United States Patent Application Publication US 2011/0183924 A1 - sequence listing, part 268

SEQ ID NO: 772811 - protein, 146 aa, Homo sapiens
KTKNGSFEKINKTDKPSARLTKKRRQKIQITSLRNERGDTTTDTTEIQKIIQGCYEHLYVNKLENLEEMNIFMEKYSSPRLNQDKLDTLSRPTTSSEIEIVIEKLPTKIKYRTRQIHSRILPDILRRIGTNPFDTNSQDRERRNPP

SEQ ID NO: 772812 - protein, 190 aa, Homo sapiens
EEKISDIPIPERAPKHVLFQRFAKIFIGCLAAVTSGMMYALYLSAYHERKFWFSNRQELEREITFQGDSAIYYSYYKDMLKAPSFERGVYELTHNNKTVSLKTINAVQQMSLYPELIASILYQATGSNEIIEPVYFYIGIVFGLQGIYVTALFVTSWLMSGTWLAGMLTVAWFVINRAACNLAAGLPYSE

SEQ ID NO: 772813 - protein, 148 aa, Homo sapiens
KRKSVTFQFLKELQNELEREITFQGDSAIYYSYYKDMLKAPSFERGVYELTHNNKTVSLKTINAVQQMSLYPELIASILYQATGSNEIIEPVYFYIGIVFGLQGIYVTALFVTSWLMSGTWLAGMLTVAWFVINRAACNLAAGLPYSE

SEQ ID NO: 772814 - protein, 192 aa, Homo sapiens
KRKSVTFQFPERAPKHVLFQRFAKIFIGCLAAVTSGMMYALYLSAYHERKFWFSNRQELEREITFQGDSAIYYSYYKDMLKAPSFERGVYELTHNNKTVSLKTINAVQQMSLYPELIASILYQATGSNEIIEPVYFYIGIVFGLQGIYVTALFVTSWLMSGTWLAGMLTVAWFVINSCTDPWYSVGGDNTGY

SEQ ID NO: 772815 - protein, 328 aa, Homo sapiens
GGKFSIHPRLGTIRTRKPLDHETQPVVVLTVQAQLGSAPACSSTEVNITVMDVNDNHPAFLRTSDEIRISQTTPPGTALYLARAEDRDSGRNGLIRYSIASPQPGVFAIDRALGVLFLNGSLGAGEQRELTLTLRAEDQGVHPQAALLVLTVVIEKREHSPSWTFEHLVYQVEVSESLSPMTQMLQTQAHPLGPQRAASPLRYSLEPSVDSAMFGIRPYTGWIYLRRQFDYESTQTYNFRVFAWIPEDGFLQNVSTTVIVRVWDENDNSPTFLHDVLFLKVEESPVPQGVIGKITAIDMDSGKNGQLLYFLLSDGKFFKMNPNTGSTS

SEQ ID NO: 772816 - protein, 110 aa, Homo sapiens
LCWIRNEAPKEAQPGKWPHSLDQHLWERKKGSHGDSPHRSFLEPVTLKNKCVATDEHAHPLQLPVYKLSEALECLWSMGSREVGNSIMIQMSSNFKVSFPFFLCWKCSQI

SEQ ID NO: 772817 - protein, 721 aa, Homo sapiens
MVCFSNFFHINKVETHLVETMLFIPGLFGCCCFKNYYPPASWIFSVFSNLLVRCLTSENNFLTFKVLLFDFLRDFLTLFFNFSNQNYFRAMMVFISNILFYIYWLLQFLFYGHYIFSYFCEDTNYGFKQFFFVSIALDLLFLRFFKEVCVSVYRGGSVCISPPPPRFFIIEVFFKCLMILDYLFKCKSSAPGISLASFVCVYVGGVQLVSFIVLYNDLGENQLFSWELPKVSIQAAFSVVVQFLSVRNFQSHTCEYTPVASILRAGVCVCVCVCVCAGKEVDLVILKLEEQEEGGGGANIEYLFCTRHHPKCYSSLSPHISSAALHLLLSSFFFEMRKVRYRDVKQLAQSKASLLIDRAEIELRNLLDSMYLAFHNIILVFNPCHYLLLCLRFPKRVVANPENNPSVPDVGGEKNCLVTSHMAQQGRGVPSWLLNVGMECEAGGQVRGYYRWEVSPLCGEEGLLPLVLLQVWDSRTLDTNVPNLEGILDCILCSSFIFPPRKPAEPDLGPQLCMELPIGPSTARVLVRNTEMNPCALGSGYRILLGGFCLEVGHFSGIWYRMGGKGATRKNMRICTVQQFGVSSWVTHNLDSKLPKQTHLCILPKILLLGVFIVPSGNLHLVSLPHCCCFREFLLTCVVFSIGLVRFGLLKYRGDCLYLRDFFFILLVKLTSSLSFSSLYIIPVTTFKAKPRFVCFSSVLSLLIKFLEFKEEFINQNLNIK

SEQ ID NO: 772818 - protein, 82 aa, Homo sapiens
HRCHSEVQSNIHISLLPGLLAVFRQRFLRHGLHKFRVLPGDRGIDKHRGLSIHLGNLSISIYFNNHIQSSGTFFHKCFQSSL

SEQ ID NO: 772819 - protein, 193 aa, Homo sapiens
MPTTSRPALDVKGGTSPAKEDANQEMSSVAYSNLAVKDRKAVAILHYPGVASNGTKASGAPTSSSGSPIGSPTTTPPTKPPSFNLHPAPHLLASMQLQKLNSQYQGMAAATPGQPGEAGPLQNWDFGAQAGGAESLSPSAGAQSPAIIDSDPVDEEVLMSLVVELGLDRANELPELWLGQNEFDFTADFPSSC

SEQ ID NO: 772820 - protein, 242 aa, Homo sapiens
ASQSTGLGVRETWLRIPAPPLSSAVTLAQQLQLAASLPANLSNFCQGSEMPTTSRPALDVKGGTSPAKEDANQEMSSVAYSNLAVKDRKAVAILHYPGVASNGTKASGAPTSSSGSPIGSPTTTPPTKPPSFNLHPAPHLLASMQLQKLNSQYQGMAAATPGQPGEAGPLQNWDFGAQAGGAESLSPSAGAQSPAIIDSDPVDEEVLMSLVVELGLDRANELPELWLGQNEFDFTADFPSSC

SEQ ID NO: 772821 - protein, 193 aa, Homo sapiens; identical to SEQ ID NO: 772819

SEQ ID NO: 772822 - protein, 219 aa, Homo sapiens [sequence omitted]

SEQ ID NO: 772823 - protein, 219 aa, Homo sapiens [sequence omitted]

SEQ ID NO: 772824 - protein, 219 aa, Homo sapiens [sequence omitted]

SEQ ID NO: 772825 - protein, 193 aa, Homo sapiens; identical to SEQ ID NO: 772819

SEQ ID NO: 772826 - protein, 193 aa, Homo sapiens; identical to SEQ ID NO: 772819

SEQ ID NO: 772827 - protein, 132 aa, Homo sapiens
MEPSAQQLQLAASLPANLSNFCQGSEMPTTSRPALDVKGGTSPAKEDANQEMSSVAYSNLAVKDRKAVAILHYPGVASNGTKSPAIIDSDPVDEEVLMSLVVELGLDRANELPELWLGQNEFDFTADFPSSC

SEQ ID NO: 772828 - protein, 110 aa, Homo sapiens
MSASKPSRSAVWIFKFLLLSEKIAIEMEPSAQQLQLAASLPANLSNFCQGSEMPTTSRPALDVKGGTSPAKEDANQEMSSVAYSNLAVKDRKAVAILHYQPCYHRFGPSG

SEQ ID NO: 772829 - protein, 193 aa, Homo sapiens; identical to SEQ ID NO: 772819

SEQ ID NO: 772830 - protein, 219 aa, Homo sapiens [sequence omitted]

SEQ ID NO: 772831 - protein, 161 aa, Homo sapiens
MPTTSRPALDVKGGTSPAKEDANQEMSSVAYSNLAVKDRKAVAILHYPPSFNLHPAPHLLASMQLQKLNSQYQGMAAATPGQPGEAGPLQNWDFGAQAGGAESLSPSAGAQSPAIIDSDPVDEEVLMSLVVELGLDRANELPELWLGQNEFDFTADFPSSC

SEQ ID NO: 772832 - protein, 30 aa, Homo sapiens
MLPGHIATSGLLLAQHSEMDAIAADSRKPR

SEQ ID NO: 772833 - protein, 209 aa, Homo sapiens
KIMHRDVKPSNILVNSRGEIKLCDFGVSGQLIDSMANSFVGTRSYMSPERLQGTHYSVQSDIWSMGLSLVEMAVGRYPIPPPDAKELELMFGCQVEGDAAETPPRPRTPGRPLSSYGMDSRPPMAIFELLDYIVNEPPPKLPSGVFSLEFQDFVNKCLIKNPAERADLKQLMVHAFIKRSDAEEVDFAGWLCSTIGLNQPSTPTHAAGV

SEQ ID NO: 772834 - protein, 209 aa, Homo sapiens; identical to SEQ ID NO: 772833

SEQ ID NO: 772835 - protein, 209 aa, Homo sapiens; identical to SEQ ID NO: 772833

SEQ ID NO: 772836 - protein, 209 aa, Homo sapiens; identical to SEQ ID NO: 772833

SEQ ID NO: 772837 - protein, 164 aa, Homo sapiens [sequence omitted]

SEQ ID NO: 772838 - protein, 214 aa, Homo sapiens
KIMHRDVKPSNILVNSRGEIKLCDFGVSGQLIDSMANSFVGTRSYMSPERLQGTHYSVQSDIWSMGLSLVEMAVGRYPIPPPDAKELELMFGCQVEGDAAETPPRPRTPGRPLSSYGMDSRPPMAIFELLDYIVNEPPPKLPSGVFSLEFQDFVNKCLIKNPAERADLKQLMVHAFIKRSDAEEVDFAGWLCSTIGLNQPSTPTLSLFRCAFHL

SEQ ID NO: 772839 - protein, 111 aa, Homo sapiens
FSSPRRNRSEGSRGDLFREMKLLEHLKSLHVLRRDLDERIESFISNTYIENKENEISSLVSLQRKHKAVSQRKSTYNLTVREGHMWTLCYFCHFFMCLKPFQKKKQSQCMW

SEQ ID NO: 772840 - protein, 460 aa, Homo sapiens
MDWSLAFLLVISLLVTYASLLLVLALLLRLCRQPLHLHSLHKVLLLLIMLLVAAGLVGLDIQWQQEWHSLRVSLQATAPFLHIGAAAGIALLAWPVADTFYRIHRRGPKILLLLLFFGVVLVIYLAPLCISSPCIMEPRDLPPKPGLVGHRGAPMLAPENTLMSLRKTAECGATVFETDVMVSSDGVPFLMHDEHLSRTTNVASVFPTRITAHSSDFSWTELKRLNAGSWFLERRPFWGAKPLAGPDQKEAESQTVPALEELLEEAAALNLSIMFDLRRPPQNHTYYDTFVIQTLETVLNARVPQAMVFWLPDEDRANVQRRAPGMRQIYGRQGGNRTERPQFLNLPYQDLPLLDIKALHKDNVSVNLFVVNKPWLFSLLWCAGVDSVTTNDCQLLQQMRYPIWLITPQTYLIIWVITNCVSTMLLLWTFLLQRRFVKKRGKTGLETAVLLTRINNFMME

SEQ ID NO: 772841 - protein, 539 aa, Homo sapiens
MAESPGCCSVWARCLHCLYSCHWRKCPRERMQTSKCDCIWFGLLFLTFLLSLSWLYIGLVLLNDLHNFNEFLFRRWGHWMDWSLAFLLVISLLVTYASLLLVLALLLRLCRQPLHLHSLHKVLLLLIMLLVAAGLVGLDIQWQQEWHSLRVSLQATAPFLHIGAAAGIALLAWPVADTFYRIHRRGPKILLLLLFFGVVLVIYLAPLCISSPCIMEPRDLPPKPGLVGHRGAPMLAPENTLMSLRKTAECGATVFETDVMVSSDGVPFLMHDEHLSRTTNVASVFPTRITAHSSDFSWTELKRLNAGSWFLERRPFWGAKPLAGPDQKEAESQTVPALEELLEEAAALNLSIMFDLRRPPQNHTYYDTFVIQTLETVLNARVPQAMVFWLPDEDRANVQRRAPGMRQIYGRQGGNRTERPQFLNLPYQDLPLLDIKALHKDNVSVNLFVVNKPWLFSLLWCAGVDSVTTNDCQLLQQMRYPIWLITPQTYLIIWVITNCVSTMLLLWTFLLQRRFVKKRGKTGLETAVLLTRINNFMME

SEQ ID NO: 772842 - protein, 113 aa, Homo sapiens
TNVASVFPTRITAHSSDFSWTELKRLNAGSWFLEVRTASAKRQPSAGTLREGRVHSVDKHLLSPVLGNKNIVCALKSLPPSREPRQQTIQETQSNKNIFLPGRESGVDSYRRG

SEQ ID NO: 772843 - protein, 509 aa, Homo sapiens
MGSGDHQFNLAEILSQNYSVRGECEEASRCPDKPKEELEKDFISQSNDMPFDELLALYGYEASDPISDRESEGGDVAPNLPDMTLDKEQIAKDLLSGEEEEETQSSADDLTPSVTSHEASDLFPNRSGSRFLADEDREPGSSASSDTEEDSLPANKCKKEIMVGPQFQADLSNLHLNRHCEKIYENEDQLLWDPSVLPEREVEEFLYRAVKRRWHEMAGPQLPEGEAVKDSEQALYELVKCNFNVEEALRRLRFNVKVIRDGLCAWSEEECRNFEHGFRVHGKNFHLIQANKVRTRSVGECVEYYYLWKKSERYDYFAQQTRLGRRKYVPSGTTDADQDLDGSDPDGPGRPRPEQDTLTGMRTDPLSVDGTAGGLDEPGVASDGLPSSEPGPCSFQQLDESPAVPLSHRPPALADPASYQPAVTAPEPDASPRLAVDFALPKELPLISSHVDLSGDPEETVAPAQVALSVTEFGLIGIGDVNPFLAAHPTCPAPGLHSEPLSHCNVMTC

SEQ ID NO: 772844 - protein, 502 aa, Homo sapiens
MGSGDHQFNLAEILSQNYSVRGECEEASRCPDKPKEELEKDFISQSNDMPFDELLALYGYEASDPISDRESEGGDVAPNLPDMTLDKEQIAKDLLSGEEEEETQSSADDLTPSVTSHEASDLFPNRSGSRFLADEDREPGSSASSDTEEDSLPANKCKKEIMVGPQFQADLSNLHLNRHCEKIYENEDQLLWDPSVLPEREVEEFLYRAVKRRWHEMAGPQLPEGEAVKDSEQALYELVKCNFNVEEALRRLRFNVKVIRDGLCAWSEEECRNFEHGFRVHGKNFHLIQANKVRTRSVGECVEYYYLWKKSERYDYFAQQTRLGRRKDADQDLDGSDPDGPGRPRPEQDTLTGMRTDPLSVDGTAGGLDEPGVASDGLPSSEPGPCSFQQLDESPAVPLSHRPPALADPASYQPAVTAPEPDASPRLAVDFALPKELPLISSHVDLSGDPEETVAPAQVALSVTEFGLIGIGDVNPFLAAHPTCPAPGLHSEPLSHCNVMTC

SEQ ID NO: 772845 - protein, 461 aa, Homo sapiens
MPFDELLALYGYEASDPISDRESEGGDVAPNLPDMTLDKEQIAKDLLSGEEEEETQSSADDLTPSVTSHEASDLFPNRSGSRFLADEDREPGSSASSDTEEDSLPANKCKKEIMVGPQFQADLSNLHLNRHCEKIYENEDQLLWDPSVLPEREVEEFLYRAVKRRWHEMAGPQLPEGEAVKDSEQALYELVKCNFNVEEALRRLRFNVKVIRDGLCAWSEEECRNFEHGFRVHGKNFHLIQANKVRTRSVGECVEYYYLWKKSERYDYFAQQTRLGRRKYVPSGTTDADQDLDGSDPDGPGRPRPEQDTLTGMRTDPLSVDGTAGGLDEPGVASDGLPSSEPGPCSFQQLDESPAVPLSHRPPALADPASYQPAVTAPEPDASPRLAVDFALPKELPLISSHVDLSGDPEETVAPAQVALSVTEFGLIGIGDVNPFLAAHPTCPAPGLHSEPLSHCNVMTC

SEQ ID NO: 772846 - protein, 256 aa, Homo sapiens
MGSGDHQFNLAEILSQNYSVRGECEEASRCPDKPKEELEKDFISQSNDMPFDELLALYGYEASDPISDRESEGGDVAPNLPDMTLDKEQIAKDLLSGEEEEETQSSADDLTPSVTSHEASDLFPNRSGSRFLADEDREPGSSASSDTEEDSLPANKCKKEIMVGPQFQADLSNLHLNRHCEKIYENEDQLLWDPSVLPEREVEEFLYRAVKRRWHEMAGPQLPEGEALPRVSSGLLCSSPFPSWTRPSLTPPRTTL

SEQ ID NO: 772847 - protein, 509 aa, Homo sapiens; identical to SEQ ID NO: 772843

SEQ ID NO: 772848 - protein, 169 aa, Homo sapiens
MPFDELLALYGYEASDPISDRESEGGDVAPNLPDMTLDKEQIAKDLLSGEEEEETQSSADDLTPSVTSHEASDLFPNRSGSRFLADEDREPGSSASSDTEEDSLPANKCKKEIMVGPQFQADLSNLHLNRHCEKTRQGASGGAGPAGHAGARLQPVSPALQVFLLWEAS

SEQ ID NO: 772849 - protein, 253 aa, Homo sapiens
RSCRIRQEALLGGAWSPGAPHRSRDLLGAGPNRRRREPLGHPRRSSPRPTFPQVAEPAGRAKLAGPPGGSRWPRPSREGPAPRGAPEPSRPPPPGGMEADGDGEELARLRSVFAACDANRSGRLEREEFRALCTELRVRPADAEAVFQRLDADRDGAITFQEFARGFLGSLRGGRRRDWGPLDPAPAVSEAGPETHDSEEDEGDEDAAAALATSCGPASPGRAWQDFQARLGDEAKFIPREEPVSNLYKTSTF

SEQ ID NO: 772850 - protein, 285 aa, Homo sapiens
RSCRIRQEALLGGAWSPGAPHRSRDLLGAGPNRRRREPLGHPRRSSPRPTFPQVAEPAGRAKLAGPPGGSRWPRPSREGPAPRGAPEPSRPPPPGGMEADGDGEELARLRSVFAACDANRSGRLEREEFRALCTELRVRPADAEAVFQRLDADRDGAITFQEFARGFLGSLRGGRRRDWGPLDPAPAVSEAGPETHDSEEDEGDEDAAAALATSCGPASPGRAWQDFQARLGDEAKFIPRFGYTISKPAFVFVRHLITLCALSWAKKEGRETLWTIEEGGAKMAE

SEQ ID NO: 772851 - protein, 94 aa, Homo sapiens
  misc_feature (46)..(46): Xaa can be any naturally occurring amino acid
  misc_feature (50)..(50): Xaa can be any naturally occurring amino acid
  misc_feature (57)..(57): Xaa can be any naturally occurring amino acid
LARVRYIGIHVPWWFAEPINPLIFKDKAFSISSSVVQRNILKKLRXNTRXFLMKCLXIRKMMEDTEEQQNWVEDYYRCQIATSERKAYDNWLCV

SEQ ID NO: 772852 - protein, 85 aa, Homo sapiens
EEMQPNAYNCSCGTHTDSQPPLSPGSALGGRGPLDRANPQDGPADPSRPQSGAKVYNLRAQGTCIRPKKEIVVFQQSSRGRPDSK

SEQ ID NO: 772853 - protein, 164 aa, Homo sapiens
MKDRLQELKQRTKEIELSRDSHVSTTETEEQGVFLQQAVIYEREPVAERHLHEIQKLQESINNLADNVQKFGQQQKSLVASMRRFSLLKRESTITKEIKIQAEYINRSLNDLVKEVKKSEVENGPSSVVTRILKSQHAAMFRHFQQIMFIYNDTIAAKQEKCKT

SEQ ID NO: 772854 - protein, 176 aa, Homo sapiens
DGVWLYRQAGMQWRDLSSLQPPPPGFKRFSCLSTSSSWDYRRAPPRPDEKTEAQRGEIRPPECSSPRLRKIKCYPSLKIHPSSPSLKSPAARSRSSIYPHLDSLALCCTCLSPHLFTHTHTHTHTHTEYYNTITYYITLYYCSSTGTTRNSTVNSLRVGYILQSSLFLSLVVESKK

SEQ ID NO: 772855 - protein, 279 aa, Homo sapiens
QFVQPEERRQGSLLGPGLPSHALGTLAKVAGRQDAAPPGGSAASEEREEGPSVEALAVSKADCYVQLWLPTASPSPAQTRIVANCSDPEWNETFHYQIHGAVKNVLELTLYDKDILGSDQLSLLLFDLRSLKCGQPHKHTFPLNHQDSQELQVEFVLEKSQVPASEVITNGVLVAHPCLRIQGTLRGDGTAPREEYGSRQLQLAVPGAYEKPQLLPLQPPTEPGLPPTFTFHVNPVLSSRLHVELMELLAAVQSGPSAELEAQTSKLGEGGILLSSLPL

SEQ ID NO: 772856 - protein, 302 aa, Homo sapiens
SLCNQRSAGRVPCWGPGCPAMLWALWPRWLADKMLPLLGAVLLQKREKRGPLWRHWRRETYPYYDLQVKVLRATNIRGTDLSKADCYVQLWLPTASPSPAQTRIVANCSDPEWNETFHYQIHGAVKNVLELTLYDKDILGSDQLSLLLFDLRSLKCGQPHKHTFPLNHQDSQELQVEFVLEKSQVPASEVITNGVLVAHPCLRIQGTLRGDGTAPREEYGSRQLQLAVPGAYEKPQLLPLQPPTEPGLPPTFTFHVNPVLSSRLHVELMELLAAVQSGPSAELEAQTSKLGEGGILLSSLPL

SEQ ID NO: 772857 - protein, 81 aa, Homo sapiens
QFVQPEERRQGSLLGPGLPSHALGTLAKVAGRQDAAPPGGSAASEEREEGPSVEALAGNVPEITWETRTGGVLGAAVPCED

SEQ ID NO: 772858 - protein, 103 aa, Homo sapiens
KKIFNLNLKKRPPVIHNPSSWAPAPNTHTHTHTHTLCCSVLLFSQTSHAPLSPGLLVLFPLLGTCSLPPPSPYLGKSYSFFRLNFIHFFHGKTSMSHSYPASG

SEQ ID NO: 772859 - protein, 289 aa, Homo sapiens
MFVLLYVTSFAICASGQPRGNQLKGENYSPRYICSIPGLPGPPGPPGANGSPGPHGRIGLPGRDGRDGRKGEKGEKGTAGLRGKTGPLGLAGEKGDQGETGKKGPIGPEGEKGEVGPIGPPGPKGDRGEQGDPGLPGVCRCGSIVLKSAFSVGITTSYPEERLPIIFNKVLFNEGEHYNPATGKFICAFPGIYYFSYDITLANKHLAIGLVHNGQYRIKTFDANTGNHDVASGSTVIYLQPEDEVWLEIFFTDQNGLFSDPGWADSLFSGFLLYVDTDYLDSISEDDEL

SEQ ID NO: 772860 - protein, 296 aa, Homo sapiens
MSRQEPKMFVLLYVTSFAICASGQPRGNQLKGENYSPRYICSIPGLPGPPGPPGANGSPGPHGRIGLPGRDGRDGRKGEKGEKGTAGLRGKTGPLGLAGEKGDQGETGKKGPIGPEGEKGEVGPIGPPGPKGDRGEQGDPGLPGVCRCGSIVLKSAFSVGITTSYPEERLPIIFNKVLFNEGEHYNPATGKFICAFPGIYYFSYDITLANKHLAIGLVHNGQYRIKTFDANTGNHDVASGSTVIYLQPEDEVWLEIFFTDQNGLFSDPGWADSLFSGFLLYVDTDYLDSISEDDEL

SEQ ID NO: 772861 - protein, 672 aa, Homo sapiens
GTQRNRGPRQASRDGRRCPGLRRLQSELPSEAGVGKMAQSTATSPDGGTTFEHLWSSLEPDSTYFDLPQSSRGNNEVVGGTDSSMDVFHLEGMTTSVMAQFNLLSSTMDQMSSRAASASPYTPEHAASVPTHSPYAQPSSTFDTMSPAPVIPSNTDYPGPHHFEVTFQQSSTAKSATWTYSPLLKKLYCQIAKTCPIQIKVSTPPPPGTAIRAMPVYKKAEHVTDVVKRCPNHELGRDFNEGQSAPASHLIRVEGNNLSQYVDDPVTGRQSVVVPYEPPQVGTEFTTILYNFMCNSSCVGGMNRRPILIIITLEMRDGQVLGRRSFEGRICACPGRDRKADEDHYREQQALNESSAKNGAASKRAFKQSPPAVPALGAGVKKRRHGDEDTYYLQVRGRENFEILMKLKESLELMELVPQPLVDSYRQQQQLLQRPSHLQPPSYGPVLSPMNKVHGGMNKLPSVNQLVGQPPPHSSAATPNLGPVGPGMLNNHGHAVPANGEMSSSHSAQSMVSGSHCTPPPPYHADPSLVSFLTGLGCPNCIEYFTSQGLQSIYHLQNLTIEDLGALKIPEQYRMTIWRGLQDLKQGHDYSTAQQLLRSSNAATISIGGSGELQRQRVMEAVHFRVRHTITIPNRGGPGGGPDEWADFGFDLPDCKARKQPIKEEFTEAEIH

SEQ ID NO: 772862 - protein, 478 aa, Homo sapiens
GTQRNRGPRQASRDGRRCPGLRRLQSELPSEAGVGKMAQSTATSPDGGTTFEHLWSSLEPDSTYFDLPQSSRGNNEVVGGTDSSMDVFHLEGMTTSVMAQFNLLSSTMDQMSSRAASASPYTPEHAASVPTHSPYAQPSSTFDTMSPAPVIPSNTDYPGPHHFEVTFQQSSTAKSATWTYSPLLKKLYCQIAKTCPIQIKVSTPPPPGTAIRAMPVYKKAEHVTDVVKRCPNHELGRDFNEGQSAPASHLIRVEGNNLSQYVDDPVTGRQSVVVPYEPPQVGTEFTTILYNFMCNSSCVGGMNRRPILIIITLEMRDGQVLGRRSFEGRICACPGRDRKADEDHYREQQALNESSAKNGAASKRAFKQSPPAVPALGAGVKKRRHGDEDTYYLQVRGRENFEILMKLKESLELMELVPQPLVDSYRQQQQLLQRPSHLQPPSYGPVLSPTLSPATAPACSMAGVGGDRSVGSDFQASS

SEQ ID NO: 772863 - protein, 508 aa, Homo sapiens
MATDWLGSIVSINCGDSLGVYQGRVSAVDQVSQTISLTRPFHNGVKCLVPEVTFRAGDITELKILEIPGPGDNQHFGDLHQTELGPSGAGCQVGINQNGTGKFVKKPASSSSAPQNIPKRTDVKSQDVAVSPQQQQCSKSYVDRHMESLSQSKSFRRRHNSWSSSSRHPNQATPKKSGLKNGQMKNKDDECFGDDIEEIPDTDFDFEGNLALFDKAAVFEEIDTYERRSGTRSRGIPNERPTRYRHDENILESEPIVYRRIIVPHNVSKEFCTDSGLVVPSISYELHKKLLSVAEKHGLTLERRLEMTGVCASQMALTLLGGPNRLNPKNVHQRPTVALLCGPHVKGAQGISCGRHLANHDVQVILFLPNFVKMLESITNELSLFSKTQGQQVSSLKDLPTSPVDLVINCLDCPENVFLRDQPWYKAAVAWANQNRAPVLSIDPPVHEVEQGIDAKWSLALGLPLPLGEHAGRIYLCDIGIPQQVFQEVGINYHSPFGCKFVIPLHSA

SEQ ID NO: 772864 - protein, 508 aa, Homo sapiens; identical to SEQ ID NO: 772863

SEQ ID NO: 772865 - protein, 499 aa, Homo sapiens
  misc_feature (2)..(2): Xaa can be any naturally occurring amino acid
RXAQVSKILGVYQGRVSAVDQVSQTISLTRPFHNGVKCLVPEVTFRAGDITELKILEIPGPGDNQHFGDLHQTELGPSGAGCQVGINQNGTGKFVKKPASSSSAPQNIPKRTDVKSQDVAVSPQQQQCSKSYVDRHMESLSQSKSFRRRHNSWSSSSRHPNQATPKKSGLKNGQMKNKDDECFGDDIEEIPDTDFDFEGNLALFDKAAVFEEIDTYERRSGTRSRGIPNERPTRYRHDENILESEPIVYRRIIVPHNVSKEFCTDSGLVVPSISYELHKKLLSVAEKHGLTLERRLEMTGVCASQMALTLLGGPNRLNPKNVHQRPTVALLCGPHVKGAQGISCGRHLANHDVQVILFLPNFVKMLESITNELSLFSKTQGQQVSSLKDLPTSPVDLVINCLDCPENVFLRDQPWYKAAVAWANQNRAPVLSIDPPVHEVEQGIDAKWSLALGLPLPLGEHAGRIYLCDIGIPQQVFQEVGINYHSPFGCKFVIPLHSA

SEQ ID NO: 772866 - protein, 396 aa, Homo sapiens
MATDWLGSIVSINCGDSLGVYQGRVSAVDQVSQTISLTRPFHNGVKCLVPEVTFRAGDITELKILEIPGPGDNQHFGDLHQTELGPSGAGCQVGINQNGTGKFVKKPASSSSAPQNIPKRTDVKSQDVAVSPQQQQCSKSYVDRHMESLSQSKSFRRRHNSCSGLVVPSISYELHKKLLSVAEKHGLTLERRLEMTGVCASQMALTLLGGPNRLNPKNVHQRPTVALLCGPHVKGAQGISCGRHLANHDVQVILFLPNFVKMLESITNELSLFSKTQGQQVSSLKDLPTSPVDLVINCLDCPENVFLRDQPWYKAAVAWANQNRAPVLSIDPPVHEVEQGIDAKWSLALGLPLPLGEHAGRIYLCDIGIPQQVFQEVGINYHSPFGCKFVIPLHSA

SEQ ID NO: 772867 - protein, 508 aa, Homo sapiens; identical to SEQ ID NO: 772863

SEQ ID NO: 772868 - protein, 508 aa, Homo sapiens; identical to SEQ ID NO: 772863

SEQ ID NO: 772869 - protein, 325 aa, Homo sapiens
MKNKDDECFGDDIEEIPDTDFDFEGNLALFDKAAVFEEIDTYERRSGTRSRGIPNERPTRYRHDENILESEPIVYRRIIVPHNVSKEFCTDSGLVVPSISYELHKKLLSVAEKHGLTLERRLEMTGVCASQMALTLLGGPNRLNPKNVHQRPTVALLCGPHVKGAQGISCGRHLANHDVQVILFLPNFVKMLESITNELSLFSKTQGQQVSSLKDLPTSPVDLVINCLDCPENVFLRDQPWYKAAVAWANQNRAPVLSIDPPVHEVEQGIDAKWSLALGLPLPLGEHAGRIYLCDIGIPQQVFQEVGINYHSPFGCKFVIPLHSA

SEQ ID NO: 772870 - protein, 174 aa, Homo sapiens
MGKITFYEDRAFQGRSYETTTDCPNLQPYFSRCNSIRVESGCWMLYERPNYQGQQYLLRRGEYPDYQQWMGLSDSIRSCCLIPQTVSHRLRLYEREDHKGLMMELSEDCPSIQDRFHLSEIRSLHVLEGCWVLYELPNYRGRQYLLRPQEYRRCQDWGAMDAKAGSLRRVVDLY

SEQ ID NO: 772871 - protein, 176 aa, Homo sapiens
MPPFTITFYEDRAFQGRSYETTTDCPNLQPYFSRCNSIRVESGCWMLYERPNYQGQQYLLRRGEYPDYQQWMGLSDSIRSCCLIPQTVSHRLRLYEREDHKGLMMELSEDCPSIQDRFHLSEIRSLHVLEGCWVLYELPNYRGRQYLLRPQEYRRCQDWGAMDAKAGSLRRVVDLY

SEQ ID NO: 772872 - protein, 107 aa, Homo sapiens
SRGPDYRTSKCSPLARLCHLAWVLFASSLTIQKISPYQIALLRQCLQEREREFTAPHSGQPHYSQSHTSRQLQVSLTRLIGEGTNFNHCQMLTSKCFGTKSIIFVQH

SEQ ID NO: 772873 - protein, 134 aa, Homo sapiens
GVAYISAVLSISFAHPLAFLTLLPTSISQFFSGAVLGSEMFVILMLYLWFAIGLACAGFCCHQLLLILRGQTLPPGAEGGGSEGPDPGARTYKRSSERGGCWACWSPCSMSEVRAPSSRISSRHSRQFISLSLS

SEQ ID NO: 772874 - protein, 134 aa, Homo sapiens; identical to SEQ ID NO: 772873

SEQ ID NO: 772875 - protein, 134 aa, Homo sapiens; identical to SEQ ID NO: 772873

SEQ ID NO: 772876 - protein, 134 aa, Homo sapiens; identical to SEQ ID NO: 772873

SEQ ID NO: 772877 - protein, 110 aa, Homo sapiens
GKEKRRRDYLPAFSFYQFPSSNSEQTGSAVSGSSLTSRVGLIPFCGPRIMGSPCNLLQDSSPSFPVSGSMNTTFSLFFSQPQSCYVLISGLLYCLCFAFSALPYAATFLS

SEQ ID NO: 772878 - protein, 98 aa, Homo sapiens
AMFVVWPWPPLVISDWTVDGHLTRAGQSEPAGIGPRHVAEVRTCNTGTHRWDAVDLGHRAGVEGKEREEMGREGHGIGVHISVLVLHESWWHLLAWFP

SEQ ID NO: 772879 - protein, 169 aa, Homo sapiens
GRRWGPPREKKSGKRRTARPRFQLRDGQGRPPGAGKDVALEEFHKHPPVQWAFQETSVESAVDTPFPAGIFVRLEFKLQQTSCRKRDWKKPECKVRPNGRKRKCLACIKLGSEDKVLGRLVHCPIETQVLREAEEHQETQCLRVQRAGEDPHSFYFPGQFAFSKALPRS

SEQ ID NO: 772880 - protein, 163 aa, Homo sapiens
MRRLLIPLALWLGAVGVGVAELTEAQRRGLQVALEEFHKHPPVQWAFQETSVESAVDTPFPAGIFVRLEFKLQQTSCRKRDWKKPECKVRPNGRKRKCLACIKLGSEDKVLGRLVHCPIETQVLREAEEHQETQCLRVQRAGEDPHSFYFPGQFAFSKALPRS

SEQ ID NO: 772881 - protein, 163 aa, Homo sapiens; identical to SEQ ID NO: 772880

SEQ ID NO: 772882 - protein, 163 aa, Homo sapiens; identical to SEQ ID NO: 772880

SEQ ID NO: 772883 - protein, 104 aa, Homo sapiens
MRRLLIPLALWLGAVGVGVAELTEAQRRGLQVALEEFHKHPPVQWAFQETSVESAVDTVSSMARAGAGRVVPQETSAFPRRGQKCLGSEPQPFGEKATVQPAGM

SEQ ID NO: 772884 - protein, 163 aa, Homo sapiens; identical to SEQ ID NO: 772880

SEQ ID NO: 772885 - protein, 163 aa, Homo sapiens; identical to SEQ ID NO: 772880

SEQ ID NO: 772886 - protein, 163 aa, Homo sapiens; identical to SEQ ID NO: 772880

SEQ ID NO: 772887 - protein, 85 aa, Homo sapiens
SAHPMLPAPPQRKRKCLACIKLGSEDKVLGRLVHCPIETQVLREAEEHQETQCTWATRWPNAAAGVVLVVRIQLCLGHVQPHLPY

SEQ ID NO: 772888 - protein, 163 aa, Homo sapiens; identical to SEQ ID NO: 772880

SEQ ID NO: 772889 - protein, 124 aa, Homo sapiens
MRRLLIPLALWLGAVGVGVAELTEAQRRGLQVALEEFHKHPPVQWAFQETSVESAVDTVSSMARAGAGRVVPQETSAFPRRGQKCLGSEPQPFGETRACSAPSAGYRPSSACLSVRSPSQLEYL

SEQ ID NO: 772890 - protein, 148 aa, Homo sapiens
TLTILDDTQYPVIEGLETFVVFLSSAQGAELTKPFQAVIAINDTFQDVPSMQFAKDLLLVKEKEGVLHVPITRSGDLSYESSVRCYTQSHSAQVMEDFEERQNADSSRITFLKGDKVKNCTVYIHDDSMFEPEEQFRVYLGLPLGNHW

SEQ ID NO: 772891 - protein, 51 aa, Homo sapiens
MTHVYWAPVMDQPCARTWGAAVNKVHIAAALRVGLVVKRALGWWLESQLLD

SEQ ID NO: 772892 - protein, 128 aa, Homo sapiens
ERTNPLTGLGPIPLSPTLLLLSYLILLPIVSLDFSGLTWASGTHVAHSVVPIMSALERLLGQPVWNSQSPRVLELLQSATRSFCLITNTIPFILATRPRKRWLSMSKAPGNEDWKCETTGHRGMGGSE

SEQ ID NO: 772893 - protein, 182 aa, Homo sapiens
MCTPVRVSIVCVMGAVGAVWTAPLPLPWAPTPSIHLREEGAAFPFCRVCVLRPRRSKWRSWDVNLGPRRRGLLGCGPCPSGKPRVHLQRTRSGAGAEAGGLPTRGSMRGCPFLGSSAAKCSLLLRPPSRGEASPWLPEFMTHPVHHQQLACVSGWLGTSLLEATCLGPHGGSWWGHHPGSRE

SEQ ID NO: 772894 - protein, 182 aa, Homo sapiens; identical to SEQ ID NO: 772893

SEQ ID NO: 772895 - protein, 188 aa, Homo sapiens
MAALMRSKDSSCCLLLLAAVLMVESSQIGSSRAKLNSIKSSLGGETPGQAANRSAGMYQGLAFGGSKKGKNLGQAYPCSSDKECEVGRYCHSPHQGSSACMVCRRKKKRCHRDGMCCPSTRCNNGICIPVTESILTPHIPALDGTRHRDRNHGHYSNHDLGWQNLGRPHTKMSHIKGRDICSSGVFLK

SEQ ID NO: 772896 - protein, 255 aa, Homo sapiens [sequence omitted]

SEQ ID NO: 772897 - protein, 75 aa, Homo sapiens
NLAPNNEHTEILMKQYRRSDNTQQILTWGVFHTHTCTYTHTSRHLPHENNHQFLMKTLSGSQFPIVNNLGENYNA

SEQ ID NO: 772898 - protein, 71 aa, Homo sapiens
PSACWSSAPSGSQAYHVTSSPNSSAHKVPKPSSKLAGSGQHGILFLCLYGLGNDIKSLLHQNTCAVKDTAE

SEQ ID NO: 772899 - protein, 773 aa, Homo sapiens
MTGRARARARGRARGQETAQLVGSTASQQPGYIQPRPQPPPAEGELFGRGRQRGTAGGTAKSQGLQISAGFQELSLAERGGRRRDFHDLGVNTRQNLDHVKESKTGSSGIIVRLSTNHFRLTSRPQWALYQYHIDYNPLMEARRLRSALLFQHEDLIGKCHAFDGTILFLPKRLQQKVTEVFSKTRNGEDVRITITLTNELPPTSPTCLQFYNIIFRRLLKIMNLQQIGRNYYNPNDPIDIPSHRLVIWPGFTTSILQYENSIMLCTDVSHKVLRSETVLDFMFNFYHQTEEHKFQEQVSKELIGLVVLTKYNNKTYRVDDIDWDQNPKSTFKKADGSEVSFLEYYRKQYNQEITDLKQPVLVSQPKRRRGPGGTLPGPAMLIPELCYLTGLTDKMRNDFNVMKDLAVHTRLTPEQRQREVGRLIDYIHKNDNVQRELRDWGLSFDSNLLSFSGRILQTEKIHQGGKTFDYNPQFADWSKETRGAPLISVKPLDNWLLIYTRRNYEAANSLIQNLFKVTPAMGMQMRKAIMIEVDDRTEAYLRVLQQKVTADTQIVVCLLSSNRKDKYDAIKKYLCTDCPTPSQCVVARTLGKQQTVMAIATKIALQMNCKMGGELWRVDIPLKLVMIVGIDCYHDMTAGRRSIAGFVASINEGMTRWFSRCIFQDRGQELVDGLKVCLQAALRAWNSCNEYMPSRIIVYRDGVGDGQLKTLVNYEVPQFLDCLKSIGRGYNPRLTVIVVKKRVNTRFFAQSGGRLQNPLPGTVIDVEVTRPE

SEQ ID NO: 772900 - protein, 861 aa, Homo sapiens
MTGRARARARGRARGQETAQLVGSTASQQPGYIQPRPQPPPAEGELFGRGRQRGTAGGTAKSQGLQISAGFQELSLAERGGRRRDFHDLGVNTRQNLDHVKESKTGSSGIIVRLSTNHFRLTSRPQWALYQYHIDYNPLMEARRLRSALLFQHEDLIGKCHAFDGTILFLPKRLQQKVTEVFSKTRNGEDVRITITLTNELPPTSPTCLQFYNIIFRRLLKIMNLQQIGRNYYNPNDPIDIPSHRLVIWPGFTTSILQYENSIMLCTDVSHKVLRSETVLDFMFNFYHQTEEHKFQEQVSKELIGLVVLTKYNNKTYRVDDIDWDQNPKSTFKKADGSEVSFLEYYRKQYNQEITDLKQPVLVSQPKRRRGPGGTLPGPAMLIPELCYLTGLTDKMRNDFNVMKDLAVHTRLTPEQRQREVGRLIDYIHKNDNVQRELRDWGLSFDSNLLSFSGRILQTEKIHQGGKTFDYNPQFADWSKETRGAPLISVKPLDNWLLIYTRRNYEAANSLIQNLFKVTPAMGMQMRKAIMIEVDDRTEAYLRVLQQKVTADTQIVVCLLSSNRKDKYDAIKKYLCTDCPTPSQCVVARTLGKQQTVMAIATKIALQMNCKMGGELWRVDIPLKLVMIVGIDCYHDMTAGRRSIAGFVASINEGMTRWFSRCIFQDRGQELVDGLKVCLQAALRAWNSCNEYMPSRIIVYRDGVGDGQLKTLVNYEVPQFLDCLKSIGRGYNPRLTVIVVKKRVNTRFFAQSGGRLQNPLPGTVIDVEVTRPEWYDFFIVSQAVRSGSVSPTHYNVIYDNSGLKPDHIQRLTYKLCHIYYNWPGVIRVPAPCQYAHKLAFLVGQSIHREPNLSLSNRLYYL

SEQ ID NO: 772901 - protein, 826 aa, Homo sapiens
MTGRARARARGRARGQETAQLVGSTASQQPGYIQPRPQPPPAEGELFGRGRQRGTAGGTAKSQGLQISAGFQELSLAERGGRRRDFHDLGVNTRQNLDHVKESKTGSSGIIVRLSTNHFRLTSRPQWALYQYHIDYNPLMEARRLRSALLFQHEDLIGKCHAFDGTILFLPKRLQQKVTEVFSKTRNGEDVRITITLTNELPPTSPTCLQFYNIIFRRLLKIMNLQQIGRNYYNPNDPIDIPSHRLVIWPGFTTSILQYENSIMLCTDVSHKVLRSETVLDFMFNFYHQTEEHKFQEQVSKELIGLVVLTKYNNKTYRVDDIDWDQNPKSTFKKADGSEVSFLEYYRKQYNQEITDLKQPVLVSQPKRRRGPGGTLPGPAMLIPELCYLTGLTDKMRNDFNVMKDLAVHTRLTPEQRQREVGRLIDYIHKNDNVQRELRDWGLSFDSNLLSFSGRILQTEKIHQGGKTFDYNPQFADWSKETRGAPLISVKPLDNWLLIYTRRNYEAANSLIQNLFKVTPAMGMQMRKAIMIEVDDRTEAYLRVLQQKVTADTQIVVCLLSSNRKDKYDAIKKYLCTDCPTPSQCVVARTLGKQQTVMAIATKIALQMNCKMGGELWRVDIPLKLVMIVGIDCYHDMTAGRRSIAGFVASINEGMTRWFSRCIFQDRGQELVDGLKVCLQAALRAWNSCNEYMPSRIIVYRDGVGDGQLKTLVNYEVPQFLDCLKSIGRGYNPRLTVIVVKKRVNTRFFAQSGGRLQNPLPGTVIDVEVTRPEWYDFFIVSQAVRSGSVSPTHYNVIYDNSGLKPDHIQRLTYKLCHIYYNWPEMT

SEQ ID NO: 772902 - protein, 193 aa, Homo sapiens
MCKYHPLCALEAVFQIACTGGSIGPVPTESAGNSAPSTPRPCRSDYPCRGPLDGTKIGPGKQVTLTSEPLPEGLAWQLCFRSRRCAGGGEQPSLCDLLHGRISQQVEQSRSQVQAIGEKVSLAQAKIEKIKGSKKAIKVFSSAKYPAPERLQEYGSIFTDAQDPGLQRRPRHRIQSKQRPLDERALQVCWLRT

SEQ ID NO: 772903 - protein, 138 aa, Homo sapiens
  misc_feature (56)..(56): Xaa can be any naturally occurring amino acid
MTYGLREAGRGQKGAPLWGGAAKGKKTPPPFFFSGRTNLGGGGAPTKGARAVADMXPQDCAGTPQGALEPCVQEATALLTCGPAHPWKSVALEEEQEGPGTRLPGNLSSEDVLPAGCTEWRVQTLAYLPQEDWAPTSL

SEQ ID NO: 772904 - protein, 104 aa, Homo sapiens
MFFQPLYSVHNGNFQQVEQSRSQVQAIGEKVSLAQAKIEKIKGSKKAIKVFSSAKYPAPERLQEYGSIFTDAQDPGLQRRPRHRIQSKQRPLDERALQVCWLRT

SEQ ID NO: 772905 - protein, 103 aa, Homo sapiens
NTLVAVSIFLLLTGPTYLLFKLSPRVKRIFYQNVPSPAMFFQPLYSVHNGNFQLSAPTMCLTSSFCEGVCPVAMGKGLWCVCCPWGSHCLWAPALPGPLVSPD

SEQ ID NO: 772906 - protein, 43 aa, Homo sapiens
MCKSYELLSPTLDHHSRACPWVLRCILADFCSYLDFLAQSFGG

SEQ ID NO: 772907 - protein, 128 aa, Homo sapiens
WSARGQCPLPGGRLQTQTRGLRRWEAPVRAGWRPERTCQLLVGLKSATRQRVGGEPRVLHTKHSDDRGGEGSAHLLGVVRVSLSRRQLADKGVEPRGCFLHQATGLVALAHGWRGSQVSRGSRQEAEC

SEQ ID NO: 772908 - protein, 76 aa, Homo sapiens
EDLWAEEYAQQDCVKKSYSKAFTLDISALFVTPKTTGARVELSEQQLQLWPSDANQDGWDGCSHLAFLSCGQTSPI

SEQ ID NO: 772909 - protein, 69 aa, Homo sapiens
MCRDLLQPRRAARRPYAPINANAIKAECSIRLPKAAKTPLKIHPLVRLPLATIVKDLVAQTPPLPPLEP

SEQ ID NO: 772910 - protein, 668 aa, Homo sapiens
MAANMYRVGDYVYFENSSSNPYLVRRIEELNKTANGNVEAKVVCLFRRRDISSSLNSLADSNAREFEEESKQPGVSEQQRHQLKHRELFLSRQFESLPATHIRGKCSVTLLNETDILSQYLEKEDCFFYSLVFDPVQKTLLADQGEIRVGCKYQAEIPDRLVEGESDNRNQQKMEMKVWDPDNPLTDRQIDQFLVVARAVGTFARALDCSSSIRQPSLHMSAAAASRDITLFHAMDTLQRNGYDLAKAMSTLVPQGGPVLCRDEMEEWSASEAMLFEEALEKYGKDFNDIRQDFLPWKSLASIVQFYYMWKTTDRYIQQKRLKAAEADSKLKQVYIPTYTKPNPNQIISVGSKPGMNGAGFQKGLTCESCHTTQSAQWYAWGPPNMQCRLCASCWIYWKKYGGLKTPTQLEGATRGTTEPHSRGHLSRPEAQSLSPYTTSANRAKLLAKNRQTFLLQTTKLTRLARRMCRDLLQPRRAARRPYAPINANAIKAECSIRLPKAAKTPLKIHPLVRLPLATIVKDLVAQAPLKPKTPRGTKTPINRNQLSQNRGLGGIMVKRAYETMAGAGVPFSANGRPLASGIRSSSQPAAKRQKLNPADAPNPVVFVATKDTRALRKALTHLEMRRAARRPNLPLKVKPTLIAVRPPVPLPAPSHPASTNEPIVLED

SEQ ID NO: 772911 - protein, 668 aa, Homo sapiens; identical to SEQ ID NO: 772910

SEQ ID NO: 772912 - protein, 730 aa, Homo sapiens
MAANMYRVGDYVYFENSSSNPYLVRRIEELNKTANGNVEAKVVCLFRRRDISSSLNSLADSNAREFEEESKQPGVSEQQRHQLKHRELFLSRQFESLPATHIRGKCSVTLLNETDILSQYLEKEVRKRCGEKSEGNGYCPQKRGGKEHNDEVQGCQTAGHGNSDTPPSLPPMWIAALLTLSLPNFQDCFFYSLVFDPVQKTLLADQGEIRVGCKYQAEIPDRLVEGESDNRNQQKMEMKVWDPDNPLTDRQIDQFLVVARAVGTFARALDCSSSIRQPSLHMSAAAASRDITLFHAMDTLQRNGYDLAKAMSTLVPQGGPVLCRDEMEEWSASEAMLFEEALEKYGKDFNDIRQDFLPWKSLASIVQFYYMWKTTDRYIQQKRLKAAEADSKLKQVYIPTYTKPNPNQIISVGSKPGMNGAGFQKGLTCESCHTTQSAQWYAWGPPNMQCRLCASCWIYWKKYGGLKTPTQLEGATRGTTEPHSRGHLSRPEAQSLSPYTTSANRAKLLAKNRQTFLLQTTKLTRLARRMCRDLLQPRRAARRPYAPINANAIKAECSIRLPKAAKTPLKIHPLVRLPLATIVKDLVAQAPLKPKTPRGTKTPINRNQLSQNRGLGGIMVKRAYETMAGAGVPFSANGRPLASGIRSSSQPAAKRQKLNPADAPNPVVFVATKDTRALRKALTHLEMRRAARRPNLPLKVKPTLIAVRPPVPLPAPSHPASTNEPIVLED

SEQ ID NO: 772913 - protein, 744 aa, Homo sapiens
MAANMYRVGDYVYFENSSSNPYLVRRIEELNKTANGNVEAKVVCLFRRRDISSSLNSLADSNAREFEEESKQPGVSEQQRHQLKHRELFLSRQFESLPATHIRGKCSVTLLNETDILSQYLEKEDCFFYSLVFDPVQKTLLADQGEIRVGCKYQAEIPDRLVEGESDNRNQQKMEMKVWDPDNPLTDRQIDQFLVVARAVGTFARALDCSSSIRQPSLHMSAAAASRDITLFHAMDTLQRNGYDLAKAMSTLVPQGGPVLCRDEMEEWSASEAMLFEEALEKYGKDFNDIRQDFVSGWHYGGEVGEMTGEENQDLGPDASSFFLPLPPLATLEVTCQHSPVLLHVENHRPVYSAGIIWAGEGGPYGYLLTSAFEVDDILPGYEALILLFLFTFLQKRLKAAEADSKLKQVYIPTYTKPNPNQIISVGSKPGMNGAGFQKGLTCESCHTTQSAQWYAWGPPNMQCRLCASCWIYWKKYGGLKTPTQLEGATRGTTEPHSRGHLSRPEAQSLSPYTTSANRAKLLAKNRQTFLLQTTKLTRLARRMCRDLLQPRRAARRPYAPINANAIKAECSIRLPKAAKTPLKIHPLVRLPLATIVKDLVAQAPLKPKTPRGTKTPINRNQLSQNRGLGGIMVKRAYETMAGAGVPFSANGRPLASGIRSSSQPAAKRQKLNPADAPNPVVFVATKDTRALRKALTHLEMRRAARRPNLPLKVKPTLIAVRPPVPLPAPSHPASTNEPIVLED

SEQ ID NO: 772914 - protein, 679 aa, Homo sapiens
  misc_feature (4)..(4): Xaa can be any naturally occurring amino acid
  misc_feature (6)..(6): Xaa can be any naturally occurring amino acid
  misc_feature (10)..(10): Xaa can be any naturally occurring amino acid
LAAXRXNGGXGLFLPLGGVGDYVYFENSSSNPYLVRRIEELNKTANGNVEAKVVCLFRRRDISSSLNSLADSNAREFEEESKQPGVSEQQRHQLKHRELFLSRQFESLPATHIRGKCSVTLLNETDILSQYLEKEDCFFYSLVFDPVQKTLLADQGEIRVGCKYQAEIPDRLVEGESDNRNQQKMEMKVWDPDNPLTDRQIDQFLVVARAVGTFARALDCSSSIRQPSLHMSAAAASRDITLFHAMDTLQRNGYDLAKAMSTLVPQGGPVLCRDEMEEWSASEAMLFEEALEKYGKDFNDIRQDFLPWKSLASIVQFYYMWKTTDRYIQQKRLKAAEADSKLKQVYIPTYTKPNPNQIISVGSKPGMNGAGFQKGLTCESCHTTQSAQWYAWGPPNMQCRLCASCWIYWKKYGGLKTPTQLEGATRGTTEPHSRGHLSRPEAQSLSPYTTSANRAKLLAKNRQTFLLQTTKLTRLARRMCRDLLQPRRAARRPYAPINANAIKAECSIRLPKAAKTPLKIHPLVRLPLATIVKDLVAQAPLKPKTPRGTKTPINRNQLSQNRGLGGIMVKRAYETMAGAGVPFSANGRPLASGIRSSSQPAAKRQKLNPADAPNPVVFVATKDTRALRKALTHLEMRRAARRPNLPLKVKPTLIAVRPPVPLPAPSHPASTNEPIVLED

SEQ ID NO: 772915 - protein, 613 aa, Homo sapiens
MAANMYRVGDYVYFENSSSNPYLVRRIEELNKTANGNVEAKVVCLFRRRDISSSLNSLADSNAREFEEESKQPGVSEQQRHQLKHRELFLSRQFESLPATHIRGKCSVTLLNETDILSQYLEKEDCFFYSLVFDPVQKTLLADQGEIRVGCKYQAEIPDRLVEGESDNRNQQKMEMKVWDPDNPLTDRQIDQFLVVARAVGTFARALDCSSSIRQPSLHMSAAAASRDITLFHAMDTLQRNGYDLAKAMSTLVPQGGPVLCRDEMEEWSASEAMLFEEALEKYGKDFNDIRQDFLPWKSLASIVQFYYMWKTTDRYIQQKRLKAAEADSKLKQVYIPTYTKPNPNQIISVGSKPGMNGAGFQKGLTCESCHTTQSAQWYAWGPPNMQCRLCASCWIYWKKYGGLKTPTQLEGATRGTTEPHSRGHLSRPEAQSLSPYTTSANRAKLLAKNRQTFLLQTTKLTRLARRMCRDLLQPRRAARRPYAPINANAIKAECSIRLPKAAKTPLKIHPLVRLPLATIVKDLVAQAPLKPKTPRGTKTPINRNQLSQNRGLGGIMVKRAYETMAGAGVPFSANGRPLASGIRSSSQPAAKRQKLNPADAPNPVVFVATKDI

SEQ ID NO: 772916 - protein, 201 aa, Homo sapiens
MCRDLLQPRRAARRPYAPINANAIKAECSIRLPKAAKTPLKIHPLVRLPLATIVKDLVAQAPLKPKTPRGTKTPINRNQLSQNRGLGGIMVKRAYETMAGAGVPFSANGRPLASGIRSSSQPAAKRQKLNPADAPNPVVFVATKDTRALRKALTHLEMRRAARRPNLPLKVKPTLIAVRPPVPLPAPSHPASTNEPIVLED

SEQ ID NO: 772917 - protein, 525 aa, Homo sapiens
MAANMYRVGDYVYFENSSSNPYLVRRIEELNKTANGNVEAKVVCLFRRRDISSSLNSLADSNAREFEEESKQPGVSEQQRHQLKHRELFLSRQFESLPATHIRGKCSVTLLNETDILSQYLEKEDCFFYSLVFDPVQKTLLADQGEIRVGCKYQAEIPDRLVEGESDNRNQQKMEMKVWDPDNPLTDRQIDQFLVVARAVGTFARALDCSSSIRQPSLHMSAAAASRDITLFHAMDTLQRNGYDLAKAMSTLVPQGGPVLCRDEMEEWSASEAMLFEEALEKYGKDFNDIRQDFLPWKSLASIVQFYYMWKTTDRYIQQKRLKAAEADSKLKQVYIPTYTKPNPNQIISVGSKPGMNGAGFQKGLTCESCHTTQSAQWYAWGPPNMQCRLCASCWIYWKKYGGLKTPTQLEGATRGTTEPHSRGHLSRPEAQSLSPYTTSANRAKLLAKNRQTFLLQTTKLTRLARRMCRDLLQPRRAARRPYAPINANAIKAECSIRLPKAAKTPLKIHPLVRLPLARRVSFVV

SEQ ID NO: 772918 - protein, 138 aa, Homo sapiens
YNRARTPGSELEDRNQLSQNRGLGGIMVKRAYETMAGAGVPFSANGRPLASGIRSSSQPAAKRQKLNPADAPNPVVFVATKDTRALRKALTHLEMRRAARRPNLPLKVKPTLIAVRPPVPLPAPSHPASTNEPIVLED

SEQ ID NO: 772919 - protein, 668 aa, Homo sapiens; identical to SEQ ID NO: 772910

SEQ ID NO: 772920 - protein, 144 aa, Homo sapiens
RDGARRSEAGGAGGQREVRGCSAQETMSGGSSCSQTPSRAIPATRRVVLGDGVQLPPGDYSTTPGGTLFSTTPGGTRIIYDRKFLMECRNSPVTKTPPRDLPTIPGVTSPSSDEPPMEASQSHLRNSPEDKRAGGEESQFEMDI

SEQ ID NO: 772921 - protein, 144 aa, Homo sapiens; identical to SEQ ID NO: 772920

SEQ ID NO: 772922 - protein, 72 aa, Homo sapiens
GTGRGGARLEAREGSERFAGAAHRRPPLREHQQIPPCASTDAGAATPRGVTPASTPCSQGPGSGQERTLPSE

SEQ ID NO: 772923 - protein, 138 aa, Homo sapiens
LVTGFWARLVRFAEGLAHETMSGGSSCSQTPSRAIPATRRVVLGDGVQLPPGDYSTTPGGTLFSTTPGGTRIIYDRKFLMECRNSPVTKTPPRDLPTIPGVTSPSSDEPPMEASQSHLRNSPEDKRAGGEESQFEMDI

SEQ ID NO: 772924 - protein, 144 aa, Homo sapiens; identical to SEQ ID NO: 772920

SEQ ID NO: 772925 - protein, 144 aa, Homo sapiens; identical to SEQ ID NO: 772920

SEQ ID NO: 772926 - protein, 144 aa, Homo sapiens; identical to SEQ ID NO: 772920

SEQ ID NO: 772927 - protein, 144 aa, Homo sapiens; identical to SEQ ID NO: 772920

SEQ ID NO: 772928 - protein, 132 aa, Homo sapiens
MSPPWKPARATCAIAQKISGRAVKSHSLRWTFKAPAIVWSTTKGPLRAFLGGVPPARPYESDHTGQALAWGRTPQPFLPHSGHLPPPLREHQQIPPCASTDAGAATPRGVTPASTPCSQGPGSGQERTLPSE

SEQ ID NO: 772929 - protein, 144 aa, Homo sapiens; identical to SEQ ID NO: 772920

SEQ ID NO: 772930 - protein, 177 aa, Homo sapiens [sequence omitted]

SEQ ID NO: 772931 - protein, 300 aa, Homo sapiens
MAESEDRSLRIVLVGKTGSGKSATANTILGEEIFDSRIAAQAVTKNCQKASREWQGRDLLVVDTPGLFDTKESLDTTCKEISRCIISSCPGPHAIVLVLLLGRYTEEEQKTVALIKAVFGKSAMKHMVILFTRKEELEGQSFHDFIADADVGLKSIVKECGNRCCAFSNSKKTSKAEKESQVQELVELIEKMVQCNEGAYFSDDIYKDTEERLKQREEVLRKIYTDQLNEEIKLVEEDKHKSEEEKEKEIKLLKLKYDEKIKNIREEAERNIFKDVFNRIWKMLSEIWHRFLSKCKFYSS

SEQ ID NO: 772932 - protein, 400 aa, Homo sapiens
MSEREVSTAPAGTDMPAAKKQKLSSDENSNPDLSGDENDDAVSIESGTNTERPDTPTNTPNAPGRKSWGKGKWKSKKCKYSFKCVNSLKEDHNQPLFGVQFNWHSKEGDPLVFATVGSNRVTLYECHSQGEIRLLQSYVDADADENFYTCAWTYDSNTSHPLLAVAGSRGIIRIINPITMQCIKHYVGHGNAINELKFHPRDPNLLLSVSKDHALRLWNIQTDTLVAIFGGVEGHRDEVLSADYDLLGEKIMSCGMDHSLKLWRINSKRMMNAIKESYDYNPNKTNRPFISQKIHFPDFSTRDIHRNYVDCVRWLGDLILSKSCENAIVCWKPGKMEDDIDKIKPSESNVTILGRFDYSQCDIWYMRFSMDFWQKMLALGNQVGKLYVWDLEVEDPHKAK

SEQ ID NO: 772933 - protein, 109 aa, Homo sapiens
MSEREVSTAPAGTDMPAAKKQKLSSDENSNPDLSGDENDDAVSIESGTNTERPDTPTNTPNAPGRKSWGKGEDHNQPLFGVQFNWHSKEGDPLVFATVGSNRVSVKGSI

SEQ ID NO: 772934 - protein, 441 aa, Homo sapiens
MSEREVSTAPAGTDMPAAKKQKLSSDENSNPDLSGDENDDAVSIESGTNTERPDTPTNTPNAPGRKSWGKGKWKSKKCKYSFKCVNSLKEDHNQPLFGVQFNWHSKEGDPLVFATVGSNRVTLYECHSQGEIRLLQSYVDADADENFYTCAWTYDSNTSHPLLAVAGSRGIIRIINPITMQCIKHYVGHGNAINELKFHPRDPNLLLSVSKDHALRLWNIQTDTLVAIFGGVEGHRDEVLSADYDLLGEKIMSCGMDHSLKLWRINSKRMMNAIKESYDYNPNKTNRPFISQKIHFPDFSTRDIHRNYVDCVRWLGDLILSKSCENAIVCWKPGKMEDDIDKIKPSESNVTILGRFDYSQCDIWYMRFSMDFWQKMLALGNQVGKLYVWDLEVEDPHKAKCTTLTHHKCGAAIRQTSFSRDSSILIAVCDDASIWRWDRLR

SEQ ID NO: 772935 - protein, 441 aa, Homo sapiens; identical to SEQ ID NO: 772934

SEQ ID NO: 772936 - protein, 415 aa, Homo sapiens
MIRMICALWRENDDAVSIESGTNTERPDTPTNTPNAPGRKSWGKGKWKSKKCKYSFKCVNSLKEDHNQPLFGVQFNWHSKEGDPLVFATVGSNRVTLYECHSQGEIRLLQSYVDADADENFYTCAWTYDSNTSHPLLAVAGSRGIIRIINPITMQCIKHYVGHGNAINELKFHPRDPNLLLSVSKDHALRLWNIQTDTLVAIFGGVEGHRDEVLSADYDLLGEKIMSCGMDHSLKLWRINSKRMMNAIKESYDYNPNKTNRPFISQKIHFPDFSTRDIHRNYVDCVRWLGDLILSKSCENAIVCWKPGKMEDDIDKIKPSESNVTILGRFDYSQCDIWYMRFSMDFWQKMLALGNQVGKLYVWDLEVEDPHKAKCTTLTHHKCGAAIRQTSFSRDSSILIAVCDDASIWRWDRLR

SEQ ID NO: 772937 - protein, 147 aa, Homo sapiens
IFQSGRAILHSHQQCMRDPVSPNLRQHLSCENAIVCWKPGKMEDDIDKIKPSESNVTILGRFDYSQCDIWYMRFSMDFWQKMLALGNQVGKLYVWDLEVEDPHKAKCTTLTHHKCGAAIRQTSFSRDSSILIAVCDDASIWRWDRLR

SEQ ID NO: 772938 - protein, 96 aa, Homo sapiens
  misc_feature (7)..(7): Xaa can be any naturally occurring amino acid
LEPPIDXIDRTRAIVLIPANSAIMAGVTEIMPNFSCENAIVCWKPGKMEDDIDKIKPSESNVTILGRFDYSQCDIWYMRFSMDFWQKVSTYFYILK

SEQ ID NO: 772939 - protein, 361 aa, Homo sapiens
MSEREVSTAPAGTDMPAAKKQKLSSDENSNPDLSGDENDDAVSIESGTNTERPDTPTNTPNAPGRKSWGKGKWKSKKCKYSFKCVNSLKEDHNQPLFGVQFNWHSKEGDPLVFATVGSNRVTLYECHSQGEIRLLQSYVDADADENFYTCAWTYDSNTSHPLLAVAGSRGIIRIINPITMQCIKHYVGHGNAINELKFHPRDPNLLLSVSKDHALRLWNIQTDTLVAIFGGVEGHRDEVLSASCENAIVCWKPGKMEDDIDKIKPSESNVTILGRFDYSQCDIWYMRFSMDFWQKMLALGNQVGKLYVWDLEVEDPHKAKCTTLTHHKCGAAIRQTSFSRDSSILIAVCDDASIWRWDRLR

SEQ ID NO: 772940 - protein, 103 aa, Homo sapiens
ARSFRSQKSHNFPPCICPRRSLPVCPGEGKKGRHLVEPPYCVPGTLKPLSPHQDGINILSLINGETEALDKTSNSLQLVATPISEPQIFFYSREHVGIKYLTT

SEQ ID NO: 772941 - protein, 152 aa, Homo sapiens
LSYSLARRPSVGSHCLLSYLLLMNMIMIFLYLDNSTMRRMMAAANIYVCMYVCMYLETDSLSPRCSGAILAHCNLPLLDSSDSHASAPRVAGTTDAHHHTQLIFVFLVETRFYHVVQAGPEFLTSSDLPTPAFQSAEITGACLHTQPAANIY

SEQ ID NO: 772942 - protein, 491 aa, Homo sapiens
MKTFTWTLGVLFFLLVDTGHCRGGQFKIKKINQRRYPRATDGKEEAKKCAYTFLVPEQRITGPICVNTKGQDASTIKDMITRMDLENLKDVLSRQKREIDVLQLVVDVDGNIVNEVKLLRKESRNMNSRVTQLYMQLLHEIIRKRDNSLELSQLENKILNVTTEMLKMATRYRELEVKYASLTDLVNNQSVMITLLEEQCLRIFSRQDTHVSPPLVQVVPQHIPNSQQYTPGLLGGNEIQRDPGYPRDLMPPPDLATSPTKSPFKIPPVTFINEGPFKDCQQAKEAGHSVSGIYMIKPENSNGPMQLWCENSLDPGGWTVIQKRTDGSVNFFRNWENYKKGFGNIDGEYWLGLENIYMLSNQDNYKLLIELEDWSDKKVYAEYSSFRLEPESEFYRLRLGTYQGNAGDSMMWHNGKQFTTLDRDKDMYAGNCAHFHKGGWWYNACAHSNLNGVWYRGGHYRSKHQDGIFWAEYRGGSYSLRAVQMMIKPID

SEQ ID NO: 772943 - protein, 491 aa, Homo sapiens; identical to SEQ ID NO: 772942

SEQ ID NO: 772944 - protein, 258 aa, Homo sapiens
TPSCASGSHLSVPPIEKPIMFGFFANQNSLRNDTSSPLTNEGPFKDCQQAKEAGHSVSGIYMIKPENSNGPMQLWCENSLDPGGWTVIQKRTDGSVNFFRNWENYKKGFGNIDGEYWLGLENIYMLSNQDNYKLLIELEDWSDKKVYAEYSSFRLEPESEFYRLRLGTYQGNAGDSMMWHNGKQFTTLDRDKDMYAGNCAHFHKGGWWYNACAHSNLNGVWYRGGHYRSKHQDGIFWAEYRGGSYSLRAVQMMIKPID

SEQ ID NO: 772945 - protein, 298 aa, Homo sapiens
MKTFTWTLGVLFFLLVDTGHCRGGQFKIKKINQRRYPRATDGKEEAKKCAYTFLVPEQRITGPICVNTKGQDASTIKDMITRMDLENLKDVLSRQKREIDVLQLVVDVDGNIVNEVKLLRKESRNMNSRVTQLYMQLLHEIIRKRDNSLELSQLENKILNVTTEMLKMATRYRELEVKYASLTDLVNNQSVMITLLEEQCLRIFSRQDTHVSPPLVQVVPQHIPNSQQYTPGLLGGNEIQRDPGYPRDLMPPPDLATSPTKSPFKIPPVTFINEGELPLTVKSGSMRFIFLCLMKQCS

SEQ ID NO: 772946 - protein, 89 aa, Homo sapiens
ATGICGPGPCPREVRKGPSLLSETMPKAGFCLGQFSTLVMGHFRVKMPPSHLTHSSTFIFSHEGDLCKEEEIARIARRLDKMVTKKSAS

SEQ ID NO: 772947 - protein, 113 aa, Homo sapiens
CAERPQPLGFSHRNNWKERKCLGQQQQQLSSDSAFRPAFLTKRKYRHGRLESLRHLGVVFHTCGVFVTITIVGKKTTQASFRIHSSVWVTCGFWLISAYLCAKESFLVNSPIT

SEQ ID NO: 772948 - protein, 230 aa, Homo sapiens
MGRDYLFNFASAATKKITESVAETAQTIKKSVEEGKIDGIIDKTIIGDFQKEQKKFVEEQHTKKSEAAVPPWVDTNDEETIQQQILALSADKRNFLRDPPAGVQFNFDFDQMYPVALVMLQEDELLSKMRFALVPKLVKEEVFWRNYFYRVSLIKQSAQLTALAAQQQAAGKEEKSNGREQDLPLAEAARPKKPPVGTHSPLKLRRGGKISRPGCPVSEELKGWPNRETR

SEQ ID NO: 772949 - protein, 391 aa, Homo sapiens
RCSSDFRTSPWESRRVESKATSARCGLWGSGPRRRPASGMFRGLSSWLGLQQPVAGGGQPNGDAPPEQPSETVAESAEEELQQAGDQELLHQAKDFGNYLFNFASAATKKITESVAETAQTIKKSVEEGKIDGIIDKTIIGDFQKEQKKFVEEQHTKKSEAAVPPWVDTNDEETIQQQILALSADKRNFLRDPPAGVQFNFDFDQMYPVALVMLQEDELLSKMRFALVPKLVKEEVFWRNYFYRVSLIKQSAQLTALAAQQQAAGKEEKSNGREQDLPLAEAVRPKTPPVVIKSQLKTQEDEEEISTSPGVSEFVSDAFDACNLNQEDLRKEMEQLVLDKKQEETAVLEEDSADWEKELQQELQEYEVVTESEKRDENWDKEIEKMLQEEN

SEQ ID NO: 772950 - protein, 391 aa, Homo sapiens; identical to SEQ ID NO: 772949

SEQ ID NO: 772951 - protein, 356 aa, Homo sapiens
LVRGLGYSAEDWLGLQQPVAGGGQPNGDAPPEQPSETVAESAEEELQQAGDQELLHQAKDFGNYLFNFASAATKKITESVAETAQTIKKSVEEGKIDGIIDKTIIGDFQKEQKKFVEEQHTKKSEAAVPPWVDTNDEETIQQQILALSADKRNFLRDPPAGVQFNFDFDQMYPVALVMLQEDELLSKMRFALVPKLVKEEVFWRNYFYRVSLIKQSAQLTALAAQQQAAGKEEKSNGREQDLPLAEAVRPKTPPVVIKSQLKTQEDEEEISTSPGVSEFVSDAFDACNLNQEDLRKEMEQLVLDKKQEETAVLEEDSADWEKELQQELQEYEVVTESEKRDENWDKEIEKMLQEEN

SEQ ID NO: 772952 - protein, 391 aa, Homo sapiens; identical to SEQ ID NO: 772949

SEQ ID NO: 772953 - protein, 149 aa, Homo sapiens
LKKKLKRMILEYLALAAQQQAAGKEEKSNGREQDLPLAEAVRPKTPPVVIKSQLKTQEDEEEISTSPGVSEFVSDAFDACNLNQEDLRKEMEQLVLDKKQEETAVLEEDSADWEKELQQELQEYEVVTESEKRDENWDKEIEKMLQEEN

SEQ ID NO: 772954 - protein, 159 aa, Homo sapiens
RCSSDFRTSPWESRRVESKATSARCGLWGSGPRRRPASGMFRGLSSWLGLQQPVAGGGQPNGDAPPEQPSETVAESAEEELQQAGDQELLHQAKDFGNYLFNFASAATKKITESVAETAQTIKKSVEEGKIDGIIDKTIIGDFQKEQKKFVEEQTDIKF

SEQ ID NO: 772955 - protein, 162 aa, Homo sapiens
RCSSDFRTSPWESRRVESKATSARCGLWGSGPRRRPASGMFRGLSSWLGLQQPVAGGGQPNGDAPPEQPSETVAESAEEELQQAGDQELLHQAKDFGNYLFNFASAATKKITESVAETAQTIKKSVEEGKIDGIIDKTIIGDFQKEQKKFVEEQHTKKSGMV

SEQ ID NO: 772956 - protein, 391 aa, Homo sapiens; identical to SEQ ID NO: 772949

SEQ ID NO: 772957 - protein, 391 aa, Homo sapiens; identical to SEQ ID NO: 772949

SEQ ID NO: 772958 - protein, 352 aa, Homo sapiens
MFRGLSSWLGLQQPVAGGGQPNGDAPPEQPSETVAESAEEELQQAGDQELLHQAKDFGNYLFNFASAATKKITESVAETAQTIKKSVEEGKIDGIIDKTIIGDFQKEQKKFVEEQHTKKSEAAVPPWVDTNDEETIQQQILALSADKRNFLRDPPAGVQFNFDFDQMYPVALVMLQEDELLSKMRFALVPKLVKEEVFWRNYFYRVSLIKQSAQLTALAAQQQAAGKEEKSNGREQDLPLAEAVRPKTPPVVIKSQLKTQEDEEEISTSPGVSEFVSDAFDACNLNQEDLRKEMEQLVLDKKQEETAVLEEDSADWEKELQQELQEYEVVTESEKRDENWDKEIEKMLQEEN

SEQ ID NO: 772959 - protein, 316 aa, Homo sapiens
MLHPSSRPRRWLSLRRRSCSKRETRSSSTRPKTSAITESVAETAQTIKKSVEEGKIDGIIDKTIIGDFQKEQKKFVEEQHTKKSEAAVPPWVDTNDEETIQQQILALSADKRNFLRDPPAGVQFNFDFDQMYPVALVMLQEDELLSKMRFALVPKLVKEEVFWRNYFYRVSLIKQSAQLTALAAQQQAAGKEEKSNGREQDLPLAEAVRPKTPPVVIKSQLKTQEDEEEISTSPGVSEFVSDAFDACNLNQEDLRKEMEQLVLDKKQEETAVLEEDSADWEKELQQELQEYEVVTESEKRDENWDKEIEKMLQEEN

SEQ ID NO: 772960 - protein, 126 aa, Homo sapiens
RGYKDTEIREQIAAGEAVRPKTPPVVIKSQLKTQEDEEEISTSPGVSEFVSDAFDACNLNQEDLRKEMEQLVLDKKQEETAVLEEDSADWEKELQQELQEYEVVTESEKRDENWDKEIEKMLQEEN

SEQ ID NO: 772961 - protein, 290 aa, Homo sapiens
RCSSDFRTSPWESRRVESKATSARCGLWGSGPRRRPASGMFRGLSSWLGLQQPVAGGGQPNGDAPPEQPSETVAESAEEELQQAGDQELLHQAKDFGNYLFNFASAATKKITESVAETAQTIKKSVEEGKIDGIIDKTIIGDFQKEQKKFVEEQHTKKSEAAVPPWVDTNDEETIQQQILALSADKRNFLRDPPAGVQFNFDFDQMYPVALVMLQEDELLSKMRFALVPKLVKEEVFWRNYFYRVSLIKQSAQLTALAAQQQAAGKEEKSNGREQDLPLAGIFWVEDSTL

SEQ ID NO: 772962 - protein, 102 aa, Homo sapiens
MSKVLGGPFSKGHTASDKYFQIFHNISFFETESCSVAQAGVQWCNLGSLQALPPRFTPFSCLSLPSSWDYRHPPPCPDNVFVFSVETGFHCVSQDGLNLLTL

SEQ ID NO: 772963 - protein, 102 aa, Homo sapiens; identical to SEQ ID NO: 772962

SEQ ID NO: 772964 - protein, 80 aa, Homo sapiens
AAVDLGVDDAAVELGVDAAVDRGVDAAAVDGGVGDAAVDLDVDDAAVDLGVDAAVDRGVDDAAVDLGVDAAVDRGVDAAV

SEQ ID NO: 772965 - protein, 42 aa, Homo sapiens
DRLSSNFSWGPISLPFQKGRWDFNLKLNQLKNKGGVEMLFDL

SEQ ID NO: 772966 - protein, 93 aa, Homo sapiens
EWAELTRCGWESGRPENPALGSRPRPGWLGAGPSGFHSVFDPRSSLSGPAGRTTVTAAPAAARSFSGRRAQSAARRGRRHGCVLEELARQRRG

SEQ ID NO: 772967 - protein, 578 aa, Homo sapiens
MAVSWRSWLANEGVKHLCLFIWLSMNVLLFWKTFLLYNQGPEYHYLHQMLGLGLCLSRASASVLNLNCSLILLPMCRTLLAYLRGSQKVPSRRTRRLLDKSRTFHITCGVTICIFSGVHVAAHLVNALNFSVNYSEDFVELNAARYRDEDPRKLLFTTVPGLTGVCMVVVLFLMITASTYAIRVSNYDIFWYTHNLFFVFYMLLTLHVSGGLLKYQTNLDTHPPGCISLNRTSSQNISLPEYFSEHFHEPFPEGFSKPAEFTQHKFVKICMEEPRFQANFPQTWLWISGPLCLYCAERLYRYIRSNKPVTIISVISHPSDVMEIRMVKENFKARPGQYITLHCPSVSALENHPFTLTMCPTETKATFGVHLKIVGDWTERFRDLLLPPSSQDSEILPFIQSRNYPKLYIDGPFGSPFEESLNYEVSLCVAGGIGVTPFASILNTLLDDWKPYKLRRLYFIWVCRDIQSFRWFADLLCMLHNKFWQENRPDYVNIQLYLSQTDGIQKIIGEKYHALNSRLFIGRPRWKLLFDEIAKYNRGKTVGVFCCGPNSLSKTLHKLSNQNNSYGTRFEYNKESFS

SEQ ID NO: 772968 - protein, 578 aa, Homo sapiens; identical to SEQ ID NO: 772967

SEQ ID NO: 772969 - protein, 337 aa, Homo sapiens
HELSLRISNRQSYQHKSSQYVLVNLPVEDCMEEPRSKLIPQTWLWISGPLCLYCAERLYRYIRSNKPVTIISVISHPSDVMEIRMVKENFKARPGQYITLHCPSVSALENHPFTLTMCPTETKATFGVHLKIVGDWTERFRDLLLPPSSQDSEILPFIQSRNYPKLYIDGPFGSPFEESLNYEVSLCVAGGIGVTPFASILNTLLDDWKPYKLRRLYFIWVCRDIQSFRWFADLLCMLHNKFWQENRPDYVNIQLYLSQTDGIQKIIGEKYHALNSRLFIGRPRWKLLFDEIAKYNRGKTVGVFCCGPNSLSKTLHKLSNQNNSYGTRFEYNKESFS

SEQ ID NO: 772970 - protein, 338 aa, Homo sapiens [sequence omitted]

SEQ ID NO: 772971 - protein, 206 aa, Homo sapiens
  misc_feature (182)..(182): Xaa can be any naturally occurring amino acid
  misc_feature (188)..(188): Xaa can be any naturally occurring amino acid
MDQNNSLPPYAQGLASPQGAMTPGIPIFSPMMPYGTGLTPQPIQNTNSLSILEEQQRQQQQQQQQQQQQQQQQQQQQQQQQQQQQQQQQQQQQQAVAAAAVQQSTSQQATQGTSGQAPQLFHSQTLTTAPLPGTTPLYPSPMTPMTPITPATPASESSGIVPQLQILFPQLNLGLLNFEPKXTLAPSXPQKPPNFNPQAGLACRFS

SEQ ID NO: 772972 - protein, 338 aa, Homo sapiens [sequence omitted]

SEQ ID NO: 772973 - protein, 197 aa, Homo sapiens
MTPMTPITPATPASESSGIVPQLQNIVSTVNLGCKLDLKTIALRARNAEYNPKRFAAVIMRIREPRTTALIFSSGKMVCTGAKSEEQSRLAARKYARVVQKLGFPAKFLDFKIQNMVGSCDVKFPIRLEGLVLTHQQFSSYEPELFPGLIYRMIKPRIVLLIFVSGKVVLTGAKVRAEIYEAFENIYPILKGFRKTT

SEQ ID NO: 772974 - protein, 240 aa, Homo sapiens
  misc_feature (235)..(236): Xaa can be any naturally occurring amino acid
MDQNNSLPPYAQGLASPQGAMTPGIPIFSPMMPYGTGLTPQPIQNTNSLSILEEQQRQQQQQQQQQQQQQQQQQQQQQQQQQQQQQQQQQQQQQAVAAAAVQQSTSQQATQGTSGQAPQLFHSQTLTTAPLPGTTPLYPSPMTPMTPITPATPASESSGIVPQLQNIVSTVNLGCKLDLKTIALRARNAEYNPKRFAAVIMRIREPRTTALIFSSGKMVCTGAKSVRGQSRLCEXXNTYA

SEQ ID NO: 772975 - protein, 225 aa, Homo sapiens
MDQNNSLPPYAQGLASPQGAMTPGIPIFSPMMPYGTGLTPQPIQNTNSLSILEEQQRQQQQQQQQQQQQQQQQQQQQQQQQQQQQQQQQQQQQQAVAAAAVQQSTSQQATQGTSGQAPQLFHSQTLTTAPLPGTTPLYPSPMTPMTPITPATPASESSGIVPQLQNIVSTVNLGCKLDLKTIALRARNAEYNPKRFAAVIMRIREPRTTALIFSSGKMVCTGAKR

SEQ ID NO: 772976 - protein, 338 aa, Homo sapiens [sequence omitted]

SEQ ID NO: 772977 - protein, 382 aa, Homo sapiens
MDQNNSLPPYAQGLASPQGAMTPGIPIFSPMMPYGTGLTPQPIQNTNSLSILEEQQRQQQQQQQQQQQQQQQQQQQQQQQQQQQQQQQQQQQQQAVAAAAVQQSTSQQATQGTSGQAPQLFHSQTLTTAPLPGTTPLYPSPMTPMTPITPATPASESSGIVPQLQNIVSTVNLGCKLDLKTIALRARNAEYNPKRFAAVIMRIREPRTTALIFSSGKMVCTGAKSEEQSRLAARKYARVVQKLGFPAKFLDFKIQNMVGSCDVKFPIRLEGLVLTHQQFSSYEPELFPGLIYRMIKPRIVLLIWSGKVSYRCKSSAILSFEHFLFKGTAETMGLVLFPPLFFFTPLWGPRGCPTLVGARALYSGTGICNTRVTRGAKKEGET

SEQ ID NO: 772978 - protein, 281 aa, Homo sapiens
MDQNNSLPPYAQGLASPQGAMTPGIPIFSPMMPYGTGLTPQPIQNTNSLSILEEQQRQQQQQQQQQQQQQQQQQQQQQQQQQQQQQQQQQQQQQAVAAAAVQQSTSQQATQGTSGQAPQLFHSQTLTTAPLPGTTPLYPSPMTPMTPITPATPASESSGIVPQLQNIVSTVNLGCKLDLKTIALRARNAEYNPKRFAAVIMRIREPRTTALIFSSGKMVCTGAKSEEQSRLAARKYARVVQKLGFPAKFLDFKIQNMVGSCDVKFPIRLEGLVLTHQQFSR

SEQ ID NO: 772979 - protein, 120 aa, Homo sapiens
MCCVTALSFSHPGGAEMSLLRVQINTVKANRDQCKVLIVRKSSAQVQNGVLANGQQTIMILSSCDCHCRSLSTLQFIKFLHGWARWLTPVIPALWEAEEGGSQGQEFKTSLAKMVKPSLH

SEQ ID NO: 772980 - protein, 106 aa, Homo sapiens
LPCQNIGYFHYPKKFPPAPLQSNTSLPQLLATADLNCRPENVIQNPFHLDPSLCVNIAVSGVCGIFLDVLCHAPAPSFLPSGRHPCQESAALKWVFQGCLPLLSSH

SEQ ID NO: 772981 - protein, 41 aa, Homo sapiens
EIVPLDSSLGDRERLRLQKKKVQIHANKTWHNSLAQAIALR

SEQ ID NO: 772982 - protein, 91 aa, Homo sapiens
AGGEKRLLLVFPQQSRNKQTMATGPLCSEAQGSKGLNGAHGPGLGGQAQVWLCWDGSIAFRRAARPVGQEPDPQLDSGSWQAGRLLGQHAV

SEQ ID NO: 772983 - protein, 417 aa, Homo sapiens
MRFAWTVLLLGPLQLCALVHCAPPAAGQQQPPREPPAAPGAWRQQIQWENNGQVFSLLSLGSQYQPQRRRDPGAAVPGAANASAQQPRTPILLIRDNRTAAARTRTAGSSGVTAGRPRPTARHWFQAGYSTSRAREAGASRAENQTAPGEVPALSNLRPPSRVDGMVGDDPYNPYKYSDDNPYYNYYDTYERPRPGGRYRPGYGTGYFQYGLPDLVADPYYIQASTYVQKMSMYNLRCAAEENCLASTAYRADVRDYDHRVLLRFPQRVKNQGTSDFLPSRPRYSWEWHSCHQHYHSMDEFSHYDLLDANTQRRVAEGHKASFCLEDTSCDYGYHRRFACTAHTQGLSPGCYDTYGADIDCQWIDITDVKPGNYILKVSVNPSYLVPESDYTNNVVRCDIRYTGHHAYASGCTISPY

SEQ ID NO: 772984 - protein, 417 aa, Homo sapiens; identical to SEQ ID NO: 772983

SEQ ID NO: 772985 - protein, 281 aa, Homo sapiens
MRFAWTVLLLGPLQLCALVHCAPPAAGQQQPPREPPAAPGAWRQQIQWENNGQVFSLLSLGSQYQPQRRRDPGAAVPGAANASAQQPRTPILLIRDNRTAAARTRTAGSSGVTAGRPRPTARHWFQAGYSTSRAREAGASRAENQTAPGEVPALSNLRPPSRVDGMVGDDPYNPYKYSDDNPYYNYYDTYERPRPGGRYRPGYGTGYFQYGLPDLVADPYYIQASTYVQKMSMYNLRCAAEENCLASTAYRADVRDYDHRVLLRFPQRVKNQGTSTLPQYG

SEQ ID NO: 772986 - protein, 385 aa, Homo sapiens
MRFAWTVLLLGPLQLCALVHCAPPAAGQQQPPREPPAAPGAWRQQIQWENNGQVFSLLSLGSQYQPQRRRDPGAAVPGAANASAQQPRTPILLIRDNRTAAARTRTAGSSGVTAGRPRPTARHWFQAGYSTSRAREAGASRAENQTAPGEVPALSNLRPPSRVDGMVGDDPYNPYKYSDDNPYYNYYDTYERPRPGGRYRPGYGTGYFQYGLPDLVADPYYIQASTYVQKMSMYNLRCAAEENCLASTAYRADVRDYDHRVLLRFPQRVKNQGTSDFLPSRPRYSWEWHSCHQHYHSMDEFSHYDLLDANTQRRVAEGHKASFCLEDTSCDYGYHRRFACTAHTQGLSPGCYDTYGADIDCQWIDITDVKPGNYILKVSVNPSYL

SEQ ID NO: 772987 - protein, 397 aa, Homo sapiens
MRFAWTVLLLGPLQLCALVHCAPPAAGQQQPPREPPAAPGAWRQQIQWENNGQVFSLLSLGSQYQPQRRRDPGAADNRTAAARTRTAGSSGVTAGRPRPTARHWFQAGYSTSRAREAGASRAENQTAPGEVPALSNLRPPSRVDGMVGDDPYNPYKYSDDNPYYNYYDTYERPRPGGRYRPGYGTGYFQYGLPDLVADPYYIQASTYVQKMSMYNLRCAAEENCLASTAYRADVRDYDHRVLLRFPQRVKNQGTSDFLPSRPRYSWEWHSCHQHYHSMDEFSHYDLLDANTQRRVAEGHKASFCLEDTSCDYGYHRRFACTAHTQGLSPGCYDTYGADIDCQWIDITDVKPGNYILKVSVNPSYLVPESDYTNNVVRCDIRYTGHHAYASGCTISPY

SEQ ID NO: 772988 - protein, 417 aa, Homo sapiens; identical to SEQ ID NO: 772983

SEQ ID NO: 772989 - protein, 369 aa, Homo sapiens
MRFAWTVLLLGPLQLCALVHCAPPAAGQQQPPREPPAAPGAWRQQIQWENNGQVFSLLSLGSQYQPQRRRDPGAAVPGAANASAQQPRTPILLIRDNRTAAARTRTAGSSGVTAGRPRPTARHWFQAGYSTSRAREAGASRAENQTAPGEVPALSNLRPPSRVDGMVGDDPYNPYKYSDDNPYYNYYDTYERPRPGGRYRPGYGTGYFQYGLPDLVADPYYIQASTYVQKMSMYNLRCAAEENCLASTAYRADVRDYDHRVLLRFPQRVKNQGTSDFLPSRPRYSWEWHSCHQHYHSMDEFSHYDLLDANTQRRVAEGHKASFCLEDTSCDYGYHRRFACTAHTQGLSPGCYDTYGADIDCQWIDITDV

SEQ ID NO: 772990 - protein, 187 aa, Homo sapiens
MSMYNLRCAAEENCLASTAYRADVRDYDHRVLLRFPQRVKNQGTSDFLPSRPRYSWEWHSCHQHYHSMDEFSHYDLLDANTQRRVAEGHKASFCLEDTSCDYGYHRRFACTAHTQGLSPGCYDTYGADIDCQWIDITDVKPGNYILKVSVNPSYLVPESDYTNNVVRCDIRYTGHHAYASGCTISPY

SEQ ID NO: 772991 - protein, 235 aa, Homo sapiens
MDVSELCIPDPLGYHNQLLNRMSSDDRHLGSSCGSFIKTEPSSPSSGIDALSHHSPSGSSDASGGFGLALGTHANGLDSPPMFAGAGLGGTPCRKSYEDCASGIMEDSAIKCEYMLNAIPKRLCLVCGDIASGYHYGVASCEACKAFFKRTIQGNIEYSCPATNECEITKRRRKSCQACRFMKCLKVGMLKEGVRLDRVRGGRQKYKRRLDSESSPYLSLQISPPAKKPCECQGS

SEQ ID NO: 772992 - protein, 521 aa, Homo sapiens
MDVSELCIPDPLGYHNQLLNRMSSDDRHLGSSCGSFIKTEPSSPSSGIDALSHHSPSGSSDASGGFGLALGTHANGLDSPPMFAGAGLGGTPCRKSYEDCASGIMEDSAIKCEYMLNAIPKRLCLVCGDIASGYHYGVASCEACKAFFKRTIQGNIEYSCPATNECEITKRRRKSCQACRFMKCLKVGMLKEGVRLDRVRGGRQKYKRRLDSESSPYLSLQISPPAKKPLTKIVSYLLVAEPDKLYAMPPPGMPEGDIKALTTLCDLADRELVVIIGWAKHIPGFSSLSLGDQMSLLQSAWMEILILGIVYRSLPYDDKLVYAEDYIMDEEHSRLAGLLELYRAILQLVRRYKKLKVEKEEFVTLKALALANSDSMYIEDLEAVQKLQDLLHEALQDYELSQRHEEPWRTGKLLLTLPLLRQTAAKAVQHFYSVKLQGKVPMHKLFLEMLEAKAWARADSLQEWRPLEQVPSPLHRATKRQHVHFLTPLPPPPSVAWVGTAQAGYHLEVFLPQRAGWPRAA

SEQ ID NO: 772993 - protein, 120 aa, Homo sapiens
VGQEQLRGSPKDERMSSHDGKCPFQSAAFTSRDQSNSPGIPNPRPSSPTPLNERGRQISPSTRTPGGQVTFCSFSIEALVPPPWLYPRNLPAWASGLGRAEVIPDRREGWLKSTNCRAAL

SEQ ID NO: 772994 - protein, 817 aa, Homo sapiens
EYDDPNATISNILSELRSFGRTADFPPSKLKSGYGEHVCYVLDCFAEEALKYIGFTWKRPIYPVEELEEESVAEDDAELTLNKVDEEFVEEETDNEENFIDLNVLKAQTYHLDMNETAKQEDILESTTDAAEWSLEVERVLPQLKVTIRTDNKDWRIHVDQMHQHRSGIESALKETKGFLDKLHNEITRTLEKISSREKYINNQPGAHGALSSEMRRLGSLSRPGPPYVTVDWQWKLFLDTPALALTLGWKRNELGLQLRPFHGGILPFPGLVNEKFPEVKDFLFPAKMVSRTLRPEVIQCFGSCRSHRLLRGLLNRMSSDDRHLGSSCGSFIKTEPSSPSSGIDALSHHSPSGSSDASGGFGLALGTHANGLDSPPMFAGAGLGGTPCRKSYEDCASGIMEDSAIKCEYMLNAIPKRLCLVCGDIASGYHYGVASCEACKAFFKRTIQGNIEYSCPATNECEITKRRRKSCQACRFMKCLKVGMLKEGVRLDRVRGGRQKYKRRLDSESSPYLSLQISPPAKKPLTKIVSYLLVAEPDKLYAMPPPGMPEGDIKALTTLCDLADRELVVIIGWAKHIPGFSSLSLGDQMSLLQSAWMEILILGIVYRSLPYDDKLVYAEDYIMDEEHSRLAGLLELYRAILQLVRRYKKLKVEKEEFVTLKALALANSDSMYIEDLEAVQKLQDLLHEALQDYELSQRHEEPWRTGKLLLTLPLLRQTAAKAVQHFYSVKLQGKVPMHKLFLEMLEAKAWARADSLQEWRPLEQVPSPLHRATKRQHVHFLTPLPPPPSVAWVGTAQAGYHLEVFLPQRAGWPRAA

SEQ ID NO: 772995 - protein, 216 aa, Homo sapiens
MDVSELCIPDPLGYHNQLLNRMSSDDRHLGSSCGSFIKTEPSSPSSGIDALSHHSPSGSSDASGGFGLALGTHANGLDSPPMFAGAGLGGTPCRKSYEDCASGIMEDSAIKCEYMLNAIPKRLCLVCGDIASGYHYGVASCEACKAFFKRTIQGNIEYSCPATNECEITKRRRKSCQACRFMKCLKVGMLKEELCCLIWQPPATRGSRVLVQTEVC

SEQ ID NO: 772996 - protein, 155 aa, Homo sapiens
AGGQFYVMMTPQDVLQTGTQRTIAPRTHPYSPKIDGTRTPRDERRRAQHNEVERRRRDKINNWIVQLSKIIPDCNADNSKTGASKGGILSKACDYIRELRQTNQRMQETFKEAERLQMDNELLRQQIEELKNENALLRAQLQQHNLEMVGEGTRQ

SEQ ID NO: 772997 - protein, 118 aa, Homo sapiens
FLDLFDPDFHLGSPGFNRKNEEERAFIKYNLQKSKRKTKDITSLYFLIDWLGWKSVCKRLSTTNNKKGKHHCHTHANTSWSVLLFLFMFGGHFVVPIPMGRFCIPTLLNSSHIICFDQ

SEQ ID NO: 772998 - protein, 148 aa, Homo sapiens
HRPDVYLLPPAREQLNLRESATITCLVTGFSPADVFVQWMQRGQPLSPEKYVTSAPMPEPQAPGRYFAHSILTVSEEEWNTGETYTCVVAHEALPNRVTERTVDKSTEGEVSADEEGFENLWATASTFIVLFLLSLFYSTTVTLFKVK

SEQ ID NO: 772999 - protein, 73 aa, Homo sapiens
FLLSLFYSTTVTLFKVARLWHREEGAGRMWGPGSSLGWTSSPEAPTPPHWVISAPAPFPTTGKAFHTVSVACR

SEQ ID NO: 773000 - protein, 127 aa, Homo sapiens
HRPDVYLLPPAREQLNLRESATITCLVTGFSPADVFVQWMQRGQPLSPEKYVTSAPMPEPQAPGRYFAHSILTVSEEEWNTGETYTCVVAHEALPNRVTERTVDKSTGKPTLYNVSLVMSDTAGTCY

SEQ ID NO: 773001 - protein, 69 aa, Homo sapiens
SKPMEGRGKKQDWAEEAKLQCKLRDGLNHSKGYFETKIVHQSCLRLGHNGWTFIRPLQSVIRCGPSWEG

SEQ ID NO: 773002 - protein, 133 aa, Homo sapiens
MMKQKFHVLPKAAWQQTWGPKPPNAKTPGTGSHPRLRTHLPGHPQDSRGDRPSSHCHRLACVSSVLSREESGTEAREGGLEEPGEAGWGAWISPPCCSRTPAKAQPSLGWLSFTWVGGAGGEILGLRGARVAA

SEQ ID NO: 773003 - protein, 103 aa, Homo sapiens
AFPSAVNIMTWGLQHPSSKPFPKKVKRSQDDWHLLLLLLFFLFPCPAPSCACVSDNTGASTGVENPAAQLSSAHRSLGNGLSLCNKKIFFFFLNLHYIFFDCL

SEQ ID NO: 773004 - protein, 113 aa, Homo sapiens
SSPPPRRSAPWRDSALRVPGEDSAVATSSVQASAFLSISPSSPRSSSPSVSKPVASRPPCRALCEDGGGEARRERPGFPARAERRGLQTRRGQVHHERVWAMFEDCPSIQFYE

SEQ ID NO: 773005 - protein, 105 aa, Homo sapiens
MICQPLYLLLFIASYPTVYTPSTLKYIVAPRIQHALWPQFLYTCYFLHLSPPLLTTDIEDSSQVSSNFPLPFLQTLKSELGTTNNMAETIVFQGPMRKKKTGFKI

SEQ ID NO: 773006 - protein, 83 aa, Homo sapiens
MSDNTTLPAPASNQGPTTPRKGPPKFKQRQTRQFKSKPPKKGVKGFGDDIPGMEGLGTDITVICPWEAFSHLELHELAQFGII

SEQ ID NO: 773007 - protein, 424 aa, Homo sapiens
MAAESDVLHFQFEQQGDVVLQKMNLLRQQNLFCDVSIYINDTEFQGHKVILAACSTFMRDQFLLTQSKHVRITILQSAEVGRKLLLSCYTGALEVKRKELLKYLTAASYLQMVHIVEKCTEALSKYLEIDLSMKNNNQHTDLCQSSDPDVKNEDENSDKDCEIIEISEDSPVNIDFHVKEEESNALQSTVESLTSERKEMKSPELSTVDIGFKDNEICILHVESISTAGVENGQFSQPCTSSKASMYFSETQHSLINSTVESRVAEVPGNQDQGLFCENTEGSYGTVSEIQNLEEGYSLRHQCPRCPRGFLHVENYLRHLKMHKLFLCLQCGKTFTQKKNLNRHIRGHMGIRPFQCTVCLKTFTAKSTLQDHLNIHSGDRPYKCHCCDMDFKHKSALKKHLTSVHGRSSGEKLSRPDLKRQSLL

SEQ ID NO: 773008 - protein, 424 aa, Homo sapiens; identical to SEQ ID NO: 773007

SEQ ID NO: 773009 - protein, 347 aa, Homo sapiens
MTMPVNGAHKDADLWSSHDKMLAQPLKDSDVEVYNIIKKESNRQRVGLELIASENFASRAVLEALGSCLNNKYSEGYPGQRYYGGTEFIDELETLCQKRALQAYKLDPQCWGVNVQPYSGSPANFAVYTALVEPHGRIMGLDLPDGGHLTHGFMTDKKKISATSIFFESMPYKVNPDTGYINYDQLEENARLFHPKLIIAGTSCYSRNLEYARLRKIADENGAYLMADMAHISGLVAAGVVPSPFEHCHVVTTTTHKTLRGCRAGMIFYRKGVKSVDPKTGKEILYNLESLINSAVFPGLQGGPHNHAIAGVAVALKQAMTLEFKVYQHQVVANCRALSEALTELGY

SEQ ID NO: 773010 - protein, 1246 aa, Homo sapiens [sequence omitted]

SEQ ID NO: 773011 - protein, 1246 aa, Homo sapiens [sequence omitted]

SEQ ID NO: 773012 - protein, 1290 aa, Homo sapiens
MSKERPKRNIIQKKYDDSDGIPWSEERVVRKVLYLSLKEFKNSQKRQHAEGIAGSLKTVNGLLGNDQSKGLGPASEQSENEKDDASQVSSTSNDVSSSDFEEGPSRKRPRLQAQRKFAQSQPNSPSTTPVKIVEPLLPPPATQISDLSKRKPKTEDFLTFLCLRGSPALPNSMVYFGSSQDEEEVEEEDDETEDVKTATNNASSSCQSTPRKGKTHKHVHNGHVFNGSSRSTREKEPVQKHKSKEATPAKEKHSDHRADSRREQASANHPAAAPSTGSSAKGLAATHHHPPLHRSAQDLRKQVSKVNGVTRMSSLGAGVTSAKKMREVRPSPSKTVKYTATVTKGAVTYTKAKRELVKDTKPNHHKPSSAVNHTISGKTESSNAKTRKQVLSLGGASKSTGPAVNGLKVSGRLNPKSCTKEVGGRQLREGLQLREGLRNSKRRLEEAHQAEKPQSPPKKMKGAAGPAEGPGKKAPAERGLLNGHVKKEVPERSLERNRPKRATAGKSTPGRQAHGKADSASCENRSTSQPESVHKPQDSGKAEKGGGKAGWAAMDEIPVLRPSAKEFHDPLIYIESVRAQVEKFGMCRVIPPPDWRPECKLNDEMRFVTQIQHIHKLGRRWGPNVQRLACIKKHLKSQGITMDELPLIGGCELDLACFFRLINEMGGMQQVTDLKKWNKLADMLRIPRTAQDRLAKLQEAYCQYLLSYDSLSPEEHRRLEKEVLMEKEILEKRKGPLEGHTENDHHKFHPLPRFEPKNGLIHGVAPRNGFRSKLKEVGQAQLKTGRRRLFAQEKEVVKEEEEDKGVLNDFHKCIYKGRSVSLTTFYRTARNIMSMCFSKEPAPAEIECPAESVCNFQLLTSVGSQQRLVVERERNQTRTAGSGQLPAGEQEQEYWRLVEEKDCHVAVHCGKVDTNTHGSGFPVGKSEPFSRHGWNLTVLPNNTGSILRHLGAVPGVTIPWLNIGMVFSTSCWSRDQNHLPYIDYLHTGADCIWYCIPAEEENKLEDVVHTLLQANGTPGLQMLESNVMISPEVLCKEGIKVHRTVQQSGQFVVCFPGSFVSKVCCGYSVSETVHFATTQWTSMGFETAKEMKRRHIAKPFSMEKLLYQIAQAEAKKENGPTLSTISALLDELRDTELRQRRQLFEAGLHSSARYGSHDGSSTVADGKKKPRKWLQLETSERRCQICQHLCYLSMVVQENENVVFCLECALRHVEKQKSCRGLKLMYRYDEEQIISLVNQICGKVSGKNGSIENCLSKPTPKRGPRKRATVDVPPSRLSASSSSKSASSSS

SEQ ID NO: 773013 - protein, 1251 aa, Homo sapiens
MARTAARLPFRTRGGGEQRGDDSDGIPWSEERVVRKVLYLSLKEFKNSQKRQHAEGIAGSLKTVNGLLGNDQSKGLGPASEQSENEKDDASQVSSTSNDVSSSDFEEGPSRKRPRLQAQRKFAQSQPNSPSTTPVKIVEPLLPPPATQISDLSKRKPKTEDFLTFLCLRGSPALPNSMVYFGSSQDEEEVEEEDDETEDVKTATNNASSSCQSTPRKGKTHKHVHNGHVFNGSSRSTREKEPVQKHKSKEATPAKEKHSDHRADSRREQASANHPAAAPSTGSSAKGLAATHHHPPLHRSAQDLRKQVSKVNGVTRMSSLGAGVTSAKKMREVRPSPSKTVKYTATVTKGAVTYTKAKRELVKDTKPNHHKPSSAVNHTISGKTESSNAKTRKQVLSLGGASKSTGPAVNGLKVSGRLNPKSCTKEVGGRQLREGLQLREGLRNSKRRLEEAHQAEKPQSPPKKMKGAAGPAEGPGKKAPAERGLLNGHVKKEVPERSLERNRPKRATAGKSTPGRQAHGKADSASCENRSTSQPESVHKPQDSGKAEKGGGKAGWAAMDEIPVLRPSAKEFHDPLIYIESVRAQVEKFGMCRVIPPPDWRPECKLNDEMRFVTQIQHIHKLGRRWGPNVQRLACIKKHLKSQGITMDELPLIGGCELDLACFFRLINEMGGMQQVTDLKKWNKLADMLRIPRTAQDRLAKLQEAYCQYLLSYDSLSPEEHRRLEKEVLMEKEILEKRKGPLEGHTENDHHKFHPLPRFEPKNGLIHGVAPRNGFRSKLKEVGQAQLKTGRRRLFAQEKEVVKEEEEDKGVLNDFHKCIYKGRSVSLTTFYRTARNIMSMCFSKEPAPAEIEQEYWRLVEEKDCHVAVHCGKVDTNTHGSGFPVGKSEPFSRHGWNLTVLPNNTGSILRHLGAVPGVTIPWLNIGMVFSTSCWSRDQNHLPYIDYLHTGADCIWYCIPAEEENKLEDVVHTLLQANGTPGLQMLESNVMISPEVLCKEGIKVHRTVQQSGQFVVCFPGSFVSKVCCGYSVSETVHFATTQWTSMGFETAKEMKRRHIAKPFSMEKLLYQIAQAEAKKENGPTLSTISALLDELRDTELRQRRQLFEAGLHSSARYGSHDGSSTVADGKKKPRKWLQLETSERRCQICQHLCYLSMVVQENENVVFCLECALRHVEKQKSCRGLKLMYRYDEEQIISLVNQICGKVSGKNGSIENCLSKPTPKRGPRKRATVDVPPSRLSASSSSKSASSSS

SEQ ID NO: 773014 - protein, 1259 aa, Homo sapiens
IRSAFLHNTKAKSLTQATDGTLIRLAKKDDSDGIPWSEERVVRKVLYLSLKEFKNSQKRQHAEGIAGSLKTVNGLLGNDQSKGLGPASEQSENEKDDASQVSSTSNDVSSSDFEEGPSRKRPRLQAQRKFAQSQPNSPSTTPVKIVEPLLPPPATQISDLSKRKPKTEDFLTFLCLRGSPALPNSMVYFGSSQDEEEVEEEDDETEDVKTATNNASSSCQSTPRKGKTHKHVHNGHVFNGSSRSTREKEPVQKHKSKEATPAKEKHSDHRADSRREQASANHPAAAPSTGSSAKGLAATHHHPPLHRSAQDLRKQVSKVNGVTRMSSLGAGVTSAKKMREVRPSPSKTVKYTATVTKGAVTYTKAKRELVKDTKPNHHKPSSAVNHTISGKTESSNAKTRKQVLSLGGASKSTGPAVNGLKVSGRLNPKSCTKEVGGRQLREGLQLREGLRNSKRRLEEAHQAEKPQSPPKKMKGAAGPAEGPGKKAPAERGLLNGHVKKEVPERSLERNRPKRATAGKSTPGRQAHGKADSASCENRSTSQPESVHKPQDSGKAEKGGGKAGWAAMDEIPVLRPSAKEFHDPLIYIESVRAQVEKFGMCRVIPPPDWRPECKLNDEMRFVTQIQHIHKLGRRWGPNVQRLACIKKHLKSQGITMDELPLIGGCELDLACFFRLINEMGGMQQVTDLKKWNKLADMLRIPRTAQDRLAKLQEAYCQYLLSYDSLSPEEHRRLEKEVLMEKEILEKRKGPLEGHTENDHHKFHPLPRFEPKNGLIHGVAPRNGFRSKLKEVGQAQLKTGRRRLFAQEKEVVKEEEEDKGVLNDFHKCIYKGRSVSLTTFYRTARNIMSMCFSKEPAPAEIEQEYWRLVEEKDCHVAVHCGKVDTNTHGSGFPVGKSEPFSRHGWNLTVLPNNTGSILRHLGAVPGVTIPWLNIGMVFSTSCWSRDQNHLPYIDYLHTGADCIWYCIPAEEENKLEDVVHTLLQANGTPGLQMLESNVMISPEVLCKEGIKVHRTVQQSGQFVVCFPGSFVSKVCCGYSVSETVHFATTQWTSMGFETAKEMKRRHIAKPFSMEKLLYQIAQAEAKKENGPTLSTISALLDELRDTELRQRRQLFEAGLHSSARYGSHDGSSTVADGKKKPRKWLQLETSERRCQICQHLCYLSMVVQENENVVFCLECALRHVEKQKSCRGLKLMYRYDEEQIISLVNQICGKVSGKNGSIENCLSKPTPKRGPRKRATVDVPPSRLSASSSSKSASSSS

SEQ ID NO: 773015 - protein, 545 aa, Homo sapiens
GWLYKRSAADRRTEILYNTQGVVVKPDSRTTYHHVPPSAQAIEPNKWSHSYGRLLPTEQAFLQAIASTDACSLESDIKRLGGPSYYTTLGDKEVVLAVGAQTYIGFIMSSIVLYEGRSVSLTTFYRTARNIMSMCFSKEPAPAEIEQEYWRLVEEKDCHVAVHCGKVDTNTHGSGFPVGKSEPFSRHGWNLTVLPNNTGSILRHLGAVPGVTIPWLNIGMVFSTSCWSRDQNHLPYIDYLHTGADCIWYCIPAEEENKLEDVVHTLLQANGTPGLQMLESNVMISPEVLCKEGIKVHRTVQQSGQFVVCFPGSFVSKVCCGYSVSETVHFATTQWTSMGFETAKEMKRRHIAKPFSMEKLLYQIAQAEAKKENGPTLSTISALLDELRDTELRQRRQLFEAGLHSSARYGSHDGSSTVADGKKKPRKWLQLETSERRCQICQHLCYLSMVVQENENVVFCLECALRHVEKQKSCRGLKLMYRYDEEQIISLVNQICGKVSGKNGSIENCLSKPTPKRGPRKRATVDVPPSRLSASSSSKSASSSS

SEQ ID NO: 773016 - protein, 283 aa, Homo sapiens
MKTAGVPAHREGCLSLALSPQISPEVLCKEGIKVHRTVQQSGQFVVCFPGSFVSKVCCGYSVSETVHFATTQWTSMGFETAKEMKRRHIAKPFSMEKLLYQIAQAEAKKENGPTLSTISALLDELRDTELRQRRQLFEAGLHSSARYGSHDGSSTVADGKKKPRKWLQLETSERRCQICQHLCYLSMVVQENENVVFCLECALRHVEKQKSCRGLKLMYRYDEEQIISLVNQICGKVSGKNGSIENCLSKPTPKRGPRKRATVDVPPSRLSASSSSKSASSSS

SEQ ID NO: 773017 - protein, 1040 aa, Homo sapiens
MSKERPKRNIIQKKYDDSDGIPWSEERVVRKVLYLSLKEFKNSQKRQHAEGIAGSLKTVNGLLGNDQSKGLGPASEQSENEKDDASQVSSTSNDVSSSDFEEGPSRKRPRLQAQRKFAQSQPNSPSTTPVKIVEPLLPPPATQISDLSKRKPKTEDFLTFLCLRGSPALPNSMVYFGSSQDEEEVEEEDDETEDVKTATNNASSSCQSTPRKGKTHKHVHNGHVFNGSSRSTREKEPVQKHKSKEATPAKEKHSDHRADSRREQASANHPAAAPSTGSSAKGLAATHHHPPLHRSAQDLRKQVSKVNGVTRMSSLGAGVTSAKKMREVRPSPSKTVKYTATVTKGAVTYTKAKRELVKDTKPNHHKPSSAVNHTISGKTESSNAKTRKQVLSLGGASKSTGPAVNGLKVSGRLNPKSCTKEVGGRQLREGLQLREGLRNSKRRLEEAHQAEKPQSPPKKMKGAAGPAEGPGKKAPAERGLLNGHVKKEVPERSLERNRPKRATAGKSTPGRQAHGKADSASCENRSTSQPESVHKPQDSGKAEKGGGKAGWAAMDEIPVLRPSAKEFHDPLIYIESVRAQVEKFGMCRVIPPPDWRPECKLNDEMRFVTQIQHIHKLGRRWGPNVQRLACIKKHLKSQGITMDELPLIGGCELDLACFFRLINEMGGMQQVTDLKKWNKLADMLRIPRTAQDRLAKLQEAYCQYLLSYDSLSPEEHRRLEKEVLMEKEILEKRKGPLEGHTENDHHKFHPLPRFEPKNGLIHGVAPRNGFRSKLKEVGQAQLKTGRRRLFAQEKEVVKEEEEDKGVLNDFHKCIYKGRSVSLTTFYRTARNIMSMCFSKEPAPAEIECPAESVCNFQLLTSVGSQQRLVVERERNQTRTAGSGQLPAGEQEQEYWRLVEEKDCHVAVHCGKVDTNTHGSGFPVGKSEPFSRHGWNLTVLPNNTGSILRHLGAVPGVTIPWLNIGMVFSTSCWSRDQNHLPYIDYLHTGADCIWYCIPAEEENKLEDVVHTLLQANGTPGLQMLESNVMVRPLSHRLQQEL

SEQ ID NO: 773018 - protein, 83 aa, Homo sapiens
PPDWRPECKLNDEMRFVTQIQHIHKLGRRWGPNVQRLACIKKHLKSQGITMDELPLIGRSGRGVRGWCLPSCPQIPAVPSQSS

SEQ ID NO: 773019 - protein, 86 aa, Homo sapiens
DVMYLSVCPLFSPVGLLGNDQSKGLGPASEQSENEKDDASQVSSTSNDVSSSDFEEGPSRKRLVPKAENIGTFNQGLQTQVPVFTT

SEQ ID NO: 773020 - protein, 184 aa, Homo sapiens
MVPASRSREGPENMVRIALQLDDGSRLQDSFCSGQTLWELLSHFPQIRECLQHPGGATPVCVYTRDEVTGEAALRGTTLQSLGLTGGSATIRFVMKCYDPVGKTPGSLGSSASAGQAAASAPLPLESGELSRGDLSRPEDADTSGPCCEHTQEKQSTRAPAAAPFVPFSGGGQRLGGPPGPRGL

SEQ ID NO: 773021 - protein, 182 aa, Homo sapiens
MAAPAGGGGSAVSVLAPNGRRHTVKVTPSTVLLQVLEDTCRRQDFNPCEYDLKFQRSVLDLSLQWRFANLPNNAKLEMVPASRSREGPENMVRIALQLDDGSRLQDSFCSGQTLWELLSHFPQIRECLQHPGGATPVCVYTRDEVGGLLLLTQSPLTFSPLSNWKICCPAAVSRAVAGDSGS

SEQ ID NO: 773022 - protein, 447 aa, Homo sapiens
MAAPAGGGGSAVSVLAPNGRRHTVKVTPSTVLLQVLEDTCRRQDFNPCEYDLKFQRSVLDLSLQWRFANLPNNAKLEMVPASRSREGPENMVRIALQLDDGSRLQDSFCSGQTLWELLSHFPQIRECLQHPGGATPVCVYTRDEVTGEAALRGTTLQSLGLTGGSATISPGGPSKPKKSKSGQDPQQEQEQERERDPQQEQERERPVDREPVDREPVVCHPDLEERLQAWPAELPDEFFELTVDDVRRRLAQLKSERKRLEEAPLVTKAFREAQIKEKLERYPKVALRVLFPDRYVLQGFFRPSETVGDLRDFVRSHLGNPELSFYLFITPPKTVLDDHTQTLFQANLFPAALVHLGAEEPAGVYLEPGLLEHAISPSAADVLVARYMSRAAGSPSPLPAPDPAPKSEPAAEEGALVPPEPIPGTAQPVKRSLGKVPKWLKLPASKR

SEQ ID NO: 773023 - protein, 367 aa, Homo sapiens
MAAPAGGGGSAVSVLAPNGRRHTVKVTPSTVLLQVLEDTCRRQDFNPCEYDLKFQRSVLDLSLQWRFANLPNNAKLEMVPASRSREGPENMVRIALQLDDGSRLQDSFCSGQTLWELLSHFPQIRPVDREPVDREPVVCHPDLEERLQAWPAELPDEFFELTVDDVRRRLAQLKSERKRLEEAPLVTKAFREAQIKEKLERYPKVALRVLFPDRYVLQGFFRPSETVGDLRDFVRSHLGNPELSFYLFITPPKTVLDDHTQTLFQANLFPAALVHLGAEEPAGVYLEPGLLEHAISPSAADVLVARYMSRAAGSPSPLPAPDPAPKSEPAAEEGALVPPEPIPGTAQPVKRSLGKVPKWLKLPASKR

SEQ ID NO: 773024 - protein, 184 aa, Homo sapiens; identical to SEQ ID NO: 773020

SEQ ID NO: 773025 - protein, 258 aa, Homo sapiens
MGVFPEAATKPLLSMGWCGKSLSACGSAGAPVLEDTCRRQDFNPCEYDLKFQRSVLDLSLQWRFANLPNNAKLEMVPASRSREGPENMVRIALQLDDGSRLQDSFCSGQTLWELLSHFPQIRECLQHPGGATPVCVYTRDEVTGEAALRGTTLQSLGLTGGSATIRFVMKCYDPVGKTPGSLGSSASAGQAAASAPLPLESGELSRGDLSRPEDADTSGPCCEHTQEKQSTRAPAAAPFVPFSGGGQRLGGPPGPRGL

SEQ ID NO: 773026 - protein, 261 aa, Homo sapiens
MAAPAGGGGSAVSVLAPNGRRHTVKVTPSTVLLQVLEDTCRRQDFNPCEYDLKFQRSVLDLSLQWRFANLPNNAKLEMVPASRSREGPENMVRIALQLDDGSRLQDSFCSGQTLWELLSHFPQIRECLQHPGGATPVCVYTRDEVTGEAALRGTTLQSLGLTGGSATIRFVMKCYDPVGKTPGSLGSSASAGQAAASAPLPLESGELSRGDLSRPEDADTSGPCCEHTQEKQSTRAPAAAPFVPFSGGGQRLGGPPGPRGL

SEQ ID NO: 773027 - protein, 208 aa, Homo sapiens
MAAPAGGGGSAVSVLAPNGRRHTVKVTPSTVLLQVLEDTCRRQDFNPCEYDLKFQRSVLDLSLQWRFANLPNNAKLEMVPASRSREGPENMVRIALQLDDGSRLQDSFCSGQTLWELLSHFPQIRECLQHPGGATPVCVYTRDEVASPGQWRETRALESTTCFMEKEGVAGPRSPGCPETSLGALFVFSASLKAQESQKWFHLINICF

SEQ ID NO: 773028 - protein, 184 aa, Homo sapiens; identical to SEQ ID NO: 773020

SEQ ID NO: 773029 - protein, 238 aa, Homo sapiens
GGAVASLPRGEVLEDTCRRQDFNPCEYDLKFQRSVLDLSLQWRFANLPNNAKLEMVPASRSREGPENMVRIALQLDDGSRLQDSFCSGQTLWELLSHFPQIRECLQHPGGATPVCVYTRDEVTGEAALRGTTLQSLGLTGGSATIRFVMKCYDPVGKTPGSLGSSASAGQAAASAPLPLESGELSRGDLSRPEDADTSGPCCEHTQEKQSTRAPAAAPFVPFSGGGQRLGGPPGPRGL

SEQ ID NO: 773030 - protein, 19 aa, Homo sapiens
MSQKTCFIETSRKLQTKKT

SEQ ID NO: 773031 - protein, 274 aa, Homo sapiens
EHLPFFQPTARSLTSLLGTMSTCSHQFTSSRSMKGSCSIGGSIGGGSSRISSVLAGGSCHAPSTYGGACVSPSLSFSFGGACGLGGGYGGGFGSSSSFASGFGGGYGGGLGAGFGGGLGAGLGGGFAGGDGLLVGSEKVTMQHLGDRLASYLDKVRALEEANADLEVKIRDWYQRQRPSEIKDYSPYFKTIEDLRHKIIAATIENAQPILQIDNARLAADDFRTNEEHELALRLTVEAGVNGLCRVLDELTLARTDLEMQIEGLKEELAYLRKN

SEQ ID NO: 773032 - protein, 102 aa, Homo sapiens
MAGCRSRALPARRQLRPGEKLSTAAAGPTAKPLTALGPAGSAAAPSAGPTEPTATWNARWPTSNARSPGSHPRLSFHTSAQAEGAGSGLGQPRKRSHSAAAG

SEQ ID NO: 773033 - protein, 180 aa, Homo sapiens
GSGWHASALPFYLCRCCFSPERLPATCTNPTATLPMPPHSLVLPVPCTHQELARGPGRWVLLTACSQCPVHNMGLKIQAMNQGYTSTGNLSIRLGLRLQVCTALSTGCFPGGPGALQMLSFQCTRSLPQPPPWALGTSTSLSEVASPRPEPSSDLGTSPPAFRKYQGALLLAEGMDHSSS

SEQ ID NO: 773034 - protein, 347 aa, Homo sapiens
MSFVLSRMAACGGTCKNKVTVSKPVWDFLSKETPARLARLREEHRVSILIDGETSDIYVLQLSPQGPPPAPPNGLYLARKALKGLLKEAEKELKKAQRQGELMGCLALGGGGEHPEMHRAGPPPLRAAPLLPPGARGLPPPPPPLPPPLPPRLREEAEEQESTCPICLGEIQNAKTLEKCRHSFCEGCITRALQVKKACPMCGRFYGQLVGNQPQNGRMLVSKDATLLLPSYEKYGTIVIQYVFPPGVQGAEHPNPGVRYPGTTRVAYLPDCPEGNKVLTLFRKAFDQRLTFTIGTSMTTGRPNVITWNDIHHKTSCTGGPQLFGYPDPTYLTRVQEELRAKGITDD

SEQ ID NO: 773035 - protein, 347 aa, Homo sapiens; identical to SEQ ID NO: 773034

SEQ ID NO: 773036 - protein, 347 aa, Homo sapiens; identical to SEQ ID NO: 773034

SEQ ID NO: 773037 - protein, 350 aa, Homo sapiens
MPILSSSGSKMAACGGTCKNKVTVSKPVWDFLSKETPARLARLREEHRVSILIDGETSDIYVLQLSPQGPPPAPPNGLYLARKALKGLLKEAEKELKKAQRQGELMGCLALGGGGEHPEMHRAGPPPLRAAPLLPPGARGLPPPPPPLPPPLPPRLREEAEEQESTCPICLGEIQNAKTLEKCRHSFCEGCITRALQVKKACPMCGRFYGQLVGNQPQNGRMLVSKDATLLLPSYEKYGTIVIQYVFPPGVQGAEHPNPGVRYPGTTRVAYLPDCPEGNKVLTLFRKAFDQRLTFTIGTSMTTGRPNVITWNDIHHKTSCTGGPQLFGYPDPTYLTRVQEELRAKGITDD

SEQ ID NO: 773038 - protein, 323 aa, Homo sapiens
MSFVLSRMAACGGTCKNKVTVSKPVWDFLSKETPARLARLREEHRVSILIDGETSDIYVLQLSPQGPPPAPPNGLYLARKALKGLLKEAEKELKKAQRQGELMGCLALGGGGEHPEMHRAGPPPLRAAPLLPPGARGLPPPPPPLPPPLPPRLREEAEEQESTCPICLGEIQNAKTLEKCRHSFCEGCITRALQVKKACPMCGRFYGQLVGNQPQNGRMLVSKDATLLLPSYEKYGTIVIQYVFPPGVQGAEHPNPGVRYPGTTRVAYLPDCPEGNKVLTLFRKAFDQRLTFTIGTSMTPVRNLLTLFWNRCQTVAFNLIKIK

SEQ ID NO: 773039 - protein, 347 aa, Homo sapiens; identical to SEQ ID NO: 773034

SEQ ID NO: 773040 - protein, 347 aa, Homo sapiens; identical to SEQ ID NO: 773034

SEQ ID NO: 773041 - protein, 278 aa, Homo sapiens [sequence omitted]

SEQ ID NO: 773042 - protein, 138 aa, Homo sapiens
FFLEMESHSVAQAGVQTEQETRRPRLGVGVAGGKRRQKREREWEKTQKETIGGATQHPPPRAKTKIKKPPRENPRAVTAETGGENLSRDIAKQERTARKRPGVYELVSVIEPSRRKNHSDRVLSLSLPNTERRTIING

SEQ ID NO: 773043 - protein, 139 aa, Homo sapiens [sequence omitted]

SEQ ID NO: 773044 - protein, 230 aa, Homo sapiens
  misc_feature (15)..(16): Xaa can be any naturally occurring amino acid
  misc_feature (56)..(56): Xaa can be any naturally occurring amino acid
MQDERSGPGQPAADXXPEPTGPRPAPPTAPRSRSRPHHPRPPSPTGHARPALKRGXGGVPLRPGPALAPPGPPPGAGAMAFTFAAFCYMLTLVLSISLIFFVIWHIIAFDELRTDFKNPIDQGTLLRARERLKNIERICCLLRKLVVPEYSIHGLFCLMFLCAAEWVTLGLNIPLLFYHLWRYFHRPADGSEVMYDAVSIMNADILNYCQKESWCKLAFYLLSFFYYLYR

SEQ ID NO: 773045 - protein, 238 aa, Homo sapiens
  misc_feature (15)..(16): Xaa can be any naturally occurring amino acid
  misc_feature (56)..(56): Xaa can be any naturally occurring amino acid
MQDERSGPGQPAADXXPEPTGPRPAPPTAPRSRSRPHHPRPPSPTGHARPALKRGXGGVPLRPGPALAPPGPPPGAGAMAFTFAAFCYMLTLVLSISLIFFVIWHIIAFDELRTDFKNPIDQGTLLRARERLKNIERICCLLRKLVVPEYSIHGLFCLMFLCAAEWVTLGLNIPLLFYHLWRYFHRPADGSEVMYDAVSIMNADILNYCQKESWCKLAFYLLSFFYYLYSMVYTLVSF

SEQ ID NO: 773046 - protein, 230 aa, Homo sapiens; identical to SEQ ID NO: 773044
  misc_feature (15)..(16): Xaa can be any naturally occurring amino acid
  misc_feature (56)..(56): Xaa can be any naturally occurring amino acid

SEQ ID NO: 773047 - protein, 156 aa, Homo sapiens
RLLPGRADSAAEIALAPPMAAHVERWELLQYLLLRHPIAAFSFPQQRERLKNIERICCLLRKLVVPEYSIHGLFCLMFLCAAEWVTLGLNIPLLFYHLWRYFHRPADGSEVMYDAVSIMNADILNYCQKESWCKLAFYLLSFFYYLYSMVYTLVSF

SEQ ID NO: 773048 - protein, 238 aa, Homo sapiens; identical to SEQ ID NO: 773045
  misc_feature (15)..(16): Xaa can be any naturally occurring amino acid
  misc_feature (56)..(56): Xaa can be any naturally occurring amino acid

SEQ ID NO: 773049 - protein, 148 aa, Homo sapiens
MAASPARPAVLALTGLALLLLLCWGPGGISGNKLKLMLQKREAPVPTKTKVAVDENKAKEFLGSLKRQKRQLWDRTRPEVQQWYQQFLYMGFDEAKFEDDITYWLNRDRNGHEYYGDYYQRHYDEDSAIGPRSPYGFRHGASVNYDDY

SEQ ID NO: 773050 - protein, 112 aa, Homo sapiens
MLQKREAPVPTKTKVAVDENKAKEFLGSLKRQKRQLWDRTRPEVQQWYQQFLYMGFDEAKFEDDITYWLNRDRNGHEYYGDYYQRHYDEDSAIGPRSPYGFRHGASVNYDDY

SEQ ID NO: 773051 - protein, 148 aa, Homo sapiens; identical to SEQ ID NO: 773049

SEQ ID NO: 773052 - protein, 112 aa, Homo sapiens; identical to SEQ ID NO: 773050

SEQ ID NO: 773053 - protein, 648 aa, Homo sapiens [sequence omitted]

SEQ ID NO: 773054 - protein, 133 aa, Homo sapiens
MVELIFIPTNSDSRSAKEEQRVIHLNHVQEMIRSRCGVSQLFSFVPHFLTQHFKLPKVRKRKKAKGKKVVLTLAVLKKQETMKVVNLPFEKFGTGQDILALDRTSSPKGTSLALSNGPIILGCSSREPSSISS

SEQ ID NO: 773055 - protein, 514 aa, Homo sapiens
MSWPRRLLLRYLFPALLLHGLGEGSALLHPDSRSHPRSLEKSAWRAFKESQCHHMLKHLHNGARITVQMPPTIEGHWVSTGCEVRSGPEFITRSYRFYHNNTFKAYQFYYGSNRCTNPTYTLIIRGKIRLRQASWIIRGGTEADYQLHNVQVICHTEAVAEKLGQQVNRTCPGFLADGGPWVQDVAYDLWREENGCECTKAVNFAMHELQLIRVEKQYLHHNLDHLVEELFLGDIHTDATQRMFYRPSSYQPPLQNAKNHDHACIACRIIYRSDEHHPPILPPKADLTIGLHGEWVSQRCEVRPEVLFLTRHFIFHDNNNTWEGHYYHYSDPVCKHPTFSIYARGRYSRGVLSSRVMGGTEFVFKVNHMKVTPMDAATASLLNVFNGNECGAEGSWQVGIQQDVTHTNGCVALGIKLPHTEYEIFKMEQDARGRYLLFNGQRPSDGSSPDRPEKRATSYQMPLVQCASSSPRAEDLAEDSGSSLYGRAPGRHTWSLLLAALACLVPLLHWNIRR

SEQ ID NO: 773056 - protein, 571 aa, Homo sapiens
RWKYEETLQLRWRWRPLQLRAAWPGRTRPEAEGRARAQLPGHQIGARRAGGPRAGLEMSWPRRLLLRYLFPALLLHGLGEGSALLHPDSRSHPRSLEKSAWRAFKESQCHHMLKHLHNGARITVQMPPTIEGHWVSTGCEVRSGPEFITRSYRFYHNNTFKAYQFYYGSNRCTNPTYTLIIRGKIRLRQASWIIRGGTEADYQLHNVQVICHTEAVAEKLGQQVNRTCPGFLADGGPWVQDVAYDLWREENGCECTKAVNFAMHELQLIRVEKQYLHHNLDHLVEELFLGDIHTDATQRMFYRPSSYQPPLQNAKNHDHACIACRIIYRSDEHHPPILPPKADLTIGLHGEWVSQRCEVRPEVLFLTRHFIFHDNNNTWEGHYYHYSDPVCKHPTFSIYARGRYSRGVLSSRVMGGTEFVFKVNHMKVTPMDAATASLLNVFNGNECGAEGSWQVGIQQDVTHTNGCVALGIKLPHTEYEIFKMEQDARGRYLLFNGQRPSDGSSPDRPEKRATSYQMPLVQCASSSPRAEDLAEDSGSSLYGRAPGRHTWSLLLAALACLVPLLHWNIRR

SEQ ID NO: 773057 - protein, 546 aa, Homo sapiens
LYQFQLFTLPAGQDLAQPLFIQSANQPSDGQCPPGDLVTDGPELAGQGHPTQFWPYSPRQWAQPSSPEDPADLSASCRLGHWCTSCRDSNLHNGARITVQMPPTIEGHWVSTGCEVRSGPEFITRSYRFYHNNTFKAYQFYYGSNRCTNPTYTLIIRGKIRLRQASWIIRGGTEADYQLHNVQVICHTEAVAEKLGQQVNRTCPGFLADGGPWVQDVAYDLWREENGCECTKAVNFAMHELQLIRVEKQYLHHNLDHLVEELFLGDIHTDATQRMFYRPSSYQPPLQNAKNHDHACIACRIIYRSDEHHPPILPPKADLTIGLHGEWVSQRCEVRPEVLFLTRHFIFHDNNNTWEGHYYHYSDPVCKHPTFSIYARGRYSRGVLSSRVMGGTEFVFKVNHMKVTPMDAATASLLNVFNGNECGAEGSWQVGIQQDVTHTNGCVALGIKLPHTEYEIFKMEQDARGRYLLFNGQRPSDGSSPDRPEKRATSYQMPLVQCASSSPRAEDLAEDSGSSLYGRAPGRHTWSLLLAALACLVPLLHWNIRR

SEQ ID NO: 773058 - protein, 326 aa, Homo sapiens
MPAGHGARGSRLKPRPGPAAPGRRRRAERAPSCPGTKSERGVREGPEQDWKCPGRAASCSDTCSRPSCFTNHDHACIACRIIYRSDEHHPPILPPKADLTIGLHGEWVSQRCEVRPEVLFLTRHFIFHDNNNTWEGHYYHYSDPVCKHPTFSIYARGRYSRGVLSSRVMGGTEFVFKVNHMKVTPMDAATASLLNVFNGNECGAEGSWQVGIQQDVTHTNGCVALGIKLPHTEYEIFKMEQDARGRYLLFNGQRPSDGSSPDRPEKRATSYQMPLVQCASSSPRAEDLAEDSGSSLYGRAPGRHTWSLLLAALACLVPLLHWNIRR

SEQ ID NO: 773059 - protein, 514 aa, Homo sapiens; identical to SEQ ID NO: 773055

SEQ ID NO: 773060 - protein, 514 aa, Homo sapiens; identical to SEQ ID NO: 773055

SEQ ID NO: 773061 - protein, 114 aa, Homo sapiens
VICHTEAVAEKLGQQVNRTCPGFLADGGPWVQDVAYDLWREENGCECTKAVNFAMHELQLIRVEKQYLHHNLDHLVEELFLGDIHTDATQRMFYRPSSYQPPLQNAKVPQSSVF

SEQ ID NO: 773062 - protein, 514 aa, Homo sapiens; identical to SEQ ID NO: 773055

SEQ ID NO: 773063 - protein, 409 aa, Homo sapiens
ASSDLRLAAVALPTYTLIIRGKIRLRQASWIIRGGTEADYQLHNVQVICHTEAVAEKLGQQVNRTCPGFLADGGPWVQDVAYDLWREENGCECTKAVNFAMHELQLIRVEKQYLHHNLDHLVEELFLGDIHTDATQRMFYRPSSYQPPLQNAKNHDHACIACRIIYRSDEHHPPILPPKADLTIGLHGEWVSQRCEVRPEVLFLTRHFIFHDNNNTWEGHYYHYSDPVCKHPTFSIYARGRYSRGVLSSRVMGGTEFVFKVNHMKVTPMDAATASLLNVFNGNECGAEGSWQVGIQQDVTHTNGCVALGIKLPHTEYEIFKMEQDARGRYLLFNGQRPSDGSSPDRPEKRATSYQMPLVQCASSSPRAEDLAEDSGSSLYGRAPGRHTWSLLLAALACLVPLLHWNIRR

SEQ ID NO: 773064 - protein, 304 aa, Homo sapiens
MSFSPQREPRRSLCGLVEELFLGDIHTDATQRMFYRPSSYQPPLQNAKNHDHACIACRIIYRSDEHHPPILPPKADLTIGLHGEWVSQRCEVRPEVLFLTRHFIFHDNNNTWEGHYYHYSDPVCKHPTFSIYARGRYSRGVLSSRVMGGTEFVFKVNHMKVTPMDAATASLLNVFNGNECGAEGSWQVGIQQDVTHTNGCVALGIKLPHTEYEIFKMEQDARGRYLLFNGQRPSDGSSPDRPEKRATSYQMPLVQCASSSPRAEDLAEDSGSSLYGRAPGRHTWSLLLAALACLVPLLHWNIRR

SEQ ID NO: 773065 - protein, 198 aa, Homo sapiens
MAATGAQIHYYHYSDPVCKHPTFSIYARGRYSRGVLSSRVMGGTEFVFKVNHMKVTPMDAATASLLNVFNGNECGAEGSWQVGIQQDVTHTNGCVALGIKLPHTEYEIFKMEQDARGRYLLFNGQRPSDGSSPDRPEKRATSYQMPLVQCASSSPRAEDLAEDSGSSLYGRAPGRHTWSLLLAALACLVPLLHWNIRR

SEQ ID NO: 773066 - protein, 230 aa, Homo sapiens
MSWPRRLLLRYLFPALLLHGLGEGSALLHPDSRSHPRSLEKSAWRAFKESQCHHMLKHLHNGARITVQMPPTIEGHWVSTGCEVRSGPEFITRSYRFYHNNTFKAYQFYYGSNRCTNPTYTLIIRGKIRLRQASWIIRGGTEADYQLHNVQVICHTEAVAEKLGQQVNRTCPGFLADGGPWVQDVAYDLWREENGCECTKAVNFAMHELQLLFLPKISFLITMHFKDKQF

SEQ ID NO: 773067 - protein, 227 aa, Homo sapiens
MRHEAPMQMASAQDARYGQKDSSDQNFDYMFKLLIIGNSSVGKTSFLFRYADDSFTSAFVSTVGIDFKVKTVFKNEKRIKLQIWDTAGQERYRTITTAYYRGAMGFILMYDITNEESFNAVQDWSTQIKTYSWDNAQVILVGNKCDMEDERVISTERGQHLGEQLGFEFFETSAKDNINVKQTFERLVDIICDKMSESLETDPAITAAKQNTRLKETPPPPQPNCAC

SEQ ID NO: 773068 - protein, 227 aa, Homo sapiens; identical to SEQ ID NO: 773067

SEQ ID NO: 773069 - protein, 144 aa, Homo sapiens [sequence omitted]

SEQ ID NO: 773070 - protein, 169 aa, Homo sapiens
WKPRSVLLSSWVVQGRRWPCSRVLAGWGHRSHPSALPGVSGGGQFRQQKPGWDQANLVWVGGLRPWRWPPSPCSLPWVSALPSLGHPPLPLLSQRTPIPDSSEFWKCFLRLIYGSDRWWRGAGGGRDGRCGEGRWKLLCHLGWGLPPSPRRPKGDPFLFSSHQELGWSL

SEQ ID NO: 773071 - protein, 350 aa, Homo sapiens
MPGPAAGSRARVYAEVNSLRSREYWDYEAHVPSWGNQDDYQLVRKLGRGKYSEVFEAINITNNERVVVKILKPVKKKKIKREVKILENLRGGTNIIKLIDTVKDPVSKTPALVFEYINNTDFKQLYQILTDFDIRFYMYELLKALDYCHSKGIMHRDVKPHNVMIDHQQKKLRLIDWGLAEFYHPAQEYNVRVASRYFKGPELLVDYQMYDYSLDMWSLGCMLASMIFRREPFFHGQDNYDQLVRIAKVLGTEELYGYLKKYHIDLDPHFNDILGQHSRKRWENFIHSENRHLVSPEALDLLDKLLRYDHQQRLTAKEAMEHPYFYPVVKEQSQPCADNAVLSSGLTAAR

SEQ ID NO: 773072 - protein, 323 aa, Homo sapiens
MCVSSFYSNQDDYQLVRKLGRGKYSEVFEAINITNNERVVVKILKPVKKKKIKREVKILENLRGGTNIIKLIDTVKDPVSKTPALVFEYINNTDFKQLYQILTDFDIRFYMYELLKALDYCHSKGIMHRDVKPHNVMIDHQQKKLRLIDWGLAEFYHPAQEYNVRVASRYFKGPELLVDYQMYDYSLDMWSLGCMLASMIFRREPFFHGQDNYDQLVRIAKVLGTEELYGYLKKYHIDLDPHFNDILGQHSRKRWENFIHSENRHLVSPEALDLLDKLLRYDHQQRLTAKEAMEHPYFYPVVKEQSQPCADNAVLSSGLTAAR

SEQ ID NO: 773073 - protein, 308 aa, Homo sapiens
LGGQEVEFIGEVFEAINITNNERVVVKILKPVKKKKIKREVKILENLRGGTNIIKLIDTVKDPVSKTPALVFEYINNTDFKQLYQILTDFDIRFYMYELLKALDYCHSKGIMHRDVKPHNVMIDHQQKKLRLIDWGLAEFYHPAQEYNVRVASRYFKGPELLVDYQMYDYSLDMWSLGCMLASMIFRREPFFHGQDNYDQLVRIAKVLGTEELYGYLKKYHIDLDPHFNDILGQHSRKRWENFIHSENRHLVSPEALDLLDKLLRYDHQQRLTAKEAMEHPYFYPVVKEQSQPCADNAVLSSGLTAAR

SEQ ID NO: 773074 - protein, 404 aa, Homo sapiens
VTQAGVQWRNLSSLQPPPPWFKRFSCLLRPTPRVPRRAAAATLCAPRRPPVPPAMPGPAAGSRARVYAEVNSLRSREYWDYEAHVPSWGNQDDYQLVRKLGRGKYSEVFEAINITNNERVVVKILKPVKKKKIKREVKILENLRGGTNIIKLIDTVKDPVSKTPALVFEYINNTDFKQLYQILTDFDIRFYMYELLKALDYCHSKGIMHRDVKPHNVMIDHQQKKLRLIDWGLAEFYHPAQEYNVRVASRYFKGPELLVDYQMYDYSLDMWSLGCMLASMIFRREPFFHGQDNYDQLVRIAKVLGTEELYGYLKKYHIDLDPHFNDILGQHSRKRWENFIHSENRHLVSPEALDLLDKLLRYDHQQRLTAKEAMEHPYFYPVVKEQSQPCADNAVLSSGLTAAR

SEQ ID NO: 773075 - protein, 350 aa, Homo sapiens; identical to SEQ ID NO: 773071

SEQ ID NO: 773076 - protein, 48 aa, Homo sapiens
QHKPVDDGSYHLLDQRSQQWRLWGIPRQPARALRVPPERFQTAHAPHH

SEQ ID NO: 773077 - protein, 246 aa, Homo sapiens
  misc_feature (16)..(16): Xaa can be any naturally occurring amino acid
  misc_feature (23)..(23): Xaa can be any naturally occurring amino acid
  misc_feature (27)..(27): Xaa can be any naturally occurring amino acid
  misc_feature (32)..(32): Xaa can be any naturally occurring amino acid
  misc_feature (37)..(38): Xaa can be any naturally occurring amino acid
  misc_feature (42)..(42): Xaa can be any naturally occurring amino acid
  misc_feature (45)..(46): Xaa can be any naturally occurring amino acid
  misc_feature (50)..(50): Xaa can be any naturally occurring amino acid
  misc_feature (66)..(66): Xaa can be any naturally occurring amino acid
  misc_feature (70)..(70): Xaa can be any naturally occurring amino acid
  misc_feature (76)..(76): Xaa can be any naturally occurring amino acid
  misc_feature (83)..(84): Xaa can be any naturally occurring amino acid
MRCSAEAARGTTATLXFRTWGPXQLGXGLPNXVRGPXXIYLXKKXXVPFXYGHKYDLTSSRQTVVXLACXCHSFHXIKRLMKXXFVHRFSTGTMPLRNIFKNCTYYWGFAAWMAYYINHPLYTPPTYGAQQVKLALAIFVICQLGNFSIHMALRDLRPAGSKTRKIPYPTKNPFTWLFLLVSCPNYTYEVGSWIGFAIMTQCLPVALFSLVGFTQMTIWAKGKHRSYLKEFRDYPPLRMPIIPFLL

SEQ ID NO: 773078 - protein, 357 aa, Homo sapiens
MATVIHNPLKALGDQFYKEAIEHCRSYNSRLCAERSVRLPFLDSQTGVAQNNCYIWMEKRHRGPGLAPGQLYTYPARCWRKKRRLHPPEDPKLRLLEIKPEVELPLKKDGFTSESTTLEALLRGEGVEKKVDAREEESIQEIQRVLENDENVEEGNEEEDLEEDIPKRKNRTRGRARGSAGGRRRHDAASQEDHDKPYVCDICGKRYKNRPGLSYHYAHTHLASEEGDEAQDQETRSPPNHRNENHRPQKGPDGTVIPNNYCDFCLGGSNMNKKSGRPEELVSCADCGRSAHLGGEGRKEKEAAAAARTTEDLFGSTSESDTSTFHGFDEDDLEEPRSCRGRRSGRGSPTADKKGSC

SEQ ID NO: 773079 - protein, 353 aa, Homo sapiens
MATVIHNPLKALGDQFYKEAIEHCRSYNSRLCAERSVRLPFLDSQTGVAQNNCYIWMEKRHRGPGLAPGQLYTYPARCWRKKRRLHPPEDPKLRLLEIKPEVELPLKKDGFTSESTTLEALLRGEGVEKKVDAREEESIQEIQRVLENDENVEEGNEEEDLEEDIPKRKNRTRGRARGSAGGRRRHDAASQEDHDKPYVCDICGKRYKNRPGLSYHYAHTHLASEEGDEAQDQETRSPPNHRNENHRPQKGPDGTVIPNNYCDFCLGGSNMNKKSGRPEELVSCADCGRSGECGPFPHRVPVDQECSSCIPLPSCGAGDWRGKRWWQCFRVERSFQLILIFFFFGSQEPKVMP

SEQ ID NO: 773080 - protein, 224 aa, Homo sapiens
MATVIHNPLKALGDQFYKEAIEHCRSYNSRLCAERSVRLPFLDSQTGVAQNNCYIWMEKRHRGPGLAPGQLYTYPARCWRKKRRLHPPEDPKLRLLEIKPEVELPLKKDGFTSESTTLEALLRGEGVEKKVDAREEESIQEIQRVLENDENVEEGNEEEDLEEDIPKRKNRTRGRPRCPLPSLHCFSSLPSAVIDAKEWGGGGKWEATVAYRKKKIYPVHIFNM

SEQ ID NO: 773081 - protein, 52 aa, Homo sapiens
MKPKCTCNTHLRRNSKSVRCPNRSEMEKRTPTQEFPPSQYDAPTSMKRRNAH

SEQ ID NO: 773082 - protein, 92 aa, Homo sapiens
PGSGSRGVKVLPRRVSFALPWIKSALPRSPALLPLGRGIPTDLEILACLPFTQSKLRRPEEDQGSLLGLPGNHMGISHTSFLLTSEHLRITW

SEQ ID NO: 773083 - protein, 129 aa, Homo sapiens
PGSGSRGVKVLPRRVSFALPWIKSALPRSPALLPLGRGIPTDLEILACLPFTQSKLRRPASPLSSTILCPVVSSAVSWVIKQASPPSGVHEWLSKPPNTFPCSLHISDEGDYVLPETAELDSMYFKFVK

SEQ ID NO: 773084 - protein, 109 aa, Homo sapiens
MYTLPIAYFSCSKHFSDYSRPVLFKVLTREVDSSPGRLPASPQLAPGARRPGPSPGEAASSAWSWDPAGPTFVLGCRRPPRPSWCRALLLPKSSLPLSQGWGGSQGLVL

SEQ ID NO: 773085 - protein, 83 aa, Homo sapiens
PGSGSRGVKVLPRRVSFALPWIKSALPRSPALLPLGRGIPTDLEILACLPFTQSKLRRPGEDQGSYVAFSNHMGSANVFSTRH

SEQ ID NO: 773086 - protein, 509 aa, Homo sapiens
MGVLKFKHIFFRSFVKSSGVSQIVFTFLLIPCCLTLNFRAPPVIPNVPFLWAWNAPSEFCLGKFDEPLDMSLFSFIGSPRINATGQGVTIFYVDRLGYYPYIDSITGVTVNGGIPQKISLQDHLDKAKKDITFYMPVDNLGMAVIDWEEWRPTWARNWKPKDVYKNRSIELVQQQNVQLSLTEATEKAKQEFEKAGKDFLVETIKLGKLLRPNHLWGYYLFPDCYNHHYKKPGYNGSCFNVEIKRNDDLSWLWNESTALYPSIYLNTQQSPVAATLYVRNRVREAIRVSKIPDAKSPLPVFAYTRIVFTDQVLKFLSQDELVYTFGETVALGASGIVIWGTLSIMRSMKSCLLLDNYMETILNPYIINVTLAAKMCSQVLCQEQGVCIRKNWNSSDYLHLNPDNFAIQLEKGGKFTVRGKPTLEDLEQFSEKFYCSCYSTLSCKEKADVKDTDAVDVCIADGVCIDAFLKPPMETEEPQIFYNASPSTLSATMFIVSILFLIISSVASL

SEQ ID NO: 773087 - protein, 510 aa, Homo sapiens
MGVLKFKHIFFRSFVKSSGVSQIVFTFLLIPCCLTLNFRAPPVIPNVPFLWAWNAPSEFCLGKFDEPLDMSLFSFIGSPRINATGQGVTIFYVDRLGYYPYIDSITGVTVNGGIPQKISLQDHLDKAKKDITFYMPVDNLGMAVIDWEEWRPTWARNWKPKDVYKNRSIELVQQQNVQLSLTEATEKAKQEFEKAGKDFLVETIKLGKLLRPNHLWGYYLFPDCYNHHYKKPGYNGSCFNVEIKRNDDLSWLWNESTALYPSIYLNTQQSPVAATLYVRNRVREAIRVSKIPDAKSPLPVFAYTRIVFTDQVLKFLSQDELVYTFGETVALGASGIVIWGTLSIMRSMKSCLLLDNYMETILNPYIINVTLAAKMCSQVLCQEQGVCIRKNWNSSDYLHLNPDNFAIQLEKGGKFTVRGKPTLEDLEQFSEKFYCSCYSTLSCKEKADVKDTDAVDVCIADGVCIDAFLKPPMETEEPQIFYNASPSTLSATMFIDLCDLYLVPTSYLIL

SEQ ID NO: 773088 - protein, 509 aa, Homo sapiens; identical to SEQ ID NO: 773086

SEQ ID NO: 773089 - protein, 131 aa, Homo sapiens
SGRRRAIRSSAAAGTMVGGEAAAAVEELVSGVRQAADFAEQFRSYSESEKQWKARMEFILRHLPDYRDPPDGSGRLDQLLSLSMVWANHLFLGCSYNKDLLDKVMEMADGIEVEDLPQFTTRSELMKKHQS

SEQ ID NO: 773090 - protein, 131 aa, Homo sapiens; identical to SEQ ID NO: 773089

SEQ ID NO: 773091 - protein, 102 aa, Homo sapiens
SGRRRAIRSSAAAGTMVGGEAAAAVEELVSGVRQAADFAEQFRSYSESEKQWKARMEFILRHLPDYRDPPDGSGRLDQLLSLSMVWANHLFLGCRCGPLPAG

SEQ ID NO: 773092 - protein, 131 aa, Homo sapiens; identical to SEQ ID NO: 773089

SEQ ID NO: 773093 - protein, 131 aa, Homo sapiens; identical to SEQ ID NO: 773089

SEQ ID NO: 773094 - protein, 100 aa, Homo sapiens
SGRRRAIRSSAAAGTMVGGEAAAAVEELVSGVRQAADFAEQFRSYSESEKQWKARMEFILRHLPDYRDPPDGSGRLDQLLSLSMVWANHLFLGCSPRGPK

SEQ ID NO: 773095 - protein, 131 aa, Homo sapiens; identical to SEQ ID NO: 773089

SEQ ID NO: 773096 - protein, 124 aa, Homo sapiens
AFLFTLCSPTGGKKLHRLESDQARESPDHHLKRLATRGLSKGGCWFVLQGFHFFDLEQESANRHCQAKSRPLPVFVNKTSWGRAVPVCSCLWLLLWYLIRVNAVVTEAIWLVKPKRSTVLARHT

SEQ ID NO: 773097 - protein, 420 aa, Homo sapiens
MSSPRDFRAEPVNDYEGNDSEAEDLNFRETLPSSSQENTPRSKVFENKVNSEKVKLSLRNFPHNDYEDVFEEPSESGSDPSMWTARGPFRRDRWSSEDEEAAGPSQALSPLLSDTRKIVSEGELDQLAQIRPLIFNFHEQTAIKDCLKILEEKTAAYDIMQEFMALELKNLPGEFNSGNQPSNREKNRYRDILPYDSTRVPLGKSKDYINASYIRIVNCGEEYFYIATQGPLLSTIDDFWQMVLENNSNVIAMITREIEGGIIKCYHYWPISLKKPLELKHFRVFLENYQILQYFIIRMFQVVEKSTGTSHSVKQLQFTKWPDHGTPASADSFIKYIRYARKSHLTGPMVVHCSAGIGRTGVFLCVDVVFCAIVKNCSFNIMDIVAQMREQRSGMVQTKEQYHFCYDIVLEVLRKLLTLD

SEQ ID NO: 773098 - protein, 210 aa, Homo sapiens
GRQARRGPNWRGCWGCSGTVGAAPQAQVFENKVNSEKVKLSLRNFPHNDYEDVFEEPSESGSDPSMWTARGPFRRDRWSSEDEEAAGPSQALSPLLSDTRKIVSEGELDQLAQIRPLIFNFHEQTAIKDCLKILEEKTAAYDIMQEFMALELKNLPGEFNSGNQPSNREKNRYRDILPFQHHGYSGPNERTTFWHGSNEGAVSLLLRYCA

SEQ ID NO: 773099 - protein, 404 aa, Homo sapiens
GRQARRGPNWRGCWGCSGTVGAAPQAQVFENKVNSEKVKLSLRNFPHNDYEDVFEEPSESGSDPSMWTARGPFRRDRWSSEDEEAAGPSQALSPLLSDTRKIVSEGELDQLAQIRPLIFNFHEQTAIKDCLKILEEKTAAYDIMQEFMALELKNLPGEFNSGNQPSNREKNRYRDILPYDSTRVPLGKSKDYINASYIRIVNCGEEYFYIATQGPLLSTIDDFWQMVLENNSNVIAMITREIEGGIIKCYHYWPISLKKPLELKHFRVFLENYQILQYFIIRMFQVVEKSTGTSHSVKQLQFTKWPDHGTPASADSFIKYIRYARKSHLTGPMVVHCSAGIGRTGVFLCVDVVFCAIVKNCSFNIMDIVAQMREQRSGMVQTKEQYHFCYDIVLEVLRKLLTLD

SEQ ID NO: 773100 - protein, 464 aa, Homo sapiens
MVRILWIEPAAAMDAPARLLAPLLLLCAQQLRGTRAMNDIGDYVGSNLEISWLPNLDGLIAGYARNFRPGIGGPPVNVALALEVASIDHISEANMEYTMTVFLHQSWRDSRLSYNHTNETLGLDSRFVDKLWLPDTFIVNAKSAWFHDVTVENKLIRLQPDGVILYSIRITSTVACDMDLAKYPMDEQECMLDLESYGYSSEDIVYYWSESQEHIHGLDKLQLAQFTITSYRFTTELMNFKSAGQFPRLSLHFHLRRNRGVYIIQSYMPSVLLVAMSWVSFWISQAAVPARVSLGITTVLTMTTLMVSARSSLPRASAIKALDVYFWICYVFVFAALVEYAFAHFNADYRKKQKAKVKVSRPRAEMDVRNAIVLFSLSAAGVTQELAISRRQRRVPGNLMGSYRSVGVETGETKKEGAARSGGQGGIRARLRPIDADTIDIYARAVFPAAFAAVNVIYWAAYAM

SEQ ID NO: 773101 - protein, 481 aa, Homo sapiens
AGLAPARLCRLCGRREPSLRGPRPEPAAAMDAPARLLAPLLLLCAQQLRGTRAMNDIGDYVGSNLEISWLPNLDGLIAGYARNFRPGIGGPPVNVALALEVASIDHISEANMEYTMTVFLHQSWRDSRLSYNHTNETLGLDSRFVDKLWLPDTFIVNAKSAWFHDVTVENKLIRLQPDGVILYSIRITSTVACDMDLAKYPMDEQECMLDLESYGYSSEDIVYYWSESQEHIHGLDKLQLAQFTITSYRFTTELMNFKSAGQFPRLSLHFHLRRNRGVYIIQSYMPSVLLVAMSWVSFWISQAAVPARVSLGITTVLTMTTLMVSARSSLPRASAIKALDVYFWICYVFVFAALVEYAFAHFNADYRKKQKAKVKVSRPRAEMDVRNAIVLFSLSAAGVTQELAISRRQRRVPGNLMGSYRSVGVETGETKKEGAARSGGQGGIRARLRPIDADTIDIYARAVFPAAFAAVNVIYWAAYAM

SEQ ID NO: 773102 - protein, 98 aa, Homo sapiens
PFLELSRCQGPTPPSRNPVTRCDMQLCCPSSEQRRTWTYRQESPPQGVRYSEERNANQLLSPFCLVDFLAEWCTVHGRFHLAGPGSLVSSVVHTNSKH

SEQ ID NO: 773103 - protein, 41 aa, Homo sapiens
MSSSRVGPGRSEYSFQMLAIRTPAQRAVFGNIAPAEVLPAP

SEQ ID NO: 773104 - protein, 289 aa, Homo sapiens
GRSRSGSWSRSGAERSGAGAERAERAEPAAELGARAGGMYRARAARAGPEPGSPGRFGILSTGQLRDLLQDEPKLDRIVRLSRKFQGLQLEREACLASNYALAKENLALRPRLEMGRAALAIKYQELREVAENCADKLQRLEESMHRWSPHCALGWLQAELEEAEQEAEEQMEQLLLGEQSLEAFLPAFQRGRALAHLRRTQAEKLQELLRRRERSAQPAPTSAADPPKSFPAAAVLPTGAARGPPAVPRSLPPLDSRPVPPLKGSPGCPLGPAPLLSPRPSQPEPPHR

SEQ ID NO: 773105 - protein, 199 aa, Homo sapiens
ISNHFVQNSQGLGNVLSRIAEIYILSQPFMVRIMATEPPIINLQPGNFTLDIPASIMMLTQPKNSTVETIVSMDFVASTSVGLVILGQRLVCSLSLNRFRLALPESNRSNIEVLRFENILSSILHFGVLPLANAKLQQGFPLSNPHKFLFVNSDIEVLEGFLLISTDLKYETSSKQQPSFHVWEGLNLISRQWRGKSAP

SEQ ID NO: 773106 - protein, 139 aa, Homo sapiens
RPPPPPPPPPLPESPLGGRRVSPTPPASGRGPQSAASPVETGPPVPVRRERAPDSARCERAGKGCEDSLFGSSNGFLGPRRAGFQACHGLQCGRDERSSLEFSPRLGTARWVARRPRSIGKGGWRLPERAQPGSPATTL

SEQ ID NO: 773107 - protein, 119 aa, Homo sapiens
KCSLTTAGDFPSHQDFRGTPQVQPLRLLRNQSLAWSQLGQRRGARLGGLGVWLGLLRGSSSQSPHDLLVTGLKSGPRPIPTLNPELPETWLARTGPNFYRGLRGMEKGSLPLPFSVTPP

SEQ ID NO: 773108 - protein, 110 aa, Homo sapiens
MTFWFYENSFDFPDPLKVSQTPQTSSDYTLRPPFLFLFLFGDGVSLLSPKLERNGTISAHYSLHLPGSSDSPTSASRAAGITVMRHHAQLVFVCLAETGFHHVGQAGLEL

SEQ ID NO: 773109 - protein, 285 aa, Homo sapiens
GRGREKRARAKTESRRKAKGAVSNRRRREGSPPRCNIEKAPAGRMRTADGGEPAGASSPAGRVDGGLQMGSERMEMRKRQMPAAQDTPGAAPGQPGAGSRGSNACCFCWCCCCSCSCLTVRNQEDQRPTIASHELRADLPTWEESPAPTLEEVNAWAQSFDKLMVTPAGRNAFREFLRTEFSEENMLFWMACEELKKEANKNIIEEKARIIYEDYISILSPKEVSLDSRVREVINRNMVEPSQHIFDDAQLQIYTLMHRDSYPRFMNSAVYKDLLQSLSEKSIEA

SEQ ID NO: 773110 - protein, 388 aa, Homo sapiens
MPQLSQDNQECLQKHFSRPSIWTQFLPLFRAQRYNTDIHQITENEGDLRAVPDIKSFPPAQLPDSPAAPKLFGLLSSPLSSLARFFSHLLRRPPPEAPRRRLDFSPLLPALPAARLSRGHEELPGRLSLLLGAALALPGRPSGGRPLRPPHPVAKPREEDATAGQSSPMPQMGSERMEMRKRQMPAAQDTPGAAPGQPGAGSRGSNACCFCWCCCCSCSCLTVRNQEDQRPTIASHELRADLPTWEESPAPTLEEVNAWAQSFDKLMVTPAGRNAFREFLRTEFSEENMLFWMACEELKKEANKNIIEEKARIIYEDYISILSPKEVSLDSRVREVINRNMVEPSQHIFDDAQLQIYTLMHRDSYPRFMNSAVYKDLLQSLSEKSIEA

SEQ ID NO: 773111 - protein, 180 aa, Homo sapiens
MKETSGLFLISSLTVRNQEDQRPTIASHELRADLPTWEESPAPTLEEVNAWAQSFDKLMVTPAGRNAFREFLRTEFSEENMLFWMACEELKKEANKNIIEEKARIIYEDYISILSPKEVSLDSRVREVINRNMVEPSQHIFDDAQLQIYTLMHRDSYPRFMNSAVYKDLLQSLSEKSIEA

SEQ ID NO: 773112 - protein, 79 aa, Homo sapiens
GRGREKRARAKTESRRKAKGAVSNRRRREGSPPRCNIEKAPAGRMRTADGGEPAGASSPAGRVDGGLGLCMHHHIWLIK

SEQ ID NO: 773113 - protein, 273 aa, Homo sapiens
MPQLSQDNQECLQKHFSRPSIWTQFLPLFRAQRYNTDIHQITENEGDLRAVPDIKQMGSERMEMRKRQMPAAQDTPGAAPGQPGAGSRGSNACCFCWCCCCSCSCLTVRNQEDQRPTIASHELRADLPTWEESPAPTLEEVNAWAQSFDKLMVTPAGRNAFREFLRTEFSEENMLFWMACEELKKEANKNIIEEKARIIYEDYISILSPKEVSLDSRVREVINRNMVEPSQHIFDDAQLQIYTLMHRDSYPRFMNSAVYKDLLQSLSEKSIEA

SEQ ID NO: 773114 - protein, 152 aa, Homo sapiens
MKETSGLFLISSPAPTLEEVNAWAQSFDKLMVTPAGRNAFREFLRTEFSEENMLFWMACEELKKEANKNIIEEKARIIYEDYISILSPKEVSLDSRVREVINRNMVEPSQHIFDDAQLQIYTLMHRDSYPRFMNSAVYKDLLQSLSEKSIEA

SEQ ID NO: 773115 - protein, 122 aa, Homo sapiens
MVTPAGRNAFREFLRTEFSEENMLFWMACEELKKEANKNIIEEKARIIYEDYISILSPKEVSLDSRVREVINRNMVEPSQHIFDDAQLQIYTLMHRDSYPRFMNSAVYKDLLQSLSEKSIEA

SEQ ID NO: 773116 - protein, 214 aa, Homo sapiens
MADNSSDECEEENNKVLREGMPQAPGHRGKDMDPVPPAPASLKCHQTPSHVLERVGWYRESQKHRKEKKKTSQLTPQRGFSENEDDDDDDDDSSETDSDSDDDDEEHGAPLEGAYDPADYEHLPVSAEIKELFQYISRYTPQLIDLDHKLKPFIPDFIPAVGDIDAFLKVPRPDGKPDNLGLLVLDEPSTKQSDPTVLSLWLTENLAPISNEVS

SEQ ID NO: 773117 - protein, 333 aa, Homo sapiens
MADNSSDECEEENNKEKKKTSQLTPQRGFSENEDDDDDDDDSSETDSDSDDDDEEHGAPLEGAYDPADYEHLPVSAEIKELFQYISRYTPQLIDLDHKLKPFIPDFIPAVGDIDAFLKVPRPDGKPDNLGLLVLDEPSTKQSDPTVLSLWLTENSKQHNITQHMKVKSLEDAEKNPKAIDTWIESISELHRSKPPATVHYTRPMPDIDTLMQEWSPEFEELLGKVSLPTAEIDCSWESTEMICAILEIPVYKSRIQSSICSFPLSRIQNSQDLKSREEKIIFIHAAPVKWELLSETSSVLGGWPASMQCEMSGSRVGVVALKKYNGCGDRKYA

SEQ ID NO: 773118 - protein, 384 aa, Homo sapiens
MADNSSDECEEENNKVLREGMPQAPGHRGKDMDPVPPAPASLKCHQTPSHVLERVGWYRESQKHRKEKKKTSQLTPQRGFSENEDDDDDDDDSSETDSDSDDDDEEHGAPLEGAYDPADYEHLPVSAEIKELFQYISRYTPQLIDLDHKLKPFIPDFIPAVGDIDAFLKVPRPDGKPDNLGLLVLDEPSTKQSDPTVLSLWLTENSKQHNITQHMKVKSLEDAEKNPKAIDTWIESISELHRSKPPATVHYTRPMPDIDTLMQEWSPEFEELLGKVSLPTAEIDCSWRVHEMICAILEIPVYKSRIQSSICSFPLSRIQNSQDLKSREEKIIFIHAAPVKWELLSETSSVLGGWPASMQCEMSGSRVGVVALKKYNGCGDRKYA

SEQ ID NO: 773119 - protein, 289 aa, Homo sapiens
MNYSLHLAFVCLSLFTERMCIQGSQFNVEVGRSDKLSLPGFENLTAGYNKFLRPNFGGEPVQIALTLDIASISSISESNMDYTATIYLRQRWMDQRLVFEGNKSFTLDARLVEFLWVPDTYIVESKKSFLHEVTVGNRLIRLFSNGTVLYALRITTTVACNMDLSKYPMDTQTCKLQLESWGYDGNDVEFTWLRGNDSVRGLEHLRLAQYTIERYFTLVTRSQQETGNYTRLVLQFELRRNVLYFILETYVPSTFLVVLSWVSFWISLDSVPARTCIGDNKGSRRSQYY

SEQ ID NO: 773120 - protein, 440 aa, Homo sapiens
MNYSLHLAFVCLSLFTERMCIQGSQFNVEVGRSDKLSLPGFENLTAGYNKFLRPNFGGEPVQIALTLDIASISSISESNMDYTATIYLRQRWMDQRLVFEGNKSFTLDARLVEFLWVPDTYIVESKKSFLHEVTVGNRLIRLFSNGTVLYALRITTTVACNMDLSKYPMDTQTCKLQLESWGYDGNDVEFTWLRGNDSVRGLEHLRLAQYTIERYFTLVTRSQQETGNYTRLVLQFELRRNVLYFILETYVPSTFLVVLSWVSFWISLDSVPARTCIGVTTVLSMTTLMIGSRTSLPNTNCFIKAIDVYLGICFSFVFGALLEYAVAHYSSLQQMAAKDRGTTKEVEEVSITNIINSSISSFKRKISFASIEISSDNVDYSDLTMKTSDKFKFVFREKMGRIVDYFTIQNPSNVDHYSKLLFPLIFMLANVFYWAYYMYF

SEQ ID NO: 773121 - protein, 109 aa, Homo sapiens
MNYSLHLAFVCLSLFTERMCIQGSQFNVEVGRSDKLSLPGFENLTAGYNKFLRPNFGGEPVQIALTLDIASISSISESNMVSAVPLYSTQVVPLCVFKGDMLSSRSKKK

SEQ ID NO: 773122 - protein, 112 aa, Homo sapiens [sequence omitted]

SEQ ID NO: 773123 - protein, 440 aa, Homo sapiens; identical to SEQ ID NO: 773120

SEQ ID NO: 773124 - protein, 371 aa, Homo sapiens
MVTQRSSAKAHCYGVSVYRLFPALIHRLVFEGNKSFTLDARLVEFLWVPDTYIVESKKSFLHEVTVGNRLIRLFSNGTVLYALRITTTVACNMDLSKYPMDTQTCKLQLESWGYDGNDVEFTWLRGNDSVRGLEHLRLAQYTIERYFTLVTRSQQETGNYTRLVLQFELRRNVLYFILETYVPSTFLVVLSWVSFWISLDSVPARTCIGVTTVLSMTTLMIGSRTSLPNTNCFIKAIDVYLGICFSFVFGALLEYAVAHYSSLQQMAAKDRGTTKEVEEVSITNIINSSISSFKRKISFASIEISSDNVDYSDLTMKTSDKFKFVFREKMGRIVDYFTIQNPSNVDHYSKLLFPLIFMLANVFYWAYYMYF

SEQ ID NO: 773125 - protein, 349 aa, Homo sapiens
MNYSLHLAFVCLSLFTERMCIQGSQFNVEVGRSDKLSLPGFENLTAGYNKFLRPNFGGEPVQIALTLDIASISSISESNMDYTATIYLRQRWMDQRLVFEGNKSFTLDARLVEFLWVPDTYIVESKKSFLHEVTVGNRLIRLFSNGTVLYALRITTTVACNMDLSKYPMDTQTCKLQLESWGYDGNDVEFTWLRGNDSVRGLEHLRLAQYTIERYFTLVTRSQQETGNYTRLVLQFELRRNVLYFILETYVPSTFLVVLSWVSFWISLDSVPARTCIGVTTVLSMTTLMIGSRTSLPNTNCFIKAIDVYLGICFSFVFGALLEYAVAHYSSLQQMAAKDRQKICYLYAA

SEQ ID NO: 773126 - protein, 75 aa, Homo sapiens
AATPLLPTENGEGRLRVIVGREADSSSEACVGLEPPQDVTETSWQIEINEAKRKLMENILLYKEEKVDSIELFGP

SEQ ID NO: 773127 - protein, 1908 aa, Homo sapiens
RPSTRQRPRPPSPPRFSLPLRRAPASLSAARTAARALTRAAMEEVVIAGMSGKLPESENLQEFWDNLIGGVDMVTDDDRRWKAGLYGLPRRSGKLKDLSRFDASFFGVHPKQAHTMDPQLRLLLEVTYEAIVDGGINPDSLRGTHTGVWVGVSGSETSEALSRDPETLVGYSMVGCQRAMMANRLSFFFDFRGPSIALDTACSSSLMALQNAYQAIHSGQCPAAIVGGINVLLKPNTSVQFLRLGMLSPEGTCKAFDTAGNGYCRSEGVVAVLLTKKSLARRVYATILNAGTNTDGFKEQGVTFPSGDIQEQLIRSLYQSAGVAPESFEYIEAHGTGTKVGDPQELNGITRALCATRQEPLLIGSTKSNMGHPEPASGLAALAKVLLSLEHGLWAPNLHFHSPNPEIPALLDGRLQVVDQPLPVRGGNVGINSFGFGGSNVHIILRPNTQPPPAPAPHATLPRLLRASGRTPEAVQKLLEQGLRHSQDLAFLSMLNDIALSPTTAMPFRGYAVLGGERGGPEVQQVPAGERPLWFICSGMGTQWRGMGLSLMRLDRFRDSILRSDEAVNRFGLKVSQLLLSTDESTFDDIVHSFVSLTAIQIGLIDLLSCMGLRPDGIVGHSLGEVACGYADGCLSQEEAVLAAYWRGQCIKEAHLPPGAMAAVGLSWEECKQRCPPAVVPACHNSKDTVTISGPQAPVFEFVEQLRKEGVFAKEVRTGGMAFHSYFMEAIAPPLLQELKKVIREPKPRSARWLSTSIPEAQWHSSLARTSSAEYNVNNLVSPVLFQEALWHVPEHAVVLEIAPHALLQAVLKRGLKPSCTIIPLMKKDHRDNLEFFLAGIRRLHLSGIDANPNALFPPVEFPAPRGTPLISPLIKWDHSLAWDVPAAEDFPNGSGSPSAAIYNIDTSSESPDHYLVDHTLDGRVLFPATGYLSIVWKTLARPLGLGVEQLPVVFEDVVLHQATILPKTGTVSLEVRLLEASRAFEVSENGNLVVSGKVYQWDDPDPRLFDHPESPTPNPTEPLFLAQAEVYKELRLRGYDYGPHFQGILEASLEGDSGRLLWKDNWVSFMDTMLQMSILGSAKHGLYLPTRVTAIHIDPATHRQKLYTLQDKAQVADVVVSRWLRVTVAGGVHISGLHTESAPRRQQEQQVPILEKFCFTSHTEEGCLSERAALQEELQLCKGLVQALQTKVTQQGLKMVVPGLDGAQIPRDPSQQELPRLLSAACRLQLNGNLQLELAQVLAQERPKLPEDPLLSGLLDSPALKACLDTAVENMPSLKMKVVEVLAGHGHLYSRIPGLLSPHPLLQLSYTATDRHPQALEAAQAELQQHDVAQGQWDPADPAPSALGSADLLVCNCAVAALGDPASALSNMVAALREGGFLLLHTLLRGHPSGHVAFLTSTEPQYGQGILSQDAWESLFSRVSVRLVGLKKSFYGSTLFLCRRPTPQDSPIFLPVDDTSFRWVESLKGILADEDSSRPVWLKAINCATSGVVGLVNCLRREPGGTLRCVLLSNLSSTSHVPEVDPGSAELQKVLQGDLVMNVYRDGAWGAFRHFLLEEDKPEEPTAHAFVSTLTRGDLSSIRWVCSSLRHAQPTCPGAQLCTVYYASLNFRDIMLATGKLSPDAIPGKWTSQDSLLGMEFSGRDASGKRVMGLVPAKGLATSVLLSPDFLWDVPSNWTLEEAASVPVVYSTAYYALVVRGRVRPGETLLIHSGSGGVGQAAIAIALSLGCRVFTTVGSAEKRAYLQARFPQLDSTSFANSRDTSFEQHVLWHTGGKGVDLVLNSLAEEKLQASVRCLATHGRFLEIGKFDLSQNHPARHGYLPEERDIPRATQACWLRPPLGQALAQPAEWGVVGQSPRSWAPAQAHRARPHPAAPRTATRGVLPLCPAPGTNSMFGVCLCLFFKK

SEQ ID NO: 773128 - protein, 2550 aa, Homo sapiens
RPSTRQRPRPPSPPRFSLPLRRAPASLSAARTAARALTRAAMEEVVIAGMSGKLPESENLQEFWDNLIGGVDMVTDDDRRWKAGLYGLPRRSGKLKDLSRFDASFFGVHPKQAHTMDPQLRLLLEVTYEAIVDGGINPDSLRGTHTGVWVGVSGSETSEALSRDPETLVGYSMVGCQRAMMANRLSFFFDFRGPSIALDTACSSSLMALQNAYQAIHSGQCPAAIVGGINVLLKPNTSVQFLRLGMLSPEGTCKAFDTAGNGYCRSEGVVAVLLTKKSLARRVYATILNAGTNTDGFKEQGVTFPSGDIQEQLIRSLYQSAGVAPESFEYIEAHGTGTKVGDPQELNGITRALCATRQEPLLIGSTKSNMGHPEPASGLAALAKVLLSLEHGLWAPNLHFHSPNPEIPALLDGRLQVVDQPLPVRGGNVGINSFGFGGSNVHIILRPNTQPPPAPAPHATLPRLLRASGRTPEAVQKLLEQGLRHSQDLAFLSMLNDIALSPTTAMPFRGYAVLGGERGGPEVQQVPAGERPLWFICSGMGTQWRGMGLSLMRLDRFRDSILRSDEAVNRFGLKVSQLLLSTDESTFDDIVHSFVSLTAIQIGLIDLLSCMGLRPDGIVGHSLGEVACGYADGCLSQEEAVLAAYWRGQCIKEAHLPPGAMAAVGLSWEECKQRCPPAVVPACHNSKDTVTISGPQAPVFEFVEQLRKEGVFAKEVRTGGMAFHSYFMEAIAPPLLQELKKVIREPKPRSARWLSTSIPEAQWHSSLARTSSAEYNVNNLVSPVLFQEALWHVPEHAVVLEIAPHALLQAVLKRGLKPSCTIIPLMKKDHRDNLEFFLAGIRRLHLSGIDANPNALFPPVEFPAPRGTPLISPLIKWDHSLAWDVPAAEDFPNGSGSPSAAIYNIDTSSESPDHYLVDHTLDGRVLFPATGYLSIVWKTLARPLGLGVEQLPVVFEDVVLHQATILPKTGTVSLEVRLLEASRAFEVSENGNLVVSGKVYQWDDPDPRLFDHPESPTPNPTEPLFLAQAEVYKELRLRGYDYGPHFQGILEASLEGDSGRLLWKDNWVSFMDTMLQMSILGSAKHGLYLPTRVTAIHIDPATHRQKLYTLQDKAQVADVVVSRWLRVTVAGGVHISGLHTESAPRRQQEQQVPILEKFCFTSHTEEGCLSERAALQEELQLCKGLVQALQTKVTQQGLKMVVPGLDGAQIPRDPSQQELPRLLSAACRLQLNGNLQLELAQVLAQERPKLPEDPLLSGLLDSPALKACLDTAVENMPSLKMKVVEVLAGHGHLYSRIPGLLSPHPLLQLSYTATDRHPQALEAAQAELQQHDVAQGQWDPADPAPSALGSADLLVCNCAVAALGDPASALSNMVAALREGGFLLLHTLLRGHPSGHVAFLTSTEPQYGQGILSQDAWESLFSRVSVRLVGLKKSFYGSTLFLCRRPTPQDSPIFLPVDDTSFRWVESLKGILADEDSSRPVWLKAINCATSGVVGLVNCLRREPGGTLRCVLLSNLSSTSHVPEVDPGSAELQKVLQGDLVMNVYRDGAWGAFRHFLLEEDKPEEPTAHAFVSTLTRGDLSSIRWVCSSLRHAQPTCPGAQLCTVYYASLNFRDIMLATGKLSPDAIPGKWTSQDSLLGMEFSGRDASGKRVMGLVPAKGLATSVLLSPDFLWDVPSNWTLEEAASVPVVYSTAYYALVVRGRVRPGETLLIHSGSGGVGQAAIAIALSLGCRVFTTVGSAEKRAYLQARFPQLDSTSFANSRDTSFEQHVLWHTGGKGVDLVLNSLAEEKLQASVRCLATHGRFLEIGKFDLSQNHPLGMAIFLKNVTFHGVLLDAFFNESSADWREVWALVQAGIRDGVVRPLKCTVFHGAQVEDAFRYMAQGKHIGKVVVQVLAEEPEAVLKGAKPKLMSAISKTFCPAHKSYIIAGGLGGFGLELAQWLIQRGVQKLVLTSRSGIRTGYQAKQVRRWRRQGVQVQVSTSNISSLEGARGLIAEAAQLGPVGGVFNLAVVLRDGLLENQTPEFFQDVCKPKYSGTLNLDRVTREACPELDYFVVFSSVSCGRGNAGQSNYGFANSAMERICEKRRHEGLPGLAVQWGAIGDVGILVETMSTNDTIVSGTLPQRMASCLEVLDLFLNQPHMVLSSFVLAEKAAAYRDRDSQRDLVEAVAHILGIRDLAAVNLDSSLADLGLDSLMSVEVRQTLERELNLVLSVREVRQLTLRKLQELSSKADEASELACPTPKEDGLAQQQTQLNLRSLLVNPEGPTLMRLNSVQSSERPLFLVHPIEGSTTVFHSLASRLSIPTYGLQCTRAAPLDSIHSLAAYYIDCIRQVQPEGPYRVAGYSYGACVAFEMCSQLQAQQSPAPTHNSLFLFDGSPTYVLAYTQSYRAKLTPGCEAEAETEAICFFVQQFTDMEHNRVLEALLPLKGLEERVAAAVDLIIKSHQGLDRQELSFAARSFYYKLRAAEQYTPKAKYHGNVMLLRAKTGGAYGEDLGADYNLSQVCDGKVSVHVIEGDHRTLLEGSGLESIISIIHSSLAEPRVSVREG

SEQ ID NO: 773129 - protein, 2550 aa, Homo sapiens; identical to SEQ ID NO: 773128

SEQ ID NO: 773130 - protein, 2274 aa, Homo sapiens
RPSTRQRPRPPSPPRFSLPLRRAPASLSAARTAARALTRAAMEEVVIAGMSGKLPESENLQEFWDNLIGGVDMVTDDDRRWKAGLYGLPRRSGKLKDLSRFDASFFGVHPKQAHTMDPQLRLLLEVTYEAIVDGGINPDSLRGTHTGVWVGVSGSETSEALSRDPETLVGYSMVGCQRAMMANRLSFFFDFRGPSIALDTACSSSLMALQNAYQAIHSGQCPAAIVGGINVLLKPNTSVQFLRLGMLSPEGTCKAFDTAGNGYCRSEGVVAVLLTKKSLARRVYATILNAGTNTDGFKEQGVTFPSGDIQEQLIRSLYQSAGVAPESFEYIEAHGTGTKVGDPQELNGITRALCATRQEPLLIGSTKSNMGHPEPASGLAALAKVLLSLEHGLWAPNLHFHSPNPEIPALLDGRLQVVDQPLPVRGGNVGINSFGFGGSNVHIILRPNTQPPPAPAPHATLPRLLRASGRTPEAVQKLLEQGLRHSQDLAFLSMLNDIALSPTTAMPFRGYAVLGGERGGPEVQQVPAGERPLWFICSGMGTQWRGMGLSLMRLDRFRDSILRSDEAVNRFGLKVSQLLLSTDESTFDDIVHSFVSLTAIQIGLIDLLSCMGLRPDGIVGHSLGEVACGYADGCLSQEEAVLAAYWRGQCIKEAHLPPGAMAAVGLSWEECKQRCPPAVVPACHNSKDTVTISGPQAPVFEFVEQLRKEGVFAKEVRTGGMAFHSYFMEAIAPPLLQELKKVIREPKPRSARWLSTSIPEAQWHSSLARTSSAEYNVNNLVSPVLFQEALWHVPEHAVVLEIAPHALLQAVLKRGLKPSCTIIPLMKKDHRDNLEFFLAGIRRLHLSGIDANPNALFPPVEFPAPRGTPLISPLIKWDHSLAWDVPAAEDFPNGSGSPSAAIYNIDTSSESPDHYLVDHTLDGRVLFPATGYLSIVWKTLARPLGLGVEQLPVVFEDVVLHQATILPKTGTVSLEVRLLEASRAFEVSENGNLVVSGKVYQWDDPDPRLFDHPESPTPNPTEPLFLAQAEVYKELRLRGYDYGPHFQGILEASLEGDSGRLLWKDNWVSFMDTMLQMSILGSAKHGLYLPTRVTAIHIDPATHRQKLYTLQDKAQVADVVVSRWLRVTVAGGVHISGLHTESAPRRQQEQQVPILEKFCFTSHTEEGCLSERAALQEELQLCKGLVQALQTKVTQQGLKMVVPGLDGAQIPRDPSQQELPRLLSAACRLQLNGNLQLELAQVLAQERPKLPEDPLLSGLLDSPALKACLDTAVENMPSLKMKVVEVLAGHGHLYSRIPGLLSPHPLLQLSYTATDRHPQALEAAQAELQQHDVAQGQWDPADPAPSALGSADLLVCNCAVAALGDPASALSNMVAALREGGFLLLHTLLRGHPSGHVAFLTSTEPQYGQGILSQDAWESLFSRVSVRLVGLKKSFYGSTLFLCRRPTPQDSPIFLPVDDTSFRWVESLKGILADEDSSRPVWLKAINCATSGVVGLVNCLRREPGGTLRCVLLSNLSSTSHVPEVDPGSAELQKVLQGDLVMNVYRDGAWGAFRHFLLEEDKPEEPTAHAFVSTLTRGDLSSIRWVCSSLRHAQPTCPGAQLCTVYYASLNFRDIMLATGKLSPDAIPGKWTSQDSLLGMEFSGRDASGKRVMGLVPAKGLATSVLLSPDFLWDVPSNWTLEEAASVPVVYSTAYYALVVRGRVRPGETLLIHSGSGGVGQAAIAIALSLGCRVFTTVGSAEKRAYLQARFPQLDSTSFANSRDTSFEQHVLWHTGGKGVDLVLNSLAEEKLQASVRCLATHGRFLEIGKFDLSQNHPLGMAIFLKNVTFHGVLLDAFFNESSADWREVWALVQAGIRDGVVRPLKCTVFHGAQVEDAFRYMAQGKHIGKVVVQVLAEEPEAVLKGAKPKLMSAISKTFCPAHKSYIIAGGLGGFGLELAQWLIQRGVQKLVLTSRSGIRTGYQAKQVRRWRRQGVQVQVSTSNISSLEGARGLIAEAAQLGPVGGVFNLAVVLRDGLLENQTPEFFQDVCKPKYSGTLNLDRVTREACPELDYFVVFSSVSCGRGNAGQSNYGFANSAMERICEKRRHEGLPGLAVQWGAIGDVGILVETMSTNDTIVSGTLPQRMASCLEVLDLFLNQPHMVLSSFVLAEKAAAYRDRDSQRDLVEAVAHILGIRDLAAVNLDSSLADLGLDSLMSVEVRQTLERELNLVLSVREVRQLTLRKLQELSSKADEASELACPTPKEDGLAQQQTQSHPSLLAAAPSRPGIGSAR

SEQ ID NO: 773131 - protein, 390 aa, Homo sapiens
MNTTSHHIGQLRSDLDNGNNSFQYKLLGAGAGSTFIIDERTGDIYAIQKLDREERSLYILRAQVIDIATGRAVEPESEFVIKVSDINDNEPKFLDEPYEAIVPEMSPEGTLVIQVTASDADDPSSGNNARLLYSLLQGQPYFSVEPTTGVIRISSKMDRELQDEYWVIIQAKDMIGQPGALSGTTSVLIKLSDVNDNKPIFKESLYRLTVSESAPTGTSIGTIMAYDNDIGENAEMDYSIEEDDSQTFDIITNHETQEGIVILKKKVDFEHQNHYGIRAKVKNHHVPEQLMKYHTEASTTFIKIQVEDVDEPPLFLLPYYVFEVFEETPQGSFVGVVSATDPDNRKSPIRYSITRSKVFNINDNGTITTSNSLDREISAWYNLSITATEK

SEQ ID NO: 773132 - protein, 754 aa, Homo sapiens
MNCYLLLRFMLGIPLLWPCLGATERGWVWNQFFVPEEMNTTSHHIGQLRSDLDNGNNSFQYKLLGAGAGSTFIIDERTGDIYAIQKLDREERSLYILRAQVIDIATGRAVEPESEFVIKVSDINDNEPKFLDEPYEAIVPEMSPEGTLVIQVTASDADDPSSGNNARLLYSLLQGQPYFSVEPTTGVIRISSKMDRELQDEYWVIIQAKDMIGQPGALSGTTSVLIKLSDVNDNKPIFKESLYRLTVSESAPTGTSIGTIMAYDNDIGENAEMDYSIEEDDSQTFDIITNHETQEGIVILKKKVDFEHQNHYGIRAKVKNHHVPEQLMKYHTEASTTFIKIQVEDVDEPPLFLLPYYVFEVFEETPQGSFVGVVSATDPDNRKSPIRYSITRSKVFNINDNGTITTSNSLDREISAWYNLSITATEKYNIEQISSIPLYVQVLNINDHAPEFSQYYETYVCENAGSGQVIQTISAVDRDESIEEHHFYFNLSVEDTNNSSFTIIDNQDNTAVILTNRTGFNLQEEPVFYISILIADNGIPSLTSTNTLTIHVCDCGDSGSTQTCQYQELVLSMGFKTEVIIAILICIMIIFGFIFLTLGLKQRRKQILFPEKSEDFRENIFQYDDEGGGEEDTEAFDIAELRSSTIMRERKTRKTTSAEIRSLYRQSLQVGPDSAIFRKFILEKLEEANTDPCAPPFDSLQTYAFEGTGSLAGSLSSLESAVSDQDESYDYLNELGPRFKRLACMFGSAVQSNN

SEQ ID NO: 773133 - protein, 772 aa, Homo sapiens
MNCYLLLRFMLGIPLLWPCLGATENSQTKKVKQPVRSHLRVKRGWVWNQFFVPEEMNTTSHHIGQLRSDLDNGNNSFQYKLLGAGAGSTFIIDERTGDIYAIQKLDREERSLYILRAQVIDIATGRAVEPESEFVIKVSDINDNEPKFLDEPYEAIVPEMSPEGTLVIQVTASDADDPSSGNNARLLYSLLQGQPYFSVEPTTGVIRISSKMDRELQDEYWVIIQAKDMIGQPGALSGTTSVLIKLSDVNDNKPIFKESLYRLTVSESAPTGTSIGTIMAYDNDIGENAEMDYSIEEDDSQTFDIITNHETQEGIVILKKKVDFEHQNHYGIRAKVKNHHVPEQLMKYHTEASTTFIKIQVEDVDEPPLFLLPYYVFEVFEETPQGSFVGVVSATDPDNRKSPIRYSITRSKVFNINDNGTITTSNSLDREISAWYNLSITATEKYNIEQISSIPLYVQVLNINDHAPEFSQYYETYVCENAGSGQVIQTISAVDRDESIEEHHFYFNLSVEDTNNSSFTIIDNQDNTAVILTNRTGFNLQEEPVFYISILIADNGIPSLTSTNTLTIHVCDCGDSGSTQTCQYQELVLSMGFKTEVIIAILICIMIIFGFIFLTLGLKQRRKQILFPEKSEDFRENIFQYDDEGGGEEDTEAFDIAELRSSTIMRERKTRKTTSAEIRSLYRQSLQVGPDSAIFRKFILEKLEEANTDPCAPPFDSLQTYAFEGTGSLAGSLSSLESAVSDQDESYDYLNELGPRFKRLACMFGSAVQSNN

SEQ ID NO: 773134 - protein, 717 aa, Homo sapiens
MNTTSHHIGQLRSDLDNGNNSFQYKLLGAGAGSTFIIDERTGDIYAIQKLDREERSLYILRAQVIDIATGRAVEPESEFVIKVSDINDNEPKFLDEPYEAIVPEMSPEGTLVIQVTASDADDPSSGNNARLLYSLLQGQPYFSVEPTTGVIRISSKMDRELQDEYWVIIQAKDMIGQPGALSGTTSVLIKLSDVNDNKPIFKESLYRLTVSESAPTGTSIGTIMAYDNDIGENAEMDYSIEEDDSQTFDIITNHETQEGIVILKKKVDFEHQNHYGIRAKVKNHHVPEQLMKYHTEASTTFIKIQVEDVDEPPLFLLPYYVFEVFEETPQGSFVGVVSATDPDNRKSPIRYSITRSKVFNINDNGTITTSNSLDREISAWYNLSITATEKYNIEQISSIPLYVQVLNINDHAPEFSQYYETYVCENAGSGQVIQTISAVDRDESIEEHHFYFNLSVEDTNNSSFTIIDNQDNTAVILTNRTGFNLQEEPVFYISILIADNGIPSLTSTNTLTIHVCDCGDSGSTQTCQYQELVLSMGFKTEVIIAILICIMIIFGFIFLTLGLKQRRKQILFPEKSEDFRENIFQYDDEGGGEEDTEAFDIAELRSSTIMRERKTRKTTSAEIRSLYRQSLQVGPDSAIFRKFILEKLEEANTDPCAPPFDSLQTYAFEGTGSLAGSLSSLESAVSDQDESYDYLNELGPRFKRLACMFGSAVQSNN

SEQ ID NO: 773135 - protein, 207 aa, Homo sapiens
MVSSPCTPASSRTCSRILGLSLGTAALFAAGANVALLLPNWDVTYLLRGLLGRHAMLGTGLWGGGLMVLTALLSGGLALLGALICFVTSGVALKDGPFCMFDVSSFNQTQAWKYGYPFKDLHSRNYLYERFVWNSLLEPECVWTCAFFAFVIRWQVLWGVCIKAPGRLDLGSRGINSGGTRREVKEGEEKRGGGRKRGQRTDTRRNK

SEQ ID NO: 773136 - protein, 149 aa, Homo sapiens
ARGLQRGGRAALLPWRRFPCCRPRPQPARPSSRATPGPRSPGMATSIGVSFSVGDGVPEAEKNAGEPENTYILRPVFQQRRVEDGLWRGDLERAGLRGGARLGPGPRKERGGRAGSAGREAGGREAGGRPCCDVRAPLPLQGPQGTPPA

SEQ ID NO: 773137 - protein, 209 aa, Homo sapiens
MVSSPCTPASSRTCSRILGLSLGTAALFAAGANVALLLPNWDVTYLLRGLLGRHAMLGTGLWGGGLMVLTAAILISLMGWRYGCFSKSGLCRSVLTALLSGGLALLGALICFVTSGVALKDGPFCMFDVSSFNQTQAWKYGYPFKDLHSRNYLYDRSLWNSVCLEPSAAVVWHVSLFSALLCISLLQLLLVVVHVINSLLGLFCSLCEK

SEQ ID NO: 773138 - protein, 184 aa, Homo sapiens
ARGLQRGGRAALLPWRRFPCCRPRPQPARPSSRATPGPRSPGMATSIGVSFSVGDGVPEAEKNAGEPENTYILRPVFQQRFRPSVVKDCIHAVLKEELANAEYSPEEMPQLTKHLSENIKDKLKEMGFDRYKMVVQVVIGEQRGEGVFMASRCFWDADTDNYTHDVFMNDSLFCVVAAFGCFYY

SEQ ID NO: 773139 - protein, 184 aa, Homo sapiens; identical to SEQ ID NO: 773138

SEQ ID NO: 773140 - protein, 209 aa, Homo sapiens; identical to SEQ ID NO: 773137

SEQ ID NO: 773141 - protein, 183 aa, Homo sapiens [sequence omitted]

SEQ ID NO: 773142 - protein, 135 aa, Homo sapiens
LFSPSFFFYFWDGVSPCLPGWSCSELRLHHCTPALVTEQDSVSKTKTNHKLGDLETTEISHTPGGWEVQDQGRHWQIWHLVRESFWFVDGPSSVLTWWKELALCGLFYVGANFNLPKAPPLNIITLRLRISTYEF

SEQ ID NO: 773143 - protein, 173 aa, Homo sapiens
QAESSTLSSGISIGSSDGSELSEETSWPAFESSAESEDLAVHLYPGAVTIQGVLRRKTLLKEGKKPTVASWTKYWAALCGTQLFYYAAKSLKATERKHFKSTSNKNVSVIGWMVMMADDPEHPDLFLLTDSEKGNSYKFQAGNRMNAMLWFKHLSAACQSNKQQVPTNLMTFE

SEQ ID NO: 773144 - protein, 150 aa, Homo sapiens [sequence omitted]

SEQ ID NO: 773145 - protein, 209 aa, Homo sapiens
SVTHRAGQAGQPWLRHSSGLLSSWVTAYNRDSFDTTRQRLVLEIGDPEGPLLPYQAEFLVRSHDAEEVLPSTPASRFLSALGGLWEPGELQLLNVTSALDRGGRVPLPIEGRKEGLKRDLATSDIQMVHHCTIHGNTEELRQMAASREVPRPLSTLPMFNVHTVVPGPALTSSSLLCPHHEWHIPPADSSSWPSWNPGSKQAGRGGGVG

SEQ ID NO: 773146 - protein, 399 aa, Homo sapiens
LCHSPGGPGRAAMAETLFWTPLLVVLLAGLGDTEAQQTTLHPLVGRVFVHTLDHETFLSLPEHVAVPPAVHITYHAHLQGHPDLPRWLRYTQRSPHHPGFLYGSATPEDRGLQVIEVTAYNRDSFDTTRQRLVLEIGDPEGPLLPYQAEFLVRSHDAEEVLPSTPASRFLSALGGLWEPGELQLLNVTSALDRGGRVPLPIEGRKEGVYIKVGSASPFSTCLKMVASPDSHARCAQGQPPLLSCYDTLAPHFRVDWCNVTLVDKSVPEPADEVPTPGDGILEHDPFFCPPTEAPDRDFLVDALVTLLVPLLVALLLTLLLAYVMCCRREGRLKRDLATSDIQMVHHCTIHGNTEELRQMAASREVPRPLSTLPMFNVHTGERLPPRVDSAQVPLILDQH

SEQ ID NO: 773147 - protein, 263 aa, Homo sapiens
MAETLFWTPLLVVLLAGLGDTEAQQTTLHPLVGRVFVHTLDHETFLSLPEHVAVPPAVHITYHAHLQGHPDLPRWLRYTQRSPHHPGFLYGSATPEDRGLQVIEVTAYNRDSFDTTRQRLVLEIGDPEGPLLPYQAEFLVRSHDAEEVLPSTPASRFLSALGGLWEPGELQLLNVTSALDRGGRVPLPIEGRKEGLKRDLATSDIQMVHHCTIHGNTEELRQMAASREVPRPLSTLPMFNVHTGERLPPRVDSAQVPLILDQH

SEQ ID NO: 773148 - protein, 129 aa, Homo sapiens
MCLSLSPHKWWGGPQGGSEAVPGCTPGQLTPRADDSPPVPPASRWSTTAPSTGTQRSCGRWRPAARCPGHSPPCPCSMCTQVSGCLPAWTAPRCPSFWTSTDSPASGSRSSPDFILPSLSTPRVAHPTC

SEQ ID NO: 773149 - protein, 161 aa, Homo sapiens
MSVTAYNRDSFDTTRQRLVLEIGDPEGPLLPYQAEFLVRSHDAEEVLPSTPASRFLSALGGLWEPGELQLLNVTSALDRGGRVPLPIEGRKEGLKRDLATSDIQMVHHCTIHGNTEELRQMAASREVPRPLSTLPMFNVHTGERLPPRVDSAQVPLILDQH

SEQ ID NO: 773150 - protein, 510 aa, Homo sapiens
IRGRVDGAPTGPAGRPRDAPPGPSPPGARRSPTSSKFNHYLNPKGNEQTSRIGCQGLLRAGAEQALGVTVGDSGSRDSWGAVGKVPDHHAALISVKSKKAHSYHQPRSPGPDYSLRLENVPAPSRADSTSNAGGAKAEPRDRLSPESQLTEAPDRASASPRQLRSSVCERSSEFEDFWRPPSPSASPASEKSMCPSLDEAQPFPLPFKPYSWSGLAGSDLRHLVQSYRPCGALERGAGLGLFCEPAPEPGHPAALYGPKRAAGGAGAGAPGNCIAGAGATAGPGLGLYGDFGSAAAGLYEKPTAAAGLLYPERGHRLHANKGAGVKVESELLCTRLLLGGGSYKCIKCSKVFSTPHGLEVHVRRSHSGTRPFACEMCGKTFGHAVSLEQHKAVHSQERSFDCKICGKSFKRSSTLSTHLLIHSDTRPYPCQYCGKRFHQKSDMKKHTFIHTGEKPHKCQVCGKAFSQSSNLITHSRKHTGFKPFGCDLCGKGFQRKVDLRRHRETQHGLK

SEQ ID NO: 773151 - protein, 1320 aa, Homo sapiens
MQDDSIEASTSISQLLRESYLAETRHRGNNERSRAEPSSNPCHFGSPSGAAEGGGGQDDLPDLSAFLSQEELDESVNLARLAINYDPLEKADETQARKRLSPDQMKHSPNLSFEPNFCQDNPRSPTSSKESPQEAKRPQYCSETQSKKVFLNKAADFIEELSSLFKSHSSKRIRPRACKNHKSKLESQNKVMQENSSSFSDLSERRERSSVPIPIPADTRDNEVNHALEQQEAKRREAEQAASEAAGGDTTPGSSPSSLYYEEPLGQPPRFTQKLRSREVPEGTRVQLDCIVVGIPPPQVRWYCEGKELENSPDIHIVQAGNLHSLTIAEAFEEDTGRYSCFASNIYGTDSTSAEIYIEGVSSSDSEGDPNKEEMNRIQKPNEVSSPPTTSAVIPPAVPQAQHLVAQPRVATIQQCQSPTNYLQGLDGKPIIAAPVFTKMLQNLSASEGQLVVFECRVKGAPSPKVEWYREGTLIEDSPDFRILQKKPRSMAEPEEICTLVIAEVFAEDSGCFTCTASNKYGTVSSIAQLHVRGNEDLSNNGSLHSANSTTNLAAIEPQPSPPHSEPPSVEQPPKPKLEGVLVNHNEPRSSSRIGLRVHFNLPEDDKGSEASSEAGVVTTRQTRPDSFQERFNGQATKTPEPSSPVKEPPPVLAKPKLDSTQLQQLHNQVLLEQHQLQNPPPSSPKEFPFNMTVLNSNAPPAVTTSNKQVKAPSSQTFSLARPKYFFPSTNTTAATVAPSSSPVFTLSSTPQTIQRTVSKESLLVSHPSVQTKSPGGLSIQNEPLPPGPTEPTPPPFTFSIPRGNQFQPRCVSPIPVSPTSRIQNPVAFLSSVLPSLPAIPPTNAMGLPRSAPSMPSQGLAKKNTKSPQPVNDDNIRETKNAVIRDLGKKITFSDVRPNQQEYKISSFEQRLMNEIEFRLERTPVDESDDEIQHDEIPTGKCIAPIFDKRLKHFRVTEGSPVTFTCKIVGIPVPKVYWFKDGKQISKRNEHCKMRREGDGTCSLHIESTTSDDDGNYTIMAANPQGRISCSGHLMVQSLPIRSRLTSAGQSHRGRSRVQERDKEPLQERFFRPHFLQAPGDMVAHEGRLCRLDCKVSGLPPPELTWLLNGQPVLPDASHKMLVRETGVHSLLIDPLTQRDAGTYKCIATNKTGQNSFSLELSVVAKEVKKAPVILEKLQNCGVPEGHPVRLECRVIGMPPPVFYWKKDNETIPCTRERISMHQDTTGYACLLIQPAKKSDAGWYTLSAKNEAGIVSCTARLDIYAQWHHQIPPPMSVRPSGSRYGSLTSKGLDIFSAFSSMESTMVYSCSSRSVVESDEL

SEQ ID NO: 773152 - protein, 507 aa, Homo sapiens
MQDDSIEASTSISQLLRESYLAETRHRGNNERSRAEPSSNPCHFGSPSGAAEGGGGQDDLPDLSAFLSQEELDESVNLARLAINYDPLEKADETQARKRLSPDQMKHSPNLSFEPNFCQDNPRSPTSSKESPQEAKRPQYCSETQSKKVFLNKAADFIEELSSLFKSHSSKRIRPRACKNHKSKLESQNKVMQENSSSFSDLSERRERSSVPIPIPADTRDNEVNHALEQQEAKRREAEQAASEAAGGDTTPGSSPSSLYYEEPLGQPPRFTQKLRSREVPEGTRVQLDCIVVGIPPPQVRWYCEGKELENSPDIHIVQAGNLHSLTIAEAFEEDTGRYSCFASNIYGTDSTSAEIYIEGVSSSDSEGDPNKEEMNRIQKPNEVSSPPTTSAVIPPAVPQAQHLVAQPRVATIQQCQSPTNYLQGLDGKPIIAAPVFTKMLQNLSASEGQLVVFECRVKGAPSPKVEWYREGTLIEDSPDFRILQKKPRSMAEPGKDDFNFNLLVYE

SEQ ID NO: 773153 - protein, 212 aa, Homo sapiens
MLFKLLQRQTYTCLSHRYGLYVCFLGVVVTIVSAFQFGEVVLEWSRDQYHVLFDSYRDNIAGKSFQNRLCLPMPIDVVYTWVNGTDLELLKELQQVREQMEEEQKAMREILGKNTTEPTKKSEKQLECLLTHCIKVPMLVLDPALPANITLKDLPSLYPSFHSASDIFNVAKPKNPSTNVSVVVFDSTKDVEDAHSGLLKGNSRQTVWRGYL

SEQ ID NO: 773154 - protein, 71 aa, Homo sapiens
MLFKLLQRQTYTCLSHRYGLYVCFLGVVVTIVSAFQFGEVVLEWSRDQYHVLFDSYRDNIAGKSFQNRSVR

SEQ ID NO: 773155 - protein, 56 aa, Homo sapiens
MGEHGMNSAHTLYSGWKQNENPTPLAGDVEGQGRRKVLGPGLRGQGDQQKTAGRAG

SEQ ID NO: 773156 - protein, 106 aa, Homo sapiens
TLRGRYIILLYTGSNSVSENECPSGACECDLIWKYGICRCNQVKIRSYWISVGPNPVTDMAKSRSPHSYSLAGAISATQLFMFLSSRSPSLLPLFQVSLACAWTIA

SEQ ID NO: 773157 - protein, 109 aa, Homo sapiens
RPSLGVLPSLYTFRSVGTFNIIVTAENEVGSAQDSIFVYVLQLIEGLQVVGGGRYFPTNHTVQLQAVVRDGTNIYSWTAWRDRGPALAGSGKGFSLTALEAGTYHVQLR

SEQ ID NO: 773158 - protein, 104 aa, Homo sapiens
TQMQMVSIFYGEERTSQRTKSPQFRVKRCGEEWTRETFRGSGKRQCTEEPLSRNQVTPSQRIFPGLRVGQPVNLCSTRLQNDNEAVILCASHWNRNTDFHFLPL

SEQ ID NO: 773159 - protein, 68 aa, Homo sapiens
AGSSVVDTPVIMLVWERFQSLAIAPTEAPFCTLLLPCTSQTRAFRAGTFIALPSPRLPNDNIQLSRSA

SEQ ID NO: 773160 - protein, 84 aa, Homo sapiens
SQAHSLQLRWGSGCGSCSHVGEADRTFLSPIAQHPPVCHVETHLGMQVANSSEEDELVWSKWDVDVKFILCCAKYHRVSHLPHQ

SEQ ID NO: 773161 - protein, 105 aa, Homo sapiens
MSFWRGFRKLTIIAEGQGKTVTSYMARPGAKGGATHFSMTRSQGSLLTISTTAPKVDGVETMRNHPCDAVTSHKAPSPTWRITSLHEIWVGMQIEMISPGVRRRG

SEQ ID NO: 773162 - protein, 530 aa, Homo sapiens
PPPPQPQPPQQPSPPPQQPPPPPPQPPQQQQPPPQAPPMEPEAPDSRKRPLETPPEVVCTKRSNTGEEGEYFLKVLIPSYAAGSIIGKGGQTIVQLQKETGATIKLSKSKDFYPGTTERVCLVQGTAEALNAVHSFIAEKVREIPQAMTKPEVVNILQPQTTMNPDRAKQAKLIVPNSTAGLIIGKGGATVKAVMEQSGAWVQLSQKPEGINLQERVVTVSGEPEQVHKAVSAIVQKVQEDPQSSSCLNISYANVAGPVANSNPTGSPYASPADVLPAAAAASAAAASGLLGPAGLAGVGAFPAALPAFSGTDLLAISTALNTLASYGYNTNSLGLGLNSAAASGVLAAVAAGANPAAAAAANLLASYAGEAGAGPAGGAAPPPPPPPGALGSFALAAAANGYLGAGAGGGAGGGGGPLVAAAAAAGAAGGFLTAEKLAAESAKELVEIAVPENLVGAILGKGGKTLVEYQELTGARIQISKKGEFLPGTRNRRVTITGSPAATQAAQYLISQRVTYEQGVRASNPQKVG

SEQ ID NO: 773163 - protein, 516 aa, Homo sapiens
MTVGWYLHFSVPLCASVSSCVKMELIPPASPGGCEEQDEIKLTKHSAQRLIKKEGEYFLKVLIPSYAAGSIIGKGGQTIVQLQKETGATIKLSKSKDFYPGTTERVCLVQGTAEALNAVHSFIAEKVREIPQAMTKPEVVNILQPQTTMNPDRAKQAKLIVPNSTAGLIIGKGGATVKAVMEQSGAWVQLSQKPEGINLQERVVTVSGEPEQVHKAVSAIVQKVQEDPQSSSCLNISYANVAGPVANSNPTGSPYASPADVLPAAAAASAAAASGLLGPAGLAGVGAFPAALPAFSGTDLLAISTALNTLASYGYNTNSLGLGLNSAAASGVLAAVAAGANPAAAAAANLLASYAGEAGAGPAGGAAPPPPPPPGALGSFALAAAANGYLGAGAGGGAGGGGGPLVAAAAAAGAAGGFLTAEKLAAESAKELVEIAVPENLVGAILGKGGKTLVEYQELTGARIQISKKGEFLPGTRNRRVTITGSPAATQAAQYLISQRVTYEQGVRASNPQKVG

SEQ ID NO: 773164 - protein, 368 aa, Homo sapiens
PSLLLPTQAKLIVPNSTAGLIIGKGGATVKAVMEQSGAWVQLSQKPEGINLQERVVTVSGEPEQVHKAVSAIVQKVQEDPQSSSCLNISYANVAGPVANSNPTGSPYASPADVLPAAAAASAAAASGLLGPAGLAGVGAFPAALPAFSGTDLLAISTALNTLASYGYNTNSLGLGLNSAAASGVLAAVAAGANPAAAAAANLLASYAGEAGAGPAGGAAPPPPPPPGALGSFALAAAANGYLGAGAGGGAGGGGGPLVAAAAAAGAAGGFLTAEKLAAESAKELVEIAVPENLVGAILGKGGKTLVEYQELTGARIQISKKGEFLPGTRNRRVTITGSPAATQAAQYLISQRVTYEQGVRASNPQKVG

SEQ ID NO: 773165 - protein, 203 aa, Homo sapiens
MTVGWYLHFSVPLCASVSSCVKMELIPPASPGGCEEQDEIKLTKHSAQRLIKKEGEYFLKVLIPSYAAGSIIGKGGQTIVQLQKETGATIKLSKSKDFYPGTTERVCLVQGTAEALNAVHSFIAEKVREIPQAMTKPEVVNILQPQTTMNPDRAKQVSWGRDWVAVKLLTFTKKHSSHITAYCEVQWDKADKNLISQRPHGSG

SEQ ID NO: 773166 - protein, 33 aa, Homo sapiens
MRTVASTCWMPHSRCPFEFFKSLPPHVIVLMTF

SEQ ID NO: 773167 - protein, 37 aa, Homo sapiens
MDAGPLIKDISNAYLPHCSSQPAGVSSVSCTIAPAAL

SEQ ID NO: 773168 - protein, 280 aa, Homo sapiens
GRRARRAAPPSWRAVGAGARPLRGPPAAGELPGTRGFQRGKKVAPAPGAARSADAAFRAKVRRGRAGGRAGSGGSFPHQRRSLPVGGTSGVIVEETAAPSPAGLFLGVRGASPALGACGVSQPRGPERTMRGPGHPLLLGLLLVLGAAGRGRGGAEPREPADGQALLRLVVELVQELRKHHSAEHKGLQLLGRDCALGRAEAAGLGPSPEQRVEIVPRDLRMKDKFLKHLTGPLYFSPKCSKHFHRLYHNTRDCTIPAYYKRCARLLTRLAVSPVCMEDK

SEQ ID NO: 773169 - protein, 112 aa, Homo sapiens
GIFKNTIDYTFWITEKYRCTLRLPMFINMLCPLTEVTGLLELTLRSVDSHITRNVFVFSSEQTVQEQHTRSHEKCLGNQQGNRTIFIHIPSWTRDLFLQTDSSISPLSFVCC

SEQ ID NO: 773170 - protein, 98 aa, Homo sapiens
RLTSAGAGIRSSPRSEAGLGAGAPQVGRGSSEIVPRDLRMKDKFLKHLTGPLYFSPKCSKHFHRLYHNTRDCTIPAYYKRCARLLTRLAVSPVCMEDK

SEQ ID NO: 773171 - protein, 280 aa, Homo sapiens; identical to SEQ ID NO: 773168

SEQ ID NO: 773172 - protein, 95 aa, Homo sapiens
MMMTATQRARHPTQAHFKILLASSLLKFLYPKQGTQLVQISTGLQISRSKNGVFTSAPYLSLQEILGLAASDMSWNPLPEIAVFLDGLSTSSTTK

SEQ ID NO: 773173 - protein, 33 aa, Homo sapiens
GGTPWWCDPCPLDAYGPAGESRVNPDKQKHPLQ

SEQ ID NO: 773174 - protein, 159 aa, Homo sapiens
MAILADGELPPFHRRHWGPKGLENGLRSEQECGQGLAHLADPCSTVTAPQNWKLLCRQACSVSAPSVPGSPAPIRNPSASQGAGIIGMSRHAWLSSVIFTPDLVCLSPLPPHSSRVLRYPHLTWGQLWALVMLRMPRHSDHSLSYPRPFRIPSSRSLTR

SEQ ID NO: 773175 - protein, 340 aa, Homo sapiens
MPGWLTLPTLCRFLLWAFTIFHKAQGDPASHPGPHYLLPPIHEVIHSHRGATATLPCVLGTTPPSYKVRWSKVEPGELRETLILITNGLHARGYGPLGGRARMRRGHRLDASLVIAGVRLEDEGRYRCELINGIEDESVALTLSLEGVVFPYQPSRGRYQFNYYEAKQACEEQDGRLATYSQLYQAWTEGLDWCNAGWLLEGSVRYPVLTARAPCGGRGRPGIRSYGPRDRMRDRYDAFCFTSALAGQVFFVPGRLTLSEAHAACRRRGAVVAKVGHLYAAWKFSGLDQCDGGWLADGSVRFPITTPRPRCGGLPDPGVRSFGFPRPQQAAYGTYCYAEN

SEQ ID NO: 773176 - protein, 31 aa, Homo sapiens
MRDRYDAFCFTSALAGPRCLSCPGRLTLFEP

SEQ ID NO: 773177 - protein, 340 aa, Homo sapiens; identical to SEQ ID NO: 773175

SEQ ID NO: 773178 - protein, 403 aa, Homo sapiens
MPGWLTLPTLCRFLLWAFTIFHKAQGDPASHPGPHYLLPPIHEVIHSHRGATATLPCVLGTTPPSYKVRWSKVEPGELRETLILITNGLHARGYGPLGGRARMRRGHRLDASLVIAGVRLEDEGRYRCELINGIEDESVALTLSLEGEALPLPPHSCVAAGPPRLGLPGLLPSISSAPLGTPAPSPRPRRPSSPSAPIRWPSPGSPPPPGVVFPYQPSRGRYQFNYYEAKQACEEQDGRLATYSQLYQAWTEGLDWCNAGWLLEGSVRYPVLTARAPCGGRGRPGIRSYGPRDRMRDRYDAFCFTSALAGQVFFVPGRLTLSEAHAACRRRGAVVAKVGHLYAAWKFSGLDQCDGGWLADGSVRFPITTPRPRCGGLPDPGVRSFGFPRPQQAAYGTYCYAEN

SEQ ID NO: 773179 - protein, 112 aa, Homo sapiens
SRPSPPTLPSVGDPLWSPGQVFFVPGRLTLSEAHAACRRRGAVVAKVGHLYAAWKFSGLDQCDGGWLADGSVRFPITTPRPRCGGLPDPGVRSFGFPRPQQAAYGTYCYAEN

SEQ ID NO: 773180 - protein, 141 aa, Homo sapiens
MRTQAPEGRGQKLFLKGAKGATVLNRGSSSRVLRCLELPGAWQTFIQNLFLKQDKKLLSTAPSVSVKRPASNRRCRADPPSCQAGSPSPHSAASFFGPSPSSTKPKETQVRPQPRPESGGGLGRLQGWGKGKGQLLQVPRD

SEQ ID NO: 773181 - protein, 403 aa, Homo sapiens
MPGWLTLPTLCRFLLWAFTIFHKAQGDPASHPGPHYLLPPIHEVIHSHRGATATLPCVLGTTPPSYKVRWSKVEPGELRETLILITNGLHARGYGPLGGRARMRRGHRLDASLVIAGVRLEDEGRYRCELINGIEDESVALTLSLEGEALPLPPHSCVAAGPPRLGLPGLLPSISSAPLGTPAPSPRPRRPSSPSLPSAGPPQDPRHPLGVVFPYQPSRGRYQFNYYEAKQACEEQDGRLATYSQLYQAWTEGLDWCNAGWLLEGSVRYPVLTARAPCGGRGRPGIRSYGPRDRMRDRYDAFCFTSALAGQVFFVPGRLTLSEAHAACRRRGAVVAKVGHLYAAWKFSGLDQCDGGWLADGSVRFPITTPRPRCGGLPDPGVRSFGFPRPQQAAYGTYCYAEN

SEQ ID NO: 773182 - protein, 403 aa, Homo sapiens; identical to SEQ ID NO: 773181

SEQ ID NO: 773183 - protein, 293 aa, Homo sapiens
PRGTFHKGSATKPAGCQSSSKDRSAASTPSKALKFPVHPRKAVGSLAPGELALWHREWDEARTPKAKPGPSSQGSGSPRPGTKTGGGSQPQPASGQLQSEDSTTPDKPSFPSRSPAPERLPARAQAKSCTKGPREAGEQGPHGSLGPKEKGESSTKRKKGQVPGPARSESVGSFGRAPSAPDKPPRTPRKQATPSRVLPTKPKPNSQNKPRPPPSEQRKAEPGHTQRKDRLGKAFPQGRPLLRPPKRGTAVHGAEPAEPHTHRTAEAQSDLLSQLFGQRLTGFKIPLKKDASE

SEQ ID NO: 773184 - protein, 293 aa, Homo sapiens; identical to SEQ ID NO: 773183

SEQ ID NO: 773185 - protein, 71 aa, Homo sapiens
AAWRGALLYHCCACSPEPHLFLLCSAAHLNAPKQVLGTHFSKQHDERMTSKSLVLYSSLHRLIHTDLIGLT

SEQ ID NO: 773186 - protein, 87 aa, Homo sapiens
AARSAGTPFPRKSPLHWALKDKQELVTQAEEERASQAGGAAYAKARRGPRSLGSLGKCEHFGEWRLERCGEWGLVAGNEAAAGWATW

SEQ ID NO: 773187 - protein, 76 aa, Homo sapiens
RGGTAGGARLPERRPGHDPRCSVLQARRRGPPSPTAAATTTSARAGLARLGRGSAVSPPRRKRPAEVPTWGLRCPA

SEQ ID NO: 773188 - protein, 87 aa, Homo sapiens; identical to SEQ ID NO: 773186

SEQ ID NO: 773189 - protein, 76 aa, Homo sapiens; identical to SEQ ID NO: 773187

SEQ ID NO: 773190 - protein, 167 aa, Homo sapiens
RGGTAGGARLPERRPGHDPRCSVLQARRRGPPSPTAAATTHRVGAVVGPFDSRRSGARGIPAKVLRSPPKPQKKGANKNGGGKKGPGAPWAKEEVARDGGFKMSCLESSSSSHDEAPVLNDKHLDVPDIIITPPTPTGMMLPRDLGSTVWLDETGSCPDDGEIDPEA

SEQ ID NO: 773191 - protein, 173 aa, Homo sapiens
MDVTIQHPWFKRTLGPFYPSRLFDQFFGEGLFEYDLLPFLSSTISPYYRQSLFRTVLDSGISEVRSDRDKFVIFLDVKHFSPEDLTVKVQDDFVEIHGKHNERQDDHGYISREFHRRYRLPSNVDQSALSCSLSADGMLTFCGPKIQTGLDATHAERAIPVSREEKPTSAPSS

SEQ ID NO: 773192 - protein, 173 aa, Homo sapiens; identical to SEQ ID NO: 773191

SEQ ID NO: 773193 - protein, 173 aa, Homo sapiens; identical to SEQ ID NO: 773191

SEQ ID NO: 773194 - protein, 136 aa, Homo sapiens
MPVCPGDSHRPPKALPHLVCGRRGRQVRSDRDKFVIFLDVKHFSPEDLTVKVQDDFVEIHGKHNERQDDHGYISREFHRRYRLPSNVDQSALSCSLSADGMLTFCGPKIQTGLDATHAERAIPVSREEKPTSAPSS

SEQ ID NO: 773195 - protein, 173 aa, Homo sapiens; identical to SEQ ID NO: 773191

SEQ ID NO: 773196 - protein, 135 aa, Homo sapiens
MDVTIQHPWFKRTLGPFYPSRLFDQFFGEGLFEYDLLPFLSSTISPYYRQSLFRTVLDSGISEVRRGPWCWPLLAAQRVVASVGGERWTLVLLRQAGGLVPLHPLAEAGREPVSPLQPRGRASPGTGERVDKGAA

SEQ ID NO: 773197 - protein, 135 aa, Homo sapiens; identical to SEQ ID NO: 773196

SEQ ID NO: 773198 - protein, 1251 aa, Homo sapiens
MLGWVQRVLPQPPGTPRKTKMQEEEEVEPEPEMEAEVEPEPNPEEAETESESMPPEESFKEEEVAVADPSPQETKEAALTSTISLRAQGAEISEMNSPSHRVLTWLMKGVEKVIPQPVHSITEDPAQILGHGSTGDTGCTDEPNEALEAQDTRPGLRLLLWLEQNLERVLPQPPKSSEVWRDEPAVATGAASDPAPPGRPQEMGPKLQARETPSLPTPIPLQPKEEPKEAPAPEPQPGSQAQTSSLPPTRDPARLVAWVLHRLEMALPQPVLHGKIGEQEPDSPGICDVQTISILPGGQVEPDLVLEEVEPPWEDAHQDVSTSPQGTEVVPAYEEENKAVEKMPRELSRIEEEKEDEEEEEEEEEEEEEEEVTEVLLDSCVVSQVGVGQSEEDGTRPQSTSDQKLWEEVGEEAKKEAEEKAKEEAEEVAEEEAEKEPQDWAETKEEPEAEAEAASSGVPATKQHPEVQVEDTDADSCPLMAEENPPSTVLPPPSPAKSDTLIVPSSASGTHRKKLPSEDDEAEELKALSPAESPVVAWSDPTTPKDTDGQDRAASTASTNSAIINDRLQELVKLFKERTEKVKEKLIDPDVTSDEESPKPSPAKKAPEPAPDTKPAEAEPVEEEHYCDMLCCKFKHRPWKKYQFPQSIDPLTNLMYVLWLFFVVMAWNWNCWLIPVRWAFPYQTPDNIHHWLLMDYLCDLIYFLDITVFQTRLQFVRGGDIITDKKDMRNNYLKSRRFKMDLLSLLPLDFLYLKVGVNPLLRLPRCLKYMAFFEFNSRLESILSKAYVYRVIRTTAYLLYSLHLNSCLYYWASAYQGLGSTHWVYDGVGNSYIRCYYFAVKTLITIGGLPDPKTLFEIVFQLLNYFTGVFAFSVMIGQMRDVVGAATAGQTYYRSCMDSTVKYMNFYKIPKSVQNRVKTWYEYTWHSQGMLDESELMVQLPDKMRLDLAIDVNYNIVSKVALFQGCDRQMIFDMLKRLRSVVYLPNDYVCKKGEIGREMYIIQAGQVQVLGGPDGKSVLVTLKAGSVFGEISLLAVGGGNRRTANVVAHGFTNLFILDKKDLNEILVHYPESQKLLRKKARRMLRSNNKPKEEKSVLILPPRAGTPKLFNAALAMTGKMGGKGAKGGKLAHLRARLKELAALEAAAKQQELVEQAKSSQDVKGEEGSAAPDQHTHPKEAATDPPAPRTPPEPPGSPPSSPPPASLGRPEGEEEGPAEPEEHSVRICMSPGPEPGEQILSVKMPEEREEKAE

SEQ ID NO: 773199 - protein, 766 aa, Homo sapiens
MATPCQNMELNRLVQDQIPGQVASASALQNLVEHLPNVPSYRIPITRIPVLTSRRTSLSNSSFAKETRSSIRQLVPATKQHPEVQVEDTDADSCPLMAEENPPSTVLPPPSPAKSDTLIVPSSASGTHRKKLPSEDDEAEELKALSPAESPVVAWSDPTTPKDTDGQDRAASTASTNSAIINDRLQELVKLFKERTEKVKEKLIDPDVTSDEESPKPSPAKKAPEPAPDTKPAEAEPVEEEHYCDMLCCKFKHRPWKKYQFPQSIDPLTNLMYVLWLFFVVMAWNWNCWLIPVRWAFPYQTPDNIHHWLLMDYLCDLIYFLDITVFQTRLQFVRGGDIITDKKDMRNNYLKSRRFKMDLLSLLPLDFLYLKVGVNPLLRLPRCLKYMAFFEFNSRLESILSKAYVYRVIRTTAYLLYSLHLNSCLYYWASAYQGLGSTHWVYDGVGNSYIRCYYFAVKTLITIGGLPDPKTLFEIVFQLLNYFTGVFAFSVMIGQMRDVVGAATAGQTYYRSCMDSTVKYMNFYKIPKSVQNRVKTWYEYTWHSQGMLDESELMVQLPDKMRLDLAIDVNYNIVSKVALFQGCDRQMIFDMLKRLRSVVYLPNDYVCKKGEIGREMYIIQAGQVQVLGGPDGKSVLVTLKAGSVFGEISLLAVGGGNRRTANVVAHGFTNLFILDKKDLNEILVHYPESQKLLRKKARPRARKTSRERKAPPPQTSTRTQRRPPPTHPRPGRPPSPRGLHRALHRLPPLGGRRERRRGRPSPKSTR

SEQ ID NO: 773200 - protein, 368 aa, Homo sapiens
VHALCSFCRVIRTTAYLLYSLHLNSCLYYWASAYQGLGSTHWVYDGVGNSYIRCYYFAVKTLITIGGLPDPKTLFEIVFQLLNYFTGVFAFSVMIGQMRDVVGAATAGQTYYRSCMDSTVKYMNFYKIPKSVQNRVKTWYEYTWHSQGMLDESELMVQLPDKMRLDLAIDVNYNIVSKVALFQGCDRQMIFDMLKRLRSVVYLPNDYVCKKGEIGREMYIIQAGQVQVLGGPDGKSVLVTLKAGSVFGEISLLAVGGGNRRTANVVAHGFTNLFILDKKDLNEILVHYPESQKLLRKKARPRARKTSRERKAPPPQTSTRTQRRPPPTHPRPGRPPSPRGLHRALHRLPPLGGRRERRRGRPSPKSTR

SEQ ID NO: 773201 - protein, 118 aa, Homo sapiens
ADIETSNWPRNSSFGAASEKQFQTVIGKNFWVGTQVAVAVEEGCGVHSRRAPWVLHTELAVACIMVPGSSQIWIQGLQLGPFSLHPLPGPQGWFRWSPMSSHSPSQESPRASSRHKAR

SEQ ID NO: 773202 - protein, 1245 aa, Homo sapiens
MLGWVQRVLPQPPGTPRKTKMQEEEEVEPEPEMEAEVEPEPNPEEAETESESMPPEESFKEEEVAVADPSPQETKEAALTSTISLRAQGAEISEMNSPSHRVLTWLMKGVEKVIPQPVHSITEDPAQILGHGSTGDTGCTDEPNEALEAQDTRPGLRLLLWLEQNLERVLPQPPKSSEVWRDEPAVATAPPGRPQEMGPKLQARETPSLPTPIPLQPKEEPKEAPAPEPQPGSQAQTSSLPPTRDPARLVAWVLHRLEMALPQPVLHGKIGEQEPDSPGICDVQTISILPGGQVEPDLVLEEVEPPWEDAHQDVSTSPQGTEVVPAYEEENKAVEKMPRELSRIEEEKEDEEEEEEEEEEEEEEEVTEVLLDSCVVSQVGVGQSEEDGTRPQSTSDQKLWEEVGEEAKKEAEEKAKEEAEEVAEEEAEKEPQDWAETKEEPEAEAEAASSGVPATKQHPEVQVEDTDADSCPLMAEENPPSTVLPPPSPAKSDTLIVPSSASGTHRKKLPSEDDEAEELKALSPAESPVVAWSDPTTPKDTDGQDRAASTASTNSAIINDRLQELVKLFKERTEKVKEKLIDPDVTSDEESPKPSPAKKAPEPAPDTKPAEAEPVEEEHYCDMLCCKFKHRPWKKYQFPQSIDPLTNLMYVLWLFFVVMAWNWNCWLIPVRWAFPYQTPDNIHHWLLMDYLCDLIYFLDITVFQTRLQFVRGGDIITDKKDMRNNYLKSRRFKMDLLSLLPLDFLYLKVGVNPLLRLPRCLKYMAFFEFNSRLESILSKAYVYRVIRTTAYLLYSLHLNSCLYYWASAYQGLGSTHWVYDGVGNSYIRCYYFAVKTLITIGGLPDPKTLFEIVFQLLNYFTGVFAFSVMIGQMRDVVGAATAGQTYYRSCMDSTVKYMNFYKIPKSVQNRVKTWYEYTWHSQGMLDESELMVQLPDKMRLDLAIDVNYNIVSKVALFQGCDRQMIFDMLKRLRSVVYLPNDYVCKKGEIGREMYIIQAGQVQVLGGPDGKSVLVTLKAGSVFGEISLLAVGGGNRRTANVVAHGFTNLFILDKKDLNEILVHYPESQKLLRKKARRMLRSNNKPKEEKSVLILPPRAGTPKLFNAALAMTGKMGGKGAKGGKLAHLRARLKELAALEAAAKQQELVEQAKSSQDVKGEEGSAAPDQHTHPKEAATDPPAPRTPPEPPGSPPSSPPPASLGRPEGEEEGPAEPEEHSVRICMSPGPEPGEQILSVKMPEEREEKAE

SEQ ID NO: 773203 - protein, 299 aa, Homo sapiens [sequence omitted]

SEQ ID NO: 773204 - protein, 165 aa, Homo sapiens
MATPCQNMELNRLVQDQIPGQVASASALQNLVEHLPNVPSYRIPITRIPVLTSRRTSLSNSSFAKETRSSIRQLVPATKQHPEVQVEDTDADSCPLMAEENPPSTVLPPPSPAKSDTLIVPSSASGTHRKKLPSEDDEAEELKALSPAESPVVAWSDPTTPKDTE

SEQ ID NO: 773205 - protein, 515 aa, Homo sapiens
MLGWVQRVLPQPPGTPRKTKMQEEEEVEPEPEMEAEVEPEPNPEEAETESESMPPEESFKEEEVAVADPSPQETKEAALTSTISLRAQGAEISEMNSPSHRVLTWLMKGVEKVIPQPVHSITEDPAQILGHGSTGDTGCTDEPNEALEAQDTRPGLRLLLWLEQNLERVLPQPPKSSEVWRDEPAVATGAASDPAPPGRPQEMGPKLQARETPSLPTPIPLQPKEEPKEAPAPEPQPGSQAQTSSLPPTRDPARLVAWVLHRLEMALPQPVLHGKIGEQEPDSPGICDVQTISILPGGQVEPDLVLEEVEPPWEDAHQDVSTSPQGTEVVPAYEEENKAVEKMPRELSRIEEEKEDEEEEEEEEEEEEEEEVTEVLLDSCVVSQVGVGQSEEDGTRPQSTSDQKLWEEVGEEAKKEAEEKAKEEAEEVAEEEAEKEPQDWAETKEEPEAEAEAASSGGRSCPLRMMRLKSSRRCHQQSPQWLPGLTPPPRRTLSETPLGSQKIERLRGGWGMWGG

SEQ ID NO: 773206 - protein, 353 aa, Homo sapiens
HLLHKAAGERERESFWEEVASGEEPALPGTPMNAGAEEVHSDPCENNPCLHGGTCNANGTMYGCSCDQGFAGENCEIDIDDCLCSPCENGGTCIDEVNGFVCLCLPSYGGSFCEKDTEGCDRGWHKFQGHCYRYFAHRRAWEDAEKDCRRRSGHLTSVHSPEEHSFINSFGHENTWIGLNDRIVERDFQWTDNTGLQFENWRENQPDNFFAGGEDCVVMVAHESGRWNDVPCNYNLPYVCKKGTVLCGPPPAVENASLIGARKAKYNVHATVRYQCNEGFAQHHVATIRCRSNGKWDRPQIVCTKPRRSHRMRRHHHHHQHHHQHHHHKSRKERRKHKKHPTEDWEKDEGNFC

SEQ ID NO: 773207 - protein, 218 aa, Homo sapiens
AGTRRNLGIEKDCRRRSGHLTSVHSPEEHSFINSFGHENTWIGLNDRIVERDFQWTDNTGLQFENWRENQPDNFFAGGEDCVVMVAHESGRWNDVPCNYNLPYVCKKGTVLCGPPPAVENASLIGARKAKYNVHATVRYQCNEGFAQHHVATIRCRSNGKWDRPQIVCTKPRRSHRMRRHHHHHQHHHQHHHHKSRKERRKHKKHPTEDWEKDEGNFC

SEQ ID NO: 773208 - protein, 140 aa, Homo sapiens
SVARRAQWYVVPSNETASTMSCTVGNRWHHSMPEQWQVGQAPNCLHQTQTFTSDAATPPPPPTPPPASPPQIPQGAQKTQETPNGGLGEGRREFLLKNQKKESTTPFPCLLWSLRLGRQNPERNKRVQKSLNPKPHPPHT

SEQ ID NO: 773209 - protein, 1321 aa, Homo sapiens
MGAPFVWALGLLMLQMLLFVAGEQGTQDITDASERGLHMQKLGSGSVQAALAELVALPCLFTLQPRPSAARDAPRIKWTKVRTASGQRQDLPILVAKDNVVRVAKSWQGRVSLPSYPRRRANATLLLGPLRASDSGLYRCQVVRGIEDEQDLVPLEVTGVVFHYRSARDRYALTFAEAQEACRLSSAIIAAPRHLQAAFEDGFDNCDAGWLSDRTVRYPITQSRPGCYGDRSSLPGVRSYGRRNPQELYDVYCFARELGGEVFYVGPARRLTLAGARAQCRRQGAALASVGQLHLAWHEGLDQCDPGWLADGSVRYPIQTPRRRCGGPAPGVRTVYRFANRTGFPSPAERFDAYCFRAHHPTSQHGDLETPSSGDEGEILSAEGPPVRELEPTLEEEEVVTPDFQEPLVSSGEEETLILEEKQESQQTLSPTPGDPMLASWPTGEVWLSTVAPSPSDMGAGTAASSHTEVAPTDPMPRRRGRFKGLNGRYFQQQEPEPGLQGGMEASAQPPTSEAAVNQMEPPLAMAVTEMLGSGQSRSPWADLTNEVDMPGAGSAGGKSSPEPWLWPPTMVPPSISGHSRAPVLELEKAEGPSARPATPDLFWSPLEATVSAPSPAPWEAFPVATSPDLPMMAMLRGPKEWMLPHPTPISTEANRVEAHGEATATAPPSPAAETKVYSLPLSLTPTGQGGEAMPTTPESPRADFRETGETSPAQVNKAEHSSSSPWPSVNRNVAVGFVPTETATEPTGLRGIPGSESGVFDTAESPTSGLQATVDEVQDPWPSVYSKGLDASSPSAPLGSPGVFLVPKVTPNLEPWVATDEGPTVNPMDSTVTPAPSDASGIWEPGSQVFEEAESTTLSPQVALDTSIVTPLTTLEQGDKVGVPAMSTLGSSSSQPHPEPEDQVETQGTSGASVPPHQSSPLGKPAVPPGTPTAASVGESASVSSGEPTVPWDPSSTLLPVTLGIEDFELEVLAGSPGVESFWEEVASGEEPALPGTPMNAGAEEVHSDPCENNPCLHGGTCNANGTMYGCSCDQGFAGENCEIDIDDCLCSPCENGGTCIDEVNGFVCLCLPSYGGSFCEKDTEGCDRGWHKFQGHCYRYFAHRRAWEDAEKDCRRRSGHLTSVHSPEEHSFINSFGHENTWIGLNDRIVERDFQWTDNTGLQFENWRENQPDNFFAGGEDCVVMVAHESGRWNDVPCNYNLPYVCKKGTVLCGPPPAVENASLIGARKAKYNVHATVRYQCNEGFAQHHVATIRCRSNGKWDRPQIVCTKPRRSHRMRRHHHHHQHHHQHHHHKSRKERRKHKKHPTEDWEKDEGNFC

SEQ ID NO: 773210 - protein, 1321 aa, Homo sapiens; identical to SEQ ID NO: 773209

SEQ ID NO: 773211 - protein, 1275 aa, Homo sapiens
MGAPFVWALGLLMLQMLLFVAGEQGTQDITDASERGLHMQKLGSGSVQAALAELVALPCLFTLQPRPSAARDAPRIKWTKVRTASGQRQDLPILVAKDNVVRVAKSWQGRVSLPSYPRRRANATLLLGPLRASDSGLYRCQVVRGIEDEQDLVPLEVTGVVFHYRSARDRYALTFAEAQEACRLSSAIIAAPRHLQAAFEDGFDNCDAGWLSDRTVRYPITQSRPGCYGDRSSLPGVRSYGRRNPQELYDVYCFARELGGEVFYVGPARRLTLAGARAQCRRQGAALASVGQLHLAWHEGLDQCDPGWLADGSVRYPIQTPRRRCGGPAPGVRTVYRFANRTGFPSPAERFDAYCFRAHHPTSQHGDLETPSSGDEGEILSAEGPPVRELEPTLEEEEVVTPDFQEPLVSSGEEETLILEEKQESQQTLSPTPGDPMLASWPTGEVWLSTVAPSPSDMGAGTAASSHTEVAPTDPMPRRRGRFKGLNGRYFQQQEPEPGLQGGMEASAQPPTSEAAVNQMEPPLAMAVTEMLGSGQSRSPWADLTNEVDMPGAGSAGGKSSPEPWLWPPTMVPPSISGHSRAPVLELEKAEGPSARPATPDLFWSPLEATVSAPSPAPWEAFPVATSPDLPMMAMLRGPKEWMLPHPTPISTEANRVEAHGEATATAPPSPAAETKVYSLPLSLTPTGQGGEAMPTTPESPRADFRETGETSPAQVNKAEHSSSSPWPSVNRNVAVGFVPTETATEPTGLRGIPGSESGVFDTAESPTSGLQATVDEVQDPWPSVYSKGLDASSPSAPLGSPGVFLVPKVTPNLEPWVATDEGPTVNPMDSTVTPAPSDASGIWEPGSQVFEEAESTTLSPQVALDTSIVTPLTTLEQGDKVGVPAMSTLGSSSSQPHPEPEDQVETQGTSGASVPPHQSSPLGKPAVPPGTPTAASVGESASVSSGEPTVPWDPSSTLLPVTLGIEDFELEVLAGSPGVESFWEEVASGEEPALPGTPMNAGAEEVHSDPCENNPCLHGGTCNANGTMYGCSCDQGFAGENCEIDIDDCLCSPCENGGTCIDEVNGFVCLCLPSYGGSFCEKDTEGCDRGWHKFQGHCYRYFAHRRAWEDAEKDCRRRSGHLTSVHSPEEHSFINSFGHENTWIGLNDRIVERDFQWTDNTGLQFENWRENQPDNFFAGGEDCVVMVAHESGRWNDVPCNYNLPYVCKKGTVLCGPPPAVENASLIGARKAKYNVHATVRYQCNEGFAQHHVATIRCRSNGKWDRPQIVCTKRK

SEQ ID NO: 773212 - protein, 1321 aa, Homo sapiens; identical to SEQ ID NO: 773209

SEQ ID NO: 773213 - protein, 1260 aa, Homo sapiens
MGAPFVWALGLLMLQMLLFVAGEQGTQDITDASERGLHMQKLGSGSVQAALAELVALPCLFTLQPRPSAARDAPRIKWTKVRTASGQRQDLPILVAKDNVVRVAKSWQGRVSLPSYPRRRANATLLLGPLRASDSGLYRCQVVRGIEDEQDLVPLEVTGVVFHYRSARDRYALTFAEAQEACRLSSAIIAAPRHLQAAFEDGFDNCDAGWLSDRTVRYPITQSRPGCYGDRSSLPGVRSYGRRNPQELYDVYCFARELGGEVFYVGPARRLTLAGARAQCRRQGAALASVGQLHLAWHEGLDQCDPGWLADGSVRYPIQTPRRRCGGPAPGVRTVYRFANRTGFPSPAERFDAYCFRAHHPTSQHGDLETPSSGDEGEILSAEGPPVRELEPTLEEEEVVTPDFQEPLVSSGEEETLILEEKQESQQTLSPTPGDPMLASWPTGEVWLSTVAPSPSDMGAGTAASSHTEVAPTDPMPRRRGRFKGLNGRYFQQQEPEPGLQGGMEASAQPPTSEAAVNQMEPPLAMAVTEMLGSGQSRSPWADLTNEVDMPGAGSAGGKSSPEPWLWPPTMVPPSISGHSRAPVLELEKAEGPSARPATPDLFWSPLEATVSAPSPAPWEAFPVATSPDLPMMAMLRGPKEWMLPHPTPISTEANRVEAHGEATATAPPSPAAETKVYSLPLSLTPTGQGGEAMPTTPESPRADFRETGETSPAQVNKAEHSSSSPWPSVNRNVAVGFVPTETATEPTGLRGIPGSESGVFDTAESPTSGLQATVDEVQDPWPSVYSKGLDASSPSAPLGSPGVFLVPKVTPNLEPWVATDEGPTVNPMDSTVTPAPSDASGIWEPGSQVFEEAESTTLSPQVALDTSIVTPLTTLEQGDKVGVPAMSTLGSSSSQPHPEPEDQVETQGTSGASVPPHQSSPLGKPAVPPGTPTAASVGESASVSSGEPTVPWDPSSTLLPVTLGIEDFELEVLAGSPGVESFWEEVASGEEPALPGTPMNAGAEEVHSDPCENNPCLHGGTCNANGTMYGCSCDQGFAGENCEIDIDDCLCSPCENGGTCIDEVNGFVCLCLPSYGGSFCEKDTEGCDRGWHKFQGHCYRYFAHRRAWEDAEKDCRRRSGHLTSVHSPEEHSFINSFGHENTWIGLNDRIVERDFQWTDNTGLQFENWRENQPDNFFAGGEDCVVMVAHESGRWNDVPCNYNLPYVCKKGTARRSHRMRRHHHHHQHHHQHHHHKSRKERRKHKKHPTEDWEKDEGNFC

SEQ ID NO: 773214 - protein, 203 aa, Homo sapiens
MRREKSSSATRPHTLHQLCFGHENTWIGLNDRIVERDFQWTDNTGLQFENWRENQPDNFFAGGEDCVVMVAHESGRWNDVPCNYNLPYVCKKGTVLCGPPPAVENASLIGARKAKYNVHATVRYQCNEGFAQHHVATIRCRSNGKWDRPQIVCTKPRRSHRMRRHHHHHQHHHQHHHHKSRKERRKHKKHPTEDWEKDEGNFC

SEQ ID NO: 773215 - protein, 1321 aa, Homo sapiens; identical to SEQ ID NO: 773209

SEQ ID NO: 773216 - protein, 1321 aa, Homo sapiens; identical to SEQ ID NO: 773209

SEQ ID NO: 773217 - protein, 261 aa, Homo sapiens
MDEALETQLKTSRGRFSATESLPTLELLSQVDMDCRVHMRPIGLTWVLQLTLAWILLEACGGSRPLQARSQQHHGLAADLGKGKLHLAGPCCPSEMDTTETSGPGNHPERCGVPSPECESFLEHLQRALRSRFRLRLLGVRQAQPLCEELCQAWFANCEDDITCGPTWLPLSEKRGCEPSCLTYGQTFADGTDLCRSALGHALPVAAPGARHCFNISISAVPRPRPGRRGREAPSRRSRSPRTSILDAAGSGSGSGSGSGP

SEQ ID NO: 773218 - protein, 239 aa, Homo sapiens
MARQLLSQVDMDCRVHMRPIGLTWVLQLTLAWILLEACGGSRPLQARSQQHHGLAADLGKGKLHLAGPCCPSEMDTTETSGPGNHPERCGVPSPECESFLEHLQRALRSRFRLRLLGVRQAQPLCEELCQAWFANCEDDITCGPTWLPLSEKRGCEPSCLTYGQTFADGTDLCRSALGHALPVAAPGARHCFNISISAVPRPRPGRRGREAPSRRSRSPRTSILDAAGSGSGSGSGSGP

SEQ ID NO: 773219 - protein, 255 aa, Homo sapiens
MDEALETQLKTSRGRFSATESLPTLELLSQVDMDCRVHMRPIGLTWVLQLTLAWILLEACGGSRPLQARSQQHHGLAADLGKGKLHLAEMDTTETSGPGNHPERCGVPSPECESFLEHLQRALRSRFRLRLLGVRQAQPLCEELCQAWFANCEDDITCGPTWLPLSEKRGCEPSCLTYGQTFADGTDLCRSALGHALPVAAPGARHCFNISISAVPRPRPGRRGREAPSRRSRSPRTSILDAAGSGSGSGSGSGP

SEQ ID NO: 773220 - protein, 254 aa, Homo sapiens
MDCRVHMRPIGLTWVLQLTLAWILLEACGGSRPLQARSQQHHGLAADLGKGKLHLAGDPQASVPKPYLNIQDPSSQGSPLPGPCCPSEMDTTETSGPGNHPERCGVPSPECESFLEHLQRALRSRFRLRLLGVRQAQPLCEELCQAWFANCEDDITCGPTWLPLSEKRGCEPSCLTYGQTFADGTDLCRSALGHALPVAAPGARHCFNISISAVPRPRPGRRGREAPSRRSRSPRTSILDAAGSGSGSGSGSGP

SEQ ID NO: 773221 - protein, 229 aa, Homo sapiens
MDCRVHMRPIGLTWVLQLTLAWILLEACGGSRPLQARSQQHHGLAADLGKGKLHLAGPCCPSEMDTTETSGPGNHPERCGVPSPECESFLEHLQRALRSRFRLRLLGVRQAQPLCEELCQAWFANCEDDITCGPTWLPLSEKRGCEPSCLTYGQTFADGTDLCRSALGHALPVAAPGARHCFNISISAVPRPRPGRRGREAPSRRSRSPRTSILDAAGSGSGSGSGSGP

SEQ ID NO: 773222 - protein, 334 aa, Homo sapiens
MDEALGEGLNPLFPRFRLGMEPESGPILGFIYNSRLPSLGLSPKEAQKGQTPGRALGHRYHHLPLWDVWDRTSVLTLNFRTNPSETQLKTSRGRFSATESLPTLELLSQVDMDCRVHMRPIGLTWVLQLTLAWILLEACGGSRPLQARSQQHHGLAADLGKGKLHLAEMDTTETSGPGNHPERCGVPSPECESFLEHLQRALRSRFRLRLLGVRQAQPLCEELCQAWFANCEDDITCGPTWLPLSEKRGCEPSCLTYGQTFADGTDLCRSALGHALPVAAPGARHCFNISISAVPRPRPGRRGREAPSRRSRSPRTSILDAAGSGSGSGSGSGP

SEQ ID NO: 773223 - protein, 86 aa, Homo sapiens
VSAGEDSISTLGLILGVGLLLLLVSILGYSLAKWYQRGYCWEGPNFVFNLYQIRNLKDLEMGPPFTISGHISSTDGGYMKFSNGLV

SEQ ID NO: 773224 - protein, 87 aa, Homo sapiens
KGKLKPMQVALSEDDLTVLMKILLENLGEASSQPSPTQSVQETVRVRKVDVSSVPDHLKEQEDWTDSKLSMNQIVSLQFDFHFESLS

SEQ ID NO: 773225 - protein, 138 aa, Homo sapiens
TGTSCDAPAAAAAWSERASERWWVPCDGGVGDRSPRSVAGAWTPPGTLPAPSLPLPVFVPALLRGHLGPSPPLGGGCAVLATAASAPRPGRLCQCPTRVQRIGAPWPTAGGKTRDLGPSEPQGPLSWSLGLFLMPQHL

SEQ ID NO: 773226 - protein, 232 aa, Homo sapiens
VKRCVQQLGLALDFMHGRQLVHRDIKPENVLLFDRECRRVKLADFGMTRRVGCRVKRVSGTIPYTAPEVCQAGRADGLAVDTGVDVWAFGVLIFCVLTGNFPWEAASGADAFFEEFVRWQRGRLPGLPSQWRRFTEPALRMFQRLLALEPERRGPAKEVFRFLKHELTSELRRRPSHRARKPPGDRPPAAGPLRLEAPGPLKRTVLTERGSGSRPAPPADGSAPKPEPVPAP

SEQ ID NO: 773227 - protein, 69 aa, Homo sapiens
PRASASSNAQGPMACLICQHMIPQNIASDQVSDLATEVAQHGIMKSVAILLGPTTIQKAAGLIKPWNCL

SEQ ID NO: 773228 - protein, 65 aa, Homo sapiens
CSEIPGDMKGPLEDCDHELKVRLVGVIVSFSPAILSCIVVEAEEVNLTRGPNFLENTQLKRSNLP

SEQ ID NO: 773229 - protein, 98 aa, Homo sapiens
LGVPRVTTSSPRREGLCFPGGALSQPQEPLVTALTLFPHLGSALGGLHSCHAPRWPWSSTEACFGDTRGPDLSELGSCHLRAVLSESGGTAAFTHGRV

SEQ ID NO: 773230 - protein, 111 aa, Homo sapiens
MTTASTSQVRQNYHQDSEAAINRQINLELYASYVYLSMSYYFDRDDVALKNFAKYFLHQSHEEREHAEKLMKLQNQRGGRIFLQDIKKPDCDDWESGLNAMECALHLEKSV

SEQ ID NO: 773231 - protein, 111 aa, Homo sapiens; identical to SEQ ID NO: 773230

SEQ ID NO: 773232 - protein, 75 aa, Homo sapiens
VWRSEDPPLLMRWRRKYWQFLHQSHEEREHAEKLMKLQNQRGGRIFLQDIKKPDCDDWESGLNAMECALHLEKSV

SEQ ID NO: 773233 - protein, 144 aa, Homo sapiens
MRPLQRLICFCRYLRWFTFRFDLPGLSSASLMLLDAESMKLSRSRVASRTSPPSAPDSSAPAGAPVSSSSKQQPLSRAPKAPPSPSGEPPKPKGTKGCVLRSAACTAIAAAPGLSAALPVRPRQLLPAAQTQLPPRRGARGAAY

SEQ ID NO: 773234 - protein, 144 aa, Homo sapiens; identical to SEQ ID NO: 773233

SEQ ID NO: 773235 - protein, 165 aa, Homo sapiens
MGRRRRGQGAVWKEGGERGQMAPARPPRRENPQRRGTGGSRARSRSSRRGGQSGGSFWSGSSPGRSRARGTVGFPPLPAAAQRGRAPAPGVPAVRRLRRGTRREARRQARLPPPCRRRNRRGSRAVRSAARAPPPAPARRPDPAPAPARRARRSLLVPGLARCAA

SEQ ID NO: 773236 - protein, 43 aa, Homo sapiens
MWQIPIPLTSLYYVAFPGGYLMGSRDVHTTSPQLPSSDLTCTA

SEQ ID NO: 773237 - protein, 737 aa, Homo sapiens
MKKLGRIHPNRQVLAFILMVFLSQVRLEPIRYSVLEETESGSFVAHLAKDLGLGIGELASRSARVLSDDDKQRLQLDRQTGDLLLREKLDREELCGPIEPCVLHFQVFLEMPVQFFQGELLIQDINDHSPIFPEREVLLKILENSQPGTLFPLLIAEDLDVGSNGLQKYTISPNSHFHILTRNHSEGKKYPDLVQDKPLDREEQPEFSLTLVALDGGSPPRSGTVMVRILIMDINDNAPEFVHTPYGVQVLENSPLDSPIVRVLARDIDAGNFGSVSYGLFQASDEIKQTFSINEVTGEILLKKKLDFEKIKSYHVEIEATDGGGLSGKGTVVIEVVDVNDNPPELIISSLTSSIPENAPETVVSIFRIRDRDSGENGKMICSIPDNLPFILKPTLKNFYTLVTERPLDRETSAEYNITIAVTDLGTPRLKTQQNITVQVSDVNDNAPAFTQTSYTLFVRENNSPALHIGSVSATDRDSGTNAQVTYSLLPPQDPHLPLASLVSINADNGHLFALRSLDYEALQAFEFRVGASDRGSPALSSEALVRVLVLDTNDNSPFVLYPLQNGSAPCTELVPRAAEPGYLVTKVVAVDGDSGQNAWLSYQLLKATEPGLFGVWAHNGEVRTARLLSERDAAKHRLVVLVKDNGEPPRSATATLHVLLVDGFSQPYLPLPEAAPAQAQADSLTVYLVVALASVSSLFLFSVLLFVAVRLCRRSRAASVGRCSVPEGPFQGIWWT

SEQ ID NO: 773238 - protein, 529 aa, Homo sapiens
MARFPKADLAAAGVMLLCHFFTDQFQFADGKPGDQILDWQYGVTQAFPHTEEEVEVDSHAYSHRWKRNLDFLKAVDTNRASVGQDSPEPRSFTDLLLDDGQDNNTQIEEDTDHNYYISRIYGPSDSASRDLWVNIDQMEKDKVKIHGILSNTHRQAARVNLSFDFPFYGHFLREITVATGGFIYTGEVVHRMLTATQYIAPLMANFDPSVSRNSTVRYFDNGTALVVQWDHVHLQDNYNLGSFTFQATLLMDGRIIFGYKEIPVLVTQISSTNHPVKVGLSDAFVVVHRIQQIPNVRRRTIYEYHRVELQMSKITNISAVEMTPLPTCLQFNRCGPCVSSQIGFNCSWCSKLQRCSSGFDRHRQDWVDSGCPEESKEKMCENTEPVETSSRTTTTIGATTTQFRVLTTTRRAVTSQFPTSLPTEDDTKIALHLKDNGASTDDSAAEKKGGTLHAGLIVGILILVLIVATAILVTVYMYHHPTSAASIFFIERRPSRWPAMKFRRGSGHPAYAEVEPVGEKEGFIVSEQC

SEQ ID NO: 773239 - protein, 480 aa, Homo sapiens [sequence omitted]

SEQ ID NO: 773240 - protein, 375 aa, Homo sapiens
MARFPKADLAAAGVMLLCHFFTDQFQFADGKPGDQILDWQYGVTQAFPHTEEEVEVDSHAYSHRWKRNLDFLKAVDTNRASVGQDSPEPRSFTDLLLDDGQDNNTQIEEDTDHNYYISRIYGPSDSASRDLWVNIDQMEKDKVKIHGILSNTHRQAARVNLSFDFPFYGHFLREITVATGGFIYTGEVVHRMLTATQYIAPLMANFDPSVSRNSTVRYFDNGTALVVQWDHVHLQDNYNLGSFTFQATLLMDGRIIFGYKEIPVLVTQISSTNHPVKVGLSDAFVVVHRIQQIPNVRRRTIYEYHRVELQMSKITNISAVEMTPLPTCLQFNRCGPCVSSQIGFNCSWCSKLQSQKRRCVRIQNQWKLLLEPPQP

SEQ ID NO: 773241 - protein, 238 aa, Homo sapiens
MEKDKVKIHGILSNTHRQAARVNLSFDFPFYGHFLREITVATGGFIYTGEVVHRMLTATQYIAPLMANFDPSVSRNSTVRYFDNGTALVVQWDHVHLQDNYNLGSFTFQATLLMDGRIIFGYKEIPVLVTQISSTNHPVKVGLSDAFVVVHRIQQIPNVRRRTIYEYHRVELQMSKITNISAVEMTPLPTCLQFNRCGPCVSSQIGFNCSWCSKLQSQKRRCVRIQNQWKLLLEPPQP

SEQ ID NO: 773242 - protein, 498 aa, Homo sapiens [sequence omitted]

SEQ ID NO: 773243 - protein, 138 aa, Homo sapiens
MEPEVPEMSQSKTEHMKTPEEELQPESSPAETSACKDPLKPLKIRPVSQPFVNPAVKNKAEECETWIDRFRKLENALYLCDLSNTGVLEKERARRLIHNYNLIYNLSLSPQKIDQALRRFRSGENMLLEPALRYLKEL

SEQ ID NO: 773244 - protein, 263 aa, Homo sapiens
SFLGRSTDRAPLSCQGGDAALAGSEGILKGIMSSAWKTPRGSDAMPEIMVKIIGSKHFQYLVEKPKIKENDSLKTETQTMHQKPMTDNARQMSRDTPVPINFTDQQTTDNPDDVKEKKHPENNQKSENNQKLLTGANSSRFLDGNIPSQANVHCSSVPTGDQSLSYVHGIPRRKLRDWSLEQMVRGSSDQPEDIGQSPSGTTNEDAFLLALVRRELKSRPLSSNLLEKLQKELKILDPISSGFLLQSQLSRLFLKHEVPLQLP

SEQ ID NO: 773245 - protein, 348 aa, Homo sapiens
SFLGRSTDRAPLSCQGGDAALAGSEGILKGIMSSAWKTPRGSDAMPEIMVKIIGSKHFQYLVEKPKIKENDSLKTETQTMHQKPMTDNARQMSRDTPVPINFTDQQTTDNPDDVKEKKHPENNQKSENNQKLLTGANSSRFLDGNVRAICGKHGLYLTLSLLETLLNHQDLGYQNEIKWQNFVEMLTRASSDLLSDLPTGKNEKEAPAPPMEPEVPEMSQSKTEHMKTPEEELQPESSPAETSACKDPLKPLKIRPVSQPFVNPAVKNKAEECETWIDRFRKLENALYLCDLSNTGVLEKERARRLIHNYNLIYNLSLSPQKIDQALRRFRSGENMLLEPALRYLKEL

SEQ ID NO: 773246 - protein, 164 aa, Homo sapiens [sequence omitted]

SEQ ID NO: 773247 - protein, 208 aa, Homo sapiens
  misc_feature (95)..(95): Xaa can be any naturally occurring amino acid
KHLQINWTGLTNLLDAPGINDVSDSLLEDLIATHLVLPNRVTVPVKKGLDLTNLRFPLPCGVIRVHFAEAEQLARRDTFWGSEAVRSLRQGEHSXLQHFRSRTIYRNLNPTWNEVFEFMVYEVPGQDLEVDLYDEDTDRDDFLGSLQICLGDVMTNRVVDEWFVLNDTTSGRLHLRLEWLSLLTDQEVLTEDHGGLSTAILVVFLESA

SEQ ID NO: 773248 - protein, 118 aa, Homo sapiens
LCLGCWVCLVVCLSVCALDAGSVWWSVCVLDAWSAWWSVCLCLGCWICLVVCLSVSQMLGLLGGLSVCVLDAGSAWWSVCLCLGYWICLVVCLSVCVLDAGCAWWSVCLSVCALDAGS

SEQ ID NO: 773249 - protein, 71 aa, Homo sapiens
FNSPTSSPLKVTAIPRKQSSLIPLPSWQTLCHALRTTKLRDETDRRKGGWDYVYCLYSEKCSNKKREDPFL

SEQ ID NO: 773250 - protein, 37 aa, Homo sapiens
MTGLLGLEFHGAGPQCMGGVQPLVLNQPRDPSLLGCL

SEQ ID NO: 773251 - protein, 433 aa, Homo sapiens
MPDYLGADQRKTKEDEKDDKPIRALDEGDIALLKTYGQSTYSRQIKQVEDDIQQLLKKINELTGIKESDTGLAPPALWDLAADKQTLQSEQPLQVARCTKIINADSEDPKYIINVKQFAKFVVDLSDQVAPTDIEEGMRVGVDRNKYQIHIPLPPKIDPTVTMMQVEEKPDVTYSDVGGCKEQIEKLREVVETPLLHPERFVNLGIEPPKGVLLFGPPGTGKTLCARAVANRTDACFIRVIGSELVQKYVGEGARMVRELFEMARTKKACLIFFDEIDAIGGARFDDGAGGDNEVQRTMLELINQLDGFDPRGNIKVLMATNRPDTLDPALMRPGRLDRKIEFSLPDLEGRTHIFKIHARSMSVERDIRFELLARLCPNSTGAEIRSVCTEAGMFAIRARRKIATEKDFLEAVNKVIKSYAKFSATPRYMTYN

SEQ ID NO: 773252 - protein, 433 aa, Homo sapiens; identical to SEQ ID NO: 773251

SEQ ID NO: 773253 - protein, 433 aa, Homo sapiens; identical to SEQ ID NO: 773251

SEQ ID NO: 773254 - protein, 433 aa, Homo sapiens; identical to SEQ ID NO: 773251

SEQ ID NO: 773255 - protein, 457 aa, Homo sapiens
GRENTRSPVTRPRHNRAEAFGAAKMPDYLGADQRKTKEDEKDDKPIRALDEGDIALLKTYGQSTYSRQIKQVEDDIQQLLKKINELTGIKESDTGLAPPALWDLAADKQTLQSEQPLQVARCTKIINADSEDPKYIINVKQFAKFVVDLSDQVAPTDIEEGMRVGVDRNKYQIHIPLPPKIDPTVTMMQVEEKPDVTYSDVGGCKEQIEKLREVVETPLLHPERFVNLGIEPPKGVLLFGPPGTGKTLCARAVANRTDACFIRVIGSELVQKYVGEGARMVRELFEMARTKKACLIFFDEIDAIGGARFDDGAGGDNEVQRTMLELINQLDGFDPRGNIKVLMATNRPDTLDPALMRPGRLDRKIEFSLPDLEGRTHIFKIHARSMSVERDIRFELLARLCPNSTGAEIRSVCTEAGMFAIRARRKIATEKDFLEAVNKVIKSYAKFSATPRYMTYN

SEQ ID NO: 773256 - protein, 278 aa, Homo sapiens
MPDYLGADQRKTKEDEKDDKPIRALDEGDIALLKTYGQSTYSRQIKQVEDDIQQLLKKINELTGIKESDTGLAPPALWDLAADKQTLQSEQPLQVARCTKIINADSEDPKYIINVKQFAKFVVDLSDQVAPTDIEEGMRVGVDRNKYQIHIPLPPKIDPTVTMMQVEEKPDVTYSDVGGCKEQIEKLREVVETPLLHPERFVNLGIEPPKGVLLFGPPGTGKTLCARAVANRTDACFIRVIGSELVQKYVGEGLEWFVTLGMAEKKAAYFLRMGYGGA

SEQ ID NO: 773257 - protein, 459 aa, Homo sapiens
FKELGGFWRLLTRCPCNYATRCPIRASNDRRRLTEEGRRSAIRALDEWEILVLCLINLCVNAGQSTYSRQIKQVEDDIQQLLKKINELTGIKESDTGLAPPALWDLAADKQTLQSEQPLQVARCTKIINADSEDPKYIINVKQFAKFVVDLSDQVAPTDIEEGMRVGVDRNKYQIHIPLPPKIDPTVTMMQVEEKPDVTYSDVGGCKEQIEKLREVVETPLLHPERFVNLGIEPPKGVLLFGPPGTGKTLCARAVANRTDACFIRVIGSELVQKYVGEGARMVRELFEMARTKKACLIFFDEIDAIGGARFDDGAGGDNEVQRTMLELINQLDGFDPRGNIKVLMATNRPDTLDPALMRPGRLDRKIEFSLPDLEGRTHIFKIHARSMSVERDIRFELLARLCPNSTGAEIRSVCTEAGMFAIRARRKIATEKDFLEAVNKVIKSYAKFSATPRYMTYN

SEQ ID NO: 773258 - protein, 141 aa, Homo sapiens
MPDYLGADQRKTKEDEKDDKPIRALDEGDIALLKTYGQSTYSRQIKQVEDDIQQLLKKINELTGIKESDTGLAPPALWDLAADKQTLQSEQPLQVARCTKIINADSEDPKYIINVKQFAKFVVDLSDQVAPTDIEEGMRVG

SEQ ID NO: 773259 - protein, 415 aa, Homo sapiens
MPDYLGADQRKTKEDEKDDKPIRALDEGDIALLKTYGQSTYSRQIKQVEDDIQQLLKTLWDLAADKQTLQSEQPLQVARCTKIINADSEDPKYIINVKQFAKFVVDLSDQVAPTDIEEGMRVGVDRNKYQIHIPLPPKIDPTVTMMQVEEKPDVTYSDVGGCKEQIEKLREVVETPLLHPERFVNLGIEPPKGVLLFGPPGTGKTLCARAVANRTDACFIRVIGSELVQKYVGEGARMVRELFEMARTKKACLIFFDEIDAIGGARFDDGAGGDNEVQRTMLELINQLDGFDPRGNIKVLMATNRPDTLDPALMRPGRLDRKIEFSLPDLEGRTHIFKIHARSMSVERDIRFELLARLCPNSTGAEIRSVCTEAGMFAIRARRKIATEKDFLEAVNKVIKSYAKFSATPRYMTYN

SEQ ID NO: 773260 - protein, 337 aa, Homo sapiens
MCTKIINADSEDPKYIINVKQFAKFVVDLSDQVAPTDIEEGMRVGVDRNKYQIHIPLPPKIDPTVTMMQVEEKPDVTYSDVGGCKEQIEKLREVVETPLLHPERFVNLGIEPPKGVLLFGPPGTGKTLCARAVANRTDACFIRVIGSELVQKYVGEGARMVRELFEMARTKKACLIFFDEIDAIGGARFDDGAGGDNEVQRTMLELINQLDGFDPRGNIKVLMATNRPDTLDPALMRPGRLDRKIEFSLPDLEGRTHIFKIHARSMSVERDIRFELLARLCPNSTGAEIRSVCTEAGMFAIRARRKIATEKDFLEAVNKVIKSYAKFSATPRYMTYN

SEQ ID NO: 773261 - protein, 351 aa, Homo sapiens
GRVGPDAWEPLQVARCTKIINADSEDPKYIINVKQFAKFVVDLSDQVAPTDIEEGMRVGVDRNKYQIHIPLPPKIDPTVTMMQVEEKPDVTYSDVGGCKEQIEKLREVVETPLLHPERFVNLGIEPPKGVLLFGPPGTGKTLCARAVANRTDACFIRVIGSELVQKYVGEGARMVRELFEMARTKKACLIFFDEIDAIGGARFDDGAGGDNEVQRTMLELINQLDGFDPRGNIKVLMATNRPDTLDPALMRPGRLDRKIEFSLPDLEGRTHIFKIHARSMSVERDIRFELLARLCPNSTGAEIRSVCTEAGMFAIRARRKIATEKDFLEAVNKVIKSYAKFSATPRYMTYN

SEQ ID NO: 773262 - protein, 296 aa, Homo sapiens
MRVGVDRNKYQIHIPLPPKIDPTVTMMQVEEKPDVTYSDVGGCKEQIEKLREVVETPLLHPERFVNLGIEPPKGVLLFGPPGTGKTLCARAVANRTDACFIRVIGSELVQKYVGEGARMVRELFEMARTKKACLIFFDEIDAIGGARFDDGAGGDNEVQRTMLELINQLDGFDPRGNIKVLMATNRPDTLDPALMRPGRLDRKIEFSLPDLEGRTHIFKIHARSMSVERDIRFELLARLCPNSTGAEIRSVCTEAGMFAIRARRKIATEKDFLEAVNKVIKSYAKFSATPRYMTYN

SEQ ID NO: 773263 - protein, 250 aa, Homo sapiens
DDLVMYYVETPLLHPERFVNLGIEPPKGVLLFGPPGTGKTLCARAVANRTDACFIRVIGSELVQKYVGEGARMVRELFEMARTKKACLIFFDEIDAIGGARFDDGAGGDNEVQRTMLELINQLDGFDPRGNIKVLMATNRPDTLDPALMRPGRLDRKIEFSLPDLEGRTHIFKIHARSMSVERDIRFELLARLCPNSTGAEIRSVCTEAGMFAIRARRKIATEKDFLEAVNKVIKSYAKFSATPRYMTYN

SEQ ID NO: 773264 - protein, 278 aa, Homo sapiens; identical to SEQ ID NO: 773256

SEQ ID NO: 773265 - protein, 433 aa, Homo sapiens; identical to SEQ ID NO: 773251

SEQ ID NO: 773266 - protein, 433 aa, Homo sapiens; identical to SEQ ID NO: 773251

SEQ ID NO: 773267 - protein, 432 aa, Homo sapiens
MPDYLGADQRKTKEDEKDDKPIRALDEGDIALLKTYGQSTYSRQIKQVEDDIQQLLKKINELTGIKESDTGLAPPALWDLAADKQTLQSEQPLQVARCTKIINADSEDPKYIINVKQFAKFVVDLSDQVAPTDIEEGMRVGVDRNKYQIHIPLPPKIDPTVTMMQVEEKPDVTYSDVGGCKEQIEKLREVVETPLLHPERFVNLGIEPPKGVLLFGPPGTGKTLCARAVANRTDACFIRVIGSELVQKYVGEGARMVRELFEMARTKKACLIFFDEIDAIGGARFDDGAGGDNEVQRTMLELINQLDGFDPRGNIKVLMATNRPDTLDPALMRPGRLDRKIEFSLPDLEGRTHIFKIHARSMSVERDIRFELLARLCPNSTGAEIRSVCTEAGMFAIRARRKIATEKDFLEAVNKVIKSYAKFSATPRYLYY

SEQ ID NO: 773268 - protein, 444 aa, Homo sapiens
MCSRCVINSGSRLSGETKEDEKDEKAIRALDEGDIGPLFDKLMCHMLGQSTYSRQIKQVEDDIQQLLKKINELTGIKESDTGLAPPALWDLAADKQTLQSEQPLQVARCTKIINADSEDPKYIINVKQFAKFVVDLSDQVAPTDIEEGMRVGVDRNKYQIHIPLPPKIDPTVTMMQVEEKPDVTYSDVGGCKEQIEKLREVVETPLLHPERFVNLGIEPPKGVLLFGPPGTGKTLCARAVANRTDACFIRVIGSELVQKYVGEGARMVRELFEMARTKKACLIFFDEIDAIGGARFDDGAGGDNEVQRTMLELINQLDGFDPRGNIKVLMATNRPDTLDPALMRPGRLDRKIEFSLPDLEGRTHIFKIHARSMSVERDIRFELLARLCPNSTGAEIRSVCTEAGMFAIRARRKIATEKDFLEAVNKVIKSYAKFSATPRYMTYN

SEQ ID NO: 773269 - protein, 141 aa, Homo sapiens; identical to SEQ ID NO: 773258

SEQ ID NO: 773270 - protein, 296 aa, Homo sapiens; identical to SEQ ID NO: 773262

SEQ ID NO: 773271 - protein, 277 aa, Homo sapiens
MLYISVPLLVEEKPDVTYSDVGGCKEQIEKLREVVETPLLHPERFVNLGIEPPKGVLLFGPPGTGKTLCARAVANRTDACFIRVIGSELVQKYVGEGARMVRELFEMARTKKACLIFFDEIDAIGGARFDDGAGGDNEVQRTMLELINQLDGFDPRGNIKVLMATNRPDTLDPALMRPGRLDRKIEFSLPDLEGRTHIFKIHARSMSVERDIRFELLARLCPNSTGAEIRSVCTEAGMFAIRARRKIATEKDFLEAVNKVIKSYAKFSATPRYMTYN

SEQ ID NO: 773272 - protein, 178 aa, Homo sapiens
MVRELFEMARTKKACLIFFDEIDAIGGARFDDGAGGDNEVQRTMLELINQLDGFDPRGNIKVLMATNRPDTLDPALMRPGRLDRKIEFSLPDLEGRTHIFKIHARSMSVERDIRFELLARLCPNSTGAEIRSVCTEAGMFAIRARRKIATEKDFLEAVNKVIKSYAKFSATPRYMTYN

SEQ ID NO: 773273 - protein, 36 aa, Homo sapiens
MGLGNCSISKQCAVNWLPSVPLTVQRHFCPPNAYGP

SEQ ID NO: 773274 - protein, 70 aa, Homo sapiens
IFRSMCHHLDTLGNTPCWAGVSSQGLRQPSSHDFAGLSPHNCSHRIELYTGAYSFPGPVLHAASGCSSSP

SEQ ID NO: 773275 - protein, 95 aa, Homo sapiens
PQVLHPVLTPPPAGPHAQLPVEGPGSLSHSVSAAAVNAHRETGTLTPASTLPQLTSLHPSTLPLHHHCRCWHMQARMDLLPPSYKMVWLAPSIRV

SEQ ID NO: 773276 - protein, 192 aa, Homo sapiens
MLWGSSTQLASDGSPKGSSPESYIHGIAESQLRYIQQGIFSVTNPHPEIFLVARIEKVLQGNITHCAEPYIKNSDPVKTAQKVHRTAKQVCSRLGQYRMPFAWAARPIFKDTQGSLDLDGRFSPLYKQDSSKLSSEDILKLLSEYKKPEKTKLQIIPGQLNITVECVPVDLSTCFFPCYRLYYFFICALEAF

SEQ ID NO: 773277 - protein, 78 aa, Homo sapiens
LAYRACGRSCCFSTHPPFPLLVSEGEPASRPEVEHSSSLLSPAGSPNSALQWLPGHPRNPAEPAPPGPGPLCCSVLHP

SEQ ID NO: 773278 - protein, 60 aa, Homo sapiens
MTVPWGNYRDFLDTQTSGPQRGFGSRSLSLKEPIQNFSVTLSDDIHLAVGSPSTLNEDMV

SEQ ID NO: 773279 - protein, 248 aa, Homo sapiens
MSLFPSLPLLLLSMVAASYSETVTCEDAQKTCPAVIACSSPGINGFPGKDGRDGTKGEKGEPGQGLRGLQGPPGKLGPPGNPGPSGSPGPKGQKGDPGKSPDGDSSLAASERKALQTEMARIKKWLTFSLGKQVGNKFFLTNGEIMTFEKVKALCVKFQASVATPRNAAENGAIQNLIKEEAFLGITDEKTEGQFVDLTGNRLTYTNWNEGEPNNAGSDEDCVLLLKNGQWNDVPCSTSHLAVCEFPI

SEQ ID NO: 773280 - protein, 230 aa, Homo sapiens
MSLFPSLPLLLLSMVAASYSETVTCEDAQKTCPAVIACSSPGINGFPGKDGRDGTKGEKGEPGQGLRGLQGPPGKLGPPGNPGPSGSPGPKGQKGDPGKSPDGDSSLAASERKALQTEMARIKKWLTFSLGKQVGNKFFLTNGEIMTFDAAENGAIQNLIKEEAFLGITDEKTEGQFVDLTGNRLTYTNWNEGEPNNAGSDEDCVLLLKNGQWNDVPCSTSHLAVCEFPI

SEQ ID NO: 773281 - protein, 248 aa, Homo sapiens; identical to SEQ ID NO: 773279

SEQ ID NO: 773282 - protein, 248 aa, Homo sapiens; identical to SEQ ID NO: 773279

SEQ ID NO: 773283 - protein, 108 aa, Homo sapiens
GVPGHRAKPPWSPSGSRLCAAPECDALGPPLSQAESCTHTLRLHFLLQRISLMLTSSMETWGTPPSASSMSSLGSSLALTHTGKDFSFSWEGWLAEGWWILELDQQLA

SEQ ID NO: 773284 - protein, 122 aa, Homo sapiens
SSIANMVNVPKTRRAFCKKCGKHQPYKVPQYKGKDSSYAQGKMRCDQKQSGYGGQTKLIFWKKAETTQMIVLRLECREPNCRSKGMLAIQKCKLFFFFKTGPHSVSQAGVQSWLTAALTSLA

SEQ ID NO: 773285 - protein, 293 aa, Homo sapiens
MPTSSSFKHRIKEQEDYIRDWTAHREEIARISQDLALIAREINDVAGEIDSVTSSGTAPSTTLVDRVFDESLNFQKIPPLVHSKTPEGNNGRSGDPRPQAAEPPDHLTITRRRTWSRDEVMGDNLLLSSVFQFSKKIRQSIDKTAGKIRILFKDKDRNWDDIESKLRAESEVPIVKTSSMEISSILQELKRVEKQLQAINAMIDPDGTLEALNNMGFPSAMLPSPPKQKSSPVNNHHSPGQTPTLGQPEARALHPAAVSAAAEFENAESEADFSIHFNRVNPDGEEEDVTVHK

SEQ ID NO: 773286 - protein, 412 aa, Homo sapiens
IDLLAQPRRTRLGSLSARSDSEATISRSSASSRTAEAIIRSGARLVPSDKFSPRIRANSISRLSDSKVKSMTSAHGSASALKTTRLQSAGSAMPTSSSFKHRIKEQEDYIRDWTAHREEIARISQDLALIAREINDVAGEIDSVTSSGTAPSTTVSTAATTPGSAIDTREEVGDLHGEMHKLVDRVFDESLNFQKIPPLVHSKTPEGNNGRSGDPRPQAAEPPDHLTITRRRTWSRDEVMGDNLLLSSVFQFSKKIRQSIDKTAGKIRILFKDKDRNWDDIESKLRAESEVPIVKTSSMEISSILQELKRVEKQLQAINAMIDPDGTLEALNNMGFPSAMLPSPPKQKSSPVNNHHSPGQTPTLGQPEARALHPAAVSAAAEFENAESEADFSIHFNRVNPDGEEEDVTVHK

SEQ ID NO: 773287 - protein, 402 aa, Homo sapiens
IDLLAQPRRTRLGSLSARSDSEATISRSSASSRTAEAIIRSGARLVPSDKFSPRIRANSISRLSDSKVKSMTSAHGSASALKTTRLQSAGSAMPTSSSFKHRIKEQEDYIRDWTAHREEIARISQDLALIAREINDVAGEIDSVTSSGTAPSTTVSTAATTPGSAIDTREELVDRVFDESLNFQKIPPLVHSKTPEGNNGRSGDPRPQAAEPPDHLTITRRRTWSRDEVMGDNLLLSSVFQFSKKIRQSIDKTAGKIRILFKDKDRNWDDIESKLRAESEVPIVKTSSMEISSILQELKRVEKQLQAINAMIDPDGTLEALNNMGFPSAMLPSPPKQKSSPVNNHHSPGQTPTLGQPEARALHPAAVSAAAEFENAESEADFSIHFNRVNPDGEEEDVTVHK

SEQ ID NO: 773288 - protein, 129 aa, Homo sapiens
RSLGEKIMEQVSGKLDSIPYLPPTSCGTPGKVILPLSLSFLIEKSRMTRCSFQALKSRDRVSSRGQVGFKLLTSSDPPISASQSARIIDVSPRAQLILHFQLSVSLDCLLPTLYPLTDSVQSPTPNSKI

SEQ ID NO: 773289 - protein, 890 aa, Homo sapiens
PADPSVTPLCRPQNQPRQLAPTLPPIGQAARGRGPESWSLCWARTPSLRWQQSRAVGAAAIGRGVARAGLQELPGGSGAKKWEEGKKAGGIWGQARGQPALKYAEGLLPAPGIRGERASQKFGCSCPGGVDGCAPRAARGLSGRHFPSGPAFVSGISSSCCVWPPTAAAAAETLARTKEEETAGAAAALGPGGTMGNGMCSRKQKRIFQTLLLLTVVFGFLYGAMLYYELQTQLRKAEAVALKYQQHQESLSAQLQVVYEHRSRLEKSLQKERLEHKKAKEDFLVYKLEAQETLNKGRQDSNSRYSALNVQHQMLKSQHEELKKQHSDLEEEHRKQGEDFSRTFNDHKQKYLQLQQEKEQELSKLKETVYNLREENRQLRKAHQDIHTQLQDVKQQHKNLLSEHEQLVVTLEDHKSALAAAQTQVAEYKQLKDTLNRIPSLRKPDPAEQQNVTQVAHSPQGYNTAREKPTREVQEVSRNNDVWQNHEAVPGRAEDTKLYAPTHKEAEFQAPPEPIQQEVERREPEEHQVEEEHRKALEEEEMEQVGQAEHLEEEHDPSPEEQDREWKEQHEQREAANLLEGHARAEVYPSAKPMIKFQSPYEEQLEQQRLAVQQVEEAQQLREHQEALHQQRLQGHLLRQQEQQQQQVAREMALQRQAELEEGRPQHQEQLRQQAHYDAMDNDIVQGAEDQGIQGEEGAYERDNQHQDEAEGDPGNRHEPREQGPREADPESEADRAAVEDINPADDPNNQGEDEFEEAEQVREENLPDENEEQKQSNQKQENTEVEEHLVMAGNPDQQEDNVDEQYQEEAEEEVQEDLTEEKKRELEHNAEETYGENDENTDDKNNDGEEQEVRDDNRPKGREEHYEEEEEEEEDGAAVAEKSHRRAEM

SEQ ID NO: 773290 - protein, 577 aa, Homo sapiens [sequence omitted]

SEQ ID NO: 773291 - protein, 362 aa, Homo sapiens
METDAPQPGLASPDSPHDPCKMFIGGLSWQTTQEGLREYFGQFGEVKECLVMRDPLTKRSRGFGFVTFMDQAGVDKVLAQSRHELDSKTIDPKVAFPRRAQPKMVTRTKKIFVGGLSVNTTVEDVKQYFEQFGKVDDAMLMFDKTTNRHRGFGFVTFESEDIVEKVCEIHFHEINNKMVECKKAQPKEVMSPTGSARGRSRVMPYGMDAFMLGIGMLGYPGFQATTYASRSYTGLAPGYTYQFPEFRVERTPLPSAPVLPELTAIPLTAYGPMAAAAAAAAVVRGTGSHPWTMAPPPGSTPSRTGGFLGTTSPGPMAELYGAANQDSGVSSYISAASPAPSTGFGHSLGGPLIATAFTNGYH

SEQ ID NO: 773292 - protein, 69 aa, Homo sapiens
AEDRTLSYGVSWIHTEPIHGQMHHHYFYTTKKGETLPIKTMTLKSKAINDKTILMSVQLSVRNVHLGIH

SEQ ID NO: 773293 - protein, 890 aa, Homo sapiens
MSRSATLLLCLLGCHVWKAVTKTLREPGAGAQEVTLKVHISDASTHQPVADALIEIFTNQASIASGTSGTDGVAFIKFQYKLGSQLIVTASKHAYVPNSAPWKPIRLPVFSSLSLGLLPERSATLMVYEDVVQIVSGFQGARPQPRVHFQRRALRLPENTSYSDLTAFLTAASSPSEVDSFPYLRGLDGNGTGNSTRHDLTPVTAVSVHLLSSNGTPVLVDGPIYVTVPLATQSSLRHNAYVAAWRFDQKLGTWLKSGLGLVHQEGSQLTWTYIAPQLGYWVAAMSPPIPGPVVTQDITTYHTVFLLAILGGMAFILLVLLCLLLYYCRRKCLKPRQHHRKLQLPAGLESSKRDQSTSMSHINLLFSRRASEFPGPLSVTSHGRPEAPGTKELMSGVHLEMMSPGGEGDLHTPMLKLSYSTSQEFSSREELLSCKEEDKSQISFDNLTPSGTLGKDYHKSVEVFPLKARKSMEREGYESSGNDDYRGSYNTVLSQPLFEKQDREGPASTGSKLTIQEHLYPAPSSPEKEQLLDRRPTECMMSRSVDHLERPTSFPRPGQLICCSSVDQVNDSVYRKVLPALVIPAHYMKLPGDHSYVSQPLVVPADQQLEIERLQAELSNPHAGIFPHPSSQIQPQPLSSQAISQQHLQDAGTREWSPQNASMSESLSIPASLNDAALAQMNSEVQLLTEKALMELGGGKPLPHPRAWFVSLDGRSNAHVRHSYIDLQRAGRNGSNDASLDSGVDMNEPKSARKGRGDALSLQQNYPPVQEHQQKEPRAPDSTAYTQLVYLDDVEQSGSECGTTVCTPEDSALRCLLEGSSRRSGGQLPSLQEETTRRTADAPSEPAASPHQRRSAHEEEEDDDDDDQGEDKKSPWQKREERPLMAFNIK

SEQ ID NO: 773294 - protein, 890 aa, Homo sapiens; identical to SEQ ID NO: 773293

SEQ ID NO: 773295 - protein, 844 aa, Homo sapiens
AAEMSRSATLLLCLLGCHVWKAVTKTLREPGAGAQEVTLKVHISDASTHQPVADALIEIFTNQASIASGTSGTDGVAFIKFQYKLGSQLIVTASKHAYVPNSAPWKPIRLPVFSSLSLGLLPERSATLMVYEDVVQIVSGFQGARPQPRVHFQRRALRLPENTSYSDLTAFLTAASSPSEVDSFPYLRGLDGNGTGNSTRHDLTPVTAVSVHLLSSNGTPVLVDGPIYVTVPLATQSSLRHNAYVAAWRFDQKLGTWLKSGLGLVHQEGSQLTWTYIAPQLGYWVAAMSPPIPGPVVTQDITTYHTVFLLAILGGMAFILLVLLCLLLYYCRRKCLKPRQHHRKLQLPAGLESSKRDQSTSMSHINLLFSRRASEFPGPLSVTSHGRPEAPGTKELMSGVHLEMMSPGGEGDLHTPMLKLSYSTSQEFSSREELLSCKEEDKSQISFDNLTPSGTLGKDYHKSVEVFPLKARKSMEREGYESSGNDDYRGSYNTVLSQPLFEKQDREGPASTGSKLTIQEHLYPAPSSPEKEQLLDRRPTECMMSRSVDHLERPTSFPRPGQLICCSSVDQVNDSVYRKVLPALVIPAHYMKLPGDHSYVSQPLVVPADQQLEIERLQAELSNPHAGIFPHPSSQIQPQPLSSQAISQQHLQDAGTREWSPQNASMSESLSIPASLNDAALAQMNSEVQLLTEKALMELGGGKPLPHPRAWFVSLDGRSNAHVRHSYIDLQRAGRNGSNDASLDSGVDMNEPKSARKGRGDALSLQQNYPPVQEHQQKEPRAPDSTAYTQLVYLDDVEQSGSECGTTVCTPEDSALRCLLEGSSRRKWCPDVLPRTRRIRHQGH

SEQ ID NO: 773296 - protein, 327 aa, Homo sapiens
  misc_feature (298)..(298): Xaa can be any naturally occurring amino acid
  misc_feature (300)..(300): Xaa can be any naturally occurring amino acid
  misc_feature (313)..(313): Xaa can be any naturally occurring amino acid
AAEMSRSATLLLCLLGCHVWKAVTKTLREPGAGAQEVTLKVHISDASTHQPVADALIEIFTNQASIASGTSGTDGVAFIKFQYKLGSQLIVTASKHAYVPNSAPWKPIRLPVFSSLSLGLLPERSATLMVYEDVVQIVSGFQGARPQPRVHFQRRALRLPENTSYSDLTAFLTAASSPSEVDSFPYLRGLDGNGTGNSTRHDLTPVTAVSVHLLSSNGTPVLVDGPIYVTVPLATQSSLRHNAYVAAWRFDQKLGTWLKSGLGLVHQEGSQLTWTYIAPQLGYWVGPANVSLPISQGXRXLTTRDILPPFFNXGGVFFGPFFKGGKG

SEQ ID NO: 773297 - protein, 505 aa, Homo sapiens
LPAPGLLGCSPTTAQPCHTPRPRPPQLGMGAGVLVLGASEPGNLSSAAPLPDGAATAARLLVPASPPASLLPPASESPEPLSQQWTAGMGLLMALIVLLIVAGNVLVIVAIAKTPRLQTLTNLFIMSLASADLVMGLLVVPFGATIVVWGRWEYGSFFCELWTSVDVLCVTASIETLCVIALDRYLAITSPFRYQSLLTRARARGLVCTVWAISALVSFLPILMHWWRAESDEARRCYNDPKCCDFVTNRAYAIASSVVSFYVPLCIMAFVYLRVFREAQKQVKKIDSCERRFLGGPARPPSPSPSPVPAPAPPPGPPRPAAAAATAPLANGRAGKRRPSRLVALREQKALKTLGIIMGVFTLCWLPFFLANVVKAFHRELVPDRLFVFFNWLGYANSAFNPIIYCRSPDFRKAFQGLLCCARRAARRRHATHGDRPRASGCLARPGPPPSPGAASDDDDDDVVGATPPARLLEPWAGCNGGAAADSDSSLDEPCRPGFASESKV

SEQ ID NO: 773298 - protein, 130 aa, Homo sapiens
AAAAADPPRCWPRRWAWAAACPGVPGDCGAATAPSPTRPSAAARPAAPPPRSADLHARTPGHPDKLRRGADRPTDRGRRLEGLRIRRKRQLGARGPVEEAELLPTPQNLHSMDLDLWIRLSPWALPSGRR

SEQ ID NO: 773299 - protein, 130 aa, Homo sapiens; identical to SEQ ID NO: 773298

SEQ ID NO: 773300 - protein, 104 aa, Homo sapiens
AAAAADPPRCWPRRWAWAAACPGVPGDCGAATAPSPTRPSAAARPAAPPPRSADLHARTPGHPDKLRRGADRPTDRGRRLEGLRIRRKRQLGARGPVEEAEVRS

SEQ ID NO: 773301 - protein, 103 aa, Homo sapiens
AAAADPPRCWPRRWAWAAACPGVPGDCGAATAPSPTRPSAAARPAAPPPRSADLHARTPGHPDKLRRGADRPTDRGRRLEGLRIRRKRQLGARGPVEEAEVRS

SEQ ID NO: 773302 - protein, 232 aa, Homo sapiens
MTKKKVSQKKQRGRPSSQPCRNIVGCRISHGWKEGDEPITQWKGTVLDQVPINPSLYLVKYDGIDCVYGLELHRDERVLSLKILSDRVASSHISDANLANTIIGKAVEHMFEGEHGSKDEWRGMVLAQAPIMKAWFYITYEKDPVLYMYQLLDDYKEGDLRIMPESSESPPTEREPGGVVDGLIGKHVEYTKEDGSKRIGMVIHQVETKPSVYFIKFDDDFHIYVYDLVKKS

SEQ ID NO: 773303 - protein, 104 aa, Homo sapiens
LTGISLFFLFSISPPPLPPTPISPPNYCQTDCPLHSQTISCYSLPPAEFIHLQIPSTSTIPNCSQFSKHSLLFSTLWLCTLLSLPIMLSLPPHPPGEELILKTW

SEQ ID NO: 773304 - protein, 140 aa, Homo sapiens
APGPHIGILPSLASTFVTIRSFAHIDTILLRMLSFVALCILGKSRIKSLLGVVGCLVVVRSSALTLSPGPPIQTFEISIPSNSDGQKCIESLLCSSRVVNTRDTAGNQQGCLSSPSLYSHGGKIINYISVCLYRERGKRE

SEQ ID NO: 773305 - protein, 67 aa, Homo sapiens
LLEEPRLGFFESLTHLIGNLEKYSFKSYIRTIQYVVENEVKIGSMGFCFLLFAGIIESYITELKEKY

SEQ ID NO: 773306 - protein, 88 aa, Homo sapiens [sequence omitted]

SEQ ID NO: 773307 - protein, 137 aa, Homo sapiens [sequence omitted]

SEQ ID NO: 773308 - protein, 275 aa, Homo sapiens
WEVGAAAVSAFAMRPGAPGPLWPLPWGALAWAVGFVSSMGSGNPAPGGVCWLQQGQEATCSLVLQTDVTRAECCASGNIDTAWSNLTHPGNKINLLGFLGLVHCLPCKDSCDGVECGPGKACRMLGGRPRCECAPDCSGLPARLQVCGSDGATYRDECELRAARCRGHPDLSVMYRGRCRKSCEHVVCPRPQSCVVDQTGSAHCVVCRAAPCPVPSSPGQELCGNNNVTYISSCHMRQATCFLGRSIGVRHAGSCAGTPEEPPGGESAEEEENFV

SEQ ID NO: 773309 - protein, 275 aa, Homo sapiens; identical to SEQ ID NO: 773308

SEQ ID NO: 773310 - protein, 152 aa, Homo sapiens [sequence omitted]

SEQ ID NO: 773311 - protein, 107 aa, Homo sapiens
LVLTRELWDVGLKSCEHVVCPRPQSCVVDQTGSAHCVVCRAAPCPVPSSPGQELCGNNNVTYISSCHMRQATCFLGRSIGVRHAGSCAGTPEEPPGGESAEEEENFV

SEQ ID NO: 773312 - protein, 275 aa, Homo sapiens; identical to SEQ ID NO: 773308

SEQ ID NO: 773313 - protein, 275 aa, Homo sapiens; identical to SEQ ID NO: 773308

SEQ ID NO: 773314 - protein, 275 aa, Homo sapiens; identical to SEQ ID NO: 773308

SEQ ID NO: 773315 - protein, 275 aa, Homo sapiens; identical to SEQ ID NO: 773308

SEQ ID NO: 773316 - protein, 275 aa, Homo sapiens; identical to SEQ ID NO: 773308

SEQ ID NO: 773317 - protein, 171 aa, Homo sapiens
MRQRRVVSDVEQPAAAQSRALCPAEPSPLWGSSGGDHGPLLTHWPRGGCRRQDSRMCDIRSPGAGCPSGTTRCLLPPQWGSHPGLLGPPQPAPARPADPDSSQTCLTHQCSRGWRHQPGAGLGPVLPRRLTLPSICVDAQNRLPVPACKPQPQTSYGERTTRRISSFPGLG

SEQ ID NO: 773318 - protein, 275 aa, Homo sapiens
WEVGAAAVSAFAMRPGAPGPLWPLPWGALAWAVGFVSSMGSGNPAPGGVCWLQQGQEATCSLVLQTDVTRAECCASGNIDTAWSNLTHPGNKINLLGFLGLVHCLPCKDSCDGVECGPGKACRMLGGRPRCECAPDCSGLPARLQVCGSDGATYRDECELRAARCRGHPDLSVMYRGRCRKSCEHVVCPRPQSCVVDQTGSAHCVVCRAAPCPVPSSPGQELCGNNNVTYISSCHMRQATCFLGRSIGVRHAGSCAGTPEEPPGAESNLYATDTP

SEQ ID NO: 773319 - protein, 115 aa, Homo sapiens
WEVGAAAVSAFAMRPGAPGPLWPLPWGALAWAVGFVSSMGSGNPAPGGVCWLQQGQEATCSLVLQTDVTRAECCASGNIDTAWSNLTHPGNKINLPDDILEGLRKGGLGAGWWVG

SEQ ID NO: 773320 - protein, 275 aa, Homo sapiens; identical to SEQ ID NO: 773308

SEQ ID NO: 773321 - protein, 275 aa, Homo sapiens; identical to SEQ ID NO: 773308

SEQ ID NO: 773322 - protein, 248 aa, Homo sapiens
WEVGAAAVSAFAMRPGAPGPLWPLPWGALAWAVGFVSSMGSGNPAPGGVCWLQQGQEATCSLVLQTDVTRAECCASGNIDTAWSNLTHPGNKINLLGFLGLVHCLPCKDSCDGVECGPGKACRMLGGRPRCECAPDCSGLPARLQVCGSDGATYRDECELRAARCRGHPDLSVMYRGRCRKSCEHVVCPRPQSCVVDQTGSAHCVVCRAAPCPVPSSPGQELCGNNNVTYISSSPQAVPYLWCPEKCP

SEQ ID NO: 773323 - protein, 109 aa, Homo sapiens
VGSGPPLASEWEGSRLGVWLSFLGKYKLELGPRYLWEKLVVPLPIRVTHEVAVPGFLRPGRLSLASSQPQSHRFRQEGPYGSPALTHIPTLHPHPAPVMAPPEHEHSPS

SEQ ID NO: 773324 - protein, 35 aa, Homo sapiens
QTSSSPFCFTATVAYLVSQPQHHPSNPFLRHIRVP

SEQ ID NO: 773325 - protein, 164 aa, Homo sapiens
QSTKAIQYSLMYASFLQNPNGAALRGIYTNLIGIKKRHLFHSENAVTSSACAARKARLSKGLLLCRKKAQLQRRGDTLEAGSACLATPGSALLFPVPWAGSFRPSLIDWVNINPGTAGVCAAPIIRLLWASLCPCVPPLRNVSLRTVQKCEQVKRATITSLMIC

SEQ ID NO: 773326 - protein, 579 aa, Homo sapiens
MAEPGGAAGRSHPEDGSASEGEKEGNNESHMVSPPEKDDGQKGEEAVGSTEHPEEVTTQAEAAIEEGEVETEGEAAVEGEEEAVSYGDAESEEEYYYTETSSPEGQISAADTTYPYFSPPQELPGEEAYDSVSGEAGLQGFQQEATGPPESRERRVTSPEPSHGVLGPSEQMGQVTSGPAVGRLTGSTEEPQGQVLPMGVQHRFRLSHGSDIESSDLEEFVSQEPVIPPGVPDAHPREGDLPVFQDQIQQPSTEEGAMAERVESEGSDEEAEDEGSQLVVLDPDHPLMVRFQAALKNYLNRQIEKLKLDLQELVVATKQSRAQRQELGVNLYEVQQHLVHLQKLLEKSHDRHAMASSERRQKEEELQAARALYTKTCAAANEERKKLAALQTEMENLALHLFYMQNIDQDMRDDIRVMTQVVKKAETERIRAEIEKKKQDLYVDQLTTRAQQLEEDIALFEAQYLAQAEDTRILRKAVSEACTEIDAISVEKRRIMQQWASSLVGMKHRDEAHRAVLEALSVSLERFPSQNINTARSRLSTTWHSAGILLRGSFLPGASRAFASVCYGGAAVDNRIREC

SEQ ID NO: 773327 - protein, 133 aa, Homo sapiens
MRRMLSEYFSGLCTRTNTSQRVREPLTSPAACHTKAPGRSEAQLLFIIFLWFLQWSLALSPRLECSGTISAHCDLRLLGSSDSPASASQVAGITGVHHHAWLIFVFLVETGFHHVGQADLEPLPQVIHPSWPP

SEQ ID NO: 773328 - protein, 505 aa, Homo sapiens
MAEPGGAAGRSHPEDGSASEGEKEGNNESHMVSPPEKDDGQKGEEAVGSTEHPEEVTTQAEAAIEEGEVETEGEAAVEGEEEAVSYGDAESEEEYYYTETSSPEGQISAADTTYPYFSPPQELPGEEAYDSVSGEAGLQGFQQEATGPPESRERRVTSPEPSHGVLGPSEQMGQVTSGPAVGRLTGSTEEPQGQVLPMGVQHRFRLSHGSDIESSDLEEFVSQEPVIPPGVPDAHPREGDLPVFQDQIQQPSTEEGAMAERVESEGSDEEAEDEGSQLVVLDPDHPLMVRFQAALKNYLNRQIEKLKLDLQELVVATKQSRAQRQELGVNLYEVQQHLVHLQKLLEKSHDRHAMASSERRQKEEELQAARALYTKTCAAANEERKKLAALQTEMENLALHLFYMQNIDQDMRDDIRVMTQVVKKAETERIRAEIEKKKQDLYVDQLTTRAQQLEEDIALFEAQYLAQAEDTRILRKAVSEVKAVPAALSVRPSSECPRTGCWWVY

SEQ ID NO: 773329 - protein, 505 aa, Homo sapiens; identical to SEQ ID NO: 773328

SEQ ID NO: 773330 - protein, 456 aa, Homo sapiens
MAEPGGAAGRSHPEDGSASEGEKEGNNESHMVSPPEKDDGQKGEEAVGSTEHPEEVTTQAEAAIEEGEVETEGEAAVEGEEEAVSYGDAESEEEYYYTETSSPEGQISAADTTYPYFSPPQELPGEEAYDSVSGEAGLQGFQQEATGPPESRERRVTSPEPSHGVLGPSEQMGQVTSGPAVGRLTGSTEEPQGQVLPMGVQHRFRLSHGSDIESSDLEEFVSQEPVIPPGVPDAHPREGDLPVFQDQIQQPSTEEGAMAERVESEGSDEEAEDEGSQLVVLDPDHPLMVRFQAALKNYLNRQIEKLKLDLQELVVATKQSRAQRQELGVNLYEVQQHLVHLQKLLEKSHDRHAMASSERRQKEEELQAARALYTKTCAAANEERKKLAALQTEMENLALHLFYMQNIDQDMRDDIRVMTQVVKKAETERIRAEIEKKKQDLYVDQLTTRAQQLEED

SEQ ID NO: 773331 - protein, 224 aa, Homo sapiens [sequence omitted]

SEQ ID NO: 773332 - protein, 925 aa, Homo sapiens
MVSLSLPAVIPPGVPDAHPREGDLPVFQDQIQQPSTEEGAMAERVESEGSDEEAEDEGSQLVVLDPDHPLMVRFQAALKNYLNRQIEKLKLDLQELVVATKQSRAQRQELGVNLYEVQQHLVHLQKLLEKSHDRHAMASSERRQKEEELQAARALYTKTCAAANEERKKLAALQTEMENLALHLFYMQNIDQDMRDDIRVMTQVVKKAETERIRAEIEKKKQDLYVDQLTTRAQQLEEDIALFEAQYLAQAEDTRILRKAVSEACTEIDAISVEKRRIMQQWASSLVGMKHRDEAHRAVLEALRGCQHQAKSTDGEIEAYKKSIMKEEEKNEKLASILNRTETEATLLQKLTTQCLTKQVALQSQFNTYRLTLQDTEDALSQDQLEQMILTEELQAIRQAIQGELELRRKTDAAIREKLQEHMTSNKTTKYFNQLILRLQKEKTNMMTHLSKINGDIAQTTLDITHTSSRLDAHQKTLVELDQDVKKVNELITNSQSEISRRTILIERKQGLINFLNKQLERMVSELGGEEVGPLELEIKRLSKLIDEHDGKAVQAQVTWLRLQQEMVKVTQEQEEQLASLDASKKELHIMEQKKLRVESKIEQEKKEQKEIEHHMKDLDNDLKKLNMLMNKNRCSSEELEQNNRVTENEFVRSLKASERETIKMQDKLNQLSEEKATLLNQLVEAEHQIMLWEKKIQLAKEMRSSVDSEIGQTEIRAMKGEIHRMKVRLGQLLKQQEKMIRAMELAVARRETVTTQAEGQRKMDRKALTRTDFHHKQLELRRKIRDVRKATDECTKTVLELEETQRNVSSSLLEKQEKLSVIQADFDTLEADLTRLGALKRQNLSEIVALQTRLKHLQAVKEGRYVFLFRSKQSLVLERQRLDKRLALIATILDRVRDEYPQFQEALHKVSQMIANKLESPGPS

SEQ ID NO: 773333 - protein, 92 aa, Homo sapiens
MGVQHRFRLSHGSDIESSDLEEFVSQEPGATHLLRSPCPGDEHLHRPFCARDATRLSSVTCFLSGCEPKMAGRVPRTAVPCFLLGLCMGDAG

SEQ ID NO: 773334 - protein, 559 aa, Homo sapiens
MAEPGGAAGRSHPEDGSASEGEKEGNNESHMVSPPEKDDGQKGEEAVGSTEHPEEVTTQAEAAIEEGEVETEGEAAVEGEEEAVSYGDAESEEEYYYTETSSPEGQISAADTTYPYFSPPQELPGEEAYDSVSGEAGLQGFQQEATGPPESRERRVTSPEPSHGVLGPSEQMGQVTSGPAVGRLTGSTEEPQGQVLPMGVQHRFRLSHGSDIESSDLEEFVSQEPVIPPGVPDAHPREGDLPVFQDQIQQPSTEEGAMAERVESEGSDEEAEDEGSQLVVLDPDHPLMVRFQAALKNYLNRQIEKLKLDLQELVVATKQSRAQRQELGVNLYEVQQHLVHLQKLLEKSHDRHAMASSERRQKEEELQAARALYTKTCAAANEERKKLAALQTEMENLALHLFYMQNIDQDMRDDIRVMTQVVKKAETERIRAEIEKKKQDLYVDQLTTRAQQLEEDIALFEAQYLAQAEDTRILRKAVSEACTEIDAISVEKRRIMQQWASSLVGMKHRDEAHRAVLEALRYCRATGSEDVREPQGSVAGPPHTPSLWVHRISGTEGAP

SEQ ID NO: 773335 - protein, 902 aa, Homo sapiens
MAEPGGAAGRSHPEDGSASEGEKEGNNESHMVSPPEKDDGQKGEEAVGSTEHPEEVTTQAEAAIEEGEVETEGEAAVEGEEEAVSYGDAESEEEYYYTETSSPEGQISAADTTYPYFSPPQELPGEEAYDSVSGEAGLQGFQQEATGPPESRERRVTSPEPSHGVLGPSEQMGQVTSGPAVGRLTGSTEEPQGQVLPMGVQHRFRLSHGSDIESSDLEEFVSQEPVIPPGVPDAHPREGDLPVFQDQIQQPSTEEGAMAERVESEGSDEEAEDEGSQLVVLDPDHPLMVRFQAALKNYLNRQIEKLKLDLQELVVATKQSRAQRQELGVNLYEVQQHLVHLQKLLEKSHDRHAMASSERRQKEEELQAARALYTKTCAAANEERKKLAALQTEMENLALHLFYMQNIDQDMRDDIRVMTQVVKKAETERIRAEIEKKKQDLYVDQLTTRAQQLEEDIALFEAQYLAQAEDTRILRKAVSEACTEIDAISVEKRRIMQQWASSLVGMKHRDEAHRAVLEALRGCQHQAKSTDGEIEAYKKSIMKEEEKNEKLASILNRTETEATLLQKLTTQCLTKQVALQSQFNTYRLTLQDTEDALSQDQLEQMILTEELQAIRQAIQGELELRRKTDAAIREKLQEHMTSNKTTKYFNQLILRLQKEKTNMMTHLSKINGDIAQTTLDITHTSSRLDAHQKTLVELDQDVKKVNELITNSQSEISRRTILIERKQGLINFLNKQLERMVSELGGEEVGPLELEIKRLSKLIDEHDGKAVQAQVTWLRLQQEMVKVTQEQEEQLASLDASKKELHIMEQKKLRVESKIEQEKKEQKEIEHHMKDLDNDLKKLNMLMNKNRCSSEELEQNNRVTENEFVRSLKVRPCPRSPGAQDDGGRGPLRGRPSRCRTS

SEQ ID NO: 773336 - protein, 106 aa, Homo sapiens
TIFLHLLLREASRFYKYQLLAQEDLGFVPPPSPLLLPPPPRLRLCAVLILVGVGLEATPSPGVSSAIFFVPGFLLLVPGVYHVIFIYCAVKGHRGFQFFYLPYFEK

SEQ ID NO: 773337 - protein, 186 aa, Homo sapiens
MSAARPQFSIDDAFELSLEDGGPGPESSGVARFGPLHFERRARFEVADEDKQSRLRYQNLENDEDGAQASPEPDGGVGTSSQWSFSTISSSTQRSYNTCCSWTQHPLIQKNRRVVLASFLLLLLGLVLILVGVGLEATPSPGVSSAIFFVPGFLLLVPGVYHVIFIYCAVKGHRGFQFFYLPYFEK

SEQ ID NO: 773338 - protein, 183 aa, Homo sapiens
MSAARPQFSIDDAFELSLEDGGPGPESSGVARFGPLHFERRARFEVADEDKQSRLRYQNLENDEDGAQASPEPDGGVGTSSQWSFSTISSSTQRSYNTCCSWTQHPLIQKNRRVVLASFLLLLLGLGPAQCLALETELGELPGEGLCLGHLQLRWWVSRAGGGSPRPHHCSCPHPRGSVCVQC

SEQ ID NO: 773339 - protein, 180 aa, Homo sapiens
MSAARPQFSIDDAFELSLEDGGPGPESSGVARFGPLHFERRARFEVADEDKQSRLRYQNLENDEDGAQASPEPDGGVGTRDSSRTSIRSSQWSFSTISSSTQRSYNTCCSWTQHPLIQKNRRVVLASFLLLLLGLGVSSAIFFVPGFLLLVPGVYHVIFIYCAVKGHRGFQFFYLPYFEK

SEQ ID NO: 773340 - protein, 192 aa, Homo sapiens
MSAARPQFSIDDAFELSLEDGGPGPESSGVARFGPLHFERRARFEVADEDKQSRLRYQNLENDEDGAQASPEPDGGVGTRDSSRTSIRSSQWSFSTISSSTQRSYNTCCSWTQHPLIQKNRRVVLASFLLLLLGLGPAQCLALETELGELPGEGLCLGHLQLRWWVSRAGGGSPRPHHCSCPHPRGSVCVQC

SEQ ID NO: 773341 - protein, 192 aa, Homo sapiens; identical to SEQ ID NO: 773340

SEQ ID NO: 773342 - protein, 195 aa, Homo sapiens
MSAARPQFSIDDAFELSLEDGGPGPESSGVARFGPLHFERRARFEVADEDKQSRLRYQNLENDEDGAQASPEPDGGVGTRDSSRTSIRSSQWSFSTISSSTQRSYNTCCSWTQHPLIQKNRRVVLASFLLLLLGLVLILVGVGLEATPSPGVSSAIFFVPGFLLLVPGVYHVIFIYCAVKGHRGFQFFYLPYFEK

SEQ ID NO: 773343 - protein, 192 aa, Homo sapiens; identical to SEQ ID NO: 773340

SEQ ID NO: 773344 - protein, 139 aa, Homo sapiens
MSAARPQFSIDDAFELSLEDGGPGPESSGVARFGPLHFERRARFEVADEDKQSRLRYQNLENDEDGAQASPEPDGGVGTRDSSRTSIRSSQWSFSTISSSTQRSYNTCCSWTQHPLIQKNRRVVLASFLLLLLGLGEWP

SEQ ID NO: 773345 - protein, 139 aa, Homo sapiens; identical to SEQ ID NO: 773344

SEQ ID NO: 773346 - protein, 221 aa, Homo sapiens
MSAARPQFSIDDAFELSLEDGGPGPESSGVARFGPLHFERRARFEVADEDKQSRLRYQNLENDEDGAQASPEPDGGVGTRDSSRTSIRSSQWSFSTISSSTQRSYNTCCSWTQHPLIQKNRRVVLASFLLLLLGLVLILVGVGLEATPSPGVSSAIFFVPGFLLLVPGGPPGLPVLLPALLREVIAAQRGPLAPMGAPLLPCSVPLISREEALQDPRNPSP

SEQ ID NO: 773347 - protein, 130 aa, Homo sapiens
MSAARPQFSIDDAFELSLEDGGPGPESSGVARFGPLHFERRARFEVADEDKQSRLRYQNLENDEDGAQASPEPDGGVGTRDSSRTSIRSSQWSFSTISSSTQRSYNTCCSWTQHPLIQKNRRVVLASFLP

SEQ ID NO: 773348 - protein, 130 aa, Homo sapiens
PDGPLTGNTLGCCITLTSGSQPALKFKNQVLKSISAFSYLTFELLNLSKRQAEERGIGKAKAFWGRKIGPLYPAFLRVPMAEHSMSPPPRALPDYPQGLVLPRLQSFMDALPIPLLGSAVSSVPQLRICL

SEQ ID NO: 773349 - protein, 457 aa, Homo sapiens
TVCHLRPARLPLNCCVFCKADELFTEYESKLFSNTVKGQTAIFEEMIEDEEGLVDDRAPTTTRGLWAISETERSMKAILSFAKSHRFDVEFVDEGSTSMDLFEAWKKEYKLLHEYWMALRNRVSAVDELAMATERLRVRDPREPKPNPPVLHIIEPHEVEQNRIKLLNDKAVATSQLQKKLGQLLYLTNLEKSQDKTSGGVNPEPCPICARQLGKQWAVLTCGHCFCNECISIIIEQYSVGSHRSSIKCAICRQTTSHKEISYVFTSEKANQEEDIPVKGSHSTKVEAVVRTLMKIQLRDPGAKALVFSTWQDVLDIISKALTDNNMEFAQISRVKTFQENLSAFKRDPQINILLLPLHTGSNGLTIIEATHVLLVEPILNPAHELQAIGRVHRIGQTKPTIVHRFLIKATIEERMQAMLKTAERSHTNSSAKHSEASVLTVADLADLFTKETEELE

SEQ ID NO: 773350 - protein, 481 aa, Homo sapiens
TVCHLRPARLPLNCCVFCKADELFTEYESKLFSNTVKGQTAIFEEMIEDEEGLVDDRAPTTTRGLWAISETERSMKAILSFAKSHRFDVEFVDEGSTSMDLFEAWKKEYKLLHEYWMALRNRVSAVDELAMATERLRVRDPREPKPNPPVLHIIEPHEVEQNRIKLLNDKAVATSQLQKKLGQLLYLTNLEKSQDKTSGGVNPEPCPICARQLGKQWAVLTCGHCFCNECISIIIEQYSVGSHRSSIKCAICRQTTSHKEISYVFTSEKANQEEDIPVKGSHSTKVEAVVRTLMKIQLRDPGAKALVFSTWQDVLDIISKALTDNNMEFAQISRVKTFQENLSAFKRDPQINILLLPLHTGSNGLTIIEATHVLLVEPILNPAHELQAIGRVHRIGQTKPTIVHRFLIKATIEERMQAMLKTAERRFFEEQALFCFHDITPFSHPWSLTTAILQLRDLVICELFFIYFKNFLICFLSSFSI

SEQ ID NO: 773351 - protein, 426 aa, Homo sapiens
TVCHLRPARLPLNCCVFCKADELFTEYESKLFSNTVKGQTAIFEEMIEDEEGLVDDRAPTTTRGLWAISETERSMKAILSFAKSHRFDVEFVDEGSTSMDLFEAWKKEYKLLHEYWMALRNRVSAVDELAMATERLRVRDPREPKPNPPVLHIIEPHEVEQNRIKLLNDKAVATSQLQKKLGQLLYLTNLEKSQDKTSGGVNPEPCPICARQLGKQWAVLTCGHCFCNECISIIIEQYSVGSHRSSIKCAICRQTTSHKEISYVFTSEKANQEEDIPVKGSHSTKVEAVVRTLMKIQLRDPGAKALVFSTWQDVLDIISKALTDNNMEFAQISRVKTFQENLSAFKRDPQINILLLPLHTGSNGLTIIEATHVLLVEPILNPAHELQAIGRVHRIGQTKPTIVHRFLIKATIEERMQAMLKTAERR

SEQ ID NO: 773352 - protein, 139 aa, Homo sapiens
  misc_feature (1)..(1): Xaa can be any naturally occurring amino acid
XKKQAVPVRIPGSASPGGGWKGWRTHLNMWNPNAAPGAPHGNPAFPPGGPPHPVPQPGYPGCQPLGPYPPPYPPPAPGIPPVNPLAPGMVGPAVIVDKKMQKKMKKAHKKMHKHQKHHKYHKHGKHSSSSSSSSSSDSD

SEQ ID NO: 773353 - protein, 148 aa, Homo sapiens
MWNPNAGQPGPNPYPPNIGCPGGSNPAHPPPINPPFPPGPCPPPPGAPHGNPAFPPGGPPHPVPQPGYPGCQPLGPYPPPYPPPAPGIPPVNPLAPGMVGPAVIVDKKMQKKMKKAHKKMHKHQKHHKYHKHGKHSSSSSSSSSSDSD

SEQ ID NO: 773354 - protein, 148 aa, Homo sapiens; identical to SEQ ID NO: 773353

SEQ ID NO: 773355 - protein, 148 aa, Homo sapiens; identical to SEQ ID NO: 773353

SEQ ID NO: 773356 - protein, 148 aa, Homo sapiens; identical to SEQ ID NO: 773353

SEQ ID NO: 773357 - protein, 148 aa, Homo sapiens; identical to SEQ ID NO: 773353

SEQ ID NO: 773358 - protein, 148 aa, Homo sapiens; identical to SEQ ID NO: 773353

SEQ ID NO: 773359 - protein, 135 aa, Homo sapiens
MPGSQGQIHIPPILGALEVPILPTHHLLIHPFPQAPVLLPQELPMAIQLSPQVGPLILCHSRPYPPPYPPPAPGIPPVNPLAPGMVGPAVIVDKKMQKKMKKAHKKMHKHQKHHKYHKHGKHSSSSSSSSSSDSD

SEQ ID NO: 773360 - protein, 148 aa, Homo sapiens; identical to SEQ ID NO: 773353

SEQ ID NO: 773361 - protein, 148 aa, Homo sapiens; identical to SEQ ID NO: 773353

SEQ ID NO: 773362 - protein, 148 aa, Homo sapiens; identical to SEQ ID NO: 773353

SEQ ID NO: 773363 - protein, 148 aa, Homo sapiens; identical to SEQ ID NO: 773353

SEQ ID NO: 773364 - protein, 148 aa, Homo sapiens; identical to SEQ ID NO: 773353

SEQ ID NO: 773365 - protein, 148 aa, Homo sapiens; identical to SEQ ID NO: 773353

SEQ ID NO: 773366 - protein, 148 aa, Homo sapiens; identical to SEQ ID NO: 773353

SEQ ID NO: 773367 - protein, 148 aa, Homo sapiens; identical to SEQ ID NO: 773353

SEQ ID NO: 773368 - protein, 148 aa, Homo sapiens; identical to SEQ ID NO: 773353

SEQ ID NO: 773369 - protein, 130 aa, Homo sapiens
MWNPNAGQPGPNPYPPNIGCPGGSNPAHPPPINPPFPPGPCPPPPGAPHGNPAFPPGGPPHPVPQPGYPGCQPLGPYPPPYPPPAPGIPPVNPLAPGMVGPAVIVDKKMQKKMKKAHKKMHKHPSSSDSD

SEQ ID NO: 773370 - protein, 69 aa, Homo sapiens
EWLALLYGIPPVNPLAPGMVGPAVIVDKKMQKKMKKAHKKMHKHQKHHKYHKHGKHSSSSSSSSSSDSD

SEQ ID NO: 773371 - protein, 111 aa, Homo sapiens
MWNPNAAPGAPHGNPAFPPGGPPHPVPQPGYPGCQPLGPYPPPYPPPAPGIPPVNPLAPGMVGPAVIVDKKMQKKMKKAHKKMHKHQKHHKYHKHGKHSSSSSSSSSSDSD

SEQ ID NO: 773372 - protein, 40 aa, Homo sapiens
TREVGILMVDFCRAQLSLVIWVQSVSGPTCPDAVPTLFSR

SEQ ID NO: 773373 - protein, 248 aa, Homo sapiens
MAQEKMELDLEPDTSYGGTLRRSSSAPLIHGLSDLSQVFQPYTLRTRRNSTTIMSRHSLEEGLDMVNRETAHEREMQTAMQISQSWDESLSLSDSDFDKPEKLYSPKRIDFTPVSPAPSPTRGFGKMFVSSSGLPPSPVPSPRRFSSRRSQSPVKCIRPSVLGPLKRKGEMETESQPKRLFQGTTNMLSPDAAQLSDLSSCSDILDGSSSSSGLSSDPLAKGSATAESPVACSNSCSSFILMDDLSPK

SEQ ID NO: 773374 - protein, 248 aa, Homo sapiens; identical to SEQ ID NO: 773373

SEQ ID NO: 773375 - protein, 186 aa, Homo sapiens
KRKKLEEATAARAVAFAAASRGECTETLRNRIRELEAEGKKLTMDMKVKEDQIRELELKVQELRKYKENEKDTEVLMSALSAMQDKTQHLENSLSAETRIKLDLFSALGDAKRQLEIAQGQILQKDQEIKDLKQKIAEVMAVMPSITYSAATSPLSPVSPHYSSKFVETSPSGLDPNASVYQPLKK

SEQ ID NO: 773376 - protein, 267 aa, Homo sapiens
MAQEKMELDLEPDTSYGGTLRRSSSAPLIHGLSDLSQVFQPYTLRTRRNSTTIMSRHSLLLSSSPNRIPSSRLHQIKREEGLDMVNRETAHEREMQTAMQISQSWDESLSLSDSDFDKPEKLYSPKRIDFTPVSPAPSPTRGFGKMFVSSSGLPPSPVPSPRRFSSRRSQSPVKCIRPSVLGPLKRKGEMETESQPKRLFQGTTNMLSPDAAQLSDLSSCSDILDGSSSSSGLSSDPLAKGSATAESPVACSNSCSSFILMDDLSPK

SEQ ID NO: 773377 - protein, 223 aa, Homo sapiens
MAQEKMELDLEPDTSYGGTLRRSSSAPLIHGLSDLSQVFQPYTLRTRRNSTTIMSRHSLEEGLDMVNRETAHEREMQTAMQISQSWDESLSLSDSDFDKPEKLYSPKRIDFTPVSPAPSPTRGFGKMFVSSSGLPPSPVPSPRRFSSRRSQSPVKCIRPSVLGPLKRKGEMETESQPKRLFQGTTNMLSPDAAQLSDLSSWWCYQGEEIPALTRCVEHLQMNE

SEQ ID NO: 773378 - protein, 258 aa, Homo sapiens
MGLLRGGLPCARAMARLGAVRSHYCALLLAAALAVCAFYYLGSGRETFSSATKRLKEALRRGSRRALAAALELARGSVAPAPGAKAKSLEGGGAGPVDYHLLMMFTKAEHNAALQAKARVALRSLLRLAKFEAHEVLNLHFVSEEASREVAKGLLRELLPPAAGFKCKVIFHDVAVLTDKLFPIVEAMQKHFSAGLGTYYSDSIFFLSVAMHQIMPKGSGEILAKESNSSLVTRKNREGYKEARPVGASCVLNSNCER

SEQ ID NO: 773379 - protein, 247 aa, Homo sapiens
MVRCVPSAVIVCFLRPPQPGRTVIFHDVAVLTDKLFPIVEAMQKHFSAGLGTYYSDSIFFLSVAMHQIMPKEILQIIQLDLDLKFKTNIRELFEEFDSFLPGAIIGIAREMQPVYRHTFWQFRHENPQTRVGGPPPEGLPGFNSGVMLLNLEAMRQSPLYSRLLEPAQVQQLADKYHFRGHLGDQDFFTMIGMEHPKLFHVLDCTWNRQLCTWWRDHGYSDVFEAYFRCEGHVKIYHGNCNTPIPED

SEQ ID NO: 773380 - protein, 393 aa, Homo sapiens
MGLLRGGLPCARAMARLGAVRSHYCALLLAAALAVCAFYYLGSGRETFSSATKRLKEARAGAPAAPSPPALELARGSVAPAPGAKAKSLEGGGAGPVDYHLLMMFTKAEHNAALQAKARVALRSLLRLAKFEAHEVLNLHFVSEEASREVAKGLLRELLPPAAGFKCKVIFHDVAVLTDKLFPIVEAMQKHFSAGLGTYYSDSIFFLSVAMHQIMPKEILQIIQLDLDLKFKTNIRELFEEFDSFLPGAIIGIAREMQPVYRHTFWQFRHENPQTRVGGPPPEGLPGFNSGVMLLNLEAMRQSPLYSRLLEPAQVQQLADKYHFRGHLGDQDFFTMIGMEHPKLFHVLDCTWNRQLCTWWRDHGYSDVFEAYFRCEGHVKIYHGNCNTPIPED

SEQ ID NO: 773381 - protein, 120 aa, Homo sapiens
AGTVRSFRIEGLPGFNSGVMLLNLEAMRQSPLYSRLLEPAQVQQLADKYHFRGHLGDQDFFTMIGMEHPKLFHVLDCTWNRQLCTWWRDHGYSDVFEAYFRCEGHVKIYHGNCNTPIPED

SEQ ID NO: 773382 - protein, 133 aa, Homo sapiens
MRHTFWQFRHENPQTRVGGPPPEGLPGFNSGVMLLNLEAMRQSPLYSRLLEPAQVQQLADKYHFRGHLGDQDFFTMIGMEHPKLFHVLDCTWNRQLCTWWRDHGYSDVFEAYFRCEGHVKIYHGNCNTPIPED

SEQ ID NO: 773383 - protein, 155 aa, Homo sapiens [sequence omitted]

SEQ ID NO: 773384 - protein, 393 aa, Homo sapiens; identical to SEQ ID NO: 773380

SEQ ID NO: 773385 - protein, 393 aa, Homo sapiens; identical to SEQ ID NO: 773380

SEQ ID NO: 773386 - protein, 139 aa, Homo sapiens
MEVACLLRHTFWQFRHENPQTRVGGPPPEGLPGFNSGVMLLNLEAMRQSPLYSRLLEPAQVQQLADKYHFRGHLGDQDFFTMIGMEHPKLFHVLDCTWNRQLCTWWRDHGYSDVFEAYFRCEGHVKIYHGNCNTPIPED

SEQ ID NO: 773387 - protein, 188 aa, Homo sapiens
MNGMSVLMKETLKSSVTPSPYEETGEKAAICELGSESSPDTESVGTLVLDFPASRTRHTFWQFRHENPQTRVGGPPPEGLPGFNSGVMLLNLEAMRQSPLYSRLLEPAQVQQLADKYHFRGHLGDQDFFTMIGMEHPKLFHVLDCTWNRQLCTWWRDHGYSDVFEAYFRCEGHVKIYHGNCNTPIPED

SEQ ID NO: 773388 - protein, 393 aa, Homo sapiens; identical to SEQ ID NO: 773380

SEQ ID NO: 773389 - protein, 124 aa, Homo sapiens
MFTKAEHNAALQAKARVALRSLLRLAKFEAHEVLNLHFVSEEASREVAKGLLRELLPPAAGFKCKVIFHDVAVLTDKLFPIVEAMQKHFSAGLGTYYSDSIFFLSVAMHQIMPKGEPGLPGAIA

SEQ ID NO: 773390 - protein, 108 aa, Homo sapiens
CSDVPRARKTVHVNHPHTHYEGTRPRSESCRMGNRPLRTPELGQVRVPLCTNRMVCSHRGHQWGLWSWGSLLQLQDPQPGHQNLLVYLCRLRLIYVYDMNLRSLHGAP

SEQ ID NO: 773391 - protein, 361 aa, Homo sapiens
ARGASSVAGWVGAFRAPFIEAAVAGLGAGSGKRRRGWKMPVHSRGDKKETNHHDEMEVDYAENEGSSSEDEDTESSSVSEDGDSSEMDDEDCERRRMECLDEMSNLEKQFTDLKDQLYKERLSQVDAKLQEVIAGKAPEYLEPLATLQENMQIRTKVAGIYRELCLESVKNKYECEIQASRQHCESEKLLLYDTVQSELEEKIRRLEEDRHSIDITSELWNDELQSRKKRKDPFSPDKKKPVVVSGPYIVYMLQDLDILEDWTTIRKAMATLGPHRVKTEPPVKLEKHLHSARSEEGRLYYDGEWYIRGQTICIDKKDECPTSAVITTINHDEVWFKRPDGSKSKLYISQLQKGKYSIKHS

SEQ ID NO: 773392 - protein, 361 aa, Homo sapiens; identical to SEQ ID NO: 773391

SEQ ID NO: 773393 - protein, 84 aa, Homo sapiens
LLQKKPSDGQSRVGLAVPQSSETLDSFYLGVIYWSCMAFGTPALASAAESAPLRSFLGSHTLNGSYLNLTSHSKLQNWLGNYMT

SEQ ID NO: 773394 - protein, 103 aa, Homo sapiens
GKMPWMWVGTVQSAGENPKEKGRGKVIIPLSLLELGHTSALGHQNSKLSGLWTPGLTPEPSPSPHHPTGFPDIEPGTESYIWASLGLQLAHGLLWDFAGFIIM

SEQ ID NO: 773395 - protein, 798 aa, Homo sapiens
MEASGKLICRQRQVLFSFLLLGLSLAGAAEPRSYSVVEETEGSSFVTNLAKDLGLEQREFSRRGVRVVSRGNKLHLQLNQETADLLLNEKLDREDLCGHTEPCVLRFQVLLESPFEFFQAELQVIDINDHSPVFLDKQMLVKVSESSPPGTTFPLKNAEDLDVGQNNIENYIISPNSYFRVLTRKRSDGRKYPELVLDKALDREEEAELRLTLTALDGGSPPRSGTAQVYIEVLDVNDNAPEFEQPFYRVQISEDSPVGFLVVKVSATDVDTGVNGEISYSLFQASEEIGKTFKINPLTGEIELKKQLDFEKLQSYEVNIEARDAGTFSGKCTVLIQVIDVNDHAPEVTMSAFTSPIPENAPETVVALFSVSDLDSGENGKISCSIQEDLPFLLKSAENFYTLLTERPLDRESRAEYNITITVTDLGTPMLITQLNMTVLIADVNDNAPAFTQTSYTLFVRENNSPALHIRSVSATDRDSGTNAQVTYSLLPPQDPHLPLTSLVSINADNGHLFALRSLDYEALQGFQFRVGASDHGSPALSSEALVRVVVLDANDNSPFVLYPLQNGSAPCTELVPRAAEPGYLVTKVVAVDGDSGQNAWLSYQLLKATELGLFGVWAHNGEVRTARLLSERDAAKHRLVVLVKDNGEPPRSATATLHVLLVDGFSQPYLPLPEAAPTQAQADLLTVYLVVALASVSSLFLFSVLLFVAVRLCRRSRAASVGRCLVPEGPLPGHLVDMSGTRTLSQSYQYEVCLAGGSGTNEFKFLKPIIPNFPPQCPGKEIQGNSTFPNNFGFNIQ

SEQ ID NO: 773396 - protein, 744 aa, Homo sapiens
MEASGKLICRQRQVLFSFLLLGLSLAGAAEPRSYSVVEETEGSSFVTNLAKDLGLEQREFSRRGVRVVSRGNKLHLQLNQETADLLLNEKLDREDLCGHTEPCVLRFQVLLESPFEFFQAELQVIDINDHSPVFLDKQMLVKVSESSPPGTTFPLKNAEDLDVGQNNIENYIISPNSYFRVLTRKRSDGRKYPELVLDKALDREEEAELRLTLTALDGGSPPRSGTAQVYIEVLDVNDNAPEFEQPFYRVQISEDSPVGFLVVKVSATDVDTGVNGEISYSLFQASEEIGKTFKINPLTGEIELKKQLDFEKLQSYEVNIEARDAGTFSGKCTVLIQVIDVNDHAPEVTMSAFTSPIPENAPETVVALFSVSDLDSGENGKISCSIQEDLPFLLKSAENFYTLLTERPLDRESRAEYNITITVTDLGTPMLITQLNMTVLIADVNDNAPAFTQTSYTLFVRENNSPALHIRSVSATDRDSGTNAQVTYSLLPPRVVVLDANDNSPFVLYPLQNGSAPCTELVPRAAEPGYLVTKVVAVDGDSGQNAWLSYQLLKATELGLFGVWAHNGEVRTARLLSERDAAKHRLVVLVKDNGEPPRSATATLHVLLVDGFSQPYLPLPEAAPTQAQADLLTVYLVVALASVSSLFLFSVLLFVAVRLCRRSRAASVGRCLVPEGPLPGHLVDMSGTRTLSQSYQYEVCLAGGSGTNEFKFLKPIIPNFPPQCPGKEIQGNSTFPNNFGFNIQ

SEQ ID NO: 773397 - protein, 798 aa, Homo sapiens; identical to SEQ ID NO: 773395

SEQ ID NO: 773398 - protein, 380 aa, Homo sapiens
AEIPGANLNVEGTSTPLLRIAWARIILDEAHNVKNPRVQTSIAVCKLQACARWAVTGTPIQNNLLDMYSLLKFLRCSPFDEFNLWRSQVDNGSKKGGERLSILTKSLLLRRTKDQLDSTGRPLVILPQRKFQLHHLKLSEDEETVYNVFFARSRSALQSYLKRHESRGNQSGRSPNNPFSRVALEFGSEEPRHSEAADSPRSSTVHILSQLLRLRQCCCHLSLLKSALDPMELKGEGLVLSLEEQLSALTLSELRDSEPSSTVSLNGTFFKMELFEGMRESTKISSLLAELEAIQRNSASQKSVIVSQWTNMLKVVALHLKKHGLTYATIDGSVNPKQRMDLVEAFNHSRGPQVMLISLLAGGVGLNLTGGNHLFLLDMH

SEQ ID NO: 773399 - protein, 354 aa, Homo sapiens
AEIPGANLNVEGTSTPLLRIAWARIILDEAHNVKNPRVQTSIAVCKLQACARWAVTGTPIQNNLLDMYSLLKFLRCSPFDEFNLWRSQVDNGSKKGGERLSILTKSLLLRRTKDQLDSTGRPLVILPQRKFQLHHLKLSEDEETVYNVFFARSRSALQSYLKRHESRGNQSGRSPNNPFSRVALEFGSEEPRHSEAADSPRSSTVHILSQLLRLRQCCCHLSLLKSALDPMELKGEGLVLSLEEQLSALTLSELRDSEPSSTVSLNGTFFKMELFEGMRESTKISSLLAELEAIQRNSASQKSVIVSQWTNMLKVVALHLKKHGLTYATIDGSVNPKQRMDLVEAFNHSRGPQR

SEQ ID NO: 773400 - protein, 453 aa, Homo sapiens
AEIPGANLNVEGTSTPLLRIAWARIILDEAHNVKNPRVQTSIAVCKLQACARWAVTGTPIQNNLLDMYSLLKFLRCSPFDEFNLWRSQVDNGSKKGGERLSILTKSLLLRRTKDQLDSTGRPLVILPQRKFQLHHLKLSEDEETVYNVFFARSRSALQSYLKRHESRGNQSGRSPNNPFSRVALEFGSEEPRHSEAADSPRSSTVHILSQLLRLRQCCCHLSLLKSALDPMELKGEGLVLSLEEQLSALTLSELRDSEPSSTVSLNGTFFKMELFEGMRESTKISSLLAELEAIQRNSASQKSVIVSQWTNMLKVVALHLKKHGLTYATIDGSVNPKQRMDLVEAFNHSRGPQVMLISLLAGGVGLNLTGGNHLFLLDMHWNPSLEDQACDRIYRVGQQKDVVIHRFVCEGTVEEKILQLQEKKKDLAKQVLSGSGESVTKLTLADLRVLFGI

SEQ ID NO: 773401 - protein, 453 aa, Homo sapiens; identical to SEQ ID NO: 773400

SEQ ID NO: 773402 - protein, 125 aa, Homo sapiens
IYVSLAHWMQGEQALLAPSGQAVKQTSPSHTHWAAAVWPSPERNRTKYWAQAADHHRCHDVPLDVPPASTPHCAPQPPQGLCTHHPNGLSTSAQDQLLPPGHLLRGLPSLHPFTLPLYCPSTCHL

SEQ ID NO: 773403 - protein, 69 aa, Homo sapiens
MWDSPPIPESLAPGSHGLVWSLERSWLGRGQPENHVGVGCRRRQDMVVVVLGMKPCASRSSESEAGPGP

SEQ ID NO: 773404 - protein, 169 aa, Homo sapiens
RPLLSRGASPAFGCCVRLALPVELLLGWRKWTQPGGRRCWPQAHACKATRPCVTMPKPVNLGEETPWVGTSECLSSENGGSKKDRAPAAPEMCIFCDSVSREGLCSICLNISGTQPSSRHRKALVHRGVKGRALLPAPAHRGRCLHFRSLKPSVLSVWIKEWEEHLKSE

SEQ ID NO: 773405 - protein, 156 aa, Homo sapiens
NVVFLGGAFICSMIFNKVAVTLGDVWILLATLKVLSLLWLLYYVASTTRRPHAVLYQDPHAGPLWVRGSLVLFGSCTFCLNIFRVGYDVSHIRCKSQLDLVFSVIEMVFIGVQVTGFSRPHITEDIPYLPMPCTHLPLPMPRNSHTGKYLMSQGLC

SEQ ID NO: 773406 - protein, 135 aa, Homo sapiens
RQRHPQTGQSRQAAAQWRRRAPKTTPAIRPIPPRRAPQARPLLASPLPFSKCPVASRRRRACWVTVRRLRAGAAGRARSGEADSGLRPGSCGVGARGRPEGGGLATHPAPPAPGTRPRPRILRAPGGLHLKTTCF

SEQ ID NO: 773407 - protein, 135 aa, Homo sapiens; identical to SEQ ID NO: 773406

SEQ ID NO: 773408 - protein, 135 aa, Homo sapiens; identical to SEQ ID NO: 773406

SEQ ID NO: 773409 - protein, 135 aa, Homo sapiens; identical to SEQ ID NO: 773406

SEQ ID NO: 773410 - protein, 303 aa, Homo sapiens
APRQERAVLRCGPRSLPLSDSGPGPRVAGAKSERHERAPGPVNCSGMDCGSVGGQRTQRLPGRQRLLFLPVGLSGRPGGSETSARRCLSALSDGLGALRPRAPAARGGVSRASPLLLLLLVPSPRLAAAAPRRQLGDWERSRLGYAAPPAGRSSAWRCSPGVAAAAGALPQYHGPAPALVSCRRELSLSAGSLQLERKRRDFTSSGSRKLYFDTHALVCLLEDNESHSFIQAGVQWHSLGLLQPPPPGFKRSSHLILLSSWDYRHAPPHLDNFSVFLLETGFHHVGQAGLKLLTSSDPPTLAS

SEQ ID NO: 773411 - protein, 119 aa, Homo sapiens
APRQERAVLRCGPRSLPLSDSGPGPRVAGAKSERHERAPGPVNCSGMDCGSVGGQRTQRLPGRQRLLFLPVGLSGRPGGSETSARRCLSALSDGLGALRPRAPAAAAACHVPHRCSSSC

SEQ ID NO: 773412 - protein, 405 aa, Homo sapiens
APRQERAVLRCGPRSLPLSDSGPGPRVAGAKSERHERAPGPVNCSGMDCGSVGGQRTQRLPGRQRLLFLPVGLSGRPGGSETSARRCLSALSDGLGALRPRAPAARGGVSRASPLLLLLLVPSPRLAAAAPRRQLGDWERSRLGYAAPPAGRSSAWRCSPGVAAAAGALPQYHGPAPALVSCRRELSLSAGSLQLERKRRDFTSSGSRKLYFDTHALVCLLEDNGFATQQAEIIVSALVKILEANMDIVYKDMVTKMQQEITFQQVMSQIANVKKDMIILEKSEFSALRAENEKIKLELHQLKQQVMDEVIKVRTDTKLDFNLEKSRVKELYSLNEKKLLELRTEIVALHAQQDRALTQTDRKIETEVAGLKTMLESHKLDNIKYLAGSIFTCLTVALGFYRLWI

SEQ ID NO: 773413 - protein, 381 aa, Homo sapiens
APRQERAVLRCGPRSLPLSDSGPGPRVAGAKSERHERAPGPVNCSGMDCGSVGGQRTQRLPGRQRLLFLPVGLSGRPGGSETSARRCLSALSDGLGALRPRAPAARGGVSRASPLLLLLLVPSPRLAAAAPRRQLGDWERSRLGYAAPPAGRSSAWRCSPGVAAAAGALPQYHGPAPALVSCRRELSLSAGSLQLERKRRDFTSSGSRKLYFDTHALVCLLEDNGFATQQAEIIVSALVKILEANMDIVYKDMVTKMQQEITFQQVMSQIANVKKDMIILEKSEFSALRAENEKIKLELHQLKQQVMYSLNEKKLLELRTEIVALHAQQDRALTQTDRKIETEVAGLKTMLESHKLDNIKYLAGSIFTCLTVALGFYRLWI

SEQ ID NO: 773414 - protein, 405 aa, Homo sapiens; identical to SEQ ID NO: 773412

SEQ ID NO: 773415 - protein, 405 aa, Homo sapiens; identical to SEQ ID NO: 773412

SEQ ID NO: 773416 - protein, 439 aa, Homo sapiens
APRQERAVLRCGPRSLPLSDSGPGPRVAGAKSERHERAPGPVNCSGMDCGSVGGQRTQRLPGRQRLLFLPVGLSGRPGGSETSARRCLSALSDGLGALRPRAPAARGGVSRASPLLLLLLVPSPRLAAAAPRRQLGDWERSRLGYAAPPAGRSSAWRCSPGVAAAAGALPQYHGPAPALVSCRRGNRGEGLRVEADQLEHLSGHSEACWGNLLTFELAELSLSAGSLQLERKRRDFTSSGSRKLYFDTHALVCLLEDNGFATQQAEIIVSALVKILEANMDIVYKDMVTKMQQEITFQQVMSQIANVKKDMIILEKSEFSALRAENEKIKLELHQLKQQVMDEVIKVRTDTKLDFNLEKSRVKELYSLNEKKLLELRTEIVALHAQQDRALTQTDRKIETEVAGLKTMLESHKLDNIKYLAGSIFTCLTVALGFYRLWI

SEQ ID NO: 773417 - protein, 130 aa, Homo sapiens [sequence omitted]

SEQ ID NO: 773418 - protein, 405 aa, Homo sapiens; identical to SEQ ID NO: 773412

SEQ ID NO: 773419 - protein, 405 aa, Homo sapiens; identical to SEQ ID NO: 773412

SEQ ID NO: 773420 - protein, 128 aa, Homo sapiens
VRASQLLCLPTQASAMVGAPPPTLLPPCSSISDCCASNEPGSVGVGPSEPGTGYNLLVCRFLRPLEKHSIRVGVTPFSRCHLSQLPLARKGNSLTPLHFPGEAMPRPASAHARCTAPTVLHPLSNKPQ

SEQ ID NO: 773421 - protein, 70 aa, Homo sapiens
MKLPKGTRSSVYFAQHPEKEPLPSRQEVKQTPVIMAKIKGPGPAKYLRPSCTGYIDHDISMFKAPAYTLH

SEQ ID NO: 773422 - protein, 99 aa, Homo sapiens
PVALVGPQLPEAKFPRPRSGLTVASPGSAPALRWHLQAPNGLRSVGSSRPSLGLLAASAGPNRPEVGLSRPSLGLPAASAGPSHPQIGLELGLEEQQVG

SEQ ID NO: 773423 - protein, 313 aa, Homo sapiens
NSASPETQRPGVSPERSRAKVTPRPPPAARRLRGSVCQSARASEPLAPRRSPGQPSAMNQIEPGVQYNYVYDEDEYMIQEEEWDRDLLLDPAWEKQQRKTFTAWCNSHLRKAGTQIENIEEDFRNGLKLMLLLEVISGERLPKPDRGKMRFHKIANVNKALDYIASKGVKLVSIGAEEIVDGNVKMTLGMIWTIILRFAIQDISVEETSAKEGLLLWCQRKTAPYRNVNIQNFHTSWKDGLGLCALIHRHRPDLIDYSKLNKDDPIGNINLAMEIAEKHLDIPKMLDAEDLVYTARPDERAIMTYVSCYYHAF

SEQ ID NO: 773424 - protein, 97 aa, Homo sapiens
FFPLFSLVSLLRLYVCGVCVCARPVLFSPPSDIVNTPKPDERAIMTYVSCFYHAFAGAEQVLNTCPSGLLCYSLLVLVVCAYLSVCLCASHLTLESF

SEQ ID NO: 773425 - protein, 894 aa, Homo sapiens
MNQIEPGVQYNYVYDEDEYMIQEEEWDRDLLLDPAWEKQQRKTFTAWCNSHLRKAGTQIENIEEDFRNGLKLMLLLEVISGERLPKPDRGKMRFHKIANVNKALDYIASKGVKLVSIGAEEIVDGNVKMTLGMIWTIILRFAIQDISVEETSAKEGLLLWCQRKTAPYRNVNIQNFHTSWKDGLGLCALIHRHRPDLIDYSKLNKDDPIGNINLAMEIAEKHLDIPKMLDAEDIVNTPKPDERAIMTYVSCFYHAFAGAEQAETAANRICKVLAVNQENERLMEEYERLASELLEWIRRTIPWLENRTPEKTMQAMQKKLEDFRDYRRKHKPPKVQEKCQLEINFNTLQTKLRISNRPAFMPSEGKMVSDIAGAWQRLEQAEKGYEEWLLNEIRRLERLEHLAEKFRQKASTHETWAYGKEQILLQKDYESASLTEVRALLRKHEAFESDLAAHQDRVEQIAAIAQELNELDYHDAVNVNDRCQKICDQWDRLGTLTQKRREALERMEKLLETIDQLHLEFAKRAAPFNNWMEGAMEDLQDMFIVHSIEEIQSLITAHEQFKATLPEADGERQSIMAIQNEVEKVIQSYNIRISSSNPYSTVTMDELRTKWDKVKQLVPIRDQSLQEELARQHANERLRRQFAAQANAIGPWIQNKMEEIARSSIQITGALEDQMNQLKQYEHNIINYKNNIDKLEGDHQLIQEALVFDNKHTNYTMEHIRVGWELLLTTIARTINEVETQILTRDAKGITQEQMNEFRASFNHFDRRKNGLMDHEDFRACLISMGYDLGEAEFARIMTLVDPNGQGTVTFQSFIDFMTRETADTDTAEQVIASFRILASDKPYILAEELRRELPPDQAQYCIKRMPAYSGPGSVPGALDYAAFSSALYGESDL

SEQ ID NO: 773426 - protein, 96 aa, Homo sapiens
EDLWAQSYGEGLLEFIQTLREPHSTGMMGKSRPKVRKQILEHEEIVGYSELPVVCKLETPKTVREATASEGMELFLGLRFRRTCTKERHPYQCHCS

SEQ ID NO: 773427 - protein, 92 aa, Homo sapiens
RDSHQQYLLPSIPVLVMSPSTSGCLCDQWNKAEMMLRHFQGWLIKDTVTSALFFPPWVTLGKASCYAARTLKRPMRRAMWQGTEAACPHPCE

SEQ ID NO: 773428 - protein, 92 aa, Homo sapiens; identical to SEQ ID NO: 773427

SEQ ID NO: 773429 - protein, 109 aa, Homo sapiens
GLLQCLPFLKTLSLWLIQASRLKTSDLFVSFVPVTKPTFFSLCRASCLLLLHLFLLAFSRVPRQPQRSPNCFFWLGLGSLLQAFLSQSTNGIFLNLVSLSNFKKPSDFL

SEQ ID NO: 773430 - protein, 237 aa, Homo sapiens
STQSWDTQAYRAHRLTGHTVTGHTGSQGTESGATQAHGAQSHGAQTHRLTDHRGSWGAGSQGTQTHRAHRLTGHTGSQGTQSHGAQRLTGHRLTGTGSRGTDLPDTQVMGHRVMGHTGSQGTQAHGTQSHGTHRLTGHTGSQDTQVHGAQSHGAQTHRLTGHRRSWGAGSQGTQTHRAHRLMGHRVTGHRLTNSQVTEAHGVQAHRAHRLTGHTGSWGTESQGTDSQGTQAHRTHRL

SEQ ID NO: 773431 - protein, 69 aa, Homo sapiens
GRDGPTLLTPLSTCKGTCECICMLICMLICMLVCLLICMLVCMLIYLLVCVVICVLVCELICVLVCVLV

SEQ ID NO: 773432 - protein, 131 aa, Homo sapiens
TTTTKFAAASTEKREPIALIRKSDVSRGNLEKEMAHLNHDLYSGDLNEQSQAQLSEGSITLQVEAVESTSQVDENDVTLTADKGKTEDTFFMSNKPQRYKDKLPDSGDSMLRISTIASAIAEASVNTDPSQ

SEQ ID NO: 773433 - protein, 105 aa, Homo sapiens
MSQKQEEENPAEETGEEKQDTQEKEGILPERAEEAKLKAKYPSLGQKPGGSDFLMKRLQKGVWGIVSYPLSLELKEVLRMKSVEVLLDPFLEVLLLNRSRGEFEI

SEQ ID NO: 773434 - protein, 117 aa, Homo sapiens
MSQKQEEENPAEETGEEKQDTQEKEGILPERAEEAKLKAKYPSLGQKPGGSDFLMKRLQKGQKYFDSGDYNMAKAKMKNKQLPSAGPDKNLVTGDHIPTPQDLPQRKSSLVTSKLAG

SEQ ID NO: 773435 - protein, 108 aa, Homo sapiens
MSQKQEEENPAEETGEEKQDTQEKEGILPERAEEAKLKAKYPSLGQKPGGSDFLMKRLQKGQQVLVTQETTTWPKNVTETAAASPPDMIWSDVSMPHDTIKPQKFSYP

SEQ ID NO: 773436 - protein, 117 aa, Homo sapiens; identical to SEQ ID NO: 773434

SEQ ID NO: 773437 - protein, 117 aa, Homo sapiens; identical to SEQ ID NO: 773434

SEQ ID NO: 773438 - protein, 142 aa, Homo sapiens
GGGPGVNRTRRWLPGPLTLHSPGPAMSQKQEEENPAEETGEEKQDTQEKEGILPERAEEAKLKAKYPSLGQKPGGSDFLMKRLQKGQKYFDSGDYNMAKAKMKNKQLPSAGPDKNLVTGDHIPTPQDLPQRKSSLVTSKLAG

SEQ ID NO: 773439 - protein, 148 aa, Homo sapiens
MSQKQEEENPAEETGEEKQDTQEKEGILPERAEEAKLKAKYPSLGQKPGGSDFLMKRLQKGVWGIVSYPLSLELKEVLRMKSVEVLLDPFLEQKYFDSGDYNMAKAKMKNKQLPSAGPDKNLVTGDHIPTPQDLPQRKSSLVTSKLAG

SEQ ID NO: 773440 - protein, 133 aa, Homo sapiens
MSQKQEEENPAEETGEEKQDTQEKEGILPERAEEAKLKAKYPSLGQKPGGSDFLMKRLQKGDYKSLHWSVLLCADEMQKYFDSGDYNMAKAKMKNKQLPSAGPDKNLVTGDHIPTPQDLPQRKSSLVTSKLAG

SEQ ID NO: 773441 - protein, 117 aa, Homo sapiens; identical to SEQ ID NO: 773434

SEQ ID NO: 773442 - protein, 117 aa, Homo sapiens; identical to SEQ ID NO: 773434

SEQ ID NO: 773443 - protein, 117 aa, Homo sapiens; identical to SEQ ID NO: 773434

SEQ ID NO: 773444 - protein, 117 aa, Homo sapiens; identical to SEQ ID NO: 773434

SEQ ID NO: 773445 - protein, 131 aa, Homo sapiens
DVGRVVGKTVNGKGMAGGLGCDVCYWFVEDTQEKEGILPERAEEAKLKAKYPSLGQKPGGSDFLMKRLQKGQKYFDSGDYNMAKAKMKNKQLPSAGPDKNLVTGDHIPTPQDLPQRKSSLVTSKLAGGQVE

SEQ ID NO: 773446 - protein, 137 aa, Homo sapiens
MSQKQEEENPAEETGEEKQDTQEKEGILPERAEEAKLKAKYPSLGQKPGGSDFLMKRLQKGDYKSLHWSVLLCADEMQKYFDSGDYNMAKAKMKNKQLPSAGPDKNLVTGDHIPTPQDLPQRKSSLVTSKLAGGQVE

SEQ ID NO: 773447 - protein, 133 aa, Homo sapiens
HNWDRTSPSSQSIVSHIPDNSISILYHTSPHTTLVFPPTFSLQLLQIQPLYVPLQSLFPFLRVTDQSVEVHQPHPPWTPNIFSAPLWPVSPSLAPGSTRFLHLRSSQILYFFSFLSELPSLSFSLSPQDYWSQ

SEQ ID NO: 773448 - protein, 121 aa, Homo sapiens
MSQKQEEENPAEETGEEKQDTQEKEGILPERAEEAKLKAKYPSLGQKPGGSDFLMKRLQKGQKYFDSGDYNMAKAKMKNKQLPSAGPDKNLVTGDHIPTPQDLPQRKSSLVTSKLAGGQVE

SEQ ID NO: 773449 - protein, 121 aa, Homo sapiens; identical to SEQ ID NO: 773448

SEQ ID NO: 773450 - protein, 117 aa, Homo sapiens; identical to SEQ ID NO: 773434

SEQ ID NO: 773451 - protein, 104 aa, Homo sapiens
MRILTHNKFRVDVEGGNQDTQEKEGILPERAEEAKLKAKYPSLGQKPGGSDFLMKRLQKGVWGIVSYPLSLELKEVLRMKSVEVLLDPFLEVLLLNRSRGEFEI

SEQ ID NO: 773452 - protein, 127 aa, Homo sapiens
DVGRVVGKTVNGKGMAGGLGCDVCYWFVEDTQEKEGILPERAEEAKLKAKYPSLGQKPGGSDFLMKRLQKGQKYFDSGDYNMAKAKMKNKQLPSAGPDKNLVTGDHIPTPQDLPQRKSSLVTSKLAG

SEQ ID NO: 773453 - protein, 117 aa, Homo sapiens; identical to SEQ ID NO: 773434

SEQ ID NO: 773454 - protein, 117 aa, Homo sapiens; identical to SEQ ID NO: 773434

SEQ ID NO: 773455 - protein, 117 aa, Homo sapiens; identical to SEQ ID NO: 773434

SEQ ID NO: 773456 - protein, 121 aa, Homo sapiens; identical to SEQ ID NO: 773448

SEQ ID NO: 773457 - protein, 117 aa, Homo sapiens; identical to SEQ ID NO: 773434

SEQ ID NO: 773458 - protein, 113 aa, Homo sapiens
TCGVNTWTWCLDTQEKEGILPERAEEAKLKAKYPSLGQKPGGSDFLMKRLQKGQKYFDSGDYNMAKAKMKNKQLPSAGPDKNLVTGDHIPTPQDLPQRKSSLVTSKLAGGQVE

SEQ ID NO: 773459 - protein, 178 aa, Homo sapiens
LLDPFLEQKYFDSGDYNMAKAKMKNKQLPSAGPDKNLVTGDHIPTPQDLPQRKSSLVTSKLRVAKLNDAARGSARGSDFLMKRLQKGVWGIVSYPLSLELKEVLRMKSVEVLLDPFLEQKYFDSGDYNMAKAKMKNKQLPSAGPDKNLVTGDHIPTPQDLPQRKSSLVTSKLAGGQVE

SEQ ID NO: 773460 - protein, 105 aa, Homo sapiens; identical to SEQ ID NO: 773433

SEQ ID NO: 773461 - protein, 133 aa, Homo sapiens
LRTLPTAKVFISLPPNLDFKVAPSILKPRKAPALLCLRGPQLEVPCCLCPLKSEQFLAPVGRSRPKANSRPDCDKPRTEACPMKRLSPLKPLPLVGTFQRRRGLGDMKLGKPLLRFPTALVLDPTPNKKKQVK

SEQ ID NO: 773462 - protein, 447 aa, Homo sapiens
LGPWPSLSRMGRVEDGGTTEELEDWDPGTSALPAPGIKQGPREQTGTGPLSQKCWEPEPDAPSQPGPALWSRGRARTQALAGGSSLQQLDPENTGFIGADTFTGLVHSHELPLDPAKLDMLVALAQSNEQGQVCYQELVDLISSKRSSSFKRAIANGQRALPRDGPLDEPGLGVYKRFVRYVAYEILPCEVDRRWYFYRHRSCPPPVFMASVTLAQIIVFLCYGARLNKWVLQTYHPEYMKSPLVYHPGHRARAWRFLTYMFMHVGLEQLGFNALLQLMIGVPLEMVHGLLRISLLYLAGVLAGSLTVSITDMRAPVVGGSGGVYALCSAHLANVVMNWAGMRCPYKLLRMVLALVCMSSEVGRAVWLRFSPPLPASGPQPSFMAHLAGAVVGVSMGLTILRSYEERLRDQCGWWVVLLAYGTFLLFAVFWNVFAYDLLGAHIPPPP

SEQ ID NO: 773463 - protein, 342 aa, Homo sapiens
VTRPKRGAERSGRSGPAGAERSRPQSSPSRPRPPTPDPGPRPGSMDRSSLLQLIQEQQLDPENTGFIGADTFTGLVHSHELPLDPAKLDMLVALAQSNEQGQVCYQELVDLIIVFLCYGARLNKWVLQTYHPEYMKSPLVYHPGHRARAWRFLTYMFMHVGLEQLGFNALLQLMIGVPLEMVHGLLRISLLYLAGVLAGSLTVSITDMRAPVVGGSGGVYALCSAHLANVVMNWAGMRCPYKLLRMVLALVCMSSEVGRAVWLRFSPPLPASGPQPSFMAHLAGAVVGVSMGLTILRSYEERLRDQCGWWVVLLAYGTFLLFAVFWNVFAYDLLGAHIPPPP

SEQ ID NO: 773464 - protein, 471 aa, Homo sapiens
VTRPKRGAERSGRSGPAGAERSRPQSSPSRPRPPTPDPGPRPGSMDRSSLLQLIQEQQLDPENTGFIGADTFTGLVHSHELPLDPAKLDMLVALAQSNEQGQVCYQELVDLISSKRSSSFKRAIANGQRALPRDGPLDEPGLGVYKRFVRYVAYEILPCEVDRRWYFYRHRSCPPPVFMASVTLAQIIVFLCYGARLNKWVLQTYHPEYMKSPLVYHPGHRARAWRFLTYMFMHVGLEQLGFNALLQLMIGVPLEMVHGLLRISLLYLAGVLAGSLTVSITDMRAPVVGGSGGVYALCSAHLANVVMVTGLPGGGRGEGPQVSLTTSRLHTPIELGWDEMSLQVAEDGAGLGVQLSEGPGGGPGGLSACSQGTSHLPRPSAVSSEVGRAVWLRFSPPLPASGPQPSFMAHLAGAVVGVSMGLTILRSYEERLRDQCGWWVVLLAYGTFLLFAVFWNVFAYDLLGAHIPPPP

SEQ ID NO: 773465 - protein, 417 aa, Homo sapiens
VTRPKRGAERSGRSGPAGAERSRPQSSPSRPRPPTPDPGPRPGSMDRSSLLQLIQEQQLDPENTGFIGADTFTGLVHSHELPLDPAKLDMLVALAQSNEQGQVCYQELVDLISSKRSSSFKRAIANGQRALPRDGPLDEPGLGVYKRFVRYVAYEILPCEVDRRWYFYRHRSCPPPVFMASVTLAQIIVFLCYGARLNKWVLQTYHPEYMKSPLVYHPGHRARAWRFLTYMFMHVGLEQLGFNALLQLMIGVPLEMVHGLLRISLLYLAGVLAGSLTVSITDMRAPVVGGSGGVYALCSAHLANVVMNWAGMRCPYKLLRMVLALVCMSSEVGRAVWLRFSPPLPASGPQPSFMAHLAGAVVGVSMGLTILRSYEERLRDQCGWWVVLLAYGTFLLFAVFWNVFAYDLLGAHIPPPP

SEQ ID NO: 773466 - protein, 78 aa, Homo sapiens
VTRPKRGAERSGRSGPAGAERSRPQSSPSRPRPPTPDPGPRPGSMDRSSLLQLIQEQVRRGVVWGAGTAPNAALLPLS

SEQ ID NO: 773467 - protein, 107 aa, Homo sapiens
LCLLRPRLCAPRLTGHGAPPLGPQDEPKLKTIPPTQVVPAGLGFPTHLAPPSPLCAQTHACMHSHTVPSPRTLPLMPLVSPSKPNVKCSLLHESLPNPPTFGASPVA

SEQ ID NO: 773468 - protein, 83 aa, Homo sapiens
MKQCWIDPTCTQRRKAAGETSSEERDSGSNPRIQATCVGLRVACVCFHAQHQDLSTESFPYLPWDPGIKVLPEGFSTMWSIVH

SEQ ID NO: 773469 - protein, 108 aa, Homo sapiens
FEEEVMSPHLQAWALLLCEQGQGPQEASQSLFLPPNLGCSGPTDSPGSGCHVLSGATMKFPAALMASGMLVHVTGRGSLWVVTSPAASDELRGTFSSLCQMTSLSPTL

SEQ ID NO: 773470 - protein, 98 aa, Homo sapiens
NFSLGSINQRLNKRERSKLKNLRRKQRRRERWLQKQGKYSGVGLLDHMTLNNEMSTDEDNEYAEEKDSYICAVCLDVYFNPYMCYPCHHIFCEPCLRT

SEQ ID NO: 773471 - protein, 144 aa, Homo sapiens
MECLGTRLNDISLGEPDLLAAGVQREQNERFNVYLMPTPNLDIYGECTMQITHENIYLWDIHNAKVKLVMWPLSSLRRYGRDSTWFTFESGRMCDTGEGLFTFQTREGEMIYQKVHSATLAIAEQHERLMLEMEQKARVRPLPW

SEQ ID NO: 773472 - protein, 223 aa, Homo sapiens
MECLGTRLNDISLGEPDLLAAGVQREQNERFNVYLMPTPNLDIYGECTMQITHENIYLWDIHNAKVKLVMWPLSSLRRYGRDSTWFTFESGRMCDTGEGLFTFQTREGEMIYQKVHSATLAIAEQHERLMLEMEQKARLQTSLTEPMTLSKSISLPRSAYWHHITRQNSVGEIYSLQGHGFGSSKMSRAQTFPSYAPEQSEEAQQPLSRSSSYGFSYSSSLIQ

SEQ ID NO: 773473 - protein, 402 aa, Homo sapiens
APFPVRGGPAGDPASPPAGARGRAGGGAAAGGGRLDARPAQTRRRTAALDSGERIAGRRSPIALAMASNFNDIVKQGYVKIRSRKLGIFRRCWLVFKKASSKGPRRLEKFPDEKAAYFRNFHKVTELHNIKNITRLPRETKKHAVAIIFHDETSKTFACESELEAEEWCKHLCMECLGTRLNDISLGEPDLLAAGVQREQNERFNVYLMPTPNLDIYGECTMQITHENIYLWDIHNAKVKLVMWPLSSLRRYGRDSTWFTFESGRMCDTGEGLFTFQTREGEMIYQKVHSATLAIAEQHERLMLEMEQKARLQTSLTEPMTLSKSISLPRSAYWHHITRQNSVGEIYSLQGNHENRHSDLTGKSCKKSENRFLEENAPLVMYGITHHLFMDTSTCKVVHDLE

SEQ ID NO: 773474 - protein, 229 aa, Homo sapiens
MECLGTRLNDISLGEPDLLAAGVQREQNERFNVYLMPTPNLDIYGECTMQITHENIYLWDIHNAKVKLVMWPLSSLRRYGRDSTWFTFESGRMCDTGEGLFTFQTREGEMIYQKVHSATLAIAEQHERLMLEMEQKARLQTSLTEPMTLSKSISLPRSAYWHHITRQNSVGEIYSLQGNHENRHSDLTGKSCKKSENRFLEENAPLVMYGITHHLFMDTSTCKVVHDLE

SEQ ID NO: 773475 - protein, 396 aa, Homo sapiens
APFPVRGGPAGDPASPPAGARGRAGGGAAAGGGRLDARPAQTRRRTAALDSGERIAGRRSPIALAMASNFNDIVKQGYVKIRSRKLGIFRRCWLVFKKASSKGPRRLEKFPDEKAAYFRNFHKVTELHNIKNITRLPRETKKHAVAIIFHDETSKTFACESELEAEEWCKHLCMECLGTRLNDISLGEPDLLAAGVQREQNERFNVYLMPTPNLDIYGECTMQITHENIYLWDIHNAKVKLVMWPLSSLRRYGRDSTWFTFESGRMCDTGEGLFTFQTREGEMIYQKVHSATLAIAEQHERLMLEMEQKARLQTSLTEPMTLSKSISLPRSAYWHHITRQNSVGEIYSLQGHGFGSSKMSRAQTFPSYAPEQSEEAQQPLSRSSSYGFSYSSSLIQ

SEQ ID NO: 773476 - protein, 504 aa, Homo sapiens
MRFFCARCCSFGPEMPAVQLLLLACLVWDVGARTAQLRKANDQSGRCQYTFSVASPNESSCPEQSQAMSVIHNLQRDSSTQRLDLEATKARLSSLESLLHQLTLDQAARPQETQEGLQRELGTLRRERDQLETQTRELETAYSNLLRDKSVLEEEKKRLRQENENLARRLESSSQEVARLRRGQCPQTRDTARAVPPGSREVSTWNLDTLAFQELKSELTEVPASRILKESPSGYLRSGEGDTGCGELVWVGEPLTLRTAETITGKYGVWMRDPKPTYPYTQETTWRIDTVGTDVRQVFEYDLISQFMQGYPSKVHILPRPLESTGAVVYSGSLYFQGAESRTVIRYELNTETVKAEKEIPGAGYHGQFPYSWGGYTDIDLAVDEAGLWVIYSTDEAKGAIVLSKLNPENLELEQTWETNIRKQSVANAFIICGTLYTVSSYTSADATVNFAYDTGTGISKTLTIPFKNRYKYSSMIDYNPLEKKLFAWDNLNMVTYDIKLSKM

SEQ ID NO: 773477 - protein, 344 aa, Homo sapiens
MRRPRQGGGGAGGSAAARARAGGLGGGSVPARARGAPAAARAAWLRDLCARMARPPRQHPGVWASLLLLLLTGPAACAASPADDGAGPGGRGPRGRARGDTGADEAVPRHDSSYGTFAGEFYDLRYLSEEGYPFPTAPPVDPFAKIKVDDCGKTKGCFRYGKPGCNAETCDYFLSYRMIGADVEFELSADTDGWVAVGFSSDKKMGGDDVMACVHDDNGRVRIQHFYNVGQWAKEIQRNPARDEEGVFENNRVTCRFKRPVNVPRDETIVDLHLSWYYLFAWGPAIQGSITRHDIDSPPASERVVSIYKYEDIFMPSAAYQTFSSPFCLLLIVALTFYLLMGTP

SEQ ID NO: 773478 - protein, 174 aa, Homo sapiens
MRRPRQGGGGAGGSAAARARAGGLGGGSVPARARGAPAAARAAWLRDLCARMARPPRQHPGVWASLLLLLLTGPAACAASPADDGAGPGGRGPRGRARGDTGADEAVPRHDSSYGTFAGEFYDLRYLSEEGYPFPTAPPVDPFAKIKVDDCGKTKGCFRQDSAFLISSLVMLVH

SEQ ID NO: 773479 - protein, 186 aa, Homo sapiens
VQHGRRGLVVVLRLPIALPLHGDVAGIEAFDQAGQADLVLGQLIPGWGQGVHLWFSGLPFGFGDGFLDGGWEGFVGDLALVLLAIQPVLVQDGEDADHTVRAVVLLLPRLCLGIMHLHAVHVPVELDLRVFVAHVHHHAHVHCTLYDDAPRPYLAFLRYDYRDLLPSLRSWPRRYLCTEVSHHPCR

SEQ ID NO: 773480 - protein, 95 aa, Homo sapiens
TWDGLEKLRYSHGATGLLGGSSGGQGRPPLSHSRGTLCGLLQWGLAGSDAGGWAVGTHLGDRHVTQAVDPKTWERGCGKAGASASGPHPPRILGR

SEQ ID NO: 773481 - protein, 110 aa, Homo sapiens
MFLASWLLFCIVAPKDDAHLSFIQCKDIWKDNRKYSCFHFKSDQLLELASKACTSFQAQSRSFTAGAVPSEHPELPCGSQQLCCGCTARLGGRWIGASRCGSGSAFLASP

SEQ ID NO: 773482 - protein, 171 aa, Homo sapiens
MVKLNSNPSEKGTKPPSVEDGFQTVPLITPLEVNHLQLPAPEKVIVKTRTEYQPEQKNKGKFRVPKIAEFTVTILVSLALAFLACIVFLVVYKAFTYDHSCPEGFVYKHKRCIPASLDAYYSSQDPNSRSRFYTVISHYSVAKQSTARAIGPWLSAAAVIHEPKPPKTQGH

SEQ ID NO: 773483 - protein, 119 aa, Homo sapiens
MVKLNSNPSEKGTKPPSVEDGFQTVPLITPLEVNHLQLPAPEKVIVKTRTEYQPEQKNKGKFRVPKIAEFTVTILVSLALAFLACIVFLVVYKASPPTSNHPESPVNSFVIQSGITSCP

SEQ ID NO: 773484 - protein, 171 aa, Homo sapiens; identical to SEQ ID NO: 773482

SEQ ID NO: 773485 - protein, 171 aa, Homo sapiens; identical to SEQ ID NO: 773482

SEQ ID NO: 773486 - protein, 210 aa, Homo sapiens
MVKLNSNPSEKGTKPPSVEDGFQTVPLITPLEVNHLQLPAPEKVIVKTRTEYQPEQKNKGKFRVPKIAEFTVTILVSLALAFLACIVFLVVYKAFTYDHSCPEGFVYKHKRCIPASLDAYYSSQDPNSRSRFYTVISHYSVAKQSTARAIGPWLSAAAVIHEPKPPKTQGGRTHQKRGVCWSCLNRYFFLFLGIVDSSPSQAHVQRHVSC

SEQ ID NO: 773487 - protein, 109 aa, Homo sapiens
MVKLNSNPSEKGTKPPSVEDGFQTVPLITPLEVNHLQLPAPEKVIVKTRTEYQPEQKNKGKFRVPKIAEFTVTILVSLALAFLACIVFLVVYKAWGEERTKNVVCAGVV

SEQ ID NO: 773488 - protein, 171 aa, Homo sapiens; identical to SEQ ID NO: 773482

SEQ ID NO: 773489 - protein, 74 aa, Homo sapiens
RQLPGALPCSLTPERRSSDPDTREALSFQHHKLGLRREDSWPSSSSSNWLESALTPHECSTVWEERRKDGEAEQ

SEQ ID NO: 773490 - protein, 171 aa, Homo sapiens; identical to SEQ ID NO: 773482

SEQ ID NO: 773491 - protein, 171 aa, Homo sapiens; identical to SEQ ID NO: 773482

SEQ ID NO: 773492 - protein, 171 aa, Homo sapiens; identical to SEQ ID NO: 773482

SEQ ID NO: 773493 - protein, 119 aa, Homo sapiens
MVKLNSNPSEKGTKPPSVEDGFQTVPLITPLEVNHLQLPAPEKVIVKTRTEYQPEQKNKGKFRVPKIAEFTVTILVSLALAFLACIVFLVVYKAFTYDHSCPEGFVYKLPQPPITLSHL

SEQ ID NO: 773494 - protein, 102 aa, Homo sapiens
MVKLNSNPSEKGTKPPSVEDGFQTVPLITPLEVNHLQLPAPEKVIVKTRTEYQPEQKNKGKFRVPKIAEFTVMSATQHRPSESGPRPSCVQVLAGISRYLHE

SEQ ID NO: 773495 - protein, 110 aa, Homo sapiens
MAKHHPDLIFCRKQAGVAIGRLCEKCDGKCVICDSYVRPCTLVRICDECNYGSYQGRCVICGGPGVSDAYYCKECTIQEKDRDGCPKIVNLGSSKTDLFYERKKYGFKKR

SEQ ID NO: 773496 - protein, 110 aa, Homo sapiens; identical to SEQ ID NO: 773495

SEQ ID NO: 773497 - protein, 110 aa, Homo sapiens; identical to SEQ ID NO: 773495

SEQ ID NO: 773498 - protein, 110 aa, Homo sapiens; identical to SEQ ID NO: 773495

SEQ ID NO: 773499 - protein, 110 aa, Homo sapiens; identical to SEQ ID NO: 773495

SEQ ID NO: 773500 - protein, 110 aa, Homo sapiens; identical to SEQ ID NO: 773495

SEQ ID NO: 773501 - protein, 127 aa, Homo sapiens
QRNLKQVMSVPGREPSTSFPCSPGQKPHSSLWLHSPVSRAPASVQLPPGNLPSSHDYLCPSHSCFSLFPNIKTLPVSGYCPCSYTMYLNDDSTVPFSSFRSRLRDVSHALPPPSEDSSACQSLTLLR

SEQ ID NO: 773502 - protein, 81 aa, Homo sapiens
MSHIAYHCHTSLNVTRHCQCQCHTVPYIPHRHTMSHIVTNRFHTMSVSQHCVTQCHSVHTSVSQCHSMSYSSHIVHCHNIT

SEQ ID NO: 773503 - protein, 124 aa, Homo sapiens
RVSTDQQLKGSVSQDCSLLQMPVPSLGCQGTHTSVQLGYQPGGSHGPLLRFNNVIKAHRTQGNVTYVKDTNQQQHEEVHRAMSGMSPLQELLFPWNLEGTTLPIHGCIHQPGSSLNSPHTPAIS

SEQ ID NO: 773504 - protein, 1255 aa, Homo sapiens
MNGYAEFPPSPSNPTKEPVEPQPSQVPLQEDVDMSSGSSGHETNENCSTGRDSQGSDCDDSGKELGMLVEPPDARQSPDTFSLMMAKSEHNPSTSGCSSDQSSKVDTHKELIKTLKELKVHLPADKKAKGKASTLATLKYALRSVKQVKANEEYYQLLMSSEGHPCGADVPSYTVEEMESVTSEHIVKNADMFAVAVSLVSGKILYISDQVASIFHCKRDAFSDAKFVEFLAPHDVGVFHSFTSPYKLPLWSMCSGADSFTQECMEEKSFFCRVSVRKSHENEIRYHPFRMTPYLVKVRDQQGAESQLCCLLLAERVHSGYEAPRIPPEKRIFTTTHTPNCLFQDVDERAVPLLGYLPQDLIETPVLVQLHPSDRPLMLAIHKKILQSGGQPFDYSPIRFRARNGEYITLDTSWSSFINPWSRKISFIIGRHKVRVGPLNEDVFAAHPCTEEKALHPSIQELTEQIHRLLLQPVPHSGSSGYGSLGSNGSHEHLMSQTSSSDSNGHEDSRRRRAEICKNGNKTKNRSHYSHESGEQKKKSVTEMQTNPPAEKKAVPAMEKDSLGVSFPEELACKNQPTCSYQQISCLDSVIRYLESCNEAATLKRKCEFPANVPALRSSDKRKATVSPGPHAGEAEPPSRVNSRTGVGTHLTSLALPGKAESVASLTSQCSYSSTIVHVGDKKPQPELEMVEDAASGPESLDCLAGPALACGLSQEKEPFKKLGLTKEVLAAHTQKEEQSFLQKFKEIRKLSIFQSHCHYYLQERSKGQPSERTAPGLRNTSGIDSPWKKTGKNRKLKSKRVKPRDSSESTGSGGPVSARPPLVGLNATAWSPSDTSQSSCPAVPFPAPVPAAYSLPVFPAPGTVAAPPAPPHASFTVPAVPVDLQHQFAVQPPPFPAPLAPVMAFMLPSYSFPSGTPNLPQAFFPSQPQFPSHPTLTSEMASASQPEFPSRTSIPRQPCACPATRATPPSAMGRASPPLFQSRSSSPLQLNLLQLEEAPEGGTGAMGTTGATETAAVGADCKPGTSRDQQPKAPLTRDEPSDTQNSDALSTSSGLLNLLLNEDLCSASGSAASESLGSGSLGCDASPSGAGSSDTSHTSKYFGSIDSSENNHKAKMNTGMEESEHFIKCVLQDPIWLLMADADSSVMMTYQLPSRNLEAVLKEDREKLKLLQKLQPRFTESQKQELREVHQWMQTGGLPAAIDVAECVYCENKEKGNICIPYEEDIPSLGLSEVSDTKEDENGSPLNHRIEEQT

SEQ ID NO: 773505 - protein, 1219 aa, Homo sapiens
MNGYAEFPPSPSNPTKEPVEPQPSQVPLQEDVDMSSGSSGHETNENCSTGRDSQGSDCDDSGKELGMLVEPPDARQSPDTFSLMMAKSEHNPSTSGCSSDQSSKVDTHKELIKTLKELKVHLPADKKAKGKASTLATLKYALRSVKQVKANEEYYQLLMSSEGHPCGADVPSYTVEEMESVTSEHIVKNADMFAVAVSLVSGKILYISDQVASIFHCKRDAFSDAKFVEFLAPHDVGVFHSFTSPYKLPLWSMCSGADSFTQECMEEKSFFCRVSVRKSHENEIRYHPFRMTPYLVKVRDQQGAESQLCCLLLAERVHSGYEAPRIPPEKRIFTTTHTPNCLFQDVEKVLQSGGQPFDYSPIRFRARNGEYITLDTSWSSFINPWSRKISFIIGRHKVRVGPLNEDVFAAHPCTEEKALHPSIQELTEQIHRLLLQPVPHSGSSGYGSLGSNGSHEHLMSQTSSSDSNGHEDSRRRRAEICKNGNKTKNRSHYSHESGEQKKKSVTEMQTNPPAEKKAVPAMEKDSLGVSFPEELACKNQPTCSYQQISCLDSVIRYLESCNEAATLKRKCEFPANVPALRSSDKRKATVSPGPHAGEAEPPSRVNSRTGVGTHLTSLALPGKAESVASLTSQCSYSSTIVHVGDKKPQPELEMVEDAASGPESLDCLAGPALACGLSQEKEPFKKLGLTKEVLAAHTQKEEQSFLQKFKEIRKLSIFQSHCHYYLQERSKGQPSERTAPGLRNTSGIDSPWKKTGKNRKLKSKRVKPRDSSESTGSGGPVSARPPLVGLNATAWSPSDTSQSSCPAVPFPAPVPAAYSLPVFPAPGTVAAPPAPPHASFTVPAVPVDLQHQFAVQPPPFPAPLAPVMAFMLPSYSFPSGTPNLPQAFFPSQPQFPSHPTLTSEMASASQPEFPSRTSIPRQPCACPATRATPPSAMGRASPPLFQSRSSSPLQLNLLQLEEAPEGGTGAMGTTGATETAAVGADCKPGTSRDQQPKAPLTRDEPSDTQNSDALSTSSGLLNLLLNEDLCSASGSAASESLGSGSLGCDASPSGAGSSDTSHTSKYFGSIDSSENNHKAKMNTGMEESEHFIKCVLQDPIWLLMADADSSVMMTYQLPSRNLEAVLKEDREKLKLLQKLQPRFTESQKQELREVHQWMQTGGLPAAIDVAECVYCENKEKGNICIPYEEDIPSLGLSEVSDTKEDENGSPLNHRIEEQT

SEQ ID NO: 773506 - protein, 1219 aa, Homo sapiens; identical to SEQ ID NO: 773505

SEQ ID NO: 773507 - protein, 1219 aa, Homo sapiens; identical to SEQ ID NO: 773505

SEQ ID NO: 773508 - protein, 752 aa, Homo sapiens [sequence omitted]

SEQ ID NO: 773509 - protein, 203 aa, Homo sapiens
LLKGRGDEAQIEKRIQEIIEQLDVTTSEYEKEKLNARLAKLSDGVASINTGVYQMPPENNHKAKMNTGMEESEHFIKCVLQDPIWLLMADADSSVMMTYQLPSRNLEAVLKEDREKLKLLQKLQPRFTESQKQELREVHQWMQTGGLPAAIDVAECVYCENKEKGNICIPYEEDIPSLGLSEVSDTKEDENGSPLNHRIEEQT

SEQ ID NO: 773510 - protein, 1219 aa, Homo sapiens; identical to SEQ ID NO: 773505

SEQ ID NO: 773511 - protein, 1159 aa, Homo sapiens
LALQTRTCSAEAASPELDPEPGLGDPSSHLRPAFQISQPPAMETFFRRHFRGKVPGPGEGQRRPSSVGLPTGKARRRSPAGQASSSLAQRRRSSAQLQGCLLSCGVRAQCSSRRRSSTVPPSCNPRFIVDKVLTPQPTTVGAQLLGAPLLLTGLVGMNEEEGVQEDVVAEASSAIQPGTKTPGPPPPRGAQPLLPLPRYLRRASSHLLPADAVYDHALWGLHGYYRRLSQRRPSGQHPGPGGRRASGTTAGTMLPTRVRPLSRRRQVALRRKAAGPQAWSALLAKAITKSGLQHLAPPPPTPGAPCSESERQIRSTVDWSESATYGEHIWFETNVSGDFCYVGEQYCVARMLQKSVSRRKCAACKIVVHTPCIEQLEKINFRCKPSFRESGSRNVREPTFVRHHWVHRRRQDGKCRHCGKGFQQKFTFHSKEIVAISCSWCKQAYHSKVSCFMLQQIEEPCSLGVHAAVVIPPTWILRARRPQNTLKASKKKKRASFKRKSSKKGPEEGRWRPFIIRPTPSPLMKPLLVFVNPKSGGNQGAKIIQSFLWYLNPRQVFDLSQGGPKEALEMYRKVHNLRILACGGDGTVGWILSTLDQLRLKPPPPVAILPLGTGNDLARTLNWGGGYTDEPVSKILSHVEEGNVVQLDRWDLHAEPNPEAGPEDRDEGATDRLPLDVFNNYFSLGFDAHVTLEFHESREANPEKFNSRFRNKMFYAGTAFSDFLMGSSKDLAKHIRVVCDGMDLTPKIQDLKPQCVVFLNIPRYCAGTMPWGHPGEHHDFEPQRHDDGYLEVIGFTMTSLAALQVGGHGERLTQCREVVLTTSKAIPVQVDGEPCKLAASRIRIALRNQATMVQKAKRRSAAPLHSDQQPVPEQLRIQVSRVSMHDYEALHYDKEQLKEASVPLGTVVVPGDSDLELCRAHIERLQQEPDGAGAKSPTCQKLSPKWCFLDATTASRFYRIDRAQEHLNYVTEIAQDEIYILDPELLGASARPDLPTPTSPLPTSPCSPTPRSLQGDAAPPQGEELIEAAKRNDFCKLQELHRAGGDLMHRDEQSRTLLHHAVSTGSKDVVRYLLDHAPPEILDAVEENGETCLHQAAALGQRTICHYIVEAGASLMKTDQQGDTPRQRAEKAQDTELAAYLENRQHYQMIQREDQETAV

SEQ ID NO: 773512 - protein, 144 aa, Homo sapiens
GGSCNESSALGPVEALGTEEGERPGSLRQMWRYRSWDVPQIPSEAPQTQKAITKSGLQHLAPPPPTPGAPCSESERQIRSTVDWSESATYGEHIWFETNVSGDFCYVGEQYCVARMLQKSVSRRKCAACKIVVHTPCIEQLEKE

SEQ ID NO: 773513 - protein, 149 aa, Homo sapiens
GRTMAEGQGGGGQRWDWAGGGRAAEEEVVRRRCRRGEEAQVAQPWPEGSRGTAAGPPVEERFRQLHLRKQVSYRYRRTWAEGSAAPGTTPLAGVIAQTFIVRPPPAWRWEFRDDCRGISVFSCTAGRRQLLRLLLCLNRESRIHPICGG

SEQ ID NO: 773514 - protein, 126 aa, Homo sapiens
LADGAQSRGAHHDERVVGSEARPLPPAASSPCGASSVLVPPTPSSLPSLAPTLSQPGLCFSQQEPDGAGAKSPTCQKLSLPFPTWGLSLPSALWPGVTLTFVLWLEFLLRKEQSLGPPCPQPWCHL

SEQ ID NO: 773515 - protein, 924 aa, Homo sapiens
GGSCNESSALGPVEALGTEEGERPGSLRQMWRYRSWDVPQIPSEAPQTQKAITKSGLQHLAPPPPTPGAPCSESERQIRSTVDWSESATYGEHIWFETNVSGDFCYVGEQYCVARMLQKSVSRRKCAACKIVVHTPCIEQLEKINFRCKPSFRESGSRNVREPTFVRHHWVHRRRQDGKCRHCGKGFQQKFTFHSKEIVAISCSWCKQAYHSKVSCFMLQQIEEPCSLGVHAAVVIPPTWILRARRPQNTLKASKKKKRASFKRKSSKKGPEEGRWRPFIIRPTPSPLMKPLLVFVNPKSGGNQGAKIIQSFLWYLNPRQVFDLSQGGPKEALEMYRKVHNLRILACGGDGTVGWILSTLDQLRLKPPPPVAILPLGTGNDLARTLNWGGGYTDEPVSKILSHVEEGNVVQLDRWDLHAEPNPEAGPEDRDEGATDRLPLDVFNNYFSLGFDAHVTLEFHESREANPEKFNSRFRNKMFYAGTAFSDFLMGSSKDLAKHIRVVCDGMDLTPKIQDLKPQCVVFLNIPRYCAGTMPWGHPGEHHDFEPQRHDDGYLEVIGFTMTSLAALQVGGHGERLTQCREVVLTTSKAIPVQVDGEPCKLAASRIRIALRNQATMVQKAKRRSAAPLHSDQQPVPEQLRIQVSRVSMHDYEALHYDKEQLKEASVPLGTVVVPGDSDLELCRAHIERLQQEPDGAGAKSPTCQKLSPKWCFLDATTASRFYRIDRAQEHLNYVTEIAQDEIYILDPELLGASARPDLPTPTSPLPTSPCSPTPRSLQGDAAPPQGEELIEAAKRNDFCKLQELHRAGGDLMHRDEQSRTLLHHAVSTGSKDVVRYLLDHAPPEILDAVEENGETCLHQAAALGQRTICHYIVEAGASLMKTDQQGDTPRQRAEKAQDTELAAYLENRQHYQMIQREDQETAV

SEQ ID NO: 773516 - protein, 898 aa, Homo sapiens
GGSCNESSALGPVEALGTEEGERPGSLRQMWRYRSWDVPQIPSEAPQTQKAITKSGLQHLAPPPPTPGAPCSESERQIRSTVDWSESATYGEHIWFETNVSGDFCYVGEQYCVARMLINFRCKPSFRESGSRNVREPTFVRHHWVHRRRQDGKCRHCGKGFQQKFTFHSKEIVAISCSWCKQAYHSKVSCFMLQQIEEPCSLGVHAAVVIPPTWILRARRPQNTLKASKKKKRASFKRKSSKKGPEEGRWRPFIIRPTPSPLMKPLLVFVNPKSGGNQGAKIIQSFLWYLNPRQVFDLSQGGPKEALEMYRKVHNLRILACGGDGTVGWILSTLDQLRLKPPPPVAILPLGTGNDLARTLNWGGGYTDEPVSKILSHVEEGNVVQLDRWDLHAEPNPEAGPEDRDEGATDRLPLDVFNNYFSLGFDAHVTLEFHESREANPEKFNSRFRNKMFYAGTAFSDFLMGSSKDLAKHIRVVCDGMDLTPKIQDLKPQCVVFLNIPRYCAGTMPWGHPGEHHDFEPQRHDDGYLEVIGFTMTSLAALQVGGHGERLTQCREVVLTTSKAIPVQVDGEPCKLAASRIRIALRNQATMVQKAKRRSAAPLHSDQQPVPEQLRIQVSRVSMHDYEALHYDKEQLKEASVPLGTVVVPGDSDLELCRAHIERLQQEPDGAGAKSPTCQKLSPKWCFLDATTASRFYRIDRAQEHLNYVTEIAQDEIYILDPELLGASARPDLPTPTSPLPTSPCSPTPRSLQGDAAPPQGEELIEAAKRNDFCKLQELHRAGGDLMHRDEQSRTLLHHAVSTGSKDVVRYLLDHAPPEILDAVEENGETCLHQAAALGQRTICHYIVEAGASLMKTDQQGDTPRQRAEKAQDTELAAYLENRQHYQMIQREDQETAV

SEQ ID NO: 773517 - protein, 685 aa, Homo sapiens
SPTPLLPLQNTLKASKKKKRASFKRKSSKKGPEEGRWRPFIIRPTPSPLMKPLLVFVNPKSGGNQGAKIIQSFLWYLNPRQVFDLSQGGPKEALEMYRKVHNLRILACGGDGTVGWILSTLDQLRLKPPPPVAILPLGTGNDLARTLNWGGGYTDEPVSKILSHVEEGNVVQLDRWDLHAEPNPEAGPEDRDEGATDRLPLDVFNNYFSLGFDAHVTLEFHESREANPEKFNSRFRNKMFYAGTAFSDFLMGSSKDLAKHIRVVCDGMDLTPKIQDLKPQCVVFLNIPRYCAGTMPWGHPGEHHDFEPQRHDDGYLEVIGFTMTSLAALQVGGHGERLTQCREVVLTTSKAIPVQVDGEPCKLAASRIRIALRNQATMVQKAKRRSAAPLHSDQQPVPEQLRIQVSRVSMHDYEALHYDKEQLKEASVPLGTVVVPGDSDLELCRAHIERLQQEPDGAGAKSPTCQKLSPKWCFLDATTASRFYRIDRAQEHLNYVTEIAQDEIYILDPELLGASARPDLPTPTSPLPTSPCSPTPRSLQGDAAPPQGEELIEAAKRNDFCKLQELHRAGGDLMHRDEQSRTLLHHAVSTGSKDVVRYLLDHAPPEILDAVEENGETCLHQAAALGQRTICHYIVEAGASLMKTDQQGDTPRQRAEKAQDTELAAYLENRQHYQMIQREDQETAV

SEQ ID NO: 773518 - protein, 955 aa, Homo sapiens
GGSCNESSALGPVEALGTEEGERPGSLRQMWRYRSWDVPQIPSEAPQTQKAITKSGLQHLAPPPPTPGAPCSESERQIRSTVDWSESATYGEHIWFETNVSGDFCYVGEQYCVARMLQKSVSRRKCAACKIVVHTPCIEQLEKINFRCKPSFRESGSRNVREPTFVRHHWVHRRRQDGKCRHCGKGFQQKFTFHSKEIVAISCSWCKQAYHSKVSCFMLQQIEEPCSLGVHAAVVIPPTWILRARRPQNTLKASKKKKRASFKRKSSKKGPEEGRWRPFIIRPTPSPLMKPLLVFVNPKSGGNQGAKIIQSFLWYLNPRQVFDLSQGGPKEALEMYRKVHNLRILACGGDGTVSSPHGPAEHQGWACSRGPCGPDLPLFFLPQVGWILSTLDQLRLKPPPPVAILPLGTGNDLARTLNWGGGYTDEPVSKILSHVEEGNVVQLDRWDLHAEPNPEAGPEDRDEGATDRLPLDVFNNYFSLGFDAHVTLEFHESREANPEKFNSRFRNKMFYAGTAFSDFLMGSSKDLAKHIRVVCDGMDLTPKIQDLKPQCVVFLNIPRYCAGTMPWGHPGEHHDFEPQRHDDGYLEVIGFTMTSLAALQVGGHGERLTQCREVVLTTSKAIPVQVDGEPCKLAASRIRIALRNQATMVQKAKRRSAAPLHSDQQPVPEQLRIQVSRVSMHDYEALHYDKEQLKEASVPLGTVVVPGDSDLELCRAHIERLQQEPDGAGAKSPTCQKLSPKWCFLDATTASRFYRIDRAQEHLNYVTEIAQDEIYILDPELLGASARPDLPTPTSPLPTSPCSPTPRSLQGDAAPPQGEELIEAAKRNDFCKLQELHRAGGDLMHRDEQSRTLLHHAVSTGSKDVVRYLLDHAPPEILDAVEENGETCLHQAAALGQRTICHYIVEAGASLMKTDQQGDTPRQRAEKAQDTELAAYLENRQHYQMIQREDQETAV

SEQ ID NO: 773519 - protein, 360 aa, Homo sapiens
MAALQVGGHGERLTQCREVVLTTSKAIPVQVDGEPCKLAASRIRIALRNQATMVQKAKRRSAAPLHSDQQPVPEQLRIQVSRVSMHDYEALHYDKEQLKEASVPLGTVVVPGDSDLELCRAHIERLQQEPDGAGAKSPTCQKLSPKWCFLDATTASRFYRIDRAQEHLNYVTEIAQDEIYILDPELLGASARPDLPTPTSPLPTSPCSPTPRSLQGDAAPPQGEELIEAAKRNDFCKLQELHRAGGDLMHRDEQSRTLLHHAVSTGSKDVVRYLLDHAPPEILDAVEENGETCLHQAAALGQRTICHYIVEAGASLMKTDQQGDTPRQRAEKAQDTELAAYLENRQHYQMIQREDQETAV

SEQ ID NO: 773520 - protein, 864 aa, Homo sapiens
GGSCNESSALGPVEALGTEEGERPGSLRQMWRYRSWDVPQIPSEAPQTQKAITKSGLQHLAPPPPTPGAPCSESERQIRSTVDWSESATYGEHIWFETNVSGDFCYVGEQYCVARMLQKSVSRRKCAACKIVVHTPCIEQLEKINFRCKPSFRESGSRNVREPTFVRHHWVHRRRQDGKCRHCGKGFQQKFTFHSKEIVAISCSWCKQAYHSKVSCFMLQQIEEPCSLGVHAAVVIPPTWILRARRPQNTLKASKKKKRASFKRKSSKKGPEEGRWRPFIIRPTPSPLMKPLLVFVNPKSGGNQGAKIIQSFLWYLNPRQVFDLSQGGPKEALEMYRKVHNLRILACGGDGTVGWILSTLDQLRLKPPPPVAILPLGTGNDLARTLNWGGGYTDEPVSKILSHVEEGNVVQLDRWDLHAEPNPEAGPEDRDEGATDRLPLDVFNNYFSLGFDAHVTLEFHESREANPEKFNSRFRNKMFYAGTAFSDFLMGSSKDLAKHIRVVCDGMDLTPKIQDLKPQCVVFLNIPRYCAGTMPWGHPGEHHDFEPQRHDDGYLEVIGFTMTSLAALQVGGHGERLTQCREVVLTTSKAIPVQVDGEPCKLAASRIRIALRNQATMVQKAKRRSAAPLHSDQQPVPEQLRIQVSRVSMHDYEALHYDKEQLKEASVPLGTVVVPGDSDLELCRAHIERLQQEPDGAGAKSPTCQKLSPKWCFLDATTASRFYRIDRAQEHLNYVTEIAQDEIYILDPELLGASARPDLPTPTSPLPTSPCSPTPRSLQGDAAPPQGEELIEAAKRNDFCKLQELHRAGGDLMHRDEQSRTLLHHAVSTGSKDVVRYLLDHAPPEILDPVEENGETTPLSCTKS

SEQ ID NO: 773521 - protein, 117 aa, Homo sapiens
QTVCVIGRDEQSRTLLHHAVSTGSKDVVRYLLDHAPPEILDAVEENGETCLHQAAALGQRTICHYIVEAGASLMKTDQQGDTPRQRAEKAQDTELAAYLENRQHYQMIQREDQETAV

SEQ ID NO: 773522 - protein, 225 aa, Homo sapiens
MAPSRGFLAQSTCPWCLERSRSEEALLQGLVTSAAREPTGCGVRGPSSGVLQRDPQRQLRSKMCERTRFRPVLVYPAVGQRVSSGKEGWPQEVQPCHASCPQLQELHRAGGDLMHRDEQSRTLLHHAVSTGSKDVVRYLLDHAPPEILDAVEENGETCLHQAAALGQRTICHYIVEAGASLMKTDQQGDTPRQRAEKAQDTELAAYLENRQHYQMIQREDQETAV

SEQ ID NO: 773523 - protein, 302 aa, Homo sapiens
MAPSRGFLAQSTCPWCLERSRSEEALLQGLVTSAAREPTGCGVRGPSSGVLQRDPQRQLRSKMCERTRFRPVLVYPAVGQRVSSGKEGWPQEVQPCHASCPQLQELHRAGGDLMHRDEQSRTLLHHAVSTGSKDVVRYLLDHAPPEILDAVEEKKYLGSAEPWSPRKPPFSPPLPFCQVRAHKLPGHICHPLGHPYCPRALNFLPFLMALGRQMGGSGDGMGYTASPCSPSGETCLHQAAALGQRTICHYIVEAGASLMKTDQQGDTPRQRAEKAQDTELAAYLENRQHYQMIQREDQETAV

SEQ ID NO: 773524 - protein, 144 aa, Homo sapiens
MPPPKEPPRPRAGLRSWGGLTCSPEDPAGPGGSQGTRHGWVGYAFAGVLGQGAPWPQQMPSQEWRGWRGGGLREEASWAPWSSAGSPAPAPAPPHLLRASSRKLSACCTCLPCLAWHPLRRPSPLPCHFIADCAAWGWGAGLSR

SEQ ID NO: 773525 - protein, 171 aa, Homo sapiens
GRTMAEGQGGGGQRWDWAGGGRAAEEEVVRRRCRRGEEAQVAQPWPEGSRGTAAGPPVEERFRQLHLRKQVSYRKAITKSGLQHLAPPPPTPGAPCSESERQIRSTVDWSESATYGEHIWFETNVSGDFCYVGEQYCVARMLQKSVSRRKCAACKIVVHTPCIEQLEKVGG

SEQ ID NO: 773526 - protein, 71 aa, Homo sapiens
RFLQPRVLSRVGSPQDCAPAHPSPSEIFPLLPQPTFVRHHWVHRRRQDGKCRHCGKVRGPARGHRHLHLRA

SEQ ID NO: 773527 - protein, 141 aa, Homo sapiens
FLLCGLVRSGPEMVREGTKREQSHPGGLLRMMVGCPGREGAYSLSPCLPGGPLETLHHQAHPLPAHEAPAGVCEPQEWGQPGERGLASQLRARAGVGVQPVCQQLFPEPVSGFYPNPSFPGILRKSCPFSTPHPLLALVPT

SEQ ID NO: 773528 - protein, 929 aa, Homo sapiens
MEPRDGSPEARSSDSESASASSSGSERDAGPEPDKAPRRLNKRRFPGLRLFGHRKAITKSGLQHLAPPPPTPGAPCSESERQIRSTVDWSESATYGEHIWFETNVSGDFCYVGEQYCVARMLQKSVSRRKCAACKIVVHTPCIEQLEKINFRCKPSFRESGSRNVREPTFVRHHWVHRRRQDGKCRHCGKGFQQKFTFHSKEIVAISCSWCKQAYHSKVSCFMLQQIEEPCSLGVHAAVVIPPTWILRARRPQNTLKASKKKKRASFKRKSSKKGPEEGRWRPFIIRPTPSPLMKPLLVFVNPKSGGNQGAKIIQSFLWYLNPRQVFDLSQGGPKEALEMYRKVHNLRILACGGDGTVGWILSTLDQLRLKPPPPVAILPLGTGNDLARTLNWGGGYTDEPVSKILSHVEEGNVVQLDRWDLHAEPNPEAGPEDRDEGATDRLPLDVFNNYFSLGFDAHVTLEFHESREANPEKFNSRFRNKMFYAGTAFSDFLMGSSKDLAKHIRVVCDGMDLTPKIQDLKPQCVVFLNIPRYCAGTMPWGHPGEHHDFEPQRHDDGYLEVIGFTMTSLAALQVGGHGERLTQCREVVLTTSKAIPVQVDGEPCKLAASRIRIALRNQATMVQKAKRRSAAPLHSDQQPVPEQLRIQVSRVSMHDYEALHYDKEQLKEASVPLGTVVVPGDSDLELCRAHIERLQQEPDGAGAKSPTCQKLSPKWCFLDATTASRFYRIDRAQEHLNYVTEIAQDEIYILDPELLGASARPDLPTPTSPLPTSPCSPTPRSLQGDAAPPQGEELIEAAKRNDFCKLQELHRAGGDLMHRDEQSRTLLHHAVSTGSKDVVRYLLDHAPPEILDAVEENGETCLHQAAALGQRTICHYIVEAGASLMKTDQQGDTPRQRAEKAQDTELAAYLENRQHYQMIQREDQETAV

SEQ ID NO: 773529 - protein, 255 aa, Homo sapiens
GGSCNESSALGPVEALGTEEGERPGSLRQMWRYRSWDVPQIPSEAPQTQKAITKSGLQHLAPPPPTPGAPCSESERQIRSTVDWSESATYGEHIWFETNVSGDFCYVGEQYCVARMLQKSVSRRKCAACKIVVHTPCIEQLEKINFRCKPSFRESGSRNVREPTFVRHHWVHRRRQDGKCRHCGKGFQQKFTFHSKEIVAISCSWCKQAYHSKVSCFMLQQIEEPCSLGVKQRGHQPLDIGRGQKHEEQKEGYRE

SEQ ID NO: 773530 - protein, 132 aa, Homo sapiens
LVTRRSLCGVQPAAEQVLCSPAVPLGTVVVPGDSDLELCRAHIERLQQEPDGAGAKSPTCQKLSPKWCFLDATTASRFYRIDRAQEHLNYVTEIAQDEIYILDPELLGASARPDLPTPTSQRASGSSDRPQQ

SEQ ID NO: 773531 - protein, 82 aa, Homo sapiens
IQVRPQLRTDMHHHHERIPGTTTTNSLPSLAPTLSQPGLCFSQQEPDGAGAKSPTCQKLSPKWCFLDGESTPRVPSCFVFPP

SEQ ID NO: 773532 - protein, 1023 aa, Homo sapiens
GRTMAEGQGGGGQRWDWAGGGRAAEEEVVRRRCRRGEEAQVAQPWPEGSRGTAAGPPVEERFRQLHLRKQVSYRKAITKSGLQHLAPPPPTPGAPCSESERQIRSTVDWSESATYGEHIWFETNVSGDFCYVGEQYCVARMLQKSVSRRKCAACKIVVHTPCIEQLEKVVGSSALPAPALWVLRPFQRALTPTCYTNGLPGVTQHSGVKSQGPWSQMPAFESWLSLISCCIPTAWNKPGAQWINFRCKPSFRESGSRNVREPTFVRHHWVHRRRQDGKCRHCGKGFQQKFTFHSKEIVAISCSWCKQAYHSKVSCFMLQQIEEPCSLGVHAAVVIPPTWILRARRPQNTLKASKKKKRASFKRKSSKKGPEEGRWRPFIIRPTPSPLMKPLLVFVNPKSGGNQGAKIIQSFLWYLNPRQVFDLSQGGPKEALEMYRKVHNLRILACGGDGTVGWILSTLDQLRLKPPPPVAILPLGTGNDLARTLNWGGGYTDEPVSKILSHVEEGNVVQLDRWDLHAEPNPEAGPEDRDEGATDRLPLDVFNNYFSLGFDAHVTLEFHESREANPEKFNSRFRNKMFYAGTAFSDFLMGSSKDLAKHIRVVCDGMDLTPKIQDLKPQCVVFLNIPRYCAGTMPWGHPGEHHDFEPQRHDDGYLEVIGFTMTSLAALQVGGHGERLTQCREVVLTTSKAIPVQVDGEPCKLAASRIRIALRNQATMVQKAKRRSAAPLHSDQQPVPEQLRIQVSRVSMHDYEALHYDKEQLKEASVPLGTVVVPGDSDLELCRAHIERLQQEPDGAGAKSPTCQKLSPKWCFLDATTASRFYRIDRAQEHLNYVTEIAQDEIYILDPELLGASARPDLPTPTSPLPTSPCSPTPRSLQGDAAPPQGEELIEAAKRNDFCKLQELHRAGGDLMHRDEQSRTLLHHAVSTGSKDVVRYLLDHAPPEILDAVEENGETCLHQAAALGQRTICHYIVEAGASLMKTDQQGDTPRQRAEKAQDTELAAYLENRQHYQMIQREDQETAV

SEQ ID NO: 773533 - protein, 707 aa, Homo sapiens
MLQQIEEPCSLGVHAAVVIPPTWILRARRPQNTLKASKKKKRASFKRKSSKKGPEEGRWRPFIIRPTPSPLMKPLLVFVNPKSGGNQGAKIIQSFLWYLNPRQVFDLSQGGPKEALEMYRKVHNLRILACGGDGTVGWILSTLDQLRLKPPPPVAILPLGTGNDLARTLNWGGGYTDEPVSKILSHVEEGNVVQLDRWDLHAEPNPEAGPEDRDEGATDRLPLDVFNNYFSLGFDAHVTLEFHESREANPEKFNSRFRNKMFYAGTAFSDFLMGSSKDLAKHIRVVCDGMDLTPKIQDLKPQCVVFLNIPRYCAGTMPWGHPGEHHDFEPQRHDDGYLEVIGFTMTSLAALQVGGHGERLTQCREVVLTTSKAIPVQVDGEPCKLAASRIRIALRNQATMVQKAKRRSAAPLHSDQQPVPEQLRIQVSRVSMHDYEALHYDKEQLKEASVPLGTVVVPGDSDLELCRAHIERLQQEPDGAGAKSPTCQKLSPKWCFLDATTASRFYRIDRAQEHLNYVTEIAQDEIYILDPELLGASARPDLPTPTSPLPTSPCSPTPRSLQGDAAPPQGEELIEAAKRNDFCKLQELHRAGGDLMHRDEQSRTLLHHAVSTGSKDVVRYLLDHAPPEILDAVEENGETCLHQAAALGQRTICHYIVEAGASLMKTDQQGDTPRQRAEKAQDTELAAYLENRQHYQMIQREDQETAV

SEQ ID NO: 773534 - protein, 414 aa, Homo sapiens
FWHVGDLTPAPSGSCWSLSMCTRQSSRSLSPGTTTEPQRHDDGYLEVIGFTMTSLAALQVGGHGERLTQCREVVLTTSKAIPVQVDGEPCKLAASRIRIALRNQATMVQKAKRRSAAPLHSDQQPVPEQLRIQVSRVSMHDYEALHYDKEQLKEASVPLGTVVVPGDSDLELCRAHIERLQQEPDGAGAKSPTCQKLSPKWCFLDATTASRFYRIDRAQEHLNYVTEIAQDEIYILDPELLGASARPDLPTPTSPLPTSPCSPTPRSLQGDAAPPQGEELIEAAKRNDFCKLQELHRAGGDLMHRDEQSRTLLHHAVSTGSKDVVRYLLDHAPPEILDAVEENGETCLHQAAALGQRTICHYIVEAGASLMKTDQQGDTPRQRAEKAQDTELAAYLENRQHYQMIQREDQETAV

SEQ ID NO: 773535 - protein, 905 aa, Homo sapiens
GGSCNESSALGPVEALGTEEGERPGSLRQMWRYRSWDVPQIPSEAPQTQKAITKSGLQHLAPPPPTPGAPCSESERQIRSTVDWSESATYGEHIWFETNVSGDFCYVGEQYCVARMLQKSVSRRKCAACKIVVHTPCIEQLEKINFRCKPSFRESGSRNVREPTFVRHHWVHRRRQDGKCRHCGKGFQQKFTFHSKEIVAISCSWCKQAYHSKVSCFMLQQIEEPCSLGVHAAVVIPPTWILRARRPQNTLKASKKKKRASFKRKSSKKGPEEGRWRPFIIRPTPSPLMKPLLVFVNPKSGGNQGAKIIQSFLWYLNPRQVFDLSQGGPKEALEMYRKVHNLRILACGGDGTVGWILSTLDQLRLKPPPPVAILPLGTGNDLARTLNWGGGYTDEPVSKILSHVEEGNVVQLDRWDLHAEPNPEAGPEDRDEGATDRLPLDVFNNYFSLGFDAHVTLEFHESREANPEKFNSRFRNKMFYAGTAFSDFLMGSSKDLAKHIRVVCDGMDLTPKIQDLKPQCVVFLNIPRYCAGTMPWGHPGEHHDFEPQRHDDGYLEVIGFTMTSLAALQVGGHGERLTQCREVVLTTSKAIPVQVDGEPCKLAASRIRIALRNQATMVQKAKRRSAAPLHSDQQPVPEQLRIQVSRVSMHDYEALHYDKEQLKEASVPLGTVVVPGDSDLELCRAHIERLQQEPDGAGAKSPTCQKLSPKWCFLDATTASRFYRIDRAQEHLNYVTEIAQDEIYILDPELLGASARPDLPTPTSPLPTSPCSPTPRSLQGDAAPPQGEELIEAAKRNDFCKLQELHRAGGDLMHRDEQSRTLLHHAVSTGSKDVVRYLLDHAPPEILDAVEENGETCLHQAAALGQRTICHYIVEAGASLMKTDQQGDTPRQRAEKAQDTELAAY

SEQ ID NO: 773536 - protein, 147 aa, Homo sapiens
DPPAAALLQGEELIEAAKRNDFCKLQELHRAGGDLMHRDEQSRTLLHHAVSTGSKDVVRYLLDHAPPEILDAVEENGETCLHQAAALGQRTICHYIVEAGASLMKTDQQGDTPRQRAEKAQDTELAAYLENRQHYQMIQREDQETAV

SEQ ID NO: 773537 - protein, 787 aa, Homo sapiens
GGSCNESSALGPVEALGTEEGERPGSLRQMWRYRSWDVPQIPSEAPQTQKAITKSGLQHLAPPPPTPGAPCSESERQIRSTVDWSESATYGEHIWFETNVSGDFCYVGEQYCVARMLQKSVSRRKCAACKIVVHTPCIEQLEKINFRCKPSFRESGSRNVREPTFVRHHWVHRRRQDGKCRHCGKGFQQKFTFHSKEIVAISCSWCKQAYHSKVSCFMLQQIEEPCSLGVHAAVVIPPTWILRARRPQNTLKASKKKKRASFKRKSSKKGPEEGRWRPFIIRPTPSPLMKPLLVFVNPKSGGNQGAKIIQSFLWYLNPRQVFDLSQGGPKEALEMYRKVHNLRILACGGDGTVGWILSTLDQLRLKPPPPVAILPLGTGNDLARTLNWGGGYTDEPVSKILSHVEEGNVVQLDRWDLHAEPNPEAGPEDRDEGATDRLPLDVFNNYFSLGFDAHVTLEFHESREANPEKFNSRFRNKMFYAGTAFSDFLMGSSKDLAKHIRVVCDGMDLTPKIQDLKPQCVVFLNIPRYCAGTMPWGHPGEHHDFEPQRHDDGYLEVIGFTMTSLAALQVGGHGERLTQCREVVLTTSKAIPVQVDGEPCKLAASRIRIALRNQATMVQKAKRRSAAPLHSDQQPVPEQLRIQVSRVSMHDYEALHYDKEQLKEASVPLGTVVVPGDSDLELCRAHIERLQQEPDGAGAKSPTCQKLSPKWCFLDATTASRFYRIDRAQEHLNYVTEIAQDEIYILDPELLGASARPDLPTPTSHDDDEFRHDDDEFQHDDDECRHH

SEQ ID NO: 773538 - protein, 198 aa, Homo sapiens
LLSTSCTEYWLCSGPPTGSRRDNAARGRAPSLPTSLPHSSGTATGGPRPQGKSPMPPPKEPPRPRAGLRSWGGLTCSPEDPAGPGGSQGTRHGWVGYAFAGVLGQGAPWPQQMPSQEWRGWRGGGLREEASWAPWSSAGSPAPAPAPPHLLRASSRKLSACCTCLPCLAWHPLRRPSPLPCHFIADCAAWGWGAGLSR

SEQ ID NO: 773539 - protein, 595 aa, Homo sapiens
GGSCNESSALGPVEALGTEEGERPGSLRQMWRYRSWDVPQIPSEAPQTQKAITKSGLQHLAPPPPTPGAPCSESERQIRSTVDWSESATYGEHIWFETNVSGDFCYVGEQYCVARMLQKSVSRRKCAACKIVVHTPCIEQLEKINFRCKPSFRESGSRNVREPTFVRHHWVHRRRQDGKCRHCGKGFQQKFTFHSKEIVAISCSWCKQAYHSKVSCFMLQQIEEPCSLGVHAAVVIPPTWILRARRPQNTLKASKKKKRASFKRKSSKKGPEEGRWRPFIIRPTPSPLMKPLLVFVNPKSGGNQGAKIIQSFLWYLNPRQVFDLSQGGPKEALEMYRKVHNLRILACGGDGTVGWILSTLDQLRLKPPPPVAILPLGTGNDLARTLNWGGGYTDEPVSKILSHVEEGNVVQLDRWDLHAEPNPEAGPEDRDEGATDRLPLDVFNNYFSLGFDAHVTLEFHESREANPEKFNSRFRNKMFYAGTAFSDFLMGSSKDLAKHIRVVCDGMDLTPKIQDLKPQCVVFLNIPRYCAGTMPWGHPGEHHDFEPQRHDDGYLEVIGFTMTSLVSGPWAHGAWEHSPKVEGVTHTHLHGPRRP

SEQ ID NO: 773540 - protein, 871 aa, Homo sapiens
KEQEAAQAEREELAAGRMPGGGPQGAPAAAGGGGVSHRAGSRDCLPPAACFRRRRLARRPGYMRSSTGPGIGFLSPAVGTLFRFPGGVSGEESHHSESRARQCGLDSRGLLVRSPVSKSAAAPTVTSVRGTSAHFGIQLRGGTRLPDRLSWPCGPGSAGWQQEFAAMDSSETLDASWEAACSDGARRVRAAGSLPSAELSSNSCSPGCGPEVPPTPPGSHSAFTSSFSFIRLSLGSAGERGEAEGCPPSREAESHCQSPQEMGAKAASLDGPHEDPRCLSQPFSLLATRVSADLAQAARNSSRPERDMHSLPDMDPGSSSSLDPSLAGCGGDGSSGSGDAHSWDTLLRKWEPVLRDCLLRNRRQMEVISLRLKLQKLQEDAVENDDYDKAETLQQRLEDLEQEKISLHFQLPSRQPALSSFLGHLAAQVQAALRRGATQQASGDDTHTPLRMEPRLLEPTAQDSLHVSITRRDWLLQEKQQLQKEIEALQARMFVLEAKDQQLRREIEEQEQQLQWQGCDLTPLVGQLSLGQLQEVSKALQDTLASAGQIPFHAEPPETIRSLQERIKSLNLSLKEITTKVCMSEKFCSTLRKKVNDIETQLPALLEAKMHAISGNHFWTAKDLTEEIRSLTSEREGLEGLLSKLLVLSSRNVKKLGSVKEDYNRLRREVEHQETAYETSVKENTMKYMETLKNKLCSCKCPLLGKVWEADLEACRLLIQCLQLQEARGSLSVEDERQMDDLEGAAPPIPPRLHSEDKRKTPLKVLEEWKTHLIPSLHCAGGEQKEESYILSAELGEKCEDIGKKLLYLEDQLHTAIHSHDEDLIQSLRRELQMVKETLQAMILQLQPAKEAGEREAAASCMTAGVHEAQA

SEQ ID NO: 773541 - protein, 849 aa, Homo sapiens
KEQEAAQAEREELAAGRMPGGGPQGAPAAAGGGGVSHRAGSRDCLPPAACFRRRRLARRPGYMRSSTGPGIGFLSPAVGTLFRFPGGVSGEESHHSESRARQCGLDSRGLLVRSPVSKSAAAPTVTSVRGTSAHFGIQLRGGTRLPDRLSWPCGPGSAGWQQEFAAMDSSETLDASWEAACSDGARRVRAAGSLPSAELSSNSCSPGCGPEVPPTPPGSHSAFTSSFSFIRLSLGSAGERGEAEGCPPSREAESHCQSPQEMGAKAASLDGPHEDPRCLSQPFSLLATRVSADLAQAARNSSRPERDMHSLPDMDPGSSSSLDPSLAGCGGDGSSGSGDAHSWDTLLRKWEPVLRDCLLRNRRQMEVISLRLKLQKLQEDAVENDDYDKAETLQQRLEDLEQEKISLHFQLPSRQPALSSFLGHLAAQVQAALRRGATQQASGDDTHTPLRMEPRLLEPTAQDSLHVSITRRDWLLQEKQQLQKEIEALQARMFVLEAKDQQLRREIEEQEQQLQWQGCDLTPLVGQLSLGQLQEVSKALQDTLASAGQIPFHAEPPETIRSLQERIKSLNLSLKEITTKVCMSEKFCSTLRKKVNDIETQLPALLEAKMHAISGNHFWTAKDLTEEIRSLTSEREGLEGLLSKLLVLSSRNVKKLGSVKEDYNRLRREVEHQETAYETSVKENTMKYMETLKNKLCSCKCPLLGKVWEADLEACRLLIQCLQLQEARGSLSVEDERQMDDLEGAAPPIPPRLHSEDKRKTPLKESYILSAELGEKCEDIGKKLLYLEDQLHTAIHSHDEDLIQSLRRELQMVKETLQAMILQLQPAKEAGEREAAASCMTAGVHEAQA

SEQ ID NO: 773542 - protein, 366 aa, Homo sapiens
MHAHYRKHRKLQTSSRDCLPPAACFRRRRLARRPGYMRSSTGPGIGFLSPAVGTLFRFPGGVSGEESHHSESRARQCGLDSRGLLVRSPVSKSAAAPTVTSVRGTSAHFGIQLRGGTRLPDRLSWPCGPGSAGWQQEFAAMDSSETLDASWEAACSDGARRVRAAGSLPSAELSSNSCSPGCGPEVPPTPPGSHSAFTSSFSFIRLSLGSAGERGEAEGCPPSREAESHCQSPQEMGAKAASLDGPHEDPRCLSQPFSLLATRVSADLAQAARNSSRPERDMHSLPDMDPGSSSSLDPSLAGCGGDGSSGSGDAHSWDTLLRKWEPVLRDCLLRNRRQMEVISLRLKLQKLQEDAVENDDYDKGEF

SEQ ID NO: 773543 - protein, 186 aa, Homo sapiens [sequence omitted]

SEQ ID NO: 773544 - protein, 420 aa, Homo sapiens
MEPRLLEPTAQDSLHVSITRRDWLLQEKQQLQKEIEALQARMFVLEAKDQQLRREIEEQEQQLQWQGCDLTPLVGQLSLGQLQEVSKALQDTLASAGQIPFHAEPPETIRSLQERIKSLNLSLKEITTKVCMSEKFCSTLRKKVNDIETQLPALLEAKMHAISGNHFWTAKDLTEEIRSLTSEREGLEGLLSKLLVLSSRNVKKLGSVKEDYNRLRREVEHQETAYETSVKENTMKYMETLKNKLCSCKCPLLGKVWEADLEACRLLIQCLQLQEARGSLSVEDERQMDDLEGAAPPIPPRLHSEDKRKTPLKVLEEWKTHLIPSLHCAGGEQKEESYILSAELGEKCEDIGKKLLYLEDQLHTAIHSHDEDLIQSLRRELQMVKETLQAMILQLQPAKEAGEREAAASCMTAGVHEAQA

SEQ ID NO: 773545 - protein, 147 aa, Homo sapiens
MVLFFLFFPGSRDCLPPAACFRRRRLARRPGYMRSSTGPGIGFLSPAVGTLFRFPGGVSGEESHHSESRARQCGLDSRGLLVRSPVSKSAAAPTVTSVRGTSAHFGIQLRGGTRLPDRLSWPCGPGSAGWQQEFAAMDSSETLDASW

SEQ ID NO: 773546 - protein, 708 aa, Homo sapiens
HRLGSEAACESAEAEFSALPSPSLQTSWSFGPMSRRALRRLRGEQRGQEPLGPGALHFDLRDDDDAEEEGPKRELGVRRPGGAGKEGVRVNNRFELINIDDLEDDPVVNGERSGCALTDAVAPGNKGRGQRGNTESKTDGDDTETVPSEQSHASGKLRKKKKKQKNKKSSTGEASENGLEDIDRILERIEDSTGLNRPGPAPLSSRKHVLYVEHRHLNPDTELKRYFGARAILGEQRPRQRQRVYPKCTWLTTPKSTWPRYSKPGLSMRLLESKKGLSFFAFEHSEEYQQAQHKFLVAVESMEPNNIVVLLQTSPYHVDSLLQLSDACRFQEDQEMARDLVERALYSMECAFHPLFSLTSGACRLDYRRPENRSFYLALYKQMSFLEKRGCPRTALEYCKLILSLEPDEDPLCMLLLIDHLALRARNYEYLIRLFQEWEAHRNLSQLPNFAFSVPLAYFLLSQQTDLPECEQSSARQKASLLIQQALTMFPGVLLPLLESCSVRPDASVSSHRFFGPNAEISQPPALSQLVNLYLGRSHFLWKEPATMSWLEENVHEVLQAVDAGDPAVEACENRRKVLYQRAPRNIHRHVILSEIKEAVAALPPDVTTQSVMGFDPLPPSDTIYSYVRPERLSPISHGNTIALFFRSLLPNYTMEGERPEEGVAGGLNRNQGLNRLMLAVRDMMANFHLNDLEAPHEDDAEGEGEWD

SEQ ID NO: 773547 - protein, 651 aa, Homo sapiens
MWNAPLNAWRYVTVLIGTECEMLYSPATDTQFRSDQIITAAEEGMGMERGKLSLSGTSASQTQASVLHLCNVLILQTRKAAREEASENGLEDIDRILERIEDSTGLNRPGPAPLSSRKHVLYVEHRHLNPDTELKRYFGARAILGEQRPRQRQRVYPKCTWLTTPKSTWPRYSKPGLSMRLLESKKGLSFFAFEHSEEYQQAQHKFLVAVESMEPNNIVVLLQTSPYHVDSLLQLSDACRFQEDQEMARDLVERALYSMECAFHPLFSLTSGACRLDYRRPENRSFYLALYKQMSFLEKRGCPRTALEYCKLILSLEPDEDPLCMLLLIDHLALRARNYEYLIRLFQEWEAHRNLSQLPNFAFSVPLAYFLLSQQTDLPECEQSSARQKASLLIQQALTMFPGVLLPLLESCSVRPDASVSSHRFFGPNAEISQPPALSQLVNLYLGRSHFLWKEPATMSWLEENVHEVLQAVDAGDPAVEACENRRKVLYQRAPRNIHRHVILSEIKEAVAALPPDVTTQSVMGFDPLPPSDTIYSYVRPERKGEEERNSVIWGSQLCVCRPRSFPSPPNVQALACRPLWQAKSYQPWKHHCSLLPVTVAKLYHGGGEARGRSGWGSEPQPGPEQADAGCARHDGQLPPQRPGGAARGRR

SEQ ID NO: 773548 - protein, 93 aa, Homo sapiens
IYRSLIRPGHPGGAEPRQRQRVYPKCTWLTTPKSTWPRYSKPGLSMRLLESKKGLSFFAFEHSEEYQQAQHKFLVAVESMEPNNIVVRGPCSP

SEQ ID NO: 773549 - protein, 676 aa, Homo sapiens
MSRRALRRLRGEQRGQEPLGPGALHFDLRDDDDAEEEGPKRELGVRRPGGAGKEGVRVNNRFELINIDDLEDDPVVNGERSGCALTDAVAPGNKGRGQRGNTESKTDGDDTETVPSEQSHASGKLRKKKKKQKNKKSSTGEASENGLEDIDRILERIEDSTGLNRPGPAPLSSRKHVLYVEHRHLNPDTELKRYFGARAILGEQRPRQRQRVYPKCTWLTTPKSTWPRYSKPGLSMRLLESKKGLSFFAFEHSEEYQQAQHKFLVAVESMEPNNIVVLLQTSPYHVDSLLQLSDACRFQEDQEMARDLVERALYSMECAFHPLFSLTSGACRLDYRRPENRSFYLALYKQMSFLEKRGCPRTALEYCKLILSLEPDEDPLCMLLLIDHLALRARNYEYLIRLFQEWEAHRNLSQLPNFAFSVPLAYFLLSQQTDLPECEQSSARQKASLLIQQALTMFPGVLLPLLESCSVRPDASVSSHRFFGPNAEISQPPALSQLVNLYLGRSHFLWKEPATMSWLEENVHEVLQAVDAGDPAVEACENRRKVLYQRAPRNIHRHVILSEIKEAVAALPPDVTTQSVMGFDPLPPSDTIYSYVRPERLSPISHGNTIALFFRSLLPNYTMEGERPEEGVAGGLNRNQGLNRLMLAVRDMMANFHLNDLEAPHEDDAEGEGEWD

SEQ ID NO: 773550 - protein, 605 aa, Homo sapiens
EECAGAPTAEFSALPSPSLQTSWSFGPMSRRALRRLRGEQRGQEPLGPGALHFDLRDDDDAEEEGPKRELGVRRPGGAGKEGVRVNNRFELINIDDLEDDPVVNGERSGCALTDAVAPGNKGRGQRGNTESKTDGDDTETVPSEQSHASGKLRKKKKKQKNKKSSTGEASENGLEDIDRILERIEDSTGLNRPGPAPLSSRKHVLYVEHRHLNPDTELKRYFGARAILGEQRPRQRQRVYPKCTWLTTPKSTWPRYSKPGLSMRLLESKKGLSFFAFEHSEEYQQAQHKFLVAVESMEPNNIVVLLQTSPYHVDSLLQLSDACRFQEDQEMARDLVERALYSMECAFHPLFSLTSGACRLDYRRPENRSFYLALYKQMSFLEKRGCPRTALEYCKLILSLEPDEDPLCMLLLIDHLALRARNYEYLIRLFQEWEAHRNLSQLPNFAFSVPLAYFLLSQQTDLPECEQSSARQKASLLIQQALTMFPGVLLPLLESCSVRPDASVSSHRFFGPNAEISQPPALSQLVNLYLGRSHFLWKEPATMSWLEENVHEVLQAVDAGDPAVEACENRRKVLYQRAPRNIHRHVILSEIKEAVAALPPVREKG

SEQ ID NO: 773551 - protein, 743 aa, Homo sapiens
EECAGAPTAEFSALPSPSLQTSWSFGPMSRRALRRLRGEQRGQEPLGPGALHFDLRDDDDAEEEGPKRELGVRRPGGAGKEGVRVNNRFELINIDDLEDDPVVNGERSGCALTDAVAPGNKGRGQRGNTESKTDGDDTETVPSEQSHASGKLRKKKKKQKNKKSSTGEASENGLEDIDRILERIEDSTGLNRPGPAPLSSRKHVLYVEHRHLNPDTELKRYFGARAILGEQRPRQRQRVYPKCTWLTTPKSTWPRYSKPGLSMRLLESKKGLSFFAFEHSEEYQQAQHKFLVAVESMEPNNIVVLLQTSPYHVDSLLQLSDACRFQEDQEMARDLVERALYSMECAFHPLFSLTSGACRLDYRRPENRSFYLALYKQMSFLEKRGCPRTALEYCKLILSLEPDEDPLCMLLLIDHLALRARNYEYLIRLFQEWEAHRNLSQLPNFAFSVPLAYFLLSQQTDLPECEQSSARQKASLLIQQALTMFPGVLLPLLESCSVRPDASVSSHRFFGPNAEISQPPALSQLVNLYLGRSHFLWKEPATMSWLEENVHEVLQAVDAGDPAVEACENRRKVLYQRAPRNIHRHVILSEIKEAVAALPPDVTTQSVMGFDPLPPSDTIYSYVRPERKGEEERNSVIWGSQLCVCRPRSFPSPPNVQALACRPLWQVRVTQWKQAKSYQPWKHHCSLLPVTVAKLYHGGGEARGRSGWGSEPQPGPEQADAGCARHDGQLPPQRPGGAARGRR

SEQ ID NO: 773552 - protein, 688 aa, Homo sapiens
EECAGAPTAEFSALPSPSLQTSWSFGPMSRRALRRLRGEQRGQEPLGPGALHFDLRDDDDAEEEGPKRELGVRRPGGAGKEGVRVNNRFELINIDDLEDDPVVNGERSGCALTDAVAPGNKGRGQRGNTESKTDGDDTETVPSEQSHASGKLRKKKKKQKNKKSSTGEASENGLEDIDRILERIEDSTGLNRPGPAPLSSRKHVLYVEHRHLNPDTELKRYFGARAILGEQRPRQRQRVYPKCTWLTTPKSTWPRYSKPGLSMRLLESKKGLSFFAFEHSEEYQQAQHKFLVAVESMEPNNIVLSDACRFQEDQEMARDLVERALYSMECAFHPLFSLTSGACRLDYRRPENRSFYLALYKQMSFLEKRGCPRTALEYCKLILSLEPDEDPLCMLLLIDHLALRARNYEYLIRLFQEWEAHRNLSQLPNFAFSVPLAYFLLSQQTDLPECEQSSARQKASLLIQQALTMFPGVLLPLLESCSVRPDASVSSHRFFGPNAEISQPPALSQLVNLYLGRSHFLWKEPATMSWLEENVHEVLQAVDAGDPAVEACENRRKVLYQRAPRNIHRHVILSEIKEAVAALPPDVTTQSVMGFDPLPPSDTIYSYVRPERLSPISHGNTIALFFRSLLPNYTMEGERPEEGVAGGLNRNQGLNRLMLAVRDMMANFHLNDLEAPHEDDAEGEGEWD

SEQ ID NO: 773553 - protein, 703 aa, Homo sapiens
EECAGAPTAEFSALPSPSLQTSWSFGPMSRRALRRLRGEQRGQEPLGPGALHFDLRDDDDAEEEGPKRELGVRRPGGAGKEGVRVNNRFELINIDDLEDDPVVNGERSGCALTDAVAPGNKGRGQRGNTESKTDGDDTETVPSEQSHASGKLRKKKKKQKNKKSSTGEASENGLEDIDRILERIEDSTGLNRPGPAPLSSRKHVLYVEHRHLNPDTELKRYFGARAILGEQRPRQRQRVYPKCTWLTTPKSTWPRYSKPGLSMRLLESKKGLSFFAFEHSEEYQQAQHKFLVAVESMEPNNIVVLLQTSPYHVDSLLQLSDACRFQEDQEMARDLVERALYSMECAFHPLFSLTSGACRLDYRRPENRSFYLALYKQMSFLEKRGCPRTALEYCKLILSLEPDEDPLCMLLLIDHLALRARNYEYLIRLFQEWEAHRNLSQLPNFAFSVPLAYFLLSQQTDLPECEQSSARQKASLLIQQALTMFPGVLLPLLESCSVRPDASVSSHRFFGPNAEISQPPALSQLVNLYLGRSHFLWKEPATMSWLEENVHEVLQAVDAGDPAVEACENRRKVLYQRAPRNIHRHVILSEIKEAVAALPPDVTTQSVMGFDPLPPSDTIYSYVRPERLSPISHGNTIALFFRSLLPNYTMEGERPEEGVAGGLNRNQGLNRLMLAVRDMMANFHLNDLEAPHEDDAEGEGEWD

SEQ ID NO: 773554 - protein, 642 aa, Homo sapiens
ASSDPYHFLGVRRPGGAGKEGVRVNNRFELINIDDLEDDPVVNGERSGCALTDAVAPGNKGRGQRGNTESKTDGDDTETVPSEQSHASGKLRKKKKKQKNKKSSTGEASENGLEDIDRILERIEDSTGLNRPGPAPLSSRKHVLYVEHRHLNPDTELKRYFGARAILGEQRPRQRQRVYPKCTWLTTPKSTWPRYSKPGLSMRLLESKKGLSFFAFEHSEEYQQAQHKFLVAVESMEPNNIVVLLQTSPYHVDSLLQLSDACRFQEDQEMARDLVERALYSMECAFHPLFSLTSGACRLDYRRPENRSFYLALYKQMSFLEKRGCPRTALEYCKLILSLEPDEDPLCMLLLIDHLALRARNYEYLIRLFQEWEAHRNLSQLPNFAFSVPLAYFLLSQQTDLPECEQSSARQKASLLIQQALTMFPGVLLPLLESCSVRPDASVSSHRFFGPNAEISQPPALSQLVNLYLGRSHFLWKEPATMSWLEENVHEVLQAVDAGDPAVEACENRRKVLYQRAPRNIHRHVILSEIKEAVAALPPDVTTQSVMGFDPLPPSDTIYSYVRPERLSPISHGNTIALFFRSLLPNYTMEGERPEEGVAGGLNRNQGLNRLMLAVRDMMANFHLNDLEAPHEDDAEGEGEWD

SEQ ID NO: 773555 - protein, 441 aa, Homo sapiens
MRLLESKKGLSFFAFEHSEEYQQAQHKFLVAVESMEPNNIVVLLQTSPYHVDSLLQLSDACRFQEDQEMARDLVERALYSMECAFHPLFSLTSGACRLDYRRPENRSFYLALYKQMSFLEKRGCPRTALEYCKLILSLEPDEDPLCMLLLIDHLALRARNYEYLIRLFQEWEAHRNLSQLPNFAFSVPLAYFLLSQQTDLPECEQSSARQKASLLIQQALTMFPGVLLPLLESCSVRPDASVSSHRFFGPNAEISQPPALSQLVNLYLGRSHFLWKEPATMSWLEENVHEVLQAVDAGDPAVEACENRRKVLYQRAPRNIHRHVILSEIKEAVAALPPDVTTQSVMGFDPLPPSDTIYSYVRPERLSPISHGNTIALFFRSLLPNYTMEGERPEEGVAGGLNRNQGLNRLMLAVRDMMANFHLNDLEAPHEDDAEGEGEWD

SEQ ID NO: 773556 - protein, 657 aa, Homo sapiens
ARGSQTLVGTREQRKGRGLAVRSQTLWHQGTKEGVSVRVNNRFELINIDDLEDDPVVNGERSGCALTDAVAPGNKGRGQRGNTESKTDGDDTETVPSEQSHASGKLRKKKKKQKNKKSSTGEASENGLEDIDRILERIEDSTGLNRPGPAPLSSRKHVLYVEHRHLNPDTELKRYFGARAILGEQRPRQRQRVYPKCTWLTTPKSTWPRYSKPGLSMRLLESKKGLSFFAFEHSEEYQQAQHKFLVAVESMEPNNIVVLLQTSPYHVDSLLQLSDACRFQEDQEMARDLVERALYSMECAFHPLFSLTSGACRLDYRRPENRSFYLALYKQMSFLEKRGCPRTALEYCKLILSLEPDEDPLCMLLLIDHLALRARNYEYLIRLFQEWEAHRNLSQLPNFAFSVPLAYFLLSQQTDLPECEQSSARQKASLLIQQALTMFPGVLLPLLESCSVRPDASVSSHRFFGPNAEISQPPALSQLVNLYLGRSHFLWKEPATMSWLEENVHEVLQAVDAGDPAVEACENRRKVLYQRAPRNIHRHVILSEIKEAVAALPPDVTTQSVMGFDPLPPSDTIYSYVRPERLSPISHGNTIALFFRSLLPNYTMEGERPEEGVAGGLNRNQGLNRLMLAVRDMMANFHLNDLEAPHEDDAEGEGEWD

SEQ ID NO: 773557 - protein, 740 aa, Homo sapiens
EECAGAPTAEFSALPSPSLQTSWSFGPMSRRALRRLRGEQRGQEPLGPGALHFDLRDDDDAEEEGPKRELGVRRPGGAGKEGVRVNNRFELINIDDLEDDPVVNGERSGCALTDAVAPGNKGRGQRGNTESKTDGDDTETVPSEQSHASGKLRKKKKKQKNKKSSTGEASENGLEDIDRILERIEDSTGLNRPGPAPLSSRKHVLYVEHRHLNPDTELKRYFGARAILGEQRPRQRQRVYPKCTWLTTPKSTWPRYSKPGLSMRLLESKKGLSFFAFEHSEEYQQAQHKFLVAVESMEPNNIVVLLQTSPYHVDSLLQLSDACRFQEDQEMARDLVERALYSMECAFHPLFSLTSGACRLDYRRPENRSFYLALYKQMSFLEKRGCPRTALEYCKLILSLEPDEDPLCMLLLIDHLALRARNYEYLIRLFQEWEAHRNLSQLPNFAFSVPLAYFLLSQQTDLPECEQSSARQKASLLIQQALTMFPGVLLPLLESCSVRPDASVSSHRFFGPNAEISQPPALSQLVNLYLGRSHFLWKEPATMSWLEENVHEVLQAVDAGDPAVEACENRRKVLYQRAPRNIHRHVILSEIKEAVAALPPDVTTQSVMGFDPLPPSDTIYSYVRPERLSPISHGNTIALFFRSLLPNYTMEGERPEEGVAGGLNRNQGLNRLMLAVRDMMANFHLNDRFELINIDDLEDDPVVNGERSGCALTDAVAPGNKGTGQRGNTESKTDGDDIRD

SEQ ID NO: 773558 - protein, 683 aa, Homo sapiens
EECAGAPTAEFSALPSPSLQTSWSFGPMSRRALRRLRGEQRGQEPLGPGALHFDLRDDDDAEEEGPKRELGVRRPGGAGKEGVRVNNRFELINIDDLEDDPVVNGERSGCALTDAVAPGNKGRGQRGNTESKTDGDDTETVPSEQSHASGKLRKKKKKQKNKKSSTGEASENGLEDIDRILERIEDSTGLNRPGPAPLSSRKHVLYVEHRHLNPDTELKRYFGARAILGEQRPRQRQRVYPKCTWLTTPKSTWPRYSKPGLSMRLLESKKGLSFFAFEHSEEYQQAQHKFLVAVESMEPNNIVVLLQTSPYHVDSLLQLSDACRFQEDQEMARDLVERALYSMECAFHPLFSLTSGACRLDYRRPENRSFYLALYKQMSFLEKRGCPRTALEYCKLILSLEPDEDPLCMLLLIDHLALRARNYEYLIRLFQEWEAHRNLSQLPNFAFSVPLAYFLLSQQTDLPECEQSSARQKASLLIQQALTMFPGVLLPLLESCSVRPDASVSSHRFFGPNAEISQPPALSQLVNLYLGRSHFLWKEPATMSWLEENVHEVLQAVDAGDPAVEACENRRKVLYQRAPRNIHRHVILSEIKEAVAALPPDVTTQSVMGFDPLPPSDTIYSYVRPERKGEEERNSVIWGSQLCVCRPRSFPSPPNVQALACRPLWQVRVTQWKQVCSEVGKTY

SEQ ID NO: 773559 - protein, 647 aa, Homo sapiens
  misc_feature (632)..(633): Xaa can be any naturally occurring amino acid
  misc_feature (636)..(636): Xaa can be any naturally occurring amino acid
  misc_feature (638)..(638): Xaa can be any naturally occurring amino acid
  misc_feature (642)..(642): Xaa can be any naturally occurring amino acid
EECAGAPTAEFSALPSPSLQTSWSFGPMSRRALRRLRGEQRGQEPLGPGALHFDLRDDDDAEEEGPKRELGVRRPGGAGKEGVRVNNRFELINIDDLEDDPVVNGERSGCALTDAVAPGNKGRGQRGNTESKTDGDDTETVPSEQSHASGKLRKKKKKQKNKKSSTGEASENGLEDIDRILERIEDSTGLNRPGPAPLSSRKHVLYVEHRHLNPDTELKRYFGARAILGEQRPRQRQRVYPKCTWLTTPKSTWPRYSKPGLSMRLLESKKGLSFFAFEHSEEYQQAQHKFLVAVESMEPNNIVVLLQTSPYHVDSLLQLSDACRFQEDQEMARDLVERALYSMECAFHPLFSLTSGACRLDYRRPENRSFYLALYKQMSFLEKRGCPRTALEYCKLILSLEPDEDPLCMLLLIDHLALRARNYEYLIRLFQEWEAHRNLSQLPNFAFSVPLAYFLLSQQTDLPECEQSSARQKASLLIQQALTMFPGVLLPLLESCSVRPDASVSSHRFFGPNAEISQPPALSQLVNLYLGRSHFLWKEPATMSWLEENVHEVLQAVDAGDPAVEACENRRKVLYQRAPRNIHRHVILSEIKEAVAALPPDVTTQSVMGFDPLPPSDTIYSYVRPERTKKQXXRTXSXTILXEGSKI

SEQ ID NO: 773560 - protein, 605 aa, Homo sapiens; identical to SEQ ID NO: 773550

SEQ ID NO: 773561 - protein, 681 aa, Homo sapiens
EECAGAPTAEFSALPSPSLQTSWSFGPMSRRALRRLRGEQRGQEPLGPGALHFDLRDDDDAEEEGPKRELGVRRPGGAGKEGVRVNNRFELINIDDLEDDPVVNGERSGCALTDAVAPGNKGRGQRGNTESKTDGDDTETVPSEQSHASGKLRKKKKKQKNKKSSTGEASENGLEDIDRILERIEDSTGLNRPGPAPLSSRKHVLYVEHRPRQRQRVYPKCTWLTTPKSTWPRYSKPGLSMRLLESKKGLSFFAFEHSEEYQQAQHKFLVAVESMEPNNIVVLLQTSPYHVDSLLQLSDACRFQEDQEMARDLVERALYSMECAFHPLFSLTSGACRLDYRRPENRSFYLALYKQMSFLEKRGCPRTALEYCKLILSLEPDEDPLCMLLLIDHLALRARNYEYLIRLFQEWEAHRNLSQLPNFAFSVPLAYFLLSQQTDLPECEQSSARQKASLLIQQALTMFPGVLLPLLESCSVRPDASVSSHRFFGPNAEISQPPALSQLVNLYLGRSHFLWKEPATMSWLEENVHEVLQAVDAGDPAVEACENRRKVLYQRAPRNIHRHVILSEIKEAVAALPPDVTTQSVMGFDPLPPSDTIYSYVRPERLSPISHGNTIALFFRSLLPNYTMEGERPEEGVAGGLNRNQGLNRLMLAVRDMMANFHLNDLEAPHEDDAEGEGEWD

SEQ ID NO: 773562 - protein, 570 aa, Homo sapiens
EECAGAPTAEFSALPSPSLQTSWSFGPMSRRALRRLRGEQRGQEPLGPGALHFDLRDDDDAEEEGPKRELGVRRPGGAGKEGVRVNNRFELINIDDLEDDPVVNGERSGCALTDAVAPGNKGRGQRGNTESKTDGDDTETVPSEQSHASGKLRKKKKKQKNKKSSTGEASENGLEDIDRILERIEDSTGLNRPGPAPLSSRKHVLYVEHRHLNPDTELKRYFGARAILGEQRPRQRQRVYPKCTWLTTPKSTWPRYSKPGLSMRLLESKKGLSFFAFEHSEEYQQAQHKFLVAVESMEPNNIVVLLQTSPYHVDSLLQLSDACRFQEDQEMARDLVERALYSMECAFHPLFSLTSGACRLDYRRPENRSFYLALYKQMSFLEKRGCPRTALEYCKLILSLEPDEDPLCMLLLIDHLALRARNYEYLIRLFQEWEAHRNLSQLPNFAFSVPLAYFLLSQQTDLPECEQSSARQKASLLIQQALTMFPGVLLPLLESCSVRPDASVSSHRFFGPNAEISQPPALSQLVNLYLGRSHFLWKEPATMSWLEENVHEVLQAVDAGDPAVEACENR

SEQ ID NO: 773563 - protein, 619 aa, Homo sapiens
MWNAPLNAWRYVTVLIGTECEMLYSPATDTQFRSDQIITAAEEGMGMERGKLSLSGTSASQTQASVLHLCNVLILQTRKAAREEASENGLEDIDRILERIEDSTGLNRPGPAPLSSRKHVLYVEHRHLNPDTELKRYFGARAILGEQRPRQRQRVYPKCTWLTTPKSTWPRYSKPGLSMRLLESKKGLSFFAFEHSEEYQQAQHKFLVAVESMEPNNIVVLLQTSPYHVDSLLQLSDACRFQEDQEMARDLVERALYSMECAFHPLFSLTSGACRLDYRRPENRSFYLALYKQMSFLEKRGCPRTALEYCKLILSLEPDEDPLCMLLLIDHLALRARNYEYLIRLFQEWEAHRNLSQLPNFAFSVPLAYFLLSQQTDLPECEQSSARQKASLLIQQALTMFPGVLLPLLESCSVRPDASVSSHRFFGPNAEISQPPALSQLVNLYLGRSHFLWKEPATMSWLEENVHEVLQAVDAGDPAVEACENRRKVLYQRAPRNIHRHVILSEIKEAVAALPPDVTTQSVMGFDPLPPSDTIYSYVRPERLSPISHGNTIALFFRSLLPNYTMEGERPEEGVAGGLNRNQGLNRLMLAVRDMMANFHLNDLEAPHEDDAEGEGEWD

SEQ ID NO: 773564 - protein, 368 aa, Homo sapiens
EECAGAPTAEFSALPSPSLQTSWSFGPMSRRALRRLRGEQRGQEPLGPGALHFDLRDDDDAEEEGPKRELGVRRPGGAGKEGVRVNNRFELINIDDLEDDPVVNGERSGCALTDAVAPGNKGRGQRGNTESKTDGDDTETVPSEQSHASGKLRKKKKKQKNKKSSTGEASENGLEDIDRILERIEDSTGLNRPGPAPLSSRKHVLYVEHRHLNPDTELKRYFGARAILGEQRPRQRQRVYPKCTWLTTPKSTWPRYSKPGLSMRLLESKKGLSFFAFEHSEEYQQAQHKFLVAVESMEPNNIVVLLQTSPYHVDSLLQLSDACRFQEDQEMARDLVERALYSMECAFHPLFSLTSGACRLDYRRPENR

SEQ ID NO: 773565 - protein, 355 aa, Homo sapiens
LEDLSSRAVGLRLITQTENRSFYLALYKQMSFLEKRGCPRTALEYCKLILSLEPDEDPLCMLLLIDHLALRARNYEYLIRLFQEWEAHRNLSQLPNFAFSVPLAYFLLSQQTDLPECEQSSARQKASLLIQQALTMFPGVLLPLLESCSVRPDASVSSHRFFGPNAEISQPPALSQLVNLYLGRSHFLWKEPATMSWLEENVHEVLQAVDAGDPAVEACENRRKVLYQRAPRNIHRHVILSEIKEAVAALPPDVTTQSVMGFDPLPPSDTIYSYVRPERLSPISHGNTIALFFRSLLPNYTMEGERPEEGVAGGLNRNQGLNRLMLAVRDMMANFHLNDLEAPHEDDAEGEGEWD

SEQ ID NO: 773566 - protein, 310 aa, Homo sapiens
EECAGAPTAEFSALPSPSLQTSWSFGPMSRRALRRLRGEQRGQEPLGPGALHFDLRDDDDAEEEGPKRELGVRRPGGAGKEGVRVNNRFELINIDDLEDDPVVNGERSGCALTDAVAPGNKGRGQRGNTESKTDGDDTETVPSEQSHASGKLRKKKKKQKNKKSSTGEASENGLEDIDRILERIEDSTGLNRPGPAPLSSRKHVLYVEHRHLNPDTELKRYFGARAILGEQRPRQRQRVYPKCTWLTTPKSTWPRYSKPGLSMRLLESKKGLSFFAFEHSEEYQQAQHKFLVAVESMEPNNIVVRGPCSP

SEQ ID NO: 773567 - protein, 243 aa, Homo sapiens
EECAGAPTAEFSALPSPSLQTSWSFGPMSRRALRRLRGEQRGQEPLGPGALHFDLRDDDDAEEEGPKRELGVRRPGGAGKEGVRVNNRFELINIDDLEDDPVVNGERSGCALTDAVAPGNKGRGQRGNTESKTDGDDTETVPSEQSHASGKLRKKKKKQKNKKSSTGEASENGLEDIDRILERIEDSTGLNRPGPAPLSSRKHVLYVEHRHLNPDTELKRYFGARAILGEQRDRVLLGCPVWF

SEQ ID NO: 773568 - protein, 85 aa, Homo sapiens
  misc_feature (1)..(1): Xaa can be any naturally occurring amino acid
XATDATLPQLSPISHGNTIALFFRSLLPNYTMEGERPEEGVAGGLNRNQGLNRLMLAVRDMMANFHLNDLEAPHEDDAEGEGEWD

SEQ ID NO: 773569 - protein, 108 aa, Homo sapiens
HRLGSEAACESAEAEFSALPSPSLQTSWSFGPMSRRALRRLRGEQRGQEPLGPGALHFDLRDDDDAEEEGPKRELGVRRPGGAGKEGVRVNNRFELEKWTFSSPPKKR

SEQ ID NO: 773570 - protein, 169 aa, Homo sapiens
HRLGSEAACESAEAEFSALPSPSLQTSWSFGPMSRRALRRLRGEQRGQEPLGPGALHFDLRDDDDAEEEGPKRELGVRRPGGAGKEGVRVNNRFELINIDDLEDDPVVNGERSGCALTDAVAPGNKGRGQRGNTESKTDGDDTETVPSEQSHASGKHRKKLVPNSARAR

SEQ ID NO: 773571 - protein, 256 aa, Homo sapiens
HRLGSEAACESAEAEFSALPSPSLQTSWSFGPMSRRALRRLRGEQRGQEPLGPGALHFDLRDDDDAEEEGPKRELGVRRPGGAGKEGVRVNNRFELINIDDLEDDPVVNGERSGCALTDAVAPGNKGRGQRGNTESKTDGDDTETVPSEQSHASGKLRKKKKKQKNKKSSTGEASENGLEDIDRILERIEDSTGLNRPGPAPLSSRKHVLYVEHRHLNPDTELKRYFGARAILGEQRARRDTCVPKCLADTLKTGR

SEQ ID NO: 773572 - protein, 703 aa, Homo sapiens; identical to SEQ ID NO: 773553

SEQ ID NO: 773573 - protein, 676 aa, Homo sapiens; identical to SEQ ID NO: 773549

SEQ ID NO: 773574 - protein, 703 aa, Homo sapiens; identical to SEQ ID NO: 773553

SEQ ID NO: 773575 - protein, 703 aa, Homo sapiens; identical to SEQ ID NO: 773553

SEQ ID NO: 773576 - protein, 703 aa, Homo sapiens; identical to SEQ ID NO: 773553

SEQ ID NO: 773577 - protein, 684 aa, Homo sapiens
EECAGAPTAEFSALPSPSLQTSWSFGPMSRRALRRLRGEQRGQEPLGPGALHFDLRDDDDAEEEGPKRELGVRRPGGAGKEGVRVNNRFELINIDDLEDDPVVNGERSGCALTDAVAPGNKGRGQRGNTESKTDGDDTETVPSEQSHASGKLRKKKKKQKNKKSSTGEASENGLEDIDRILERIEDSTGLNRPGPAPLSSRKHVLYVEHRHLNPDTELKRYFGARAILGEQRPRQRQRVYPKCTWLTTPKSTWPRYSKPGEGCGCWAQHKFLVAVESMEPNNIVVLLQTSPYHVDSLLQLSDACRFQEDQEMARDLVERALYSMECAFHPLFSLTSGACRLDYRRPENRSFYLALYKQMSFLEKRGCPRTALEYCKLILSLEPDEDPLCMLLLIDHLALRARNYEYLIRLFQEWEAHRNLSQLPNFAFSVPLAYFLLSQQTDLPECEQSSARQKASLLIQQALTMFPGVLLPLLESCSVRPDASVSSHRFFGPNAEISQPPALSQLVNLYLGRSHFLWKEPATMSWLEENVHEVLQAVDAGDPAVEACENRRKVLYQRAPRNIHRHVILSEIKEAVAALPPDVTTQSVMGFDPLPPSDTIYSYVRPERLSPISHGNTIALFFRSLLPNYTMEGERPEEGVAGGLNRNQGLNRLMLAVRDMMANFHLNDLEAPHEDDAEGEGEWD

SEQ ID NO: 773578 - protein, 551 aa, Homo sapiens
EECAGAPTAEFSALPSPSLQTSWSFGPMSRRALRRLRGEQRGQEPLGPGALHFDLRDDDDAEEEGPKRELGVRRPGGAGKEGVRVNNRFELINIDDLEDDPVVNGERSGCALTDAVAPGNKGRGQRGNTESKTDGDDTETVPSEQSHASGKLRKKKKKQKNKKSSTGEASENGLEDIDRILERIEDSTGLNRPGPAPLSSRKHVLYVEHRHLNPDTELKRYFGARAILGEQRPRQRQRVYPKCTWLTTPKSTWPRYSKPGLSMRLLESKKGLSFFAFEHSEEYQQAQHKFLVAVESMEPNNIVVLLQTSPYHVDSLLQLSDACRFQEDQEMARDLVERALYSMECAFHPLFSLTSGACRLDYRRPENRSFYLALYKQMSFLEKRGCPRTALEYCKLILSLEPDEDPLCMLLLIDHLALRARNYEYLIRLFQEWEAHRNLSQLPNFAFSVPLAYFLLSQQTDLPECEQSSARQKASLLIQQALTMFPGVLLPLLESCSVRPDASVSSHRFFGPNAEIRSEPQPGPEQADAGCARHDGQLPPQRPGGAARGRR

SEQ ID NO: 773579 - protein, 538 aa, Homo sapiens
EECAGAPTAEFSALPSPSLQTSWSFGPMSRRALRRLRGEQRGQEPLGPGALHFDLRDDDDAEEEGPKRELGVRRPGGAGKEGVRVNNRFELINIDDLEDDPVVNGERSGCALTDAVAPGNKGRGQRGNTESKTDGDDTETVPSEQSHASGKLRKKKKKQKNKKSSTGEASENGLEDIDRILERIEDSTGLNRPGPAPLSSRKHVLYVEHRHLNPDTELKRYFGARAILGEQRPRQRQRVYPKCTWLTTPKSTWPRYSKPGLSMRLLESKKGLSFFAFEHSEEYQQAQHKFLVAVESMEPNNIVVLLQTSPYHVDSLLQLSDACRFQEDQEMARDLVERALYSMECAFHPLFSLTSGACRLDYRRPENRSFYLALYKQMSFLEKRGCPRTALEYCKLILSLEPDEDPLCMLLLIDHLALRARNYEYLIRLFQEWEAHRNLSQLPNFAFSVPLAYFLLSQQTDLPECEQSSARQKASLLIQQALTMFPGVLLPLLESCSVRPDASVSSHRFFGPNAEISCARHDGQLPPQRPGGAARGRR

SEQ ID NO: 773580 - protein, 605 aa, Homo sapiens; identical to SEQ ID NO: 773550

SEQ ID NO: 773581 - protein, 605 aa, Homo sapiens; identical to SEQ ID NO: 773550

SEQ ID NO: 773582 - protein, 672 aa, Homo sapiens
EECAGAPTAEFSALPSPSLQTSWSFGPMSRRALRRLRGEQRGQEPLGPGALHFDLRDDDDAEEEGPKRELGVRRPGGAGKEGVRVNNRFELINIDDLEDDPVVNGERSGCALTDAVAPGNKGRGQRGNTESKTDGDDTETVPSEQSHASGKLRKKKKKQKNKKSSTGEASENGLEDIDRILERIEDSTGLNRPGPAPLSSRKHVLYVEHRHLNPDTELKRPRQRQRVYPKCTWLTTPKSTWPRYSKPGEGCGCWAQHKFLVAVESMEPNNIVVLLQTSPYHVDSLLQLSDACRFQEDQEMARDLVERALYSMECAFHPLFSLTSGACRLDYRRPENRSFYLALYKQMSFLEKRGCPRTALEYCKLILSLEPDEDPLCMLLLIDHLALRARNYEYLIRLFQEWEAHRNLSQLPNFAFSVPLAYFLLSQQTDLPECEQSSARQKASLLIQQALTMFPGVLLPLLESCSVRPDASVSSHRFFGPNAEISQPPALSQLVNLYLGRSHFLWKEPATMSWLEENVHEVLQAVDAGDPAVEACENRRKVLYQRAPRNIHRHVILSEIKEAVAALPPDVTTQSVMGFDPLPPSDTIYSYVRPERLSPISHGNTIALFFRSLLPNYTMEGERPEEGVAGGLNRNQGLNRLMLAVRDMMANFHLNDLEAPHEDDAEGEGEWD

SEQ ID NO: 773583 - protein, 435 aa, Homo sapiens
EECAGAPTAEFSALPSPSLQTSWSFGPMSRRALRRLRGEQRGQEPLGPGALHFDLRDDDDAEEEGPKRELGVRRPGGAGKEGVRVNNRFELINIDDLEDDPVVNGERSGCALTDAVAPGNKGRGQRGNTESKTDGDDTETVPSEQSHASGKLRKKKKKQKNKKSSTGEASENGLEDIDRILERIEDSTGLNRPGPAPLSSRKHVLYVEHRHLNPDTELKRYFGARAILGEQRPRQRQRVYPKCTWLTTPKSTWPRYSKPGLSMRLLESKKGLSFFAFEHSEEYQQAQHKFLVAVESMEPNNIVVLLQTSPYHVDSLLQLSDACRFQEDQEMARDLVERALYSMECAFHPLFSLTSGACRLDYRRPENRSFYLALYKQMSFLEKRGCPRTALEYCKLILSLEPDEDPLCMLLLIDHLALRARNYEYLIRRGDRKAV

SEQ ID NO: 773584 - protein, 362 aa, Homo sapiens
DAEGDSKDPSYLTSGACRLDYRRPENRSFYLALYKQMSFLEKRGCPRTALEYCKLILSLEPDEDPLCMLLLIDHLALRARNYEYLIRLFQEWEAHRNLSQLPNFAFSVPLAYFLLSQQTDLPECEQSSARQKASLLIQQALTMFPGVLLPLLESCSVRPDASVSSHRFFGPNAEISQPPALSQLVNLYLGRSHFLWKEPATMSWLEENVHEVLQAVDAGDPAVEACENRRKVLYQRAPRNIHRHVILSEIKEAVAALPPDVTTQSVMGFDPLPPSDTIYSYVRPERLSPISHGNTIALFFRSLLPNYTMEGERPEEGVAGGLNRNQGLNRLMLAVRDMMANFHLNDLEAPHEDDAEGEGEWD

SEQ ID NO: 773585 - protein, 336 aa, Homo sapiens
MSFYLALYKQMSFLEKRGCPRTALEYCKLILSLEPDEDPLCMLLLIDHLALRARNYEYLIRLFQEWEAHRNLSQLPNFAFSVPLAYFLLSQQTDLPECEQSSARQKASLLIQQALTMFPGVLLPLLESCSVRPDASVSSHRFFGPNAEISQPPALSQLVNLYLGRSHFLWKEPATMSWLEENVHEVLQAVDAGDPAVEACENRRKVLYQRAPRNIHRHVILSEIKEAVAALPPDVTTQSVMGFDPLPPSDTIYSYVRPERLSPISHGNTIALFFRSLLPNYTMEGERPEEGVAGGLNRNQGLNRLMLAVRDMMANFHLNDLEAPHEDDAEGEGEWD

SEQ ID NO: 773586 - protein, 123 aa, Homo sapiens
ECRLYANLNYILEVEKKYFRDVTTQSVMGFDPLPPSDTIYSYVRPERLSPISHGNTIALFFRSLLPNYTMEGERPEEGVAGGLNRNQGLNRLMLAVRDMMANFHLNDLEAPHEDDAEGEGEWD

SEQ ID NO: 773587 - protein, 243 aa, Homo sapiens; identical to SEQ ID NO: 773567

SEQ ID NO: 773588 - protein, 190 aa, Homo sapiens
  misc_feature (184)..(184): Xaa can be any naturally occurring amino acid
HRLGSEAACESAEAEFSALPSPSLQTSWSFGPMSRRALRRLRGEQRGQEPLGPGALHFDLRDDDDAEEEGPKRELGVRRPGGAGKEGVRVNNRFELINIDDLEDDPVVNGERSGCALTDAVAPGNKGRGQRGNTESKTDGDDTETVPSEQSHASGKLRKKKKKQKNKKSSTGEASGWGRSKDSXPILYVY

SEQ ID NO: 773589 - protein, 105 aa, Homo sapiens
SFYLALYKQMSFLEKRGCPRTALEYCKLILRWVSAQGQARPRSLSWLQAHSQPDDAPVPLCSALCAASGSLEPDEDPLCMLLLIDHLALRARNYEYLIRLFQEWE

SEQ ID NO: 773590 - protein, 306 aa, Homo sapiens
ESPMCNRYEDEINKHTAAENEFVVLKKDVDAAYMGRMDLHGKVGTLTQEIDFLQQLYEMELSQVQTHVSNTNVVLSMDNNRNLDLDSIIAEVKAQYELIAQRSRAEAEAWYQTKYEELQVTAGKHGDNLRDTKNEIAELTRTIQRLQGEADAAKKQCQQLQTAMQEAEQRGELALKDAQKKLGDLDVALTQAKEDLTRLLRDYQELMNVKLALDVEIATYRKLLESEESRMSGECPSGVSISVTGNPPLCAEVAQPAEEVASTRDGNEGAPKGDTETNDGHRNRQGGQNPRHHNTEKTQGQESAEV

SEQ ID NO: 773591 - protein, 2516 aa, Homo sapiens
PGLITKTHRQLCRSPCLEPHILKRNEILQDFKPEESQTTSKEAKKPPDVVREYQTKLEFALKLGYSEEQVQLVLNKLGTDALINDILGELVKLGNKSEADQTVSTINTITRETSSLESQRSESPMQEIVTDDGENLRPIVIDGSNVAMSHGNKEVFSCRGIKLAVDWFLERGHKDITVFVPAWRKEQSRPDALITDQEILRKLEKEKILVFTPSRRVQGRRVVCYDDRFIVKLAFESDGIIVSNDNYRDLANEKPEWKKFIDERLLMYSFVNDKFMPPDDPLGRHGPSLDNFLRKKPIVPEHKKQPCPYGKKCTYGHKCKYYHPERGSQPQRSVADELRAMSRNTAAKTANEGGLVKSNSVPCSTKADSTSDVKRGAPKRQSDPSIRTQVYQDLEEKLPTKNKLETRSVPSLVSIPATSTAKPQSTTSLSNGLPSGVHFPPQDQRPQGQYPSMMMATKNHGTPMPYEQYPKCDSPVDIGYYSMLNAYSNLSLSGPRSPERRFSLDTDYRISSVASDCSSEGSMSCGSSDSYVGYNDRSYVSSPDPQLEENLKCQHMHPHSRLNPQPFLQNFHDPLTRGQSYSHEEPKFHHKPPLPHLALHLPHSAVGARSSCPGDYPSPPSSAHSKAPHLGRSLVATRIDSISDSRLYDSSPSRQRKPYSRQEGLGSWERPGYGIDAYGYRQTYSLPDNSTQPCYEQFTFQSLPEQQEPAWRIPYCGMPQDPPRYQDNREKIYINLCNIFPPDLVRIVMKRNPHMTDAQQLAAAILVEKSQLELLKDDASLWCLVVFCSAQMLREVCYNSTCDLLLSKELYSIHLCEILYHGICMYSPTWWKYHGIALHLNFFFLTFPFKSYILGWKFFQFDLIDVSVIFDINLWCIRGLYAALFILVLCFINLVFVYQLQAITIPSECGTFDYDLANCFFEPSLVRLFYSFLSYFYLGKVGFFGAIIIIYRNKVILQQLTLYFKQNVSYQFYVEMCYSIYILECLQYGTFRCVIFVWIFFSVKKLVNLNGQFKRKQMQSMEKCFHFLKMNKAKAVTVTGRALLSSYDVLLDSRSGIEFLDFHYTCIFNMSVFLFWGTTILDKITFHSTCLFLMNLIIHNATFIFNILFSFPAIYQGWPEVGLCVEVMQHFLILHYREMVMEELYMVTYNFCKILYIFHFPEGSFLGGACYIIKARLLPQIVYFRYRLRSVLVLVRDISGFKVMGFASGEYISAEEKIDFAVSGRQLCDVTSLDCCVQVLNCTSRNRCIQIFFCSLLRCPGYSDYPTCYSLKEALKNQKVPFTVDTNCIFLTIRTILICRSSYKHKYVTMIRLLGNILSLIEIQIFKVKLRSENRLENKNNNLDEIEMSVLVLYNILKTVNKFIGIFFLLKLTYCELKIKVKMLPENNVQAPLTEDNIFTTCVTLCVARSRIWVYSEMLLKGIVHIDITNNLNLFSKLNSGKWYSTQLLLLCLKGVWHSSVSRNNMGEATQPILSGVCLKATLLACEIVLLDLVTYKASLNVEANSVPKTGLQMCSIFYFSHILRLLFSMKSLLNYTCRFCFHFLHFTILIISTFAKFYIYLNEILGEMCVTFEFDLLVLLADYFVIASWILNYGKIVEPAATSTEVSSSELPTLKSFSVINYEFKNEQFSYVKRTVCPLFLKHRCCVQSCRMRELADFRYSKFLLIYSNKSKESIIKLNPELITSLHFSQNFLSEPNLLPDLLINNQRDVLISEVARNGQLIGKKKDSDWSILPLNNGQLTVLYTVTSQSVVSVSESRGNSTQLAKYWPLVSPPFLHGYRRFQSCFYDLSLYPDKSLSLTYTFGRNAHQCNIFDTGGNLNLCFYENSFMRICNITEEYFMYIYIHKYVFVMRYEKQGLGGVLLMANFSLIKLCFFEFERPSLGSGRPMIRFRTTWMESSSSLVLFLVFSKNYFDIFNRMCNFKIHKKLKVVLIIQKLFNMSYGCIYMYIDSNIFIKQIYFAYVIALQFVTGGRMALGVCVCVCVCVCVCVCFENSQAVFPLIYNGIYFKVCLVFIILLLSNFLIQDKIRHTVFWPFCWCVVHPFYCHLTPGEFPRDLKSKDSGWTYAYVPNILKMLIQLTVKFPRYTPTNKDEVLKRDGLHTCIRIRENSSVNKSKETYTIFSPLGQGLTFSVKDQIVNNTGIIWTSNAIVKTTQLCLQSIRTAQITCKLVWLCSNKTLFTETGSGQIGPVGHNLLISSSKSWYMLIEEIIIAFQLTLKENLVVFDVLQKRIVRHLMLKHLNSFEFSYLFTPMYLLEIFLVFNHKKKHSVKMFEYVLNFFHKLFISVDKWESLTNLLFFKSLIDQKKSVAAFNYATDTFWLHLPVTFFHWFWLLINNISAFFKNDFKEDKYIVISHAIALFCKIKNCDKYNCSYNVSGMLQCNIFMRNKMYLCFVCPDLSGFLDALGLSLVNDILHMIICNFEFVEVHAAEHVYSQCFIPGVASVIIFIRTFKQHEHHHPLEIVKLSFKIGMQLEVLTMFIVFKWLLCFSLILSVNLIITPVAVLLLCIRSGFSP

SEQ ID NO: 773592 - protein, 108 aa, Homo sapiens
MYEQGSGEQDTHSSAPYHFFVDDHHFLKGLLVLGPSGMPVHWLRLSVWDVGSRLRTTRDGPWQSLVRTRSCLQFGNTTQRRYGLYTLSRLSPYSEGAALARNGPPTDK

SEQ ID NO: 773593 - protein, 106 aa, Homo sapiens
MVARDERSSLAMTPQAQLHTQVMSTALPHPHRGPLTPPLTHPPPKLWRPVAGSQSPPSPVPGTKPGTQEVLCKCSWGVAALGSKGREAGGARDGPTGADGSTTIQH

SEQ ID NO: 773594 - protein, 105 aa, Homo sapiens [sequence omitted]

SEQ ID NO: 773595 - protein, 120 aa, Homo sapiens
VFSLKAMFPVFSGCFQELQEKNKSLELVSFEEVAVHFTWEEWQDLDDAQRTLYRDVMLETYSSLVSLGHCITKPEMIFKLEQGAEPWIVEETLSLRLSGGSKKQVFSGICHRSLVELQEV

SEQ ID NO: 773596 - protein, 99 aa, Homo sapiens
VFSLKAMFPVFSGCFQELQEKNKSLELVSFEEVAVHFTWEEWQDLDDAQRTLYRDVMLETYSSLVSLGHCITKPEMIFKLEQGAEPWIVEETLSLRLSG

SEQ ID NO: 773597 - protein, 112 aa, Homo sapiens
VFSLKAMFPVFSGCFQELQEKNKSLELVSFEEVAVHFTWEEWQDLDDAQRTLYRDVMLETYSSLVSLGHCITKPEMIFKLEQGGLISLVNSGTVFPIVNWTSLRMGPQIFQT

SEQ ID NO: 773598 - protein, 102 aa, Homo sapiens
MAPKAKKEAPAPPQAEAKAKAVKAKKAVLKGVHSRKKKKIHTSPTFQRPKTLRLQGQPKYPQKSAARRNKLDHHIIIKLPLTTESAMKKSEDNKTLVFIVDV

SEQ ID NO: 773599 - protein, 229 aa, Homo sapiens
MAEEMESSLEASFSSSGAVSGASGFLPPARSRIFKIIVIGDSNVGKTCLTYRFCAGRFPDRTEATIGVDFRERAVEIDGERIKIQLWDTAGQERFRKSMVQHYYRNVHAVVFVYDMTNMASFHSLPSWIEECKQHLLANDIPRILVGNKCDLRSAIQVPTDLAQKFADTHSMPLFETSAKNPNDNDHVEAIFMTLAHKLKSHKPLMLSQPPDNGIILKPEPKPAMTCWC

SEQ ID NO: 773600 - protein, 111 aa, Homo sapiens
PPARSRIFKIIVIGDSNVGKTCLTYRFCAGRFPDRTEATIGVDFRERAVEIDGERIKVSGWGTVGEDRVTGVPTPPWAGRWPCARCVCAPFFSHADEIGVGDWKDCNTANF

SEQ ID NO: 773601 - protein, 229 aa, Homo sapiens; identical to SEQ ID NO: 773599

SEQ ID NO: 773602 - protein, 53 aa, Homo sapiens
QERFWTITSSYYRGAHGFLVVYDVTDQESYANVKQWLQEIDRHASENVNKLLV

SEQ ID NO: 773603 - protein, 34 aa, Homo sapiens
MTPPRPRPEEARRRPASLGHFRQGRSRPVVRERR

SEQ ID NO: 773604 - protein, 34 aa, Homo sapiens; identical to SEQ ID NO: 773603

SEQ ID NO: 773605 - protein, 70 aa, Homo sapiens
VCMGPASASQRTLHAQLALASLHPPQSKAPAFRPLRQAQLLPASGLFRPSSFLTTAFPGPVFPFRQPLGL

SEQ ID NO: 773606 - protein, 825 aa, Homo sapiens
TDFKLYRDAYLFLLCLVAVAGIGFIYTIINSILNEVQVGVIIIESLDIITITVPPALPAAMTAGIVYAQRRLKKIGIFCISPQRINICGQLNLVCFDKTGTLTEDGLDLWGIQRVENARFLSPEENVCNEMLVKSQFVACMATCHSLTKIEGVLSGDPLDLKMFEAIGWILEEATEEETALHNRIMPTVVRPPKQLLPESTPAGNQEMELFELPATYEIGIVRQFPFSSALQRMSVVARVLGDRKMDAYMKGAPEAIAGLCKPETVPVDFQNVLEDFTKQGFRVIALAHRKLESKLTWHKVQNISRDAIENNMDFMGLIIMQNKLKQETPAVLEDLHKANIRTVMVTGDSMLTAVSVARDCGMILPQDKVIIAEALPPKDGKVAKINWHYADSLTQCSHPSAIDPEAIPVKLVHDSLEDLQMTRYHFAMNGKSFSVILEHFQDLVPKLMLHGTVFARMAPDQKTQLIEALQNVDYFVGMCGDGANDCGALKRAHGGISLSELEASVASPFTSKTPSISCVPNLIREGRAALITSFCVFKFMALYSIIQYFSVTLLYSILSNLGDFQFLFIDLAIILVVVFTMSLNPAWKELVAQRPPSGLISGALLFSVLSQIIICIGFQSLGFFWVKQQPWYEVWHPKSDACNTTGSGFWNSSHVDNETELDEHNIQNYENTTVFFISSFQYLIVAIAFSKGKPFRQPCYKNYFFVFSVIFLYIFILFIMLYPVASVDQVLQIVCVPYQWRVTMLIIVLVNAFVSITVEESVDRWGKCCLPWALGCRKKTPKAKYMYLAQELLVDPEWPPKPQTTTEAKALVKENGSCQIITIT

SEQ ID NO: 773607 - protein, 622 aa, Homo sapiens
MSVVARVLGDRKMDAYMKGAPEAIAGLCKPETVPVDFQNVLEDFTKQGFRVIALAHRKLESKLTWHKVQNISRDAIENNMDFMGLIIMQNKLKQETPAVLEDLHKANIRTVMVTGDSMLTAVSVARDCGMILPQDKVIIAEALPPKDGKVAKINWHYADSLTQCSHPSAIDPEAIPVKLVHDSLEDLQMTRYHFAMNGKSFSVILEHFQDLVPKLMLHGTVFARMAPDQKTQLIEALQNVDYFVGMCGDGANDCGALKRAHGGISLSELEASVASPFTSKTPSISCVPNLIREGRAALITSFCVFKFMALYSIIQYFSVTLLYSILSNLGDFQFLFIDLAIILVVVFTMSLNPAWKELVAQRPPSGLISGALLFSVLSQIIICIGFQSLGFFWVKQQPWYEVWHPKSDACNTTGSGFWNSSHVDNETELDEHNIQNYENTTVFFISSFQYLIVAIAFSKGKPFRQPCYKNYFFVFSVIFLYIFILFIMLYPVASVDQVLQIVCVPYQWRVTMLIIVLVNAFVSITVENFFLDMVLWKVVFNRDKQGEYRFSTTQPPQESVDRWGKCCLPWALGCRKKTPKAKYMYLAQELLVDPEWPPKPQTTTEAKALVKENGSCQIITIT

SEQ ID NO: 773608 - protein, 825 aa, Homo sapiens; identical to SEQ ID NO: 773606

SEQ ID NO: 773609 - protein, 825 aa, Homo sapiens; identical to SEQ ID NO: 773606

SEQ ID NO: 773610 - protein, 470 aa, Homo sapiens
MSVVARVLGDRKMDAYMKGAPEAIAGLCKPETVPVDFQNVLEDFTKQGFRVIALAHRKLESKLTWHKVQNISRDAIENNMDFMGLIIMQNKLKQETPAVLEDLHKANIRTVMVTGDSMLTAVSVARDCGMILPQDKVIIAEALPPKDGKVAKINWHYADSLTQCSHPSAIDPEAIPVKLVHDSLEDLQMTRYHFAMNGKSFSVILEHFQDLVPKLMLHGTVFARMAPDQKTQLIEALQNVDYFVGMCGDGANDCGALKRAHGGISLSELEASVASPFTSKTPSISCVPNLIREGRAALITSFCVFKFMALYSIIQYFSVTLLYSILSNLGDFQFLFIDLAIILVVVFTMSLNPAWKELVAQRPPSGLISGALLFSVLSQIIICIGFQSLGFFWVKQQPWYEVWHPKSDACNTTGSGFWNSSHVDNETELDEHNIQNYENTTVFFISSFQYLIVAIAFSKGKPFRQPCYKN

SEQ ID NO: 773611 - protein, 825 aa, Homo sapiens; identical to SEQ ID NO: 773606

SEQ ID NO: 773612 - protein, 825 aa, Homo sapiens; identical to SEQ ID NO: 773606

SEQ ID NO: 773613 - protein, 499 aa, Homo sapiens
MVFLSGNASDSSNCTQPPAPVNISKAILLGVILGGLILFGVLGNILVILSVACHRHLHSVTHYYIVNLAVADLLLTSTVLPFSAIFEVLGYWAFGRVFCNIWAAVDVLCCTASIMGLCIISIDRYIGVSYPLRYPTIVTQRRGLMALLCVWALSLVISIGPLFGWRQPAPEDETICQINEEPGYVLFSALGSFYLPLAIILVMYCRVYVVAKRESRGLKSGLKTDKSDSEQVTLRIHRKNAPAGGSGMASAKTKTHFSVRLLKFSREKKAAKTLGIVVGCFVLCWLPFFLVMPIGSFFPDFKPSETVFKIVFWLGYLNSCINPIIYPCSSQEFKKAFQNVLRIQCLRRKQSSKHALGYTLHPPSQAVEGQHKDMVRIPVGSRETFYRISKTDGVCEWKFFSSMPRGSARITVSKDQSSCTTARTKSRSVTRLECSGMILAHCNLRLPGSRDSPASASQAAGTTGDVPPGRRHQAQLIFVFLVETGFHHVGQDDLDLLTS

SEQ ID NO: 773614 - protein, 455 aa, Homo sapiens
MVFLSGNASDSSNCTQPPAPVNISKAILLGVILGGLILFGVLGNILVILSVACHRHLHSVTHYYIVNLAVADLLLTSTVLPFSAIFEVLGYWAFGRVFCNIWAAVDVLCCTASIMGLCIISIDRYIGVSYPLRYPTIVTQRRGLMALLCVWALSLVISIGPLFGWRQPAPEDETICQINEEPGYVLFSALGSFYLPLAIILVMYCRVYVVAKRESRGLKSGLKTDKSDSEQVTLRIHRKNAPAGGSGMASAKTKTHFSVRLLKFSREKKAAKTLGIVVGCFVLCWLPFFLVMPIGSFFPDFKPSETVFKIVFWLGYLNSCINPIIYPCSSQEFKKAFQNVLRIQCLRRKQSSKHALGYTLHPPSQAVEGQHKDMVRIPVGSRETFYRISKTDGVCEWKFFSSMPRGSARITVSKDQSSCTTARRGMDCRYFTKNCREHIKHVNFMMPPWRKGLEC

SEQ ID NO: 773615 - protein, 297 aa, Homo sapiens
MVFLSGNASDSSNCTQPPAPVNISKAILLGVILGGLILFGVLGNILVILSVACHRHLHSVTHYYIVNLAVADLLLTSTVLPFSAIFEVLGYWAFGRVFCNIWAAVDVLCCTASIMGLCIISIDRYIGVSYPLRYPTIVTQRRGLMALLCVWALSLVISIGPLFGWRQPAPEDETICQINEEPGYVLFSALGSFYLPLAIILVMYCRVYVVAKRESRGLKSGLKTDKSDSEQVTLRIHRKNAPAGGSGMASAKTKTHFSVRLLKFSREKKAAKTLGIVVGCFVLCWLPFFLVMPIGKS

SEQ ID NO: 773616 - protein, 466 aa, Homo sapiens [sequence omitted]

SEQ ID NO: 773617 - protein, 429 aa, Homo sapiens
MVFLSGNASDSSNCTQPPAPVNISKAILLGVILGGLILFGVLGNILVILSVACHRHLHSVTHYYIVNLAVADLLLTSTVLPFSAIFEVLGYWAFGRVFCNIWAAVDVLCCTASIMGLCIISIDRYIGVSYPLRYPTIVTQRRGLMALLCVWALSLVISIGPLFGWRQPAPEDETICQINEEPGYVLFSALGSFYLPLAIILVMYCRVYVVAKRESRGLKSGLKTDKSDSEQVTLRIHRKNAPAGGSGMASAKTKTHFSVRLLKFSREKKAAKTLGIVVGCFVLCWLPFFLVMPIGSFFPDFKPSETVFKIVFWLGYLNSCINPIIYPCSSQEFKKAFQNVLRIQCLRRKQSSKHALGYTLHPPSQAVEGQHKDMVRIPVGSRETFYRISKTDGVCEWKFFSSMPRGSARITVSKDQSSCTTARGHTPMT

SEQ ID NO: 773618 - protein, 203 aa, Homo sapiens
QRAWWVPSTPHSLPHHTGCHTNRDAQRDLPQWSFFPDFKPSETVFKIVFWLGYLNSCINPIIYPCSSQEFKKAFQNVLRIQCLRRKQSSKHALGYTLHPPSQAVEGQHKDMVRIPVGSRETFYRISKTDGVCEWKFFSSMPRGSARITVSKDQSSCTTARVRSKSFLQVCCCVGPSTPSLDKNHQVPTIKVHTISLSENGEEV

SEQ ID NO: 773619 - protein, 306 aa, Homo sapiens
ARAGAGLPCGAVARNRSTCRLLFPAMASRCWRWWGWSAWPRTRLPPAGSTPSFCHHFSTQEKTPQICVVGSGPAGFYTAQHLLKHPQAHVDIYEKQPVPFGLVRFGVAPDHPEVKNVINTFTQTAHSGRCAFWGNVEVGRDVTVPELREAYHAVVLSYGAEDHRALEIPGEELPGVCSARAFVGWYNGLPENQELEPDLSCDTAVILGQGNVALDVARILLTPPEHLEALLLCQRTDITKAALGVLRQSRVKTVWLVGRRGPLQVAFTIKELREMIQLPGAGPFWILWISWVSRTRSRRSPARGSG

SEQ ID NO: 773620 - protein, 236 aa, Homo sapiens
  misc_feature (173)..(175): Xaa can be any naturally occurring amino acid
  misc_feature (184)..(184): Xaa can be any naturally occurring amino acid
  misc_feature (188)..(188): Xaa can be any naturally occurring amino acid
  misc_feature (192)..(192): Xaa can be any naturally occurring amino acid
  misc_feature (201)..(201): Xaa can be any naturally occurring amino acid
  misc_feature (217)..(217): Xaa can be any naturally occurring amino acid
MASRCWRWWGWSAWPRTRLPPAGSTPSFCHHFSTQEKTPQICVVGSGPAGFYTAQHLLKHPQAHVDIYEKQPVPFGLVRFGVAPDHPEVKNVINTFTQTAHSGRCAFWGNVEVGRDVTVPELREAYHAVVLSYGAEDHRALEIPGEELPGVCSARAFVGWYNGLPENQELEQXXXCEKEVIMGXGKVXMEVXRIIMKKNEXMERKEIKKEEMGVMRXSRVKKVWIVGRSGKMKVEL

SEQ ID NO: 773621 - protein, 33 aa, Homo sapiens
MWALDEPTAFGGSDEVRDPANAKALRNKRRRMQ

SEQ ID NO: 773622 - protein, 275 aa, Homo sapiens
MASRCWRWWGWSAWPRTRLPPAGSTPSFCHHFSTQEKTPQICVVGSGPAGFYTAQHLLKHPQAHVDIYEKQPVPFGLVRFGVAPDHPEVKNVINTFTQTAHSGRCAFWGNVEVGRDVTVPELREAYHAVVLSYGAEDHRALEIPGEELPGVCSARAFVGWYNGLPENQELEPDLSCDTAVILGQGNVALDVARILLTPPEHLERTDITKAALGVLRQSRVKTVWLVGRRGPLQVAFTIKELREMIQLPGAGPFWILWISWVSRTRSRRSPARGSG

SEQ ID NO: 773623 - protein, 272 aa, Homo sapiens
MGARGGLRALSRGRSRAGAGLEKGFCHHFSTQEKTPQICVVGSGPAGFYTAQHLLKHPQAHVDIYEKQPVPFGLVRFGVAPDHPEVKNVINTFTQTAHSGRCAFWGNVEVGRDVTVPELREAYHAVVLSYGAEDHRALEIPGEELPGVCSARAFVGWYNGLPENQELEPDLSCDTAVILGQGNVALDVARILLTPPEHLERTDITKAALGVLRQSRVKTVWLVGRRGPLQVAFTIKELREMIQLPGAGPFWILWISWVSRTRSRRSPARGSG

SEQ ID NO: 773624 - protein, 275 aa, Homo sapiens; identical to SEQ ID NO: 773622

SEQ ID NO: 773625 - protein, 255 aa, Homo sapiens
PGRSGLALRSSSYGTDPLAGCCSQPWLRAAGAGGAGRRGLGPGCLPPGAPREKTPQICVVGSGPAGFYTAQHLLKHPQAHVDIYEKQPVPFGLVRFGVAPDHPEVKTAHSGRCAFWGNVEVGRDVTVPELREAYHAVVLSYGAEDHRALEIPGEELPGVCSARAFVGWYNGLPENQELEPDLSCDTAVILGQGNVALDVARILLTPPEHLERTDITKAALGVLRQSRVKTVWLVGRRGPLQVAFTIKRSPARGSG

SEQ ID NO: 773626 - protein, 275 aa, Homo sapiens; identical to SEQ ID NO: 773622

SEQ ID NO: 773627 - protein, 275 aa, Homo sapiens; identical to SEQ ID NO: 773622

SEQ ID NO: 773628 - protein, 275 aa, Homo sapiens; identical to SEQ ID NO: 773622

SEQ ID NO: 773629 - protein, 112 aa, Homo sapiens
IEDLILMRQPPNVVLITGTGYYTWLIFVFLVEMEFHYVGQAGLKLLTSGDPPASASRSVGITGVSHHAQPVWFFFYFLRWNLTLLPGWSAMARSWLTAISASWLQAILLPQP

SEQ ID NO: 773630 - protein, 228 aa, Homo sapiens
SLCYWKVACPPLAGTMQLPLALCLVCLLVHTAFRVVEGQGWQAFKNDATEIIPELGEYPEPPPELENNKTMNRAENGGRPPHHPFETKDVSEYSCRELHFTRYVTDGPCRSAKPVTELVCSGQCGPARLLPNAIGRGKWWRPSGPDFRCIPDRYRAQRVQLLCPGGEAPRARKVRLVASCKCKRLTRFHNQSELKDFGTEAARPQKGRKPRPRARSAKANQAELENAY

SEQ ID NO: 773631 - protein, 56 aa, Homo sapiens
GAYYYYYYCSFKLLTMYGAMRIKKMNKHILFRKWMYKKIKCNKVCVQKLTQWKKKK

SEQ ID NO: 773632 - protein, 339 aa, Homo sapiens
STGSTQSAHYGRGAAAAKRAQAPAAALQMAEMDPVAEFPQPPGAARWAEVMARFAARLGAQGRRVVLVTSGGTKVPLEARPVRFLDNFSSGRRGATSAEAFLAAGYGVLFLYRARSAFPYAHRFPPQTWLSALRPSGPALSGLLSLEAEENALPGFAEALRSYQEAAAAGTFLAVEFTTLADYLHLLQAAAQALNPLGPSAMFYLAAAVSDFYVPVSEMPEHKIQSSGGPLQITMKMVPKLLSPLVKDWAPKAFIISFKLETDPAIVINRARKALEIYQHQVVVANILESRQSFVFIVTKDSETKLLLSEEEIEKGVEIEEKIVDNLQSRHTAFIGDRN

SEQ ID NO: 773633 - protein, 339 aa, Homo sapiens; identical to SEQ ID NO: 773632

SEQ ID NO: 773634 - protein, 138 aa, Homo sapiens
MFYLAAAVSDFYVPVSEMPEHKIQSSGGPLQITMKMVPKLLSPLVKDWAPKAFIISFKLETDPAIVINRARKALEIYQHQVVVANILESRQSFVFIVTKDSETKLLLSEEEIEKGVEIEEKIVDNLQSRHTAFIGDRN

SEQ ID NO: 773635 - protein, 138 aa, Homo sapiens; identical to SEQ ID NO: 773634

SEQ ID NO: 773636 - protein, 237 aa, Homo sapiens
STGSTQSAHYGRGAAAAKRAQAPAAALQMAEMDPVAEFPQPPGAARWAEVMARFAARLGAQGRRVVLVTSGGTKVPLEARPVRFLDNFSSGRRGATSAEAFLAAGYGVLFLYRARSAFPYAHRFPPQTWLSALRPSGPALSGLLSLEAEENALPGFAEALRSYQEAAAAGTFLAVEFTTLADYLHLLQAAAQALNPLGACPRSTPFAWKHSLSFQPLIPLPPAYPRISAGEPELRRS

SEQ ID NO: 773637 - protein, 392 aa, Homo sapiens
STGSTQSAHYGRGAAAAKRAQAPAAALQMAEMDPVAEFPQPPGAARWAEVMARFAARLGAQGRRVVLVTSGGTKVPLEARPVRFLDNFSSGRRGATSAEAFLAAGYGVLFLYRARSAFPYAHRFPPQTWLSALRPSGPALSGLLSLEAEENALPGFAEALRSYQEAAAAGTFLAVEFTTLADYLHLLQAAAQALNPLGPSAMFYLAAAVSDFYVPVSEMPEHKIQSSGGPLQYHNEDLEKDKTSQNCLGRGMEQVAKKLGVAHEEIQRLTDELQVKEKEQCKLDSALKKAQLEIDKLKENLVKLKENDAADLQKAKEQNQRLDEEILALRNRVRSLDSEKKVLGEMVERLKGEVCESQENKQLGNHSPGKTVGGEQREQIEASMLEPELSVT

SEQ ID NO: 773638 - protein, 105 aa, Homo sapiens
MKMVPKLLSPLVKDWAPKAFIISFKLETDPAIVINRARKALEIYQHQVVVANILESRQSFVFIVTKDSETKLLLSEEEIEKGVEIEEKIVDNLQSRHTAFIGDRN

SEQ ID NO: 773639 - protein, 272 aa, Homo sapiens
STGSTQSAHYGRGAAAAKRAQAPAAALQMAEMDPVAEFPQPPGAARWAEVMARFAARLGAQGRRVVLVTSGGTKVPLEARPVRFLDNFSSGRRGATSAEAFLAAGYGVLFLYRARSAFPYAHRFPPQTWLSALRPSGPALSGLLSLEAEENALPGFAEALRSYQEAAAAGTFLAVEFTTLADYLHLLQAAAQALNPLGPSAMFYLAAAVSDFYVPVSEMPEHKIQSSGGPLQGKVQLEDILHHLEKEEINPLATTEEQLCLVLIPASTVKTG

SEQ ID NO: 773640 - protein, 138 aa, Homo sapiens; identical to SEQ ID NO: 773634

SEQ ID NO: 773641 - protein, 339 aa, Homo sapiens; identical to SEQ ID NO: 773632

SEQ ID NO: 773642 - protein, 339 aa, Homo sapiens; identical to SEQ ID NO: 773632

SEQ ID NO: 773643 - protein, 241 aa, Homo sapiens
STGSTQSAHYGRGAAAAKRAQAPAAALQMAEMDPVAEFPQPPGAARWAEVMARFAARLGAQGRRVVLVTSGGTKVPLEARPVRFLDNFSSGRRGATSAEAFLAAGYGVLFLYRARSAFPYAHRFPPQTWLSALRPSGPALSGLLSLEAEENALPGFAEALRSYQEAAAAGTFLAVEFTTLADYLHLLQAAAQALNPLGPSAMFYLAAAVSDFYVPVSEMPEHKIQSSGGPLQVMGASLPEI

SEQ ID NO: 773644 - protein, 195 aa, Homo sapiens
WPEFRHLIVPGFAEALRSYQEAAAAGTFLAVEFTTLADYLHLLQAAAQALNPLGPSAMFYLAAAVSDFYVPVSEMPEHKIQSSGGPLQITMKMVPKLLSPLVKDWAPKAFIISFKLETDPAIVINRARKALEIYQHQVVVANILESRQSFVFIVTKDSETKLLLSEEEIEKGVEIEEKIVDNLQSRHTAFIGDRN

SEQ ID NO: 773645 - protein, 165 aa, Homo sapiens
MLELQYHNEDLEKDKTSQNCLGRGMEQVAKKLGVAHEEIQRLTDELQVKEKEQCKLDSALKKAQLEIDKLKENLVKLKENDAADLQKAKEQNQRLDEEILALRNRVRSLDSEKKVLGEMVERLKGEVCESQENKQLGNHSPGKTVGGEQREQIEASMLEPELSVT

SEQ ID NO: 773646 - protein, 123 aa, Homo sapiens
GRYSSGELLSSDPSVAITMKMVPKLLSPLVKDWAPKAFIISFKLETDPAIVINRARKALEIYQHQVVVANILESRQSFVFIVTKDSETKLLLSEEEIEKGVEIEEKIVDNLQSRHTAFIGDRN

SEQ ID NO: 773647 - protein, 193 aa, Homo sapiens
  misc_feature (2)..(2): Xaa can be any naturally occurring amino acid
  misc_feature (188)..(188): Xaa can be any naturally occurring amino acid
SXTSGEAAVRWDAMEYDEKLARFRQAHLNPFNKQSGPRQHEQGPGEEVPDVTPEEALLELPPGEPEFRCPERVMDLGLSEDHFSRPVVCSWPLTSSSCGRRIEECKQVILELPEQSGEAEGCRGATHPPPAEAPGSWKDPNEDEAKTSECSLSTAFYKEKSKSVKETCDKCNTIIWGLIQTWYTCTGXPRPDE

SEQ ID NO: 773648 - protein, 114 aa, Homo sapiens
FHWVQIPSTQSSPICPSMAEQSELTVSDPFPGPTPTSTGVPAVCTHGVALGWLWVALITWTAFSSFLVCPPLSCSSISVLHAAAASAPTVVPGSLWCSAHVVKFKLLNDWMSLT

SEQ ID NO: 773649 - protein, 173 aa, Homo sapiens
MHWKMLLLLLLYYNAEASMCHRWSRAVLFPAAHRPKRSSSLPLNPVLQTSLEEVELLYEFLLAELEISPDLQISIKDEELASLRKASDFRTVCNNVIPKSIPDIRRLSASLSSHPGILKKEDFERTVLTLAYTAYRTALSHGHQKDIWAQSLVSLFQALRHDLMRSSQPGVPP

SEQ ID NO: 773650 - protein, 55 aa, Homo sapiens
MLEVLLHSQEQAMGSGTLVPGSLLLLYLDFHCRRQCLGNAITCPPSPLSSRQHRG

SEQ ID NO: 773651 - protein, 74 aa, Homo sapiens
PGSNNCPTSASRVAGTTGMSHHARLIFVFLVETGFPHVGQAGLELLASRDPPASASQNAGITGVSHRHRPRISL

SEQ ID NO: 773652 - protein, 68 aa, Homo sapiens
TQKEVMALEKVRVVPKIACSRWFPFCGRKAPCVGVCSLEGIAPLRCWSPSIGSNSGIPAVTRQSSPSR

SEQ ID NO: 773653 - protein, 118 aa, Homo sapiens
THIHHTHNHSSQTHTHTTLLTHVQAPQITRRCTHSTHTSIYCAGRKQMLEWCRTGARHLGSPMAAAELEPAPLRLQWLRVPGCERKSSTLSRRKGEGMQDRTRVLWEAHVCGTTPGLP

SEQ ID NO: 773654 - protein, 39 aa, Homo sapiens
MEALGQCWEKRAGFQQAAPPPLVKATEPSQRTTAQQGPL

SEQ ID NO: 773655 - protein, 179 aa, Homo sapiens
MATFVELSTKAKMPIVGLGTWKSPLGKVKEAVKVAIDAGYRHIDCAYVYQNEHEVGEAIQEKIQEKAVKREDLFIVSKLWPTFFERPLVRKAFEKTLKDLKLSYLDVYLIHWPQGFKSGDDLFPKDDKGNAIGGKATFLDAWEAMEELVDEGLVKALGVSNLPSIGSCKNGGNNGHPGG

SEQ ID NO: 773656 - protein, 287 aa, Homo sapiens
YAVTRLELYCMYAFMNHSYISSELSDTKMPIVGLGTWKSPLGKVKEAVKVAIDAGYRHIDCAYVYQNEHEVGEAIQEKIQEKAVKREDLFIVSKLWPTFFERPLVRKAFEKTLKDLKLSYLDVYLIHWPQGFKSGDDLFPKDDKGNAIGGKATFLDAWEAMEELVDEGLVKALGVSNFSHFQIEKLLNKPGLKYKPVTNQVECHPYLTQEKLIQYCHSKGITVTAYSPLGSPDRPWASQKTFPAGGSPIKKMLQAKNAARLIVPIRGQCCLPRCYRRCGHIRLAPGG

SEQ ID NO: 773657 - protein, 245 aa, Homo sapiens
MATFVELSTKAKMPIVGLGTWKSPLGKVKEAVKVAIDAGYRHIDCAYVYQNEHEVGEAIQEKIQEKAVKREDLFIVSKLWPTFFERPLVRKAFEKTLKDLKLSYLDVYLIHWPQGFKSGDDLFPKDDKGNAIGGKATFLDAWEAMEELVDEGLVKALGVSNFSHFQIEKLLNKPGLKYKPVTNQVECHPYLTQEKLIQYCHSKGITVTAYSPLGSPDRPWAKPEDPSLLEDPKIKEIAAKHSPSL

SEQ ID NO: 773658 - protein, 303 aa, Homo sapiens
MATFVELSTKAKMPIVGLGTWKSPLGKVKEAVKVAIDAGYRHIDCAYVYQNEHEVGEAIQEKIQEKAVKREDLFIVSKLWPTFFERPLVRKAFEKTLKDLKLSYLDVYLIHWPQGFKSGDDLFPKDDKGNAIGGKATFLDAWEAMEELVDEGLVKALGVSNFSHFQIEKLLNKPGLKYKPVTNQVECHPYLTQEKLIQYCHSKGITVTAYSPLGSPDRPWAKPEDPSLLEDPKIKEIAAKHKKTAAQVLIRFHIQRNVIVIPKSVTPARIVENIQVFDFKLSDEEMATILSFNRNWRACNVLQ

SEQ ID NO: 773659 - protein, 316 aa, Homo sapiens
MATFVELSTKAKMPIVGLGTWKSPLGKVKEAVKVAIDAGYRHIDCAYVYQNEHEVGEAIQEKIQEKAVKREDLFIVSKLWPTFFERPLVRKAFEKTLKDLKLSYLDVYLIHWPQGFKSGDDLFPKDDKGNAIGGKATFLDAWEAMEELVDEGLVKALGVSNFSHFQIEKLLNKPGLKYKPVTNQVECHPYLTQEKLIQYCHSKGITVTAYSPLGSPDRPWAKPEDPSLLEDPKIKEIAAKHKKTAAQVLIRFHIQRNVIVIPKSVTPARIVENIQVFDFKLSDEEMATILSFNRNWRACNVLQSSHLEDYPFDAEY

SEQ ID NO: 773660 - protein, 316 aa, Homo sapiens; identical to SEQ ID NO: 773659

SEQ ID NO: 773661 - protein, 332 aa, Homo sapiens
YAVTRLELYCMYAFMNHSYISSELSDTKMPIVGLGTWKSPLGKVKEAVKVAIDAGYRHIDCAYVYQNEHEVGEAIQEKIQEKAVKREDLFIVSKLWPTFFERPLVRKAFEKTLKDLKLSYLDVYLIHWPQGFKSGDDLFPKDDKGNAIGGKATFLDAWEAMEELVDEGLVKALGVSNFSHFQIEKLLNKPGLKYKPVTNQVECHPYLTQEKLIQYCHSKGITVTAYSPLGSPDRPWAKPEDPSLLEDPKIKEIAAKHKKTAAQVLIRFHIQRNVIVIPKSVTPARIVENIQVFDFKLSDEEMATILSFNRNWRACNVLQSSHLEDYPFDAEY

SEQ ID NO: 773662 - protein, 983 aa, Homo sapiens
DPIAATAMRGARGAWDFLCVLLLLLRVQTGSSQPSVSPGEPSPPSIHPGKSDLIVRVGDEIRLLCTDPGFVKWTFEILDETNENKQNEWITEKAEATNTGKYTCTNKHGLSNSIYVFVRDPAKLFLVDRSLYGKEDNDTLVRCPLTDPEVTNYSLKGCQGKPLPKDLRFIPDPKAGIMIKSVKRAYHRLCLHCSVDQEGKSVLSEKFILKVRPAFKAVPVVSVSKASYLLREGEEFTVTCTIKDVSSSVYSTWKRENSQTKLQEKYNSWHHGDFNYERQATLTISSARVNDSGVFMCYANNTFGSANVTTTLEVVDKGFINIFPMINTTVFVNDGENVDLIVEYEAFPKPEHQQWIYMNRTFTDKWEDYPKSENESNIRYVSELHLTRLKGTEGGTYTFLVSNSDVNAAIAFNVYVNTKPEILTYDRLVNGMLQCVAAGFPEPTIDWYFCPGTEQRCSASVLPVDVQTLNSSGPPFGKLVVQSSIDSSAFKHNGTVECKAYNDVGKTSAYFNFAFKGNNKEQIHPHTLFTPLLIGFVIVAGMMCIIVMILTYKYLQKPMYEVQWKVVEEINGNNYVYIDPTQLPYDHKWEFPRNRLSFGKTLGAGAFGKVVEATAYGLIKSDAAMTVAVKMLKPSAHLTEREALMSELKVLSYLGNHMNIVNLLGACTIGGPTLVITEYCCYGDLLNFLRRKRDSFICSKQEDHAEAALYKNLLHSKESSCSDSTNEYMDMKPGVSYVVPTKADKRRSVRIGSYIERDVTPAIMEDDELALDLEDLLSFSYQVAKGMAFLASKNCIHRDLAARNILLTHGRITKICDFGLARDIKNDSNYVVKGNARLPVKWMAPESIFNCVYTFESDVWSYGIFLWELFSLGSSPYPGMPVDSKFYKMIKEGFRMLSPEHAPAEMYDIMKTCWDADPLKRPTFKQIVQLIEKQISESTNHIYSNLANCSPNRQKPVVDHSVRINSVGSTASSSQPLLVHDDV

SEQ ID NO: 773663 - protein, 983 aa, Homo sapiens; identical to SEQ ID NO: 773662

SEQ ID NO: 773664 - protein, 138 aa, Homo sapiens
MGPFSLAALTFASLFLTSLPCIHPFLFFFFFVFLLAGAFYLYLLILFVASKWKEEFLSDLLLILHLPSLLYFPPPRERERERNADLTTAATAAATTAATTTLVMFTRPQINPEPGPCWSGGGYVNNPMSVPSSGPGVS

SEQ ID NO: 773665 - protein, 44 aa, Homo sapiens
NVEGLFVCHLLYYQMKTEKLHGHRDAVKEFDEIPYPRLENFFFF

SEQ ID NO: 773666 - protein, 51 aa, Homo sapiens
RLRHCTPAWATEQDCLTTEKEERKVTLFGLPGNGSQDSDSRASCLRGGEEN

SEQ ID NO: 773667 - protein, 102 aa, Homo sapiens
QLGHIFMPPSPSTTPPHPYQQGPPSYQKQGSHSVAYLPYTASSLSKGSMKKIEITVEPSQRPGTAINRSPSPISNQPSPWNQHSLYTPTGPSCTPSPSPRVI

SEQ ID NO: 773668 - protein, 911 aa, Homo sapiens
ERSEARSPIEMMMVMQPEGLGAGEGRFAGGGGGGEYMEQEEDWDRDLLLDPAWEKQQRKTFTAWCNSHLRKAGTQIENIEEDFRNGLKLMLLLEVISGERLPRPDKGKMRFHKIANVNKALDFIASKGVKLVSIGAEEIVDGNLKMTLGMIWTIILRFAIQDISVEETSAKEGLLLWCQRKTAPYRNVNVQNFHTSWKDGLALCALIHRHRPDLIDYAKLRKDDPIGNLNTAFEVAEKYLDIPKMLDAEDIVNTPKPDEKAIMTYVSCFYHAFAGAEQAETAANRICKVLAVNQENEKLMEEYEKLASELLEWIRRTVPWLENRVGEPSMSAMQRKLEDFRDYRRLHKPPRIQEKCQLEINFNTLQTKLRLSHRPAFMPSEGKLVSDIANAWRGLEQVEKGYEDWLLSEIRRLQRLQHLAEKFRQKASLHEAWTRGKEEMLSQRDYDSALLQEVRALLRRHEAFESDLAAHQDRVEHIAALAQELNELDYHEAASVNSRCQAICDQWDNLGTLTQKRRDALERMEKLLETIDQLQLEFARRAAPFNNWLDGAVEDLQDVWLVHSVEETQSLLTAHDQFKATLPEADRERGAIMGIQGEIQKICQTYGLRPCSTNPYITLSPQDINTKWDMVRKLVPSRDQTLQEELARQQVNERLRRQFAAQANAIGPWIQAKVEEVGRLAAGLAGSLEEQMAGLRQQEQNIINYKTNIDRLEGDHQLLQESLVFDNKHTVYSMEHIRVGWEQLLTSIARTINEVENQVLTRDAKGLSQEQLNEFRASFNHFDRKRNGMMEPDDFRACLISMGYDLGEVEFARIMTMVDPNAAGVVTFQAFIDFMTRETAETDTTEQVVASFKILAGDKNYITPEELRRELPAKQAEYCIRRMVPYKGSGAPAGALDYVAFSSALYGESDL

SEQ ID NO: 773669 - protein, 178 aa, Homo sapiens
MEIKHLLFLVAAACLLPMLSMKKKSARDQFNKLVTDLPNVQEEIVNIHNALRRRVVPPASNMLKMSWSEEAAQNARIFSKYCDMTESNPLERRLPNTFCGENMHMTSYPVSWSSVIGVWYSESTSFKHGEWTTTDDDITTDHYTQIVWATSYLIGCAIASCRQQGSPRYLYVCHYCHD

SEQ ID NO: 773670 - protein, 249 aa, Homo sapiens
MEIKHLLFLVAAACLLPMLSMKKKSARDQFNKLVTDLPNVQEEIVNIHNALRRRVVPPASNMLKMSWSEEAAQNARIFSKYCDMTESNPLERRLPNTFCGENMHMTSYPVSWSSVIGVWYSESTSFKHGEWTTTDDDITTDHYTQIVWATSYLIGCAIASCRQQGSPRYLYVCHYCHEGNDPETKNEPYKTGVPCEACPSNCEDKLCTNPCIYYDEYFDCDIQVHYLGCNHSTTILFCKATCLCDTEIK

SEQ ID NO: 773671 - protein, 280 aa, Homo sapiens
SSFFAATRTELGEIILLFFNFYFNFNGTCAGMEIKHLLFLVAAACLLPMLSMKKKSARDQFNKLVTDLPNVQEEIVNIHNALRRRVVPPASNMLKMSWSEEAAQNARIFSKYCDMTESNPLERRLPNTFCGENMHMTSYPVSWSSVIGVWYSESTSFKHGEWTTTDDDITTDHYTQIVWATSYLIGCAIASCRQQGSPRYLYVCHYCHEGNDPETKNEPYKTGVPCEACPSNCEDKLCTNPCIYYDEYFDCDIQVHYLGCNHSTTILFCKATCLCDTEIK

SEQ ID NO: 773672 - protein, 85 aa, Homo sapiens
  misc_feature (49)..(49): Xaa can be any naturally occurring amino acid
MRFFLVPLIPEDPHIDESKAKHQAIIMSTSLRVSPSIHGYHFDTASRKXAVGNIFENTDQGSLERLFRNSGDKKAEERAKIIFAI

SEQ ID NO: 773673 - protein, 124 aa, Homo sapiens
LADYSLYYGRQLMTICTMDYLVLNALSFVCYVGHSLTNLPLTLCFPDLISFPIIFHCLWNSQSCFPSLHRDYPFLNCSLPEFIPIHHRDVMHKRAVPFPGKEFFITETNSYPVFCLLRITVLYF

SEQ ID NO: 773674 - protein, 72 aa, Homo sapiens [sequence omitted]

SEQ ID NO: 773675 - protein, 37 aa, Homo sapiens
MENLRPEVQELLVEFNAVLQNGYPRILDLSLGPGSAT

SEQ ID NO: 773676 - protein, 35 aa, Homo sapiens
KQTALFERRRTAESPRPRGPGDIGLTCGKTSVLWR

SEQ ID NO: 773677 - protein, 93 aa, Homo sapiens
RGGDAGAGELGLRGTGRPRRGREPGSQSAALSPASTRTGGPFVLTRRTRITARCQGALIVCACHHALGGNPESYPQSRPFNHRLVPLSAPVKI

SEQ ID NO: 773678 - protein, 146 aa, Homo sapiens
GLGLSLRWVSCSLCSPAQRPPSQALGQLQEGHTGRSCCSCSLGQDIRGLGHQLPIVDLNLLHNYGPGEAGVAEGDGAHARAKAGAEAIAEAGACETLIGRAQTTCIATGGLHMDIHVLHPRLQLALLALQQLPVDGDLDVQGQPDV

SEQ ID NO: 773679 - protein, 112 aa, Homo sapiens
LTSQSEAVVVRAMKDKLGADHCEDSAILKRFTGSYQILLLTLFAVLASTASIFLAYNAFLNKIQTVPVVYVPTLGTPQPGFFNSTSSPPHFMSLQPPLAQSRLQHWLWSIRH

SEQ ID NO: 773680 - protein, 684 aa, Homo sapiens
CLKNSNSSIQSAKDKMGRKYTSTPRHIEVFPPFRLLPEKMTLIPMNMMQVMSEGGPQPQSIVHFSISNQTVAVVNRRGQVTGKIVGTAVVHGTIQTVNEDTGKVIVFSQDEVQIEVVQLRAVRILAAATRLITATKMPVYVMGVTSTQTPFSFSNANPGLTFHWSMSKRDVLDLVPRHSEVFLQLPVEHNFAMVVHTKAAGRTSIKVTVHCMNSSSGQFEGNLLELSDEVQILVFEKLQLFYPECQPEQILMPINSQLKLHTNREGAAFVSSRVLKCFPNSSVIEEDGEGLLKAGSIAGTAVLEVTSIEPFGVNQTTITGVQVAPVTYLRVSSQPKLYTAQGRTLSAFPLGMSLTFTVQFYNSIGEKFHTHNTQLYLALNRDDLLHIGPGNKNYTYMAQAVNRGLTLVGLWDRRHPGMADYIPVAVEHAIEPDTKLTFVGDIICFSTHLVSQHGEPGIWMISANNILQTDIVTGVGVARSPGTAMIFHDIPGVVKTYREVVVNASSRLMLSYDLKTYLTNTLNSTVFKLFITTGRNGVNLKGFCTPNQALAITKVLLPATLMLCHVQFSNTLLDIPASKVFQVHSDFSMEKDHCEDSAILKRFTGSYQILLLTLFAVLASTASIFLAYNAFLNKIQTVPVVYVPTLGTPQPGFFNSTSSPPHFMSLQPPLAQSRLQHWLWSIRH

SEQ ID NO: 773681 - protein, 62 aa, Homo sapiens
SQQTDTNRAGTLGKRARIHFKKQTNKKTQNFILLYNAEYFKGGKNGNREIVMRLLQEFSLEL

SEQ ID NO: 773682 - protein, 121 aa, Homo sapiens [sequence omitted]

SEQ ID NO: 773683 - protein, 1019 aa, Homo sapiens
MALFVKVDLSTYRCLVFKNKAIIRPHATEEIKVLFIPSSPGVFRCTFSVASWPCSTDAETIVQAEALASTVTLTAIAESPVIEVETEKKDVLDFGDLTYGGWKALPLKLINRTHATVPIRLIINANAVAWRCFTFSKEPVRAPVEVAPCADVVTRLAGPSVVNHMMPASYDGQDPEFLMIWVLFHSPKKQISSSDILDSAEEFSAKVDIEVDSPNPTPVLRSVSLRARAGIARIHAPRDLQTMHFLAKVASSRKQHLPLKNAGNIEVYLDIKVPEQGSHFSVDPKNLFLKPGEEHEVIVSFTPKDPEACEERILKIFVQPFGPQYEVVLKGEVISSGSKPLSPGPCLDIPSILSNKQFLAWGGVPLGRTQLQKLALRNNSASTTQHLRLLIRGQDQDCFQLQNTFGSEQRLTSNCEIRIHPKEDIFISVLFAPTRLSCMLARLEIKQLGNRSQPGIKFTIPLSGYGGTSNLILEGVKKLSDSYMVTVNGLVPGKESKIVFSVRNTGSRAAFVKAVGFKDSQKKVLLDPKVLRIFPDKFVLKERTQENVTLIYNPSDRGINNKTATELSTVYLFGGDEISRQQYRRALLHKPEMIKQILPEHSVLQNINFVEAFQDELLVTEVYDLPQRPNDVQLFYGSMCKIILSVIGEFRDCISSREFLQPSSKASLESTSDLGASGKHGGNVSLDVLPVKGPQGSPLLSRAARPPPDQLASEEPWTVLPEHLILVAPSPCDMAKTGRFQIVNNSVRLLRFELCWPAHCLTVTPQHGCVAPESKLQILVSPNSSLSTKQSMFPWSGLIYIHCDDGQKKIVKVQIREDLTQVELLTRLTSKPFGILSPVSEPSVSHLVKPMTKPPSTKVEIRNKSITFPTTEPGETSESCLELENHGTTDVKWHLSSLAPPYVKGVDESGDVFRATYAAFRCSPISGLLESHGIQKVSITFLPRGRGDYAQFWDVECHPLKEPHMKHTLRFQLSGQSIEAENEPENACLSTDSLIKIDHLVKPRRQAVSEASARIPEAA

SEQ ID NO: 773684 - protein, 1723 aa, Homo sapiens
KDYSHVRHFLPNDLEKSNGSNALDMEKYLKKTEVSRYESALENFSRASMSDTWDLSLPKEQTTQDIHPVDLSATSVSVRAPEENTAAIVYVENGESENQESFRTINSSNSVTNRENNSAVVDVKTCSIDNKLQDVGNDEKATSISTPSDSYSSVRNPRITSLCLLKDCEEIRDNRENQRQNECVSEISNSEKHVTFENHRIVSPKNSDLKNTSPEHGGRGSEDEQESFRPSTSPLSHSSPSEISGTSSSGCALESFGSAAQQQQPPCEQELSPLVCSPAGVSRLTYVSEPESSYPTTATDDALEDRKSDITSELSTTIIQGSPAALEERAMEKLREKVPFQNRGKGTLSSIIQNNSDTRKATETTSLSSKPEYVKPDFRWSKDPSSKSGNLLETSEVGWTSNPEELDPIRLALLGKSGLSCQVGSATSHPVSCQEPIDEDQRISPKDKSTAGREFSGQVSHQTTSENQCTPIPSSTVHSSVADMQNMPAAVHALLTQPSLSAAPFAQRYLGTLPSTGSTTLPQCHAGNATVCGFSGGLPYPAVAGEPVQNSVAVGICLGSNIGSGWMGTSSLCNPYSNTLNQNLLSTTKPFPVPSVGTNCGIEPWDSGVTSGLGSVRVPEELKLPHACCVGIASQTLLSVLNPTDRWLQVSIGVLSISVNGEKDHLNIGEWRGGIYGQQLFGNVPVLRLLLVNQYWWMLPSCLLVAIVCLVDLSTYRCLVFKNKAIIRPHATEEIKVLFIPSSPGVFRCTFSVASWPCSTDAETIVQAEALASTVTLTAIAESPVIEVETEKKDVLDFGDLTYGGWKALPLKLINRTHATVPIRLIINANAVAWRCFTFSKEPVRAPVEVAPCADVVTRLAGPSVVNHMMPASYDGQDPEFLMIWVLFHSPKKQISSSDILDSAEEFSAKVDIEVDSPNPTPVLRSVSLRARAGIARIHAPRDLQTMHFLAKVASSRKQHLPLKNAGNIEVYLDIKVPEQGSHFSVDPKNLFLKPGEEHEVIVSFTPKDPEACEERILKIFVQPFGPQYEVVLKGEVISSGSKPLSPGPCLDIPSILSNKQFLAWGGVPLGRTQLQKLALRNNSASTTQHLRLLIRGQDQDCFQLQNTFGSEQRLTSNCEIRIHPKEDIFISVLFAPTRLSCMLARLEIKQLGNRSQPGIKFTIPLSGYGGTSNLILEGVKKLSDSYMVTVNGLVPGKESKIVFSVRNTGSRAAFVKAVGFKDSQKKVLLDPKVLRIFPDKFVLKERTQENVTLIYNPSDRGINNKTATELSTVYLFGGDEISRQQYRRALLHKPEMIKQILPEHSVLQNINFVEAFQDELLVTEVYDLPQRPNDVQLFYGSMCKIILSVIGEFRDCISSREFLQPSSKASLESTSDLGASGKHGGNVSLDVLPVKGPQGSPLLSRAARPPPDQLASEEPWTVLPEHLILVAPSPCDMAKTGRFQIVNNSVRLLRFELCWPAHCLTVTPQHGCVAPESKLQILVSPNSSLSTKQSMFPWSGLIYIHCDDGQKKIVKVQIREDLTQVELLTRLTSKPFGILSPVSEPSVSHLVKPMTKPPSTKVEIRNKSITFPTTEPGETSESCLELENHGTTDVKWHLSSLAPPYVKGVDESGDVFRATYAAFRCSPISGLLESHGIQKVSITFLPRGRGDYAQFWDVECHPLKEPHMKHTLRFQLSGQSIEAENEPENACLSTDSLIKIDHLVKPRRQAVSEASARIPEAA

SEQ ID NO: 773685 - protein, 671 aa, Homo sapiens
KDYSHVRHFLPNDLEKSNGSNALDMEKYLKKTEVSRYESALENFSRASMSDTWDLSLPKEQTTQDIHPVDLSATSVSVRAPEENTAAIVYVENGESENQESFRTINSSNSVTNRENNSAVVDVKTCSIDNKLQDVGNDEKATSISTPSDSYSSVRNPRITSLCLLKDCEEIRDNRENQRQNECVSEISNSEKHVTFENHRIVSPKNSDLKNTSPEHGGRGSEDEQESFRPSTSPLSHSSPSEISGTSSSGCALESFGSAAQQQQPPCEQELSPLVCSPAGVSRLTYVSEPESSYPTTATDDALEDRKSDITSELSTTIIQGSPAALEERAMEKLREKVPFQNRGKGTLSSIIQNNSDTRKATETTSLSSKPEYVKPDFRWSKDPSSKSGNLLETSEVGWTSNPEELDPIRLALLGKSGLSCQVGSATSHPVSCQEPIDEDQRISPKDKSTAGREFSGQVSHQTTSENQCTPIPSSTVHSSVADMQNMPAAVHALLTQPSLSAAPFAQRYLGTLPSTGSTTLPQCHAGNATVCGFSGGLPYPAVAGEPVQNSVAVGICLGSNIGSGWMGTSSLCNPYSNTLNQNLLSTTKPFPVPSVGTNCGIEPWDSGVTSGLGSVRVPEELKLPHACCVGIASQTLLSVLNPTDRWLQVSIGVLSISVNGEKVAFYVFLI

SEQ ID NO: 773686 - protein, 1676 aa, Homo sapiens
KDYSHVRHFLPNDLEKSNGSNALDMEKYLKKTEVSRYESALENFSRASMSDTWDLSLPKEQTTQDIHPVDLSATSVSVRAPEENTAAIVYVENGESENQESFRTINSSNSVTNRENNSAVVDVKTCSIDNKLQDVGNDEKATSISTPSDSYSSVRNPRITSLCLLKDCEEIRDNRENQRQNECVSEISNSEKHVTFENHRIVSPKNSDLKNTSPEHGGRGSEDEQESFRPSTSPLSHSSPSEISGTSSSGCALESFGSAAQQQQPPCEQELSPLVCSPAGVSRLTYVSEPESSYPTTATDDALEDRKSDITSELSTTIIQGSPAALEERAMEKLREKVPFQNRGKGTLSSIIQNNSDTRKATETTSLSSKPEYVKPDFRWSKDPSSKSGNLLETSEVGWTSNPEELDPIRLALLGKSGLSCQVGSATSHPVSCQEPIDEDQRISPKDKSTAGREFSGQVSHQTTSENQCTPIPSSTVHSSVADMQNMPAAVHALLTQPSLSAAPFAQRYLGTLPSTGSTTLPQCHAGNATVCGFSGGLPYPAVAGEPVQNSVAVGICLGSNIGSGWMGTSSLCNPYSNTLNQNLLSTTKPFPVPSVGTNCGIEPWDSGVTSGLGSVRVPEELKLPHACCVGIASQTLLSVLNPTDRWLQVSIGVLSISVNGEKVDLSTYRCLVFKNKAIIRPHATEEIKVLFIPSSPGVFRCTFSVASWPCSTDAETIVQAEALASTVTLTAIAESPVIEVETEKKDVLDFGDLTYGGWKALPLKLINRTHATVPIRLIINANAVAWRCFTFSKEPVRAPVEVAPCADVVTRLAGPSVVNHMMPASYDGQDPEFLMIWVLFHSPKKQISSSDILDSAEEFSAKVDIEVDSPNPTPVLRSVSLRARAGIARIHAPRDLQTMHFLAKVASSRKQHLPLKNAGNIEVYLDIKVPEQGSHFSVDPKNLFLKPGEEHEVIVSFTPKDPEACEERILKIFVQPFGPQYEVVLKGEVISSGSKPLSPGPCLDIPSILSNKQFLAWGGVPLGRTQLQKLALRNNSASTTQHLRLLIRGQDQDCFQLQNTFGSEQRLTSNCEIRIHPKEDIFISVLFAPTRLSCMLARLEIKQLGNRSQPGIKFTIPLSGYGGTSNLILEGVKKLSDSYMVTVNGLVPGKESKIVFSVRNTGSRAAFVKAVGFKDSQKKVLLDPKVLRIFPDKFVLKERTQENVTLIYNPSDRGINNKTATELSTVYLFGGDEISRQQYRRALLHKPEMIKQILPEHSVLQNINFVEAFQDELLVTEVYDLPQRPNDVQLFYGSMCKIILSVIGEFRDCISSREFLQPSSKASLESTSDLGASGKHGGNVSLDVLPVKGPQGSPLLSRAARPPPDQLASEEPWTVLPEHLILVAPSPCDMAKTGRFQIVNNSVRLLRFELCWPAHCLTVTPQHGCVAPESKLQILVSPNSSLSTKQSMFPWSGLIYIHCDDGQKKIVKVQIREDLTQVELLTRLTSKPFGILSPVSEPSVSHLVKPMTKPPSTKVEIRNKSITFPTTEPGETSESCLELENHGTTDVKWHLSSLAPPYVKGVDESGDVFRATYAAFRCSPISGLLESHGIQKVSITFLPRGRGDYAQFWDVECHPLKEPHMKHTLRFQLSGQSIEAENEPENACLSTDSLIKIDHLVKPRRQAVSEASARIPEAA

SEQ ID NO: 773687 - protein, 671 aa, Homo sapiens; identical to SEQ ID NO: 773685

SEQ ID NO: 773688 - protein, 671 aa, Homo sapiens; identical to SEQ ID NO: 773685

SEQ ID NO: 773689 - protein, 634 aa, Homo sapiens
KDYSHVRHFLPNDLEKSNGSNALDMEKYLKKTEVSRYESALENFSRASMSDTWDLSLPKEQTTQDIHPVDLSATSVSVRAPEENTAAIVYVENGESENQESFRTINSSNSVTNRENNSAVVDVKTCSIDNKLQDVGNDEKATSISTPSDSYSSVRNPRITSLCLLKDCEEIRDNRENQRQNECVSEISNSEKHVTFENHRIVSPKNSDLKNTSPEHGGRGSEDEQESFRPSTSPLSHSSPSEISGTSSSGCALESFGSAAQQQQPPCEQELSPLVCSPAGVSRLTYVSEPESSYPTTATDDALEDRKSDITSELSTTIIQGSPAALEERAMEKLREKVPFQNRGKGTLSSIIQNNSDTRKATETTSLSSKPEYVKPDFRWSKDPSSKSGNLLETSEVGWTSNPEELDPIRLALLGKSGLSCQVGSATSHPVSCQEPIDEDQRISPKDKSTAGREFSGQVSHQTTSENQCTPIPSSTVHSSVADMQNMPAAVHALLTQPSLSAAPFAQRYLGTLPSTGSTTLPQCHAGNATVCGFSGGLPYPAVAGEPVQNSVAVGICLGSNIGSGWMGTSSLCNPYSNTLNQNLLSTTKPFPVPSVGTNCGIEPWDSGVTSGLGKMLFLYYYYLLLFSQMTPQS

SEQ ID NO: 773690 - protein, 44 aa, Homo sapiens
MQQMIGQTRSQLSVRVLVGEMGVTQPHQAVQAVTGRRGKLGKKV

SEQ ID NO: 773691 - protein, 68 aa, Homo sapiens
SHTQLLTVWYVGIFCPTAACAFAEHLQESHVGDGLDVAGTRAELLRFSECGQTRCSDMALGGVGTQAG

SEQ ID NO: 773692 - protein, 207 aa, Homo sapiens
RGVGLPFSLAWCLMSRLRSCLFVLVLERGWSPFFTCVVSDEPSVVVCVCSSAASRIFSLSAFEQLDYDGPWYGFLCVPCACSSLRFLDLGLCSFHEICIILKLHICRCFFCPSTPQDLRHAGIRHAGIRQVGIRHAVIRHAGIRHVGLRHTGITWVSGTQLSGTRVSGRRVSARGCRAGGCRARGCRAGGRRAGGRQAAWLCPTAAQ

SEQ ID NO: 773693 - protein, 488 aa, Homo sapiens
ALRSSAVVELDLEGTRIRRKKPLGERPKDEDERTVYVELLPKNVNHSWIERVFGKCGNVVYKVYHYKSTGDPKGFAFVEFETKEQAAKAIEFLNNPPEEAPRKPGIFPKTVKNKPIPALRVVEEKKKKKKKKGMKKEDNIQAKEENMDTSNTSISKMKRSRPTSEGSDIESTEPQKQCSKKKKKRDRVEASSLPEVRTGKRKRSSSEDAESLAPRSKVKKIIQKDIIKEASEASKENRDIEISTEEEKDTGDLKDSSLLKTKRKHKKKHKERHKMGEEVIPLRVLSKSEWMDLKKEYLALQKASMASLKKTISQIKSESEMETDSGVPQNTGMKNEKTANREECRTQEKVNATGPQFVSGVIVKIISTEPLPGRKQVRDTLAAISEVLYVDLLEGDTECHARFKTPEDAQAVINAYTEINKKHCWKLEILSGDHEQRYWQKILVDRQAKLNQPREKKRGTEKLITKAEKIRLAKTQQASKHIRFSEYD

SEQ ID NO: 773694 - protein, 246 aa, Homo sapiens
ALRSSAVVELDLEGTRIRRKKPLGERPKDEDERTVYVELLPKNVNHSWIERVFGKCGNVVYKVYHYKSTGDPKGFAFVEFETKEQAAKAIEFLNNPPEEAPRKPGIFPKTVKNKPIPALRVVEEKKKKKKKKGMKKEDNIQAKEENMDTSNTSISKMKRSRPTSEGSDIESTEPQKQCSKKKKKRDRVEASSLPEVRTGKRKRSSSEDAESLAPRSKVKKIIQKDIIKEASEASKENRVTFHSPMS

SEQ ID NO: 773695 - protein, 267 aa, Homo sapiens
MRQPLGQKPASGLVNQKDIEISTEEEKDTGDLKDSSLLKTKRKHKKKHKERHKMGEEVIPLRVLSKSEWMDLKKEYLALQKASMASLKKTISQIKSESEMETDSGVPQNTGMKNEKTANREECRTQEKVNATGPQFVSGVIVKIISTEPLPGRKQVRDTLAAISEVLYVDLLEGDTECHARFKTPEDAQAVINAYTEINKKHCWKLEILSGDHEQRYWQKILVDRQAKLNQPREKKRGTEKLITKAEKIRLAKTQQASKHIRFSEYD

SEQ ID NO: 773696 - protein, 214 aa, Homo sapiens
MGEEVIPLRVLSKSEWMDLKKEYLALQKASMASLKKTISQIKSESEMETDSGVPQNTGMKNEKTANREECRTQEKVNATGPQFVSGVIVKIISTEPLPGRKQVRDTLAAISEVLYVDLLEGDTECHARFKTPEDAQAVINAYTEINKKHCWKLEILSGDHEQRYWQKILVDRQAKLNQPREKKRGTEKLITKAEKIRLAKTQQASKHIRFSEYD

SEQ ID NO: 773697 - protein, 505 aa, Homo sapiens
ALRSSAVVELDLEGTRIRRKKPLGERPKDEDERTVYVELLPKNVNHSWIERVFGKCGNVVYKVYHYKSTGDPKGFAFVEFETKEQAAKAIEFLNNPPEEAPRKPGIFPKTVKNKPIPALRVVEEKKKKKKKKGMKKEDNIQAKEENMDTSNTSISKMKRSRPTSEGSDIESTEPQKQCSKKKKKRDRVEASSLPEVRTGKRKRSSSEDAESLAPRSKVKKIIQKDIIKEASEASKENRVHFTAPCLNGELFYLFQDIEISTEEEKDTGDLKDSSLLKTKRKHKKKHKERHKMGEEVIPLRVLSKSEWMDLKKEYLALQKASMASLKKTISQIKSESEMETDSGVPQNTGMKNEKTANREECRTQEKVNATGPQFVSGVIVKIISTEPLPGRKQVRDTLAAISEVLYVDLLEGDTECHARFKTPEDAQAVINAYTEINKKHCWKLEILSGDHEQRYWQKILVDRQAKLNQPREKKRGTEKLITKAEKIRLAKTQQASKHIRFSEYD

SEQ ID NO: 773698 - protein, 269 aa, Homo sapiens
RRKCPKPQYLTLYFGSRTEKETESGNQEKDTGDLKDSSLLKTKRKHKKKHKERHKMGEEVIPLRVLSKSEWMDLKKEYLALQKASMASLKKTISQIKSESEMETDSGVPQNTGMKNEKTANREECRTQEKVNATGPQFVSGVIVKIISTEPLPGRKQVRDTLAAISEVLYVDLLEGDTECHARFKTPEDAQAVINAYTEINKKHCWKLEILSGDHEQRYWQKILVDRQAKLNQPREKKRGTEKLITKAEKIRLAKTQQASKHIRFSEYD

SEQ ID NO: 773699 - protein, 166 aa, Homo sapiens
EPISHRYWVLRDATVCTLWSMGPVTRNGKYLPSTLPRNQIFIKCVCCQVLFLFPRHTCSFSYVLPVHLIWFGPVSPSYLILNYNAHLLREGPVIQVIGLWEWFPHAVLVKPDGFINGSFSCAHTVSLSCCLVKKVSASPLPSAMIVSFLRPPQSCGTVSQLNLFPL

SEQ ID NO: 773700 - protein, 87 aa, Homo sapiens
MVQGRKVCRARRGSDFAFPVPTEPGRKVCRVRRGLGLCISSGHGAGPEGVQSPERLRLCISGVGQSRAGRCAEPGEVSDFAFLVHMV

SEQ ID NO: 773701 - protein, 110 aa, Homo sapiens
MRRDPIAPLPQLPVIPVLGKQPWKHRLAGSTCLGCQTRAQLLHCLCGPRRPSHPRPPAPWLGSPGSCEQLQRVQLSQLPSVLGGKIQSCVFRQNRRLMAQGRGGQSRLCS

SEQ ID NO: 773702 - protein, 251 aa, Homo sapiens
  misc_feature (221)..(221): Xaa can be any naturally occurring amino acid
  misc_feature (226)..(226): Xaa can be any naturally occurring amino acid
  misc_feature (236)..(236): Xaa can be any naturally occurring amino acid
  misc_feature (245)..(245): Xaa can be any naturally occurring amino acid
  misc_feature (250)..(250): Xaa can be any naturally occurring amino acid
MMGGGLAEIPGLSINFAKVLHGEQYLELYKPLPRAGKLKCEAVVADVLDKGSGVVIIMDVYSYSEKELICHNQFSLFLVGSGGFGGKRTSDKVKVAVAIPNRPPDAVLTDTTSLNQAALYRLSGDWNPLHIDPNFASLAGLTSPYYMDYVHLDFLPGVCYSSLQIMMCQIQAVKARLQNQYIQDKLYKLDVEEERKQNFIFPNQGPKKLGDIVLFNGIMWXLAPTXWVLQVRTPPXGPGRFQGTXVFEGXG

SEQ ID NO: 773703 - protein, 106 aa, Homo sapiens
MNISQIISYWGYPDEEYDIVTEDGYILGLYRIPYWRTDNNKNLAQRVVVYLQHGLLTSASSWISNLPNNSLGFILADAGYDVWMGNSRGNTWSRKHLYLETSSKEF

SEQ ID NO: 773704 - protein, 258 aa, Homo sapiens
RVGVSCAWCVGGVSGCVLVSGGKRCRVWEVPVAVVWAARCLLPRLLYAVPFGSDAGTYCGSRRVLPRPGRGGGGSAQAPTAPLPEELRREDAGSAMRDEPQSALGRPAARSRGADKPAAGGCEAAVPVAAAPYRSALRFPRTRLGVRARVRAILPRRPGTEGPGKGGGRLRRGRGGIPPRDNHGRHVREAPAGSGGGPSFGPRAGGEGGPRVALGTPGTAAARTPWSPAAGPRCAFLLCSLPGMRNLEPRCRVTELSW

SEQ ID NO: 773705 - protein, 258 aa, Homo sapiens; identical to SEQ ID NO: 773704

SEQ ID NO: 773706 - protein, 305 aa, Homo sapiens
MGTEKESPEPDCQKQFQAAVSVIQNLPKNGSYRPSYEEMLRFYSYYKQATMGPCLVPRPGFWDPIGRYKWDAWNSLGKMSREEAMSAYITEMKLVAQKVIDTVPLGEVAEDMFGYFEPLYQVIPDMPRPPETFLRRVTGWKEQVVNGDVGAVSEPPCLPKEPAPPSPESHSPRDLDSEVFCDSLEQLEPELVWTEQRAASGGKRDPRNSPVPPTKKEGLRGSPPGPQELDVWLLGTVRALQESMQEVQARVQSLESMPRPPEQRPQPRPSARPWPLGLPGPALLFFLLWPFVVQWLFRMFRTQKR

SEQ ID NO: 773707 - protein, 129 aa, Homo sapiens
  misc_feature (3)..(3): Xaa can be any naturally occurring amino acid
PPXPPSRGVFFPSDPPQSWRSVVVHVPGAGLAVTRGRGDRVSAPAFPSLWVTRIFPPLLLPEEVELLSKLGLGPGPGRMIGWEAAGGRPGGPDQLGGVSRPRGRGMSAVCSLSSPAGPLRPHTHSGRLH

SEQ ID NO: 773708 - protein, 84 aa, Homo sapiens
PSICVAIPALLDPGVSRKPRGGGERGPRCPGSGRRGAHAGPRCRRPGWETVRPALSTPILFLHLFGSWRCAPKGGASGDGHIWH

SEQ ID NO: 773709 - protein, 341 aa, Homo sapiens
MGTEKESPEPDCQKQFQAAVSVIQNLPKNGSYRPSYEEMLRFYSYYKQATMGPCLVPRPGFWDPIGRYKWDAWNSLGKMSREEAMSAYITEMKLVAQKVIDTVPLGEVAEDMFGYFEPLYQVIPDMPRPPETFLRRVTGWKEQVVNGDVGAVSEPPCLPKEPAPPSPASLWAVTLPTPPQSPIHPGTWTPRFSVIPWSSWSLSWFGQSSGQHLEESVIPGTAPCPPQRKRGCGAARRGPRSWTCGCWGQFEHYRRACRRCRRGCRAWRACPGPLSRGRSPGPVLGHGPLGSRGPRCSSSSCGPSSSSGSSECFGPKRGDCQWRGLCSQLRLSCCALSLPRV

SEQ ID NO: 773710 - protein, 269 aa, Homo sapiens
MGTEKESPEPDCQKQFQAAVSVIQNLPKNGSYRPSYEEMLRFYSYYKQATMGPCLVPRPGFWDPIGRYKWDAWNSLGKMSREEAMSAYITEMKLVAQKVIDTVPLGEVAEDMFGYFEPLYQVIPDMPRPPETFLRRVTGWKEQVVNGDVGAVSEPPCLPKEPAPPSPESHSPRDLDSEVFCDSLEQLEPELVWTEQRAASGGKRDPRNSPVPPTKKEAAAQAQCSAMAPWAPGARAALLPPVALRRPVALPNVSDPKEVTVSGGVSAAN

SEQ ID NO: 773711 - protein, 323 aa, Homo sapiens [sequence omitted]

SEQ ID NO: 773712 - protein, 365 aa, Homo sapiens
MGTEKESPEPDCQKQFQAAVSVIQNLPKNGSYRPSYEEMLRFYSYYKQATMGPCLVPRPGFWDPIGRYKCVSSLLAGQTSLSCQAALSQPSAPRDAWNSLGKMSREEAMSAYITEMKLVAQKVIDTVPLGEVAEDMFGYFEPLYQVIPDMPRPPETFLRRVTGWKEQVVNGDVGAVSEPPCLPKEPAPPSPASLWAVTLPTPPQSPIHPGTWTPRFSVIPWSSWSLSWFGQSSGQHLEESVIPGTAPCPPQRKRGCGAARRGPRSWTCGCWGQFEHYRRACRRCRRGCRAWRACPGPLSRGRSPGPVLGHGPLGSRGPRCSSSSCGPSSSSGSSECFGPKRGDCQWRGLCSQLRLSCCALSLPRV

SEQ ID NO: 773713 - protein, 341 aa, Homo sapiens; identical to SEQ ID NO: 773709

SEQ ID NO: 773714 - protein, 196 aa, Homo sapiens
MRILGREAQRLPAKVTWLERAGCEWRCWGCFRASLPPQGTGTPKPSFPLGSNSTNPSTESHSPRDLDSEVFCDSLEQLEPELVWTEQRAASGGKRDPRNSPVPPTKKEGLRGSPPGPQELDVWLLGTVRALQESMQEVQARVQSLESMPRPPEQRPQPRPSARPWPLGLPGPALLFFLLWPFVVQWLFRMFRTQKR

SEQ ID NO: 773715 - protein, 151 aa, Homo sapiens [sequence omitted]

SEQ ID NO: 773716 - protein, 238 aa, Homo sapiens
MGTEKESPEPDCQKQFQAAVSVIQNLPKNGSYRPSYEEMLRFYSYYKQATMGPCLVPRPGFWDPIGRYKWDAWNSLGKMSREEAMSAYITEMKLVAQKVIDTVPLGEVAEDMFGYFEPLYQVIPDMPRPPETFLRRVTGWKEQVVNGDVGAVSEPPCLPKEPAPPSPESHSPRDLDSEVFCDSLEQLEPELVWTEQRAASGGKRDPRNSPVPPTKKAAQPQEVIHILWTPPFGNLRRQ

SEQ ID NO: 773717 - protein, 312 aa, Homo sapiens
MGTEKESPEPDCQKQFQAAVSVIQNLPKNGSYRPSYEEMLRFYSYYKQATMGPCLVPRPGFWDPIGRYKWDAWNSLGKMSREEAMSAYITEMKLVAQKVIDTVPLGEVAEDMFGYFEPLYQVIPDMPRPPETFLRRVTGWKEQVVNGDVGAVSEPPCLPKEPAPPSPESHSPRDLDSEVFCDSLEQLEPELVWTEQRAASGGKRDPRNSPVPPTKKEGLRGSPPGPQELDVWLLGTVRALQESMQEVQARVQSLESMPRPPEQSHSVGQTGVKWRELGSLQPPPPRVQAILCLSLPSSWDCRRPPPCPANFF

SEQ ID NO: 773718 - protein, 54 aa, Homo sapiens
LPVLLFLDLFQALTFHITHGTSSVRLPESRNQVKYKSTVLPAGGMGIIGQYNSP

SEQ ID NO: 773719 - protein, 101 aa, Homo sapiens
GCSLGSLQPQPTMLSQASHLSHLSSLGHMLMPPLLANFFIFCRDMGSCCVAQAGLEFLDSSSFLVSASQSGGITGVSHRNLTCNFLVMLLSPFGVRFILAS

SEQ ID NO: 773720 - protein, 162 aa, Homo sapiens
IKTPAERLRGPLPPSADDNLKTPSERQLTPLPPSAPPSADDNIKTPAERLRGPLPPSADDNLKTPSERQLTPLPPSAPPSADDNIKTPAERLRGASVGSASTPQRMIISRHLRKTVSSLPFTPISIHAVSQSDKYQDTCTSVCGGRFHPQPMIISRHLPNVS

SEQ ID NO: 773721 - protein, 177 aa, Homo sapiens
VKPFTPSEQVRRPCSLGAVPTLSPYPFLDHATHVTTPDFPAVFQSLFPGSLLPRTLVCVPLGPRGGQGASVCECDFALRSWCDPWAEREALWCRTETKAVYSFPISAVKKLPQTYYLTFMEARGPKWVSLGYNQGIAMAVSFLRLQGESVCLPFPASRGHLCSLAGGHLQSQQSHHS

SEQ ID NO: 773722 - protein, 67 aa, Homo sapiens
SEHDLRIVLVKSSVQCQDALGLYRWLCFPCTSLAWSHTKEENREVESLCSLLVFKKPGSWKDIWELH

SEQ ID NO: 773723 - protein, 116 aa, Homo sapiens [sequence omitted]

SEQ ID NO: 773724 - protein, 299 aa, Homo sapiens
SRDWEETAAGRGLRGTMGLLTILKKMKQKERELRLLMLGLDNAGKTTILKKFNGEDIDTISPTLGFNIKTLEHRGFKLNIWDVGGQKSLRSYWRNYFESTDGLIWVVDSADRQRMQDCQRELQSLLVEERLAGATLLIFANKQDLPGALSSNAIREALELDSIRRHHMVHPGLQRRHRGEPAAGPSTGSWMTFPAAFSQLTEPFQMRPASSPGPSTSQTYPWGLRVSGKYTSHYSTQLVLYCGQCCLEQPGSIGEGWLVVSGRLPGSQPQKGGGREDRAEGGHHPVNGGQKEKKCGGEN

SEQ ID NO: 773725 - protein, 214 aa, Homo sapiens
SRDWEETAAGRGLRGTMGLLTILKKMKQKERELRLLMLGLDNAGKTTILKKFNGEDIDTISPTLGFNIKTLEHRGFKLNIWDVGGQKSLRSYWRNYFESTDGLIWVVDSADRQRMQDCQRELQSLLVEERLAGATLLIFANKQDLPGALSSNAIREALELDSIRRHHMVHPGLQRRHRGEPAAGPSTGSWMTFPAGQTNAPPPPPQPAAATAAR

SEQ ID NO: 773726 - protein, 413 aa, Homo sapiens
LHLLTLAQSPCDTKECQHGGQCQVENGSAVCVCQAGYTGAACEMDVDDCSPDPCLNGGSCVDLVGNYTCLCAEPFKGLRCETGDHPVPDACLSAPCHNGGTCVDADQGYVCECPEGFMGLDCRERVPDDCECRNGGRCLGANTTLCQCPLGFFGLLCEFEITAMPCNMNTQCPDGGYCMEHGGSYLCVCHTDHNASHSLPSPCDSDPCFNGGSCDAHDDSYTCECPRGFHGKHCEKARPHLCSSGPCRNGGTCKEAGGEYHCSCPYRFTGRHCEIARLVCLWPCHNGGTCFHYIGKYKCDCPPGFSGRHCEIAPPPASGARVVNGGTCEDRDTDFFCHCQAGYMGRRCQAEVDCGPPEEVKHATLRFNGTRLGAVALYACDRGYSLSAPSRIRVCQPHGVWSEPPQCLGDSVG

SEQ ID NO: 773727 - protein, 254 aa, Homo sapiens
MQMGRFLLLVILFLPREMTSSVLTVNGKTENYILDTTPGSQASLICAVQNHTREEELLWYREEGRVDLKSGNKINSSSVCVSSISENDNGISFTCRLGRDQSVSVSVVLNVTFPPLLSGNDFQTVEEGSNVKLVCNVKANPQAQMMWYKNSSLLDLEKSRHQIQQTSESFQLSITKVEKPDNGTYSCIAKSSLKTESLDFHLIVKDKTVGVPIEPIIAACVVIFLTLCFGLIARRKKIMKLCMKDKDPHSETAL

SEQ ID NO: 773728 - protein, 116 aa, Homo sapiens
WPKPITKALKAASCDVEAPFLSGAGISRSDYLGHWVLCQQVPAFRTTGSSEGIFEPLSNLASFSLQVTPSLKELILWKTWKVQWLQLLLLKSVARPGAVAHAYNPNTLGGRGRRIT

SEQ ID NO: 773729 - protein, 359 aa, Homo sapiens
SGDLNAPLALGANALLFVGVNMYGVFVRILTERSQRKAFLQARSCIEDRLRLEDENEKQERLLMSLLPRNVAMEMKEDFLKPPERIFHKIYIQRHDNVSILFADIVGFTGLASQCTAQELVKLLNELFGKFDELATENHCRRIKILGDCYYCVSGLTQPKTDHAHCCVEMGLDMIDTITSVAEATEVDLNMRVGLHTGRVLCGVLGLRKWQYDVWSNDVTLANVMEAAGLPGKVHITKTTLACLNGDYEVEPGYGHERNSFLKTHNIETFFIVPSHRRKIFPGLILSDIKPAKRMKFKTVCYLLVQLMHCRKMFKAEIPFSNVMTCEDDDKVQIHPSLSGLDVLLGFWSPTLQRGRLCT

SEQ ID NO: 773730 - protein, 915 aa, Homo sapiens
SGDLNAPLALGANALLFVGVNMYGVFVRILTERSQRKAFLQARSCIEDRLRLEDENEKQERLLMSLLPRNVAMEMKEDFLKPPERIFHKIYIQRHDNVSILFADIVGFTGLASQCTAQELVKLLNELFGKFDELATENHCRRIKILGDCYYCVSGLTQPKTDHAHCCVEMGLDMIDTITSVAEATEVDLNMRVGLHTGRVLCGVLGLRKWQYDVWSNDVTLANVMEAAGLPGKVHITKTTLACLNGDYEVEPGYGHERNSFLKTHNIETFFIVPSHRRKIFPGLILSDIKPAKRMKFKTVCYLLVQLMHCRKMFKAEIPFSNVMTCEDDDKRRALRTASEKLRNRSSFSTNVVYTTPGTRVNRYISRLLEARQTELEMADLNFFTLKYKHVEREQKYHQLQDEYFTSAVVLTLILAALFGLVYLLIFPQSVVVLLLLVFCICFLVACVLYLHITRVQCFPGCLTIQIRTVLCIFIVVLIYSVAQGCVVGCLPWAWSSKPNSSLVVLSSGGQRTALPTLPCESTHHALLCCLVGTLPLAIFFRVSSLPKMILLSGLTTSYILVLELSGYTRTGGGAVSGRSYEPIVAILLFSCALALHARQVDIRLRLDYLWAAQAEEEREDMEKVKLDNRRILFNLLPAHVAQHFLMSNPRNMDLYYQSYSQVGVMFASIPNFNDFYIELDGNNMGVECLRLLNEIIADFDELMEKDFYKDIEKIKTIGSTYMAAVGLAPTSGTKAKKSISSHLSTLADFAIEMFDVLDEINYQSYNDFVLRVGINVGPVVAGVIGARRPQYDIWGNTVNVASRMDSTGVQGRIQVTEEVHRLLRRCPYHFVCRGKVSVKGKGEMLTYFLEGRTDGNGSQIRSLGLDRKMCPFGRAGLQGRRPPVCPMPGVSVRAGLPPHSPGQYLPSAAAGKEA

SEQ ID NO: 773731 - protein, 625 aa, Homo sapiens
SGDLNAPLALGANALLFVGVNMYGVFVRILTERSQRKAFLQARSCIEDRLRLEDENEKQERLLMSLLPRNVAMEMKEDFLKPPERIFHKIYIQRHDNVSILFADIVGFTGLASQCTAQELVKLLNELFGKFDELATENHCRRIKILGDCYYCVSGLTQPKTDHAHCCVEMGLDMIDTITSVAEATEVDLNMRVGLHTGRVLCGVLGLRKWQYDVWSNDVTLANVMEAAGLPGKVHITKTTLACLNGDYEVEPGYGHERNSFLKTHNIETFFIVPSHRRKIFPGLILSDIKPAKRMKFKTVCYLLVQLMHCRKMFKAEIPFSNVMTCEDDDKRRALRTASEKLRNRSSFSTNVVYTTPGTRVNRYISRLLEARQTELEMADLNFFTLKYKHVEREQKYHQLQDEYFTSAVVLTLILAALFGLVYLLIFPQSVVVLLLLVFCICFLVACVLYLHITRVQCFPGCLTIQIRTVLCIFIVVLIYSVAQGCVVGCLPWAWSSKPNSSLVVLSSGGQRTALPTLPCESTHHALLCCLVGTLPLAIFFRVSSLPKMILLSGLTTSYILVLELSGYTRTGGGAVSGRSYEPIVAILLFSCALALHARQVDIRLRLDYLWAAQARRALSAFWGW

SEQ ID NO: 773732 - protein, 256 aa, Homo sapiens
MEELQDDYEDMMEENLEQEEYEDPDIPESQMEEPAAHDTEATATDYHTTSHPGTHKVYVELQELVMDEKNQELRWMEAARWVQLEENLGENGAWGRPHLSHLTFWSLLELRRVFTKGTVLLDLQETSLAGVANQLLDRFIFEDQIRPPISSPLATSGTIFSAISCFWDLPAPFLWLAPSCQPTMSSQIRQNYSTDVEAAVNSLVNLYLQASYTYLSLGFYFDRDDVALEGVSHFFRELAEEKREGYERLLKMQNQR

SEQ ID NO: 773733 - protein, 911 aa, Homo sapiens
MEELQDDYEDMMEENLEQEEYEDPDIPESQMEEPAAHDTEATATDYHTTSHPGTHKVYVELQELVMDEKNQELRWMEAARWVQLEENLGENGAWGRPHLSHLTFWSLLELRRVFTKGTVLLDLQETSLAGVANQLLDRFIFEDQIRPQDREELLRALLLKHSHAGELEALGGVKPAVLTRSGDPSQPLLPQHSSLETQLFCEQGDGGTEGHSPSGILEKIPPDSEATLVLVGRADFLEQPVLGFVRLQEAAELEAVELPVPIRFLFVLLGPEAPHIDYTQLGRAAATLMSERVFRIDAYMAQSRGELLHSLEGFLDCSLVLPPTDAPSEQALLSLVPVQRELLRRRYQSSPAKPDSSFYKGLDLNGGPDDPLQQTGQLFGGLVRDIRRRYPYYLSDITDAFSPQVLAAVIFIYFAALSPAITFGGLLGEKTRNQMGVSELLISTAVQGILFALLGAQPLLVVGFSGPLLVFEEAFFSFCETNGLEYIVGRVWIGFWLILLVVLVVAFEGSFLVRFISRYTQEIFSFLISLIFIYETFSKLIKIFQDHPLQKTYNYNVLMVPKPQGPLPNTALLSLVLMAGTFFFAMMLRKFKNSSYFPGKLRRVIGDFGVPISILIMVLVDFFIQDTYTQKLSVPDGFKVSNSSARGWVIHPLGLRSEFPIWMMFASALPALLVFILIFLESQITTLIVSKPERKMVKGSGFHLDLLLVVGMGGVAALFGMPWLSATTVRSVTHANALTVMGKASTPGAAAQIQEVKEQRISGLLVAVLVGLSILMEPILSRIPLAVLFGIFLYMGVTSLSGIQLFDRILLLFKPPKYHPDVPYVKRVKTWRMHLFTGIQIICLAVLWVVKSTPASLALPFVLILTVPLRRVLLPLIFRNVELQCLDADDAKATFDEEEGRDEYDEVAMPV

SEQ ID NO: 773734 - protein, 906 aa, Homo sapiens
MDEKNQELRWMEAARWVQLEENLGENGAWGRPHLSHLTFWSLLELRRVFTKGTVLLDLQETSLAGVANQLLDRFIFEDQIRPQDREELLRALLLKHSHAGELEALGGVKPAVLTRSGDPSQPLLPQHSSLETQLFCEQGDGGTEGHSPSGILEKIPPDSEATLVLVGRADFLEQPVLGFVRLQEAAELEAVELPVPIRFLFVLLGPEAPHIDYTQLGRAAATLMSERVFRIDAYMAQSRGELLHSLEGFLDCSLVLPPTDAPSEQALLSLVPVQRELLRRRYQSSPAKPDSSFYKGLDLNGGPDDPLQQTGQLFGGLVRDIRRRYPYYLSDITDAFSPQVLAAVIFIYFAALSPAITFGGLLGQCQYLSPYLLPLTLWPLSQPQLLTLSDPPDPCISLTMTLLYGLLGNDLLTLIPLGPLPTGEKTRNQMGVSELLISTAVQGILFALLGAQPLLVVGFSGPLLVFEEAFFSFCETNGLEYIVGRVWIGFWLILLVVLVVAFEGSFLVRFISRYTQEIFSFLISLIFIYETFSKLIKIFQDHPLQKTYNYNVLMVPKPQGPLPNTALLSLVLMAGTFFFAMMLRKFKNSSYFPGKLRRVIGDFGVPISILIMVLVDFFIQDTYTQKLSVPDGFKVSNSSARGWVIHPLGLRSEFPIWMMFASALPALLVFILIFLESQITTLIVSKPERKMVKGSGFHLDLLLVVGMGGVAALFGMPWLSATTVRSVTHANALTVMGKASTPGAAAQIQEVKEQRISGLLVAVLVGLSILMEPILSRIPLAVLFGIFLYMGVTSLSGIQLFDRILLLFKPPKYHPDVPYVKRVKTWRMHLFTGIQIICLAVLWVVKSTPASLALPFVLILTVPLRRVLLPLIFRNVELQCLDADDAKATFDEEEGRDEYDEVAMPV

SEQ ID NO: 773735 - protein, 975 aa, Homo sapiens
RGTKERRGTKERRGTKEENLEQEEYEDPDIPESQMEEPAAHDTEATATDYHTTSHPGTHKVYVELQELVMDEKNQELRWMEAARWVQLEENLGENGAWGRPHLSHLTFWSLLELRRVFTKGTVLLDLQETSLAGVANQLLDRFIFEDQIRPQDREELLRALLLKHSHAGELEALGGVKPAVLTRSGDPSQPLLPQHSSLETQLFCEQGDGGTEGHSPSGILEKIPPDSEATLVLVGRADFLEQPVLGFVRLQEAAELEAVELPVPIRFLFVLLGPEAPHIDYTQLGRAAATLMSERVFRIDAYMAQSRGELLHSLEGFLDCSLVLPPTDAPSEQALLSLVPVQRELLRRRYQSSPAKPDSSFYKGLDLNGGPDDPLQQTGQLFGGLVRDIRRRYPYYLSDITDAFSPQVLAAVIFIYFAALSPAITFGGLLGQCQYLSPYLLPLTLWPLSQPQLLTLSDPPDPCISLTMTLLYGLLGNDLLTLIPLGPLPTGEKTRNQMGVSELLISTAVQGILFALLGAQPLLVVGFSGPLLVFEEAFFSFCETNGLEYIVGRVWIGFWLILLVVLVVAFEGSFLVRFISRYTQEIFSFLISLIFIYETFSKLIKIFQDHPLQKTYNYNVLMVPKPQGPLPNTALLSLVLMAGTFFFAMMLRKFKNSSYFPGKLRRVIGDFGVPISILIMVLVDFFIQDTYTQKLSVPDGFKVSNSSARGWVIHPLGLRSEFPIWMMFASALPALLVFILIFLESQITTLIVSKPERKMVKGSGFHLDLLLVVGMGGVAALFGMPWLSATTVRSVTHANALTVMGKASTPGAAAQIQEVKEQRISGLLVAVLVGLSILMEPILSRIPLAVLFGIFLYMGVTSLSGIQLFDRILLLFKPPKYHPDVPYVKRVKTWRMHLFTGIQIICLAVLWVVKSTPASLALPFVLILTVPLRRVLLPLIFRNVELQCLDADDAKATFDEEEGRDEYDEVAMPV

SEQ ID NO: 773736 - protein, 596 aa, Homo sapiens
MDEKNQELRWMEAARWVQLEENLGENGAWGRPHLSHLTFWSLLELRRVFTKGTVLLDLQETSLAGVANQLLDRFIFEDQIRPQDREELLRALLLKHSHAGELEALGGVKPAVLTRSGDPSQPLLPQHSSLETQLFCEQGDGGTEGHSPSGILEKIPPDSEATLVLVGRADFLEQPVLGFVRLQEAAELEAVELPVPIRFLFVLLGPEAPHIDYTQLGRAAATLMSERVFRIDAYMAQSRGELLHSLEGFLDCSLVLPPTDAPSEQALLSLVPVQRELLRRRYQSSPAKPDSSFYKGLDLNGGPDDPLQQTGQLFGGLVRDIRRRYPYYLSDITDAFSPQVLAAVIFIYFAALSPAITFGGLLGQCQYLSPYLLPLTLWPLSQPQLLTLSDPPDPCISLTMTLLYGLLGNDLLTLIPLGPLPTGEKTRNQMGVSELLISTAVQGILFALLGAQPLLVVGFSGPLLVFEEAFFSFCETNGLEYIVGRVWIGFWLILLVVLVVAFEGSFLVRFISRYTQEIFSFLISLIFIYETFSKLIKVGAYGDVNAHGRLCIRLRQWPGARAQACNLRTLGGRGRWITRDQEFKTSLTNIVKLHLY

SEQ ID NO: 773737 - protein, 911 aa, Homo sapiens; identical to SEQ ID NO: 773733

SEQ ID NO: 773738 - protein, 1031 aa, Homo sapiens
MLGAQITVDNWTLRTTPWRSCSAGGCSLASAVLPPGGSGDLVLDSYLRWGWKSPSQPSLSGHFPQDDYEDMMEENLEQEEYEDPDIPESQMEEPAAHDTEATATDYHTTSHPGTHKVYVELQELVMDEKNQELRWMEAARWVQLEENLGENGAWGRPHLSHLTFWSLLELRRVFTKGTVLLDLQETSLAGVANQLLDRFIFEDQIRPQDREELLRALLLKHSHAGELEALGGVKPAVLTRSGDPSQPLLPQHSSLETQLFCEQGDGGTEGHSPSGILEKIPPDSEATLVLVGRADFLEQPVLGFVRLQEAAELEAVELPVPIRFLFVLLGPEAPHIDYTQLGRAAATLMSERVFRIDAYMAQSRGELLHSLEGFLDCSLVLPPTDAPSEQALLSLVPVQRELLRRRYQSSPAKPDSSFYKGLDLNGGPDDPLQQTGQLFGGLVRDIRRRYPYYLSDITDAFSPQVLAAVIFIYFAALSPAITFGGLLGQCQYLSPYLLPLTLWPLSQPQLLTLSDPPDPCISLTMTLLYGLLGNDLLTLIPLGPLPTGEKTRNQMGVSELLISTAVQGILFALLGAQPLLVVGFSGPLLVFEEAFFSFCETNGLEYIVGRVWIGFWLILLVVLVVAFEGSFLVRFISRYTQEIFSFLISLIFIYETFSKLIKIFQDHPLQKTYNYNVLMVPKPQGPLPNTALLSLVLMAGTFFFAMMLRKFKNSSYFPGKLRRVIGDFGVPISILIMVLVDFFIQDTYTQKLSVPDGFKVSNSSARGWVIHPLGLRSEFPIWMMFASALPALLVFILIFLESQITTLIVSKPERKMVKGSGFHLDLLLVVGMGGVAALFGMPWLSATTVRSVTHANALTVMGKASTPGAAAQIQEVKEQRISGLLVAVLVGLSILMEPILSRIPLAVLFGIFLYMGVTSLSGIQLFDRILLLFKPPKYHPDVPYVKRVKTWRMHLFTGIQIICLAVLWVVKSTPASLALPFVLILTVPLRRVLLPLIFRNVELQCLDADDAKATFDEEEGRDEYDEVAMPV

SEQ ID NO: 773739 - protein, 906 aa, Homo sapiens; identical to SEQ ID NO: 773734

SEQ ID NO: 773740 - protein, 508 aa, Homo sapiens
SQKVQRYMICQFEVHLRTLRSYEKLTRYSFASMLAAENDPYGPLPPGWEKRVDSTDRVYFVNHNTKTTQWEDPRTQGLQNEEPLPEGWEIRYTREGVRYFVDHNTRTTTFKDPRNGKSSVTKGGPQIAYERGFRWKLAHFRYLCQSNALPSHVKINVSRQTLFEDSFQQIMALKPYDLRRRLYVIFRGEEGLDYGGLAREWFFLLSHEVLNPMYCLFEYAGKNNYCLQINPASTINPDHLSYFCFIGRFIAMALFHGKFIDTGFSLPFYKRMLSKKLTIKDLESIDTEFYNSLIWIRDNNIEECGLEMYFSVDMEILGKVTSHDLKLGGSNILVTEENKDEYIGLMTEWRFSRGVQEQTKAFLDGFNEVVPLQWLQYFDEKELEVMLCGMQEVDLADWQRNTVYRHYTRNSKQIIWFWQFVKETDNEVRMRLLQFVTGTCRLPLGGFAELMGSNGPQKFCIEKVGKDTWLPRSHTCFNRLDLPPYKSYEQLKEKLLFAIEETEGFGQE

SEQ ID NO: 773741 - protein, 922 aa, Homo sapiens
MATASPRSDTSNNHSGRLQLQVTVSSAKLKRKKNWFGTAIYTEVVVDGEITKTAKSSSSSNPKWDEQLTVNVTPQTTLEFQVWSHRTLKADALLGKATIDLKQALLIHNRKLERVKEQLKLSLENKNGIAQTGELTVVLDGLVIEQENITNCSSSPTIEIQENGDALHENGEPSARTTARLAVEGTNGIDNHVPTSTLVQNSCCSYVVNGDNTPSSPSQVAARPKNTPAPKPLASEPADDTVNGESSSFAPTDNASVTGTPVVSEENALSPNCTSTTVEDPPVQEILTSSENNECIPSTSAELESEARSILEPDTSNSRSSSAFEAAKSRQPDGCMDPVRQQSGNANTETLPSGWEQRKDPHGRTYYVDHNTRTTTWERPQPLPPGWERRVDDRRRVYYVDHNTRTTTWQRPTMESVRNFEQWQSQRNQLQGAMQQFNQRYLYSASMLAAENDPYGPLPPGWEKRVDSTDRVYFVNHNTKTTQWEDPRTQGLQNEEPLPEGWEIRYTREGVRYFVDHNTRTTTFKDPRNGKSSVTKGGPQIAYERGFRWKLAHFRYLCQSNALPSHVKINVSRQTLFEDSFQQIMALKPYDLRRRLYVIFRGEEGLDYGGLAREWFFLLSHEVLNPMYCLFEYAGKNNYCLQINPASTINPDHLSYFCFIGRFIAMALFHGKFIDTGFSLPFYKRMLSKKLTIKDLESIDTEFYNSLIWIRDNNIEECGLEMYFSVDMEILGKVTSHDLKLGGSNILVTEENKDEYIGLMTEWRFSRGVQEQTKAFLDGFNEVVPLQWLQYFDEKELEVMLCGMQEVDLADWQRNTVYRHYTRNSKQIIWFWQFVKETDNEVRMRLLQFVTGTCRLPLGGFAELMGSNGPQKFCIEKVGKDTWLPRSHTCFNRLDLPPYKSYEQLKEKLLFAIEETEGFGQE

SEQ ID NO: 773742 - protein, 684 aa, Homo sapiens
MNSVNGESSSFAPTDNASVTGTPVVSEENALSPNCTSTTVEDPPVQEILTSSENNECIPSTSAELESEARSILEPDTSNSRSSSAFEAAKSRQPDGCMDPVRQQSGNANTETLPSGWEQRKDPHGRTYYVDHNTRTTTWERPQPLPPGWERRVDDRRRVYYVDHNTRTTTWQRPTMESVRNFEQWQSQRNQLQGAMQQFNQRYLYSASMLAAENDPYGPLPPGWEKRVDSTDRVYFVNHNTKTTQWEDPRTQGLQNEEPLPEGWEIRYTREGVRYFVDHNTRTTTFKDPRNGKSSVTKGGPQIAYERGFRWKLAHFRYLCQSNALPSHVKINVSRQTLFEDSFQQIMALKPYDLRRRLYVIFRGEEGLDYGGLAREWFFLLSHEVLNPMYCLFEYAGKNNYCLQINPASTINPDHLSYFCFIGRFIAMALFHGKFIDTGFSLPFYKRMLSKKLTIKDLESIDTEFYNSLIWIRDNNIEECGLEMYFSVDMEILGKVTSHDLKLGGSNILVTEENKDEYIGLMTEWRFSRGVQEQTKAFLDGFNEVVPLQWLQYFDEKELEVMLCGMQEVDLADWQRNTVYRHYTRNSKQIIWFWQFVKETDNEVRMRLLQFVTGTCRLPLGGFAELMGSNGPQKFCIEKVGKDTWLPRSHTCFNRLDLPPYKSYEQLKEKLLFAIEETEGFGQE

SEQ ID NO: 773743 - protein, 407 aa, Homo sapiens
MATASPRSDTSNNHSGRLQLQVTVSSAKLKRKKNWFGTAIYTEVVVDGEITKTAKSSSSSNPKWDEQLTVNVTPQTTLEFQVWSHRTLKADALLGKATIDLKQALLIHNRKLERVKEQLKLSLENKNGIAQTGELTVVLDGLVIEQENITNCSSSPTIEIQENGDALHENGEPSARTTARLAVEGTNGIDNHVPTSTLVQNSCCSYVVNGDNTPSSPSQVAARPKNTPAPKPLASEPADDTVNGESSSFAPTDNASVTGTPVVSEENALSPNCTSTTVEDPPVQEILTSSENNECIPSTSAELESEARSILEPDTSNSRSSSAFEAAKSRQPDGCMDPVRQQSGNANTETLPSGWEQRKDPHGRTYYVDHNTRTTTWERPQPLPPGWERRADGSKMRAVFSHQYLIY

SEQ ID NO: 773744 - protein, 989 aa, Homo sapiens
MATASPRSDTSNNHSGRLQLQVTVSSAKLKRKKNWFGTAIYTEVVVDGEITKTAKSSSSSNPKWDEQLTVNVTPQTTLEFQVRSHRTLKADGCIDGGRGDWVGTGIYTGSSRRWRNYEQQQKSSSSSNPKWDEQLTVNVTPQTTLEFQVWSHRTLKADALLGKATIDLKQALLIHNRKLERVKEQLKLSLENKNGIAQTGELTVVLDGLVIEQENITNCSSSPTIEIQENGDALHENGEPSARTTARLAVEGTNGIDNHVPTSTLVQNSCCSYVVNGDNTPSSPSQVAARPKNTPAPKPLASEPADDTVNGESSSFAPTDNASVTGTPVVSEENALSPNCTSTTVEDPPVQEILTSSENNECIPSTSAELESEARSILEPDTSNSRSSSAFEAAKSRQPDGCMDPVRQQSGNANTETLPSGWEQRKDPHGRTYYVDHNTRTTTWERPQPLPPGWERRVDDRRRVYYVDHNTRTTTWQRPTMESVRNFEQWQSQRNQLQGAMQQFNQRYLYSASMLAAENDPYGPLPPGWEKRVDSTDRVYFVNHNTKTTQWEDPRTQGLQNEEPLPEGWEIRYTREGVRYFVDHNTRTTTFKDPRNGKSSVTKGGPQIAYERGFRWKLAHFRYLCQSNALPSHVKINVSRQTLFEDSFQQIMALKPYDLRRRLYVIFRGEEGLDYGGLAREWFFLLSHEVLNPMYCLFEYAGKNNYCLQINPASTINPDHLSYFCFIGRFIAMALFHGKFIDTGFSLPFYKRMLSKKLTIKDLESIDTEFYNSLIWIRDNNIEECGLEMYFSVDMEILGKVTSHDLKLGGSNILVTEENKDEYIGLMTEWRFSRGVQEQTKAFLDGFNEVVPLQWLQYFDEKELEVMLCGMQEVDLADWQRNTVYRHYTRNSKQIIWFWQFVKETDNEVRMRLLQFVTGTCRLPLGGFAELMGSNGPQKFCIEKVGKDTWLPRSHTCFNRLDLPPYKSYEQLKEKLLFAIEETEGFGQE

SEQ ID NO: 773745 - protein, 576 aa, Homo sapiens
TPHRGSKQWEQRKDPHGRTYYVDHNTRTTTWERPQPLPPGWERRVDDRRRVYYVDHNTRTTTWQRPTMESVRNFEQWQSQRNQLQGAMQQFNQRYLYSASMLAAENDPYGPLPPGWEKRVDSTDRVYFVNHNTKTTQWEDPRTQGLQNEEPLPEGWEIRYTREGVRYFVDHNTRTTTFKDPRNGKSSVTKGGPQIAYERGFRWKLAHFRYLCQSNALPSHVKINVSRQTLFEDSFQQIMALKPYDLRRRLYVIFRGEEGLDYGGLAREWFFLLSHEVLNPMYCLFEYAGKNNYCLQINPASTINPDHLSYFCFIGRFIAMALFHGKFIDTGFSLPFYKRMLSKKLTIKDLESIDTEFYNSLIWIRDNNIEECGLEMYFSVDMEILGKVTSHDLKLGGSNILVTEENKDEYIGLMTEWRFSRGVQEQTKAFLDGFNEVVPLQWLQYFDEKELEVMLCGMQEVDLADWQRNTVYRHYTRNSKQIIWFWQFVKETDNEVRMRLLQFVTGTCRLPLGGFAELMGSNGPQKFCIEKVGKDTWLPRSHTCFNRLDLPPYKSYEQLKEKLLFAIEETEGFGQE

SEQ ID NO: 773746 - protein, 125 aa, Homo sapiens
MHVSDPHSLHTVRLACLVGRQQCPWMYPGALCCRDVILNNKPSRGWERFHGNLNFKTKISLVTVVAENTGSCHVQWLSTPGGQPAVAIPWSPTGPPRHFTSRRLPCTRPPFHGSQALPHLPVLPT

SEQ ID NO: 773747 - protein, 55 aa, Homo sapiens
SSPSQKPKGGVSWFWEDELEETLWVEKKQVERGYVFECLLCAGPGEKVLIWMHRL

SEQ ID NO: 773748 - protein, 407 aa, Homo sapiens
MSRPSSVSPRQPAPGGGGGGGPSPCGPGGGGRAKGLKDIRIDEEVKIAVNIALERFRYGDQREMEFPSSLTSTERAFIHRLSQSLGLVSKSKGKGANRYLTVKKKDGSETAHAMMTCNLTHNTKHAVRSLIQRFPVTNKERTELLPKTERGNVFAVEAENREMSKTSGRLNNGIPQIPVKRGESEFDSFRQSLPVFEKQEEIVKIIKENKVVLIVGETGSGKTTQIPQFLLDDCFKNGIPCRIFCTQPRRLAAIAVAERVAAERRERIGQTIGYQIRLESRVSPKTLLTFCTNGVLLRTLMAGDSTLSTVTHVIVDEVHERDRFSDFLLTKLRDLLQKHPTLKLILSSAALDVNLFIRYFGSCPVIYIQGRPFEVKEMFLEDILRTTGYTNKEMLKYKKEKQQGKFF

SEQ ID NO: 773749 - protein, 301 aa, Homo sapiens
KASTCTLKPGIVYYHGGGGVMGSLKTHHGICSRLCKESDSVVLAVGYRKLPKHKFPVPVRDCLVATIHFLKSLDAYGVDPARVVVCGDSFGGAIAAVVCQQLVDRPDLPRIRAQILIYAILQALDLQTPSFQQRKNIPLLTWSFICYCFFQNLDFSSSWQEVIMKGAHLPAEVWEKYRKWLGPENIPERFKERGYQLKPHEPMNEAAYLEVSVVLDVMCSPLIAEDDIVSQLPETCIVSCEYDALRDNSLLYKKRLEDLGVPVTWHHMEDGFHGVLRTIDMSFLHFPCSMRILSALVQFVK

SEQ ID NO: 773750 - protein, 62 aa, Homo sapiens
TKNKGETRIKFLTCVIGKCAGLTSCFVYEAVGYKDSHTSLWNAEHCNLMEEDLAASNKSMWH

SEQ ID NO: 773751 - protein, 122 aa, Homo sapiens
MSFSAHDLWPPPNLCAPTSASITRFQPQILVPGIKAKTCSFPRSLLGSLSLCSTLSTNIRVAFSLSPISVNLCPIPLLYLPHNFYHCLKFSCLCLYVLYILSHSCASSGRDHSSICVRAEPN

SEQ ID NO: 773752 - protein, 34 aa, Homo sapiens
MLPGALRALLLTEGYRSELGVQNFSPRPVWKDQE

SEQ ID NO: 773753 - protein, 164 aa, Homo sapiens
RGPRLWSCLPCAVVWQPWSVPFLGAGPTLCQVPLPRISCATWLWHWQLCGSGQSEQQQLFPVPWRGQDWDSRGSTLMALSLISGRGKRKLGKSNMTLGARPPTMPPCSQASPAGLQELDLPSQHGSVLPLPLTVLQRAGRAISCHLSLIAIWPPDLPEVQWGGQ

SEQ ID NO: 773754 - protein, 168 aa, Homo sapiens
MEDSTSPKQEKENQEELGETRRPWEGKTAASPQYSEPESSEPLEAKQGPETGRQSRSSRPWSPQSRAKTPLGGPAGPETSSPAPVSPREPSSSPSPLAPARQDLAAPPQSDRTTSVIPEAGTPYPDPLEQSSDKRESTPHHTSQSEGNTFQQSQQPKPHLCGRRDVSY

SEQ ID NO: 773755 - protein, 171 aa, Homo sapiens
MHETDSLQGSAAAFWMHKAHHRDEENVLEQCISPGARGHPVLDEAAGPHTAGVVPQCWELPALGGIWPRVPASGWGCAEGLRKLGVLPGWAPPGPPRGPPLGLQLAIYEKLDRARWRHVGAGPELPGTRRGRVSGTLTWQHEEASVDSRSRVYGQSGRSACVNACRTGARS

SEQ ID NO: 773756 - protein, 152 aa, Homo sapiens [sequence omitted]

SEQ ID NO: 773757 - protein, 136 aa, Homo sapiens
SRNCPWRHHAGPINRPVGPGGAAPQDWGRGQLRGPQKRSCRRSGGARRPECQGWWVPEITRTPPPGGLAQAWGRCPPGSDLLPRARGFQAPAPPSSSESRGRAGWRVARVGSADPFERGSNSPSLWCYAARGCPCG

SEQ ID NO: 773758 - protein, 103 aa, Homo sapiens
GLQDRKVPSHSLGGPKSEVKLSAGPHPLWMLQGRVLCLFQFWWLQAFLALWWHHSSLLRLHVAFSVLSNLLLCSLVKTLVIGFRAHPNLDGLILSLTLVTSAK

SEQ ID NO: 773759 - protein, 50 aa, Homo sapiens
TTGQRKPADTLVLDCTLQDCKKIHLCYLSFTQPVVLCYGSPRILTSYKAY

SEQ ID NO: 773760 - protein, 407 aa, Homo sapiens
MSHRKFSAPRHGHLGFLPHKRSHRHRGKVKTWPRDDPSQPVHLTAFLGYKAGMTHTLREVHRPGLKISKREEVEAVTIVETPPLVVVGVVGYVATPRGLRSFKTIFAEHLSDECRRRFYKDWHKSKKKAFTKACKRWRDTDGKKQLQKDFAAMKKYCKVIRVIVHTQMKLLPFRQKKAHIMEIQLNGGTVAEKVAWAQARLEKQVPVHSVFSQSEVIDVIAVTKGRGVKGVTSRWHTKKLPRKTHKGLRKVACIGAWHPARVGCSIARAGQKGYHHRTELNKKIFRIGRGPHMEDGKLVKNNASTSYDVTAKSITPLGGFPHYGEVNNDFVMLKGCIAGTKKRVITLRKSLLVHHSRQAVENIELKFIDTTSKFGHGRFQTAQEKRAFMGPQKKHLEKETPETSGDL

SEQ ID NO: 773761 - protein, 68 aa, Homo sapiens
RIGRGPHMEDGKLVKNNASTSYDVTAKSITPLVRLGGGDCQAHHTADDGWSGVRLAGGPGIHVGGMPQ

SEQ ID NO: 773762 - protein, 39 aa, Homo sapiens
GLGKRPTGVIRIFICPHQLPNGSSSASLQESRPFSRTAL

SEQ ID NO: 773763 - protein, 45 aa, Homo sapiens
TRIPAQDVTVHCPVPHLHPPGVSVDLLPTSILLVCLDLLPTSILV

SEQ ID NO: 773764 - protein, 165 aa, Homo sapiens
AAGDVWGDTASTGVPDASGSQYENVENLEFVQNQEVLPSEPLNLDPSSPSDQFRYGPLPGPAVPRHGAVCHTGAPDATLHTVHPDSVSSSYSSRSHGRLSGSARPQELVGTFIQQEVGKSPLCPSVSSCESWDLFRSALPAVLGSTATTFDSRSFLQAGAAIFPK

SEQ ID NO: 773765 - protein, 166 aa, Homo sapiens
AAGDVWGDTASTGVPDASGSQYENVENLEFVQNQEVLPSEPLNLDPSSPSDQFRYGPLPGPAVPRHGAVCHTGAPDATLHTVHPDSVSSSYSSRSHGRLSGSARPQELVGTFIQQEVGKPEDEASGSFFKQIDSSPVGGETDETTVSQNYRGSVSQPSTPSPPKPT

SEQ ID NO: 773766 - protein, 703 aa, Homo sapiens
SLFTAPVMTRFANSLPINDPLQTVYQLMSGRMPAASTCCGDEKWGDWRPHLAMVLSNLNNNMDVESRTMATMGDTLASRGLLDAAHFCYLMAQAGFGVYTKKTTKLVLIGSNHSLPFLKFATNEAIQRTEAYEYAQSLGAETCPLPSFQVFKFIYSCRLAEMGLATQAFHYCEAIAKSILTQPHLYSPVLISQLVQMASQLRLFDPQLKEKPEEESLAAPTWLVHLQQVERQIKEGAGVWHQDGALPQQCPGTPSSEMEQLDRPGLSQPGALGIANPLLAVPAPSPEHSSPSVRLLPSAPQTLPDGPLASPARVPMFPVPLPPGPLEPGPGCVTPGPALGFLEPSGPGLPPGVPPLQERRHLLQEARSPDPGIVPQEAPVGNSLSELSEENFDGKFANLTPSRTVPDSEAPPGWDRADSGPTQPPLSLSPAPETKRPGQAAKKETKEPKKGESWFFRWLPGKKKTEAYLPDDKNKSIVWDEKKNQWVNLNEPEEEKKAPPPPPTSMPKTVQAAPPALPGPPGAPVNMYSRRAAGTRARYVDVLNPSGTQRSEPALAPADFVAPLAPLPIPSNLFVPTPDAEEPQLPDGTGREGPAAARGLANPEPAPEPKVLSSAASLPGSELPSSRPEGSQGGELSRCSSMSSLSREVSQHFNQAPGDLPAAGGPPSGAMPFYNPAQLAQACATSGSSRLGRIGQRKHLVLN

SEQ ID NO: 773767 - protein, 683 aa, Homo sapiens
SLFTAPVMTRFANSLPINDPLQTVYQLMSGRMPAASTCCGDEKWGDWRPHLAMVLSNLNNNMDVESRTMATMGDTLASRGLLDAAHFCYLMAQAGFGVYTKKTTKLVLIGSNHSLPFLKFATNEAIQRTEAYEYAQSLGAETCPLPSFQVFKFIYSCRLAEMGLATQAFHYCEAIAKSILTQPHLYSPVLISQLVQMASQLRLFDPQLKEKPEEESLAAPTWLVHLQQVERQIKEGAGVWHQDGALPQQCPGTPSSEMEQLDRPGLSQPGALGIANPLLAVPAPSPEHSSPSVRLLPSAPQTLPDGPLASPARVPMFPVPLPPGPLEPGPGCVTPGPALGFLEPSGPGLPPGVPPLQERRHLLQEARSPDPGIVPQEAPVGNSLSELSEENFDGKFANLTPSRTVPDSEAPPGWDRADSGPTQPPLSLSPAPETKRPGQAAKKETKEPKKGESWFFRWLPGKKKTEAYLPDDKNKSIVWDEKKNQWVNLNEPEEEKKAPPPPPTSMPKTVQAAPPALPGPPGAPVNMYSRRAAGTRARYVDVLNPSGTQRSEPALAPADFVAPLAPLPIPSNLFVPTPDAEEPQLPDGTGREGPAAARGLANPEPAPEPKVLSSAASLPGSELPSSRPEGSQGGEAPGDLPAAGGPPSGAMPFYNPAQLAQACATSGSSRLGRIGQRKHLVLN

SEQ ID NO: 773768 - protein, 658 aa, Homo sapiens
SLFTAPVMTRFANSLPINDPLQTVYQLMSGRMPAASTCCGDEKWGDWRPHLAMVLSNLNNNMDVESRTMATMGDTLASRGLLDAAHFCYLMAQAGFGVYTKKTTKLVLIGSNHSLPFLKFATNEAIQRTEAYEYAQSLGAETCPLPSFQVFKFIYSCRLAEMGLATQAFHYCEAIAKSILTQPHLYSPVLISQLVQMASQLRLFDPQLKEKPEEESLAAPTWLVHLQQVERQIKEGAGVWHQDGALPQQCPGTPSSEMEQLDRPGLSQPGALGIANPLLAVPAPSPEHSSPSVRLLPSAPQTLPDGPLASPARVPMFPVPLPPGPLEPGPGCVTPGPALGFLEPSGPGLPPGVPPLQERRHLLQEARSPDPGIVPQEAPVGNSLSELSEENFDGKFANLTPSRTVPDSEAPPGWDRADSGPTQPPLSLSPAPETKRPGQAAKKETKEPKKGESWFFRWLPGKKKTEAYLPDDKNKSIVWDEKKNQWVNLNEPEEEKKAPPPPPTSMPKTVQAAPPALPGPPGAPVNMYSRRAAGTRARYVDVLNPSGTQRSEPALAPADFVAPLAPLPIPSNLFVPTPDAEEPQLPDGTGREGPAAARGLANPEPAPEPKAPGDLPAAGGPPSGAMPFYNPAQLAQACATSGSSRLGRIGQRKHLVLN

SEQ ID NO: 773769 - protein, 678 aa, Homo sapiens
SLFTAPVMTRFANSLPINDPLQTVYQLMSGRMPAASTCCGDEKWGDWRPHLAMVLSNLNNNMDVESRTMATMGDTLASRGLLDAAHFCYLMAQAGFGVYTKKTTKLVLIGSNHSLPFLKFATNEAIQRTEAYEYAQSLGAETCPLPSFQVFKFIYSCRLAEMGLATQAFHYCEAIAKSILTQPHLYSPVLISQLVQMASQLRLFDPQLKEKPEEESLAAPTWLVHLQQVERQIKEGAGVWHQDGALPQQCPGTPSSEMEQLDRPGLSQPGALGIANPLLAVPAPSPEHSSPSVRLLPSAPQTLPDGPLASPARVPMFPVPLPPGPLEPGPGCVTPGPALGFLEPSGPGLPPGVPPLQERRHLLQEARSPDPGIVPQEAPVGNSLSELSEENFDGKFANLTPSRTVPDSEAPPGWDRADSGPTQPPLSLSPAPETKRPGQAAKKETKEPKKGESWFFRWLPGKKKTEAYLPDDKNKSIVWDEKKNQWVNLNEPEEEKKAPPPPPTSMPKTVQAAPPALPGPPGAPVNMYSRRAAGTRARYVDVLNPSGTQRSEPALAPADFVAPLAPLPIPSNLFVPTPDAEEPQLPDGTGREGPAAARGLANPEPAPEPKLSRCSSMSSLSREVSQHFNQAPGDLPAAGGPPSGAMPFYNPAQLAQACATSGSSRLGRIGQRKHLVLN

SEQ ID NO: 773770 - protein, 632 aa, Homo sapiens
MGDTLASRGLLDAAHFCYLMAQAGFGVYTKKTTKLVLIGSNHSLPFLKFATNEAIQRTEAYEYAQSLGAETCPLPSFQVFKFIYSCRLAEMGLATQAFHYCEAIAKSILTQPHLYSPVLISQLVQMASQLRLFDPQLKEKPEEESLAAPTWLVHLQQVERQIKEGAGVWHQDGALPQQCPGTPSSEMEQLDRPGLSQPGALGIANPLLAVPAPSPEHSSPSVRLLPSAPQTLPDGPLASPARVPMFPVPLPPGPLEPGPGCVTPGPALGFLEPSGPGLPPGVPPLQERRHLLQEARSPDPGIVPQEAPVGNSLSELSEENFDGKFANLTPSRTVPDSEAPPGWDRADSGPTQPPLSLSPAPETKRPGQAAKKETKEPKKGESWFFRWLPGKKKTEAYLPDDKNKSIVWDEKKNQWVNLNEPEEEKKAPPPPPTSMPKTVQAAPPALPGPPGAPVNMYSRRAAGTRARYVDVLNPSGTQRSEPALAPADFVAPLAPLPIPSNLFVPTPDAEEPQLPDGTGREGPAAARGLANPEPAPEPKVLSSAASLPGSELPSSRPEGSQGGELSRCSSMSSLSREVSQHFNQAPGDLPAAGGPPSGAMPFYNPAQLAQACATSGSSRLGRIGQRKHLVLN

SEQ ID NO: 773771 - protein, 580 aa, Homo sapiens
SLFTAPVMTRFANSLPINDPLQTVYQLMSGRMPAASTCCGDEKWGDWRPHLAMVLSNLNNNMDVESRTMATMGDTLASRGLLDAAHFCYLMAQAGFGVYTKKTTKLVLIGSNHSLPFLKFATNEAIQRTEAYEYAQSLGAETCPLPSFQVFKFIYSCRLAEMGLATQAFHYCEAIAKSILTQPHLYSPVLISQLVQMASQLRLFDPQLKEKPEEESLAAPTWLVHLQQVERQIKEGAGVWHQDGALPQQCPGTPSSEMEQLDRPGLSQPGALGIANPLLAVPAPSPEHSSPSVRLLPSAPQTLPDGPLASPARVPMFPVPLPPGPLEPGPGCVTPGPALGFLEPSGPGLPPGVPPLQERRHLLQEARSPDPGIVPQEAPVGNSLSELSEENFDGKFANLTPSRTVPDSEAPPGWDRADSGPTQPPLSLSPAPETKRPGQAAKKETKEPKKGESWFFRWLPGKKKTEAYLPDDKNKSIVWDEKKNQWVNLNEPEEEKKAPPPPPTSMPKTVQAAPPALPGPPGAPVNMYSRRAAGTRARYVDVLNPSGTQRSEPALAPADFVAPLAPLPIPSNLFVPTPVQ

SEQ ID NO: 773772 - protein, 838 aa, Homo sapiens
SLFTAPVMTRFANSLPINDPLQTVYQLMSGRMPAASTCCGDEKWGDWRPHLAMVLSNLNNNMDVESRTMATMGDTLGRSGVEMGIGCRGWSAEGPVVCGVGRNHQNPAFSVRLASLVPSVRVLDFCKRSRSLSPRRVSCRLSAASRGLLDAAHFCYLMAQAGFGVYTKKTTKLVLIGSNHRKEPSQCSPVSFPFKVKQNPSPLVNSEMARIMSLFVTWWDTLLDDFAPRLTMPIIGHFFQIKIIHFLYSLPFLKFATNEAIQRTEAYEYAQSLGAETCPLPSFQVFKFIYSCRLAEMGLATQAFHYCEAIAKSILTQPHLYSPVLISQLVQMASQLRLFDPQLKEKPEEESLAAPTWLVHLQQVERQIKEGAGVWHQDGALPQQCPGTPSSEMEQLDRPGLSQPGALGIANPLLAVPAPSPEHSSPSVRLLPSAPQTLPDGPLASPARVPMFPVPLPPGPLEPGPGCVTPGPALGFLEPSGPGLPPGVPPLQERRHLLQEARSPDPGIVPQEAPVGNSLSELSEENFDGKFANLTPSRTVPDSEAPPGWDRADSGPTQPPLSLSPAPETKRPGQAAKKETKEPKKGESWFFRWLPGKKKTEAYLPDDKNKSIVWDEKKNQWVNLNEPEEEKKAPPPPPTSMPKTVQAAPPALPGPPGAPVNMYSRRAAGTRARYVDVLNPSGTQRSEPALAPADFVAPLAPLPIPSNLFVPTPDAEEPQLPDGTGREGPAAARGLANPEPAPEPKVLSSAASLPGSELPSSRPEGSQGGELSRCSSMSSLSREVSQHFNQAPGDLPAAGGPPSGAMPFYNPAQLAQACATSGSSRLGRIGQRKHLVLN

SEQ ID NO: 773773 - protein, 725 aa, Homo sapiens
SLFTAPVMTRFANSLPINDPLQTVYQLMSGRMPAASTCCGDEKWGDWRPHLAMVLSNLNNNMDVESRTMATMGDTLASRGLLDAAHFCYLMAQAGFGVYTKKTTKLVLIGSNHSLPFLKFATNEAIQRTEAYEYAQSLGAETCPLPSFQVFKFIYSCRLAEMGLATQAFHYCEAIAKSILTQPHLYSPVLISQLVQMASQLRLFDPQLKEKPEEESLAAPTWLVHLQQVERQIKEGAGVWHQDGALPQQCPGTPSSEMEQLDRPGLSQPGALGIANPLLAVPAPSPEHSSPSVRLLPSAPQTLPDGPLASPARVPMFPVPLPPGPLEPGPGCVTPGPALGFLEPSGPGLPPGVPPLQERRHLLQEARSPDPGIVPQEAPVGNSLSELSEENFDGKFANLTPSRTVPDSEAPPGWDRADSGPTQPPLSLSPAPETKRPGQAAKKETKEPKKGESWFFRWLPGKKKTEAYLPDDKNKSIVWDEKKNQWVNLNEPEEEKKAPPPPPTSMPKTVQAAPPALPGPPGAPVNMYSRRAAGTRARYVDVLNPSGTQRSEPALAPADFVAPLAPLPIPSNLFVPTPDAEEPQLPDGTGREGPAAARGLANPEPAPEPKVLSSAASLPGSELPSSRPEGSQGGELSRCSSMSSLSREVSQHFNQHALLQPCSAGTGLRHLRELKAREDWPEEAPGAELGLPCCELALGALTLLFSPKNPTDLRDLRPAPRETQQ

SEQ ID NO: 773774 - protein, 653 aa, Homo sapiens
SLFTAPVMTRFANSLPINDPLQTVYQLMSGRMPAASTCCGDEKWGDWRPHLAMVLSNLNNNMDVESRTMATMGDTLASRGLLDAAHFCYLMAQAGFGVYTKKTTKLVLIGSNHSLPFLKFATNEAIQRTEAYEYAQSLGAETCPLPSFQVFKFIYSCRLAEMGLATQAFHYCEAIAKSILTQPHLYSPVLISQLVQMASQLRLFDPQLKEKPEEESLAAPTWLVHLQQVERQIKEGAGVWHQDGALPQQCPGTPSSEMEQLDRPGLSQPGALGIANPLLAVPAPSPEHSSPSVRLLPSAPQTLPDGPLASPARVPMFPVPLPPGPLEPGPGCVTPGPALGFLEPSGPGLPPGVPPLQERRHLLQEARSPDPGIVPQEAPVGNSLSELSEENFDGKFANLTPSRTVPDSEAPPGWDRADSGPTQPPLSLSPAPETKRPGQAAKKETKEPKKGESWFFRWLPGKKKTEAYLPDDKNKSIVWDEKKNQWVNLNEPEEEKKAPPPPPTSMPKTVQAAPPALPGPPGPALAPADFVAPLAPLPIPSNLFVPTPDAEEPQLPDGTGREGPAAARGLANPEPAPEPKVLSSAASLPGSELPSSRPEGSQGGEAPGDLPAAGGPPSGAMPFYNPAQLAQACATSGSSRLGRIGQRKHLVLN

SEQ ID NO: 773775 - protein, 343 aa, Homo sapiens
RSRLVRVRVRSSILLVSLWICSHLHPPGVSVDRPPPPSSWCLCGSPPTSILLVSLWICSPPPSSWCLCGSAPTSILLVSLWIWRLWGLTEGESWFFRWLPGKKKTEAYLPDDKNKSIVWDEKKNQWVNLNEPEEEKKAPPPPPTSMPKTVQAAPPALPGPPGAPVNMYSRRAAGTRARYVDVLNPSGTQRSEPALAPADFVAPLAPLPIPSNLFVPTPDAEEPQLPDGTGREGPAAARGLANPEPAPEPKVLSSAASLPGSELPSSRPEGSQGGELSRCSSMSSLSREVSQHFNQAPGDLPAAGGPPSGAMPFYNPAQLAQACATSGSSRLGRIGQRKHLVLN

SEQ ID NO: 773776 - protein, 703 aa, Homo sapiens; identical to SEQ ID NO: 773766

SEQ ID NO: 773777 - protein, 703 aa, Homo sapiens; identical to SEQ ID NO: 773766

SEQ ID NO: 773778 - protein, 703 aa, Homo sapiens; identical to SEQ ID NO: 773766

SEQ ID NO: 773779 - protein, 645 aa, Homo sapiens
SLFTAPVMTRFANSLPINDPLQTVYQLMSGRMPAASTCCGDEKWGDWRPHLAMVLSNLNNNMDVESRTMATMGDTLASRGLLDAAHFCYLMAQAGFGVYTKKTTKLVLIGSNHSLPFLKFATNEAIQRTEAYEYAQSLGAETCPLPSFQVFKFIYSCRLAEMGLATQAFHYCEAIAKSILTQPHLYSPVLISQLVQMASQLRLFDPQLKEKPEEESLAAPTWLVHLQQVERQIKEGAGVWHQDGALPQQCPGTPSSEMEQLDRPGLSQPGALGIANPLLAVPAPSPEHSSPSVRLLPSAPQTLPDGPLASPARVPMFPVPLPPGPLEPGPGCVTPGPALGFLEPSGPGLPPGVPPLQERRHLLQEARSPDPGIVPQEAPVGNSLSELSEENFDGKFANLTPSRTVPDSEAPPGWDRADSGPTQPPLSLSPAPETKRPGQAAKKETKEPKKGESWFFRWLPGKKKTEAYLPDDKNKSIVWDEKKNQWVNLNEPEEEKKAPPPPPTSMPKTVQAAPPALPGPPGAPVNMYSRRAAGTRARYVDVLNPSGTQRSEPALAPADFVAPLAPLPIPSNLFVPTPDAEEPQLPDGTGREGPAAARGLANPEPAPEPKVSGYGGKGERYPVRRHLPILPDRALPSASQYPMCT

SEQ ID NO: 773780 - protein, 200 aa, Homo sapiens
SLFTAPVMTRFANSLPINDPLQTVYQLMSGRMPAASTCCGDEKWGDWRPHLAMVLSNLNNNMDVESRTMATMGDTLASRGLLDAAHFCYLMAQAGFGVYTKKTTKLVLIGSNHSLPFLKFATNEAIQRTEAYEYAQSLGAETCPLPSFQMASQLRLFDPQLKEKPEEESLAAPTWLVHLQQVERQIKEGAGLCISGDTPR

SEQ ID NO: 773781 - protein, 107 aa, Homo sapiens
PDLHSPGVSGSAPHLHPPGVSVDLLPTSILLVCLDLLPTSILVSLWICSPPPSSWRLCGSAPTSILLVSLWICPPPPSSWCLCGSAPTSILLVSLWIAPHLHPPGVS

SEQ ID NO: 773782 - protein, 703 aa, Homo sapiens; identical to SEQ ID NO: 773766

SEQ ID NO: 773783 - protein, 703 aa, Homo sapiens; identical to SEQ ID NO: 773766

SEQ ID NO: 773784 - protein, 703 aa, Homo sapiens; identical to SEQ ID NO: 773766

SEQ ID NO: 773785 - protein, 69 aa, Homo sapiens
MPAASTVSGTAWWLAQAPLPVWSLLVGDAVTGREVPGEPSCVELKWRWLPGMRLRFVFPHVSAVETRNG

SEQ ID NO: 773786 - protein, 74 aa, Homo sapiens
CAHEVGRCSALVSADHAGVAVAGWEGGVPVDLCATHTSRLLVTEIIVALFPVDRDSAAGGACWKLTFRAKRRKF

SEQ ID NO: 773787 - protein, 30 aa, Homo sapiens
MPFYNPAQLAQVSDSYLSLRDPNTPTDDLT

SEQ ID NO: 773788 - protein, 84 aa, Homo sapiens
MAKPGTSRPSSAPLPGCDLGTLYRAPLPKAERVRRSQGGSLHGGIRPASLPELKARRFCKEEQSGAGYKQLMKIIVLAHTALRP

SEQ ID NO: 773789 - protein, 105 aa, Homo sapiens
PLSRTSNKELRHLIEVSVVLWAVALTSWISDRLLCSFWQRIHFFYLHSIWHVLISITFPYGMVTMALVDANYEMPGETLKVRYWPRDSWPVGLPYVEIRGDDKDC

SEQ ID NO: 773790 - protein, 209 aa, Homo sapiens
GVRCEAAVRWDAMEYDEKLARFRQAHLNPFNKQSGPRQHEQGPGEEVPDVTPEEALPELPPGEPEFRCPERVMDLGLSEDHFSRPVGLFLASDVQQLRQAIEECKQVILELPEQSEKQKDAVVRLIHLRLKLQELKDPNEDEPNIRVLLEHRFYKEKSKSVKQTCDKCNTIIWGLIQTWYTCTGGPRPRRGVRNERDQSSCLRWAHIQM

SEQ ID NO: 773791 - protein, 209 aa, Homo sapiens; identical to SEQ ID NO: 773790

SEQ ID NO: 773792 - protein, 463 aa, Homo sapiens
GVRCEAAVRWDAMEYDEKLARFRQAHLNPFNKQSGPRQHEQGPGEEVPDVTPEEALPELPPGEPEFRCPERVMDLGLSEDHFSRPVGLFLASDVQQLRQAIEECKQVILELPEQSEKQKDAVVRLIHLRLKLQELKDPNEDEPNIRVLLEHRFYKEKSKSVKQTCDKCNTIIWGLIQTWYTCTGCYYRCHSKCLNLISKPCVSSKVSHQAEYELNICPETGLDSQDYRCAECRAPISLRGVPSEARQCDYTGQYYCSHCHWNDLAVIPARVVHNWDFEPRKVSRCSMRYLALMVSRPVLRLREINPLLFSYVEELVEIRKLRQDILLMKPYFITCREAMEARLLLQLQDRQHFVENDEMYSVQDLLDVHAGRLGCSLTEIHTLFAKHIKLDCERCQAKGFVCELCREGDVLFPFDSHTSVCADCSAVFHRDCYYDNSTTCPKCARLSLRKQSLFQEPGPDVEA

SEQ ID NO: 773793 - protein, 388 aa, Homo sapiens
TWTRTGGVLKVTTKEGGGSQATDVPDAVLGSVCALAWLPCVPCADSGIPGNVESRIFMRKQDPNEDEPNIRVLLEHRFYKEKSKSVKQTCDKCNTIIWGLIQTWYTCTGCYYRCHSKCLNLISKPCVSSKVSHQAEYELNICPETGLDSQDYRCAECRAPISLRGVPSEARQCDYTGQYYCSHCHWNDLAVIPARVVHNWDFEPRKVSRCSMRYLALMVSRPVLRLREINPLLFSYVEELVEIRKLRQDILLMKPYFITCREAMEARLLLQLQDRQHFVENDEMYSVQDLLDVHAGRLGCSLTEIHTLFAKHIKLDCERCQAKGFVCELCREGDVLFPFDSHTSVCADCSAVFHRDCYYDNSTTCPKCARLSLRKQSLFQEPGPDVEA

SEQ ID NO: 773794 - protein, 446 aa, Homo sapiens
GVRCEAAVRWDAMEYDEKLARFRQAHLNPFNKQSGPRQHEQGPGEEVPDVTPEEALPELPPGEPEFRCPERVMDLGLSEDHFSRPVGLFLASDVQQLRQAIEECKQVILELPEQSEKQKDAVVRLIHLRLKLQELKDPNEDEPNIRVLLEHRFYKEKSKSVKQTCDKCNTIIWGLIQTWYTCTGCYYRCHSKCLNLISKPCVSSKVSHQAEYELNICPETGLDSQDYRCAECRAPISLRGVPSEARQCDYTGQYYCSHCHWNDLAVIPARVVHNWDFEPRKVSRCSMRYLALMVSRPVLRLREINPLLFSYVEELVEIRKLRQDILLMKPYFITCREAMEARLLLQDLLDVHAGRLGCSLTEIHTLFAKHIKLDCERCQAKGFVCELCREGDVLFPFDSHTSVCADCSAVFHRDCYYDNSTTCPKCARLSLRKQSLFQEPGPDVEA

SEQ ID NO: 773795 - protein, 189 aa, Homo sapiens
RYLPVVHTPLDSRGNLQLWVRGHLALVFALYRSCGPRGASGEDVSGRGFPAFCLGQWGCSCLSFSPTPWTVLGCWCTWLAHGGQRAENATAWLLVPFDQETQEETPQSAERPPGSLAHSRSGRDGRVSSLSSGIRKGMVSTPHCGGFRQGSYCLLCLGFPIWKMGAGVLTYLRWNGEQGTCRSPSENVM

SEQ ID NO: 773796 - protein, 67 aa, Homo sapiens
GVRGVTRPCLAGFSLQHALPGADGVSARTQAPGDQPSAVQLRGGAGGDSREAGAMEVGGGGAVSGGP

SEQ ID NO: 773797 - protein, 245 aa, Homo sapiens
RGRSRETDARRRSGAEPTARLPWPAALEEWPSCPCEPLGPGRRCRWDAMEYDEKLARFRQAHLNPFNKQSGPRQHEQGPGEEVPDVTPEEALPELPPGEPEFRCPERVMDLGLSEDHFSRPVGLFLASDVQQLRQAIEECKQVILELPEQSEKQKDAVVRLIHLRLKLQELKDPNEDEPNIRVLLEHRFYKEKSKSVKQTCDKCNTIIWGLIQTWYTCTGGPRPRRGVRNERDQSSCLRWAHIQM

SEQ ID NO: 773798 - protein, 245 aa, Homo sapiens; identical to SEQ ID NO: 773797

SEQ ID NO: 773799 - protein, 134 aa, Homo sapiens
TWTRTGGVLKVTTKEGGGSQATDVPDAVLGSVCALAWLPCVPCADSGIPGNVESRIFMRKQDPNEDEPNIRVLLEHRFYKEKSKSVKQTCDKCNTIIWGLIQTWYTCTGGPRPRRGVRNERDQSSCLRWAHIQM

SEQ ID NO: 773800 - protein, 499 aa, Homo sapiens
RGRSRETDARRRSGAEPTARLPWPAALEEWPSCPCEPLGPGRRCRWDAMEYDEKLARFRQAHLNPFNKQSGPRQHEQGPGEEVPDVTPEEALPELPPGEPEFRCPERVMDLGLSEDHFSRPVGLFLASDVQQLRQAIEECKQVILELPEQSEKQKDAVVRLIHLRLKLQELKDPNEDEPNIRVLLEHRFYKEKSKSVKQTCDKCNTIIWGLIQTWYTCTGCYYRCHSKCLNLISKPCVSSKVSHQAEYELNICPETGLDSQDYRCAECRAPISLRGVPSEARQCDYTGQYYCSHCHWNDLAVIPARVVHNWDFEPRKVSRCSMRYLALMVSRPVLRLREINPLLFSYVEELVEIRKLRQDILLMKPYFITCREAMEARLLLQLQDRQHFVENDEMYSVQDLLDVHAGRLGCSLTEIHTLFAKHIKLDCERCQAKGFVCELCREGDVLFPFDSHTSVCADCSAVFHRDCYYDNSTTCPKCARLSLRKQSLFQEPGPDVEA

SEQ ID NO: 773801 - protein, 399 aa, Homo sapiens
MGLNRELLQDGPLTAPAPNLGKGLFLASDVQQLRQAIEECKQVILELPEQSEKQKDAVVRLIHLRLKLQELKDPNEDEPNIRVLLEHRFYKEKSKSVKQTCDKCNTIIWGLIQTWYTCTGCYYRCHSKCLNLISKPCVSSKVSHQAEYELNICPETGLDSQDYRCAECRAPISLRGVPSEARQCDYTGQYYCSHCHWNDLAVIPARVVHNWDFEPRKVSRCSMRYLALMVSRPVLRLREINPLLFSYVEELVEIRKLRQDILLMKPYFITCREAMEARLLLQLQDRQHFVENDEMYSVQDLLDVHAGRLGCSLTEIHTLFAKHIKLDCERCQAKGFVCELCREGDVLFPFDSHTSVCADCSAVFHRDCYYDNSTTCPKCARLSLRKQSLFQEPGPDVEA

SEQ ID NO: 773802 - protein, 497 aa, Homo sapiens
GVRCEAAVRWDAMEYDEKLARFRQAHLNPFNKQSGPRQHEQGPGEEVPDVTPEEALPELPPGEPEFRCPERVMDLGLSEDHFSRPVGLFLASDVQQLRQAIEECKQVILELPEQSEKQKDAVVRLIHLRLKLQELKDPNEDEPNIRVLLEHRFYKEKSKSVKQTCDKCNTIIWGLIQTWYTCTGCYYRCHSKCLNLISKPCVSSKVSHQAEYELNICPETGLDSQDYRCAECRAPISLRGVPSEARQCDYTGQYYCSHCHWNDLAVIPARVVHNWDFEPRKVSRCSMRYLALMVSRPVLRLREINPLLFSYVEELVEIRKLRQDILLMKPYFITCREAMEARLLLQDLLDVHAGRLGCSLTEIHTLFAKHIKLDCEVGLCPGPLFSNPSPEGGLAGEAAQPSVSLASECPEELALTCPCPNPTLFPPRCQAKGFVCELCREGDVLFPFDSHTSVCADCSAVFHRDCYYDNSTTCPKCARLSLRKQSLFQEPGPDVEA

SEQ ID NO: 773803 - protein, 118 aa, Homo sapiens
DAWGDSVLEFPVQRAPTSFCPQGLLLRQLHHLSQVCPAQPEEAVALPGARSRCGGLAPRNSAGHPAWPARTHPANIKLFLLLRRPLGCGPGPLHPCWARAGGQCQGPLSPRCLLGLGA

SEQ ID NO: 773804 - protein, 586 aa, Homo sapiens
MAEKGDCIASVYGYDLGGRFVDFQPLGFGVNGLVLSAVDSRACRKVAVKKIALSDARSMKHALREIKIIRRLDHDNIVKVYEVLGPKGTDLQGELFKFSVAYIVQEYMETDLARLLEQGTLAEEHAKLFMYQLLRGLKYIHSANVLHRDLKPANIFISTEDLVLKIGDFGLARIVDQHYSHKGYLSEGLVTKWYRSPRLLLSPNNYTKAIDMWAAGCILAEMLTGRMLFAGAHELEQMQLILETIPVIREEDKDELLRVMPSFVSSTWEVKRPLRKLLPEVNSEAIDFLEKILTFNPMDRLTAEMGLQHPYMSPYSCPEDEPTSQHPFRIEDEIDDIVLMAANQSQLSNWDTCSSRYPVSLSSDLEWRPDRCQDASEVQRDPRGFGALAEDVQVDPRKDSHSSSERFLEQSHSSMERAFEADYGRSCDYKVGSPSYLDKLLWRDNKPHHYSEPKLILDLSHWKQAAGAPPTATGLADTGAREDEPASLFLEIAQWVKSTQGGPEHASPPADDPERRLSASPPGRPAPVDGGASPQFDLDVFISRALKLCTKPEDLPDNKLGDLNGACIPEHPGDLVQTEAFSKERW

SEQ ID NO: 773805 - protein, 586 aa, Homo sapiens; identical to SEQ ID NO: 773804

SEQ ID NO: 773806 - protein, 92 aa, Homo sapiens
LQHPYMSPYSCPEDEPTSQHPFRIEDEIDDIVLMAANQSQLSNWDTCSSRCSQPWVPEPTFPCPPISILPLILRDLPLCLPSCIAHWTTSPA

SEQ ID NO: 773807 - protein, 586 aa, Homo sapiens; identical to SEQ ID NO: 773804

SEQ ID NO: 773808 - protein, 586 aa, Homo sapiens; identical to SEQ ID NO: 773804

SEQ ID NO: 773809 - protein, 177 aa, Homo sapiens
MSEDSEKEDYSDRTISDEDESDEDMFMKFVSEDLHRCALLTADSFGDPFFPRTTQILLEYQLGRWVPRLREPRDLYGVSSSGPLSPTRWPYHCEVIDEKVQHIDGVSCWSESHQAGAQWCDLGSLQPPPPRFKRFACFSLLSSRDYRRVPPRPANFVFLVETGFHHVGQDGLRLLTS

SEQ ID NO: 773810 - protein, 104 aa, Homo sapiens
PLPDDESWECGWGCGSPAVALLLAAGYRVLREIPRYSPRTEATTGLARGLAWERGAGPDRTVSLPVYYKKSQVKHWKRCQKIQKRKTIQTEQSVMKMNRMRICS

SEQ ID NO: 773811 - protein, 115 aa, Homo sapiens
MEFRPVGFSKCGVVMPRQKLQFLRTEGVIYETVGSVALAVICHRAGLNLYVVHAPKHASCREGRKLIDLKLSSPLVSQERWELDKKFRLFPGLDITHMGRYLHRMVMVITNTTFW

SEQ ID NO: 773812 - protein, 115 aa, Homo sapiens; identical to SEQ ID NO: 773811

SEQ ID NO: 773813 - protein, 76 aa, Homo sapiens
FYKHFPDPIAKFPVRVCQWDTLKEPLKIGETSFLFSSCHMISAADIWLLLASSALNISFATLLRDICSSLTTHLAV

SEQ ID NO: 773814 - protein, 124 aa, Homo sapiens
RRARPARPCTPRAAPRGPAALAGRAALPPLSRGFYGPPAPQQPWGARGGPASGRERRGGGAECGGMRSRARPCRIPRPPARARPRPALPGLHALLPRPRIHLTLLGAPAGGGPGWVRGNSPAAQ

SEQ ID NO: 773815 - protein, 1222 aa, Homo sapiens
MVGLLLFFFPAIFLEVSLLPRSPGRKVLLAGASSQRSVARMDGDVIIGALFSVHHQPPAEKVPERKCGEIREQYGIQRVEAMFHTLDKINADPVLLPNITLGSEIRDSCWHSSVALEQSIEFIRDSLISIRDEKDGINRCLPDGQSLPPGRTKKPIAGVIGPGSSSVAIQVQNLLQLFDIPQIAYSATSIDLSDKTLYKYFLRVVPSDTLQARAMLDIVKRYNWTYVSAVHTEGNYGESGMDAFKELAAQEGLCIAHSDKIYSNAGEKSFDRLLRKLRERLPKARVVVCFCEGMTVRGLLSAMRRLGVVGEFSLIGSDGWADRDEVIEGYEVEANGGITIKLQSPEVRSFDDYFLKLRLDTNTRNPWFPEFWQHRFQCRLPGHLLENPNFKRICTGNESLEENYVQDSKMGFVINAIYAMAHGLQNMHHALCPGHVGLCDAMKPIDGSKLLDFLIKSSFIGVSGEEVWFDEKGDAPGRYDIMNLQYTEANRYDYVHVGTWHEGVLNIDDYKIQMNKSGVVRSVCSEPCLKGQIKVIRKGEVSCCWICTACKENEYVQDEFTCKACDLGWWPNADLTGCEPIPVRYLEWSNIESIIAIAFSCLGILVTLFVTLIFVLYRDTPVVKSSSRELCYIILAGIFLGYVCPFTLIAKPTTTSCYLQRLLVGLSSAMCYSALVTKTNRIARILAGSKKKICTRKPRFMSAWAQVIIASILISVQLTLVVTLIIMEPPMPILSYPSIKEVYLICNTSNLGVVAPLGYNGLLIMSCTYYAFKTRNVPANFNEAKYIAFTMYTTCIIWLAFVPIYFGSNYKIITTCFAVSLSVTVALGCMFTPKMYIIIAKPERNVRSAFTTSDVVRMHVGDGKLPCRSNTFLNIFRRKKAGAGNAKKRQPEFSPTANVRRHMCSFENPHTAVNVSNGKSVSWSEPGGGQVPKGQHMWHRLSVHVKTNETACNQTAVIKPLTKSYQGSGKSLTFSDTSTKTLYNVEEEEDAQPIRFSPPGSPSMVVHRRVPSAATTPPLPPHLTAEETPLFLAEPALPKGLPPPLQQQQQPPPQQKSLMDQLQGVVSNFSTAIPDFHAVLAGPGGPGNGLRSLYPPPPPPQHLQMLPLQLSTFGEELVSPPADDDDDSERFKLLQEYVYEHEREGNTEEDELEEEEEDLQAASKLTPDDSPALTPPSPFRDSVASGSSVPSSPVSESVLCTPPNVSYASVILRDYKQSSSTL

SEQ ID NO: 773816 - protein, 1194 aa, Homo sapiens
MVGLLLFFFPAIFLEVSLLPRSPGRKVLLAGASSQRSVARMDGDVIIGALFSVHHQPPAEKVPERKCGEIREQYGIQRVEAMFHTLDKINADPVLLPNITLGSEIRDSCWHSSVALEQSIEFIRDSLISIRDEKDGINRCLPDGQSLPPGRTKKPIAGVIGPGSSSVAIQVQNLLQLFDIPQIAYSATSIDLSDKTLYKYFLRVVPSDTLQARAMLDIVKRYNWTYVSAVHTEGNYGESGMDAFKELAAQEGLCIAHSDKIYSNAGEKSFDRLLRKLRERLPKARVVVCFCEGMTVRGLLSAMRRLGVVGEFSLIGSDGWADRDEVIEGYEVEANGGITIKLQSPEVRSFDDYFLKLRLDTNTRNPWFPEFWQHRFQCRLPGHLLENPNFKRICTGNESLEENYVQDSKMGFVINAIYAMAHGLQNMHHALCPGHVGLCDAMKPIDGSKLLDFLIKSSFIGVSGEEVWFDEKGDAPGRYDIMNLQYTEANRYDYVHVGTWHEGVLNIDDYKIQMNKSGVVRSVCSEPCLKGQIKVIRKGEVSCCWICTACKENEYVQDEFTCKACDLGWWPNADLTGCEPIPVRYLEWSNIESIIAIAFSCLGILVTLFVTLIFVLYRDTPVVKSSSRELCYIILAGIFLGYVCPFTLIAKPTTTSCYLQRLLVGLSSAMCYSALVTKTNRIARILAGSKKKICTRKPRFMSAWAQVIIASILISVQLTLVVTLIIMEPPMPILSYPSIKEVYLICNTSNLGVVAPLGYNGLLIMSCTYYAFKTRNVPANFNEAKYIAFTMYTTCIIWLAFVPIYFGSNYKIITTCFAVSLSVTVALGCMFTPKMYIIIAKPERNVRSAFTTSDVVRMHVGDGKLPCRSNTFLNIFRRKKAGAGNANSNGKSVSWSEPGGGQVPKGQHMWHRLSVHVKTNETACNQTAVIKPLTKSYQGSGKSLTFSDTSTKTLYNVEEEEDAQPIRFSPPGSPSMVVHRRVPSAATTPPLPPHLTAEETPLFLAEPALPKGLPPPLQQQQQPPPQQKSLMDQLQGVVSNFSTAIPDFHAVLAGPGGPGNGLRSLYPPPPPPQHLQMLPLQLSTFGEELVSPPADDDDDSERFKLLQEYVYEHEREGNTEEDELEEEEEDLQAASKLTPDDSPALTPPSPFRDSVASGSSVPSSPVSESVLCTPPNVSYASVILRDYKQSSSTL

SEQ ID NO: 773817 - protein, 189 aa, Homo sapiens
QWRNLDSLQPLPFRFKQFFCLSLLSSWDYRHVPPRLANFYILVEMGFHHVGQASLELLTSSDTPALAFQSARMTGVSCCTWPYLFIFDVESRSATQARVQWCNLDLGSQQSPPPGLQQSSHLSLPSSWVYSCAPPHLANFCIFAETGSHQIAQVGLELLGSRDLPASVSQNAGITGVSHRASPLGGFSG

SEQ ID NO: 773818 - protein, 315 aa, Homo sapiens
MKCLGKRRGQAAAFLPLCWLFLKILQPGHSHLYNNRYAGDKVIRFIPKTEEEAYALKKISYQLKVDLWQPSSISYVSEGTVTDVHIPQNGSRALLAFLQEANIQYKVLIEDLQKTLEKGSSLHTQRNRRSLSGYNYEVYHSLEEIQNWMHHLNKTHSGLIHMFSIGRSYEGRCLFILKLGRRSRLKRAVWIDCGIHAREWIGPAFCQWFVKEALLTYKSDPAMRKMLNHLYFYIMPVFNVDGYHFSWTNDRFWRKTRSRNSRFRCRGVDANRNWKVKWCGKFGTNWDPDPKVSAGFTLQNMSPEDSHGRLMFFCM

SEQ ID NO: 773819 - protein, 320 aa, Homo sapiens
MPKKKTGARKKAENRREREKQLRASRSTIDLAKHPCNASMVSDKCQRRQKNRAFCYFCNSVQKLPICAQCGKTKCMMKSSDCVIKHAGVYSTGLAMVGAICDFCEAWVCHGRKCLSTHACACPLTDAECVECERGVWDHGGRIFSCSFCHNFLCEDDQFEHQASCQVLEAETFKCVSCNRLGQHSCLRCKACFCDDHTRSKVFKQEKGKQPPCPKCGHETQETKDLSMSTRSLKFGRQTGGEEGDGASGYDAYWKNLSSDKYGDTSYHDEEEDEYEAEDDEEEEDEGRKDSDTESSDLFTNLNLGRTYASGYAHYEEQEN

SEQ ID NO: 773820 - protein, 53 aa, Homo sapiens
MGTDMCKGCPKRTGQDKRGFPRYKRPGDTGFENPRDRSLGLPQVQERIIARGE

SEQ ID NO: 773821 - protein, 147 aa, Homo sapiens
AVQSSQALVSTHVSCLRACFCDDHTRSKVFKQEKGKQPPCPKCGHETQETKDLSMSTRSLKFGRQTGGEEGDGASGYDAYWKNLSSDKYGDTSYHDEEEDEYEAEDDEEEEDEGRKDSDTESSDLFTNLNLGRTYASGYAHYEEQEN

SEQ ID NO: 773822 - protein, 320 aa, Homo sapiens; identical to SEQ ID NO: 773819

SEQ ID NO: 773823 - protein, 154 aa, Homo sapiens
MPKKKTGARKKAENRREREKQLRASRSTIDLAKHPCNASMVSDKCQRRQKNRAFCYFCNSVQKLPICAQCGKTKCMMKSSDCVIKHAGVYSTGLAMVGAICDFCEAWVCHGRKCLSTHACACPLTDAECVECERGVWDHETHLNVSASITWQLA

SEQ ID NO: 773824 - protein, 68 aa, Homo sapiens
LKPGPHETLTLHPWHQRSSHFFSMNGPPEGPPVHGACSVCSLRTAWCTYRSALQAPRAAAPVRIPFHC

SEQ ID NO: 773825 - protein, 104 aa, Homo sapiens
RASQRVSQGSNPGFPPQPRPFHTPCSDFLPCPEETPCLRFGPLMRSCLTSWLSRTQGSPLGTLHSARGQRIEQEESSRRGLFDHPQPRQGQLDPVIILLLYLGH

SEQ ID NO: 773826 - protein, 97 aa, Homo sapiens
LWPVGKPRSRGSPSQGCDTFFGTAQFLVSPSFRVPPCSPRTFLDVLLRNVAAVLLLHPDMGPEMGACSRSHVWYIWSSHRLTWSWHLCQCPELSILS

SEQ ID NO: 773827 - protein, 139 aa, Homo sapiens
ALSRGKHFLPSTMKASRAETRWKLLVPPEDCYGLCFSVSQDAQAAMRPFDPSALLPTCWDYWTYVGSLTTPPLTESVTWIIQKEPVEVAPSQLSAFRTLLFSALGEEEKMMVNNYRPLQPLMNRKVWASFQATNEGTRS

SEQ ID NO: 773828 - protein, 130 aa, Homo sapiens
ETRREEAESEALLMTTPRSPGPGPFLGAGKSMAARAECPCLLSPVPETSAYSTHLLTLKDMTYRELLCPHTGQGLPVTASTSPASSLCYIYIFFFPFETGSHSFVQPGSAVVQMWLNCSLDLQVSSDPPE

SEQ ID NO: 773829 - protein, 126 aa, Homo sapiens
MVNILMANTKFDAFLKQSLPSYDLQKVMAAIKQQGIEDNDELPSAKGRKVLRSLVVCENGLPIKEGLSCNGPRLVGLRSTLQGRGEMVEQLRELTRLLEAKDFRSRMEGVGQLLELCKAKTELVTA

SEQ ID NO: 773830 - protein, 112 aa, Homo sapiens
SYQSEVGSIIVPISQMGKLRHREHRSLPQGHTASRWQSYVQTQLSWAQSLLPTHSTLWLCCTHRSRGALVSGISGCMFVHASGFTGGHHTQQGALSMARATLAQCSYLPQIS

SEQ ID NO: 773831 - protein, 226 aa, Homo sapiens
MLKNGTFVIRLRIISLIFLEKKISNFTDKNMKEVKKSPKQLAAYINRTVGQTVKSPDKLRKVIYAERKFIIPFQIFVTEKNSPLEGGGCDMANKENELACAGHQTEKLHHDSRTYLVNSSDSGSSQTESPSSKYSGFFSEVSQDHETMVQVLFSRNMRLNVALSFWRRRSISELVAYLLRIEDLGVVVDCLPVLTNCLQEEKQYISLGCCVDLLLLVKSLLKSKFE

SEQ ID NO: 773832 - protein, 221 aa, Homo sapiens
MSPLSAARAALRVYAVGAAVILAQLLRRCRGGFLEPVFPPRPDGVAIVTGGTDGIGYSTAKHLARLGMHVIIRDVSLAVLPGLALPLELKRSSHLSLSRSWDYRRAPSFPPKIWNFYYCDLASMTSIRQFVQKFKMKKIPLHVLINNAGVMMVPQRKTRDGFEEHFGLNYLGHFMLTNLLLDTLKESGSPGHSARVVTVSSGTHYVAELNMDDLQSSACYS

SEQ ID NO: 773833 - protein, 396 aa, Homo sapiens
MSATDRMGPRAVPGLRLALLLLLVLGTPKSGVQGQEGLDFPEYDGVDRVINVNAKNYKNVFKKYEVLALLYHEPPEDDKASQRQFEMEELILELAAQVLEDKGVGFGLVDSEKDAAVAKKLGLTEVDSMYVFKGDEVIEYDGEFSADTIVEFLLDVLEDPVELIEGERELQAFENIEDEIKLIGYFKSKDSEHYKAFEDAAEEFHPYIPFFATFDSKVAKKLTLKLNEIDFYEAFMEEPVTIPDKPNSEEEIVNFVEEHRRSTLRKLKPESMYETWEDDMDGIHIVAFAEEADPDGFEFLETLKAVAQDNTENPDLSIIWIDPDDFPLLVPYWEKTFDIDLSAPQIGVVNVTDADSVWMEMDDEEDLPSAEELEDWLEDVLEGEINTEDDDDDDDD

SEQ ID NO: 773834 - protein, 119 aa, Homo sapiens
METYLDRTRWGLRGANFRGQLRFPPRPLLLFLHLTLFPLALSAVSPGPSSALCPLLWAIPQSPLPLEPLTQNLGPRGPSLPQLTSSGPGEPTQIPLPHLCSVPSIYAQLSPTLSNPVSF

SEQ ID NO: 773835 - protein, 471 aa, Homo sapiens
MSATDRMGPRAVPGLRLALLLLLVLGTPKSGVQGQEGLDFPEYDGVDRVINVNAKNYKNVFKKYEVLALLYHEPPEDDKASQRQFEMEELILELAAQVLEDKGVGFGLVDSEKDAAVAKKLGLTEVDSMYVFKGDEVIEYDGEFSADTIVEFLLDVLEDPVELIEGERELQAFENIEDEIKLIGYFKSKDSEHYKAFEDAAEEFHPYIPFFATFDSKVAKKLTLKLNEIDFYEAFMEEPVTIPDKPNSEEEIVNFVEEHRRSTLRKLKPESMYETWEDDMDGIHIVAFAEEADPDGFEFLETLKAVAQDNTENPDLSIIWIDPDDFPLLVPYWEKTFDIDLSAPQIGVVNVTDADSVWMEMDDEEDLPSAEELEDWLEDVLSIMCAHSNERYYGYTGAFRCLAENAGDVAFVKDVTVLQNTDGNNNEAWAKDLKLADFALLCLDGKRKPVTEASSCHLAMTPHASRGVSDL

SEQ ID NO: 773836 - protein, 396 aa, Homo sapiens; identical to SEQ ID NO: 773833

SEQ ID NO: 773837 - protein, 87 aa, Homo sapiens
MSSPRGLSKSSPRGLSKSSPWGLSKSFLCRLSKSSPWVLSMSSPQGLSKSSPRGLSKSSPRGLSMSSPRGLSKSSPRGLIMSSPRGL

SEQ ID NO: 773838 - protein, 68 aa, Homo sapiens
SPAVTPTLLSLSPHTSSPAANLASSTLTWNLLPTPSSDITLVPIPITAHLGYCSSFLPASCFHPTPSV

SEQ ID NO: 773839 - protein, 182 aa, Homo sapiens
FNSSSVTYLESVQPRDKTQDLNPQLPPKKASLPFPNIAGAETNASTLFLSPTSRGPRPMPPLSSFPQHRGGRDQCLHSLPFPNIAGAESNASTLFHSPTSRGPRPMPPLSSFPQHRGGREQCLHSLPFPNIAGAETNASTLFLSPTSRGPRPMPPLSSIPQHRRGRDQCLHSLPFPNIAGAE

SEQ ID NO: 773840 - protein, 137 aa, Homo sapiens [sequence omitted]

SEQ ID NO: 773841 - protein, 119 aa, Homo sapiens [sequence omitted]

SEQ ID NO: 773842 - protein, 112 aa, Homo sapiens
HDTHRHTHRHRHTHRDTQNRSHGHTQTHTQITRTHTDTHTHRHTLIQTHTQTHTDHIGSKTSSSLSSIISFLTKTKDNRCQGMEMPVREGAVWIPMLEWEGTLWYRKNAVCV

SEQ ID NO: 773843 - protein, 87 aa, Homo sapiens
IVIADSGGSTRGEFMHPVGVHDSVRTPLVSPTTEASHLLQDLAKQKALDRSIKGFAKVGVRGISRVICIANAHPLLLVYIKTANKGE

SEQ ID NO: 773844 - protein, 105 aa, Homo sapiens
MLHLPRPPWPAMPLSRAYKNPETLAGRQTLRRAQQGRNTRVAGCREECTDRHQQVCRPSTWQKRQSLAGMVGGEPRPLSVLTPEENLPAPSPSGFPHLLRNTSTQ

SEQ ID NO: 773845 - protein, 169 aa, Homo sapiens
CPGLFKSFLVFPETFTRTLCHDYESSSYPRCGSRARKIGDGTAPLLESGWTGGSRDPQPPRWSGMGEVTTQGLSNSCLLTLPLAPAKQPLLASAEPLELQVPKKPFLTPALSLPLGQFRANGTAKEKAEESKKGAAQYPGEFRVPGWLTSKRRRPLGALGWGNAQRSSL

SEQ ID NO: 773846 - protein, 207 aa, Homo sapiens
LGRGRRRFRSSMAATEEERLAGSGEGERLDFLRDLHVRFFQRCLEVLPERCSSLEDKQVFPTEDRSNLNRCGFRGSSYLGILFNPSKAPGTAHPYDSGHIAMTYTGLSCLLILGDDLSRVNKEACLAGLRALQLEDGSFCAVPEGSENDMRFLYCTSCICYMLNNRSGMDMKKAISYIRRSMSYDNGLAQGAGLESHGGSTFCAIAS

SEQ ID NO: 773847 - protein, 121 aa, Homo sapiens
GPREHSDAWVWSCSWVTAVVPQSTGLLPRGLGREWGSPHSQPPPSPTWLHGAHGPSHTSPAAASIFTATAPDRLPLLSTSYLNMKSGTLFLLDQGQYKNAHSYNFFFFWCLALSPGWSAVA

SEQ ID NO: 773848 - protein, 295 aa, Homo sapiens
AVVSSLVNGSTFVLQKKGIVRAKRRGTSYLTDIVWWAGTIAMAVGQIGNFLAYTAVPTVLVTPLGALGVPFGSILASYLLKEKLNILGKLGCLLSCAGSVVLIIHSPKSESVTTQAELEEKLTNPVFVGYLCIVLLMLLLLIFWIAPAHGPTNIMVYISICSLLGSFTVPSTKGIGLAAQDILHNNPSSQRALCLCLVLLAVLGCSIIVQFRYINKALECFDSSVFGAIYYVVFTTLVLLASAILFREWSNVGLVDFLGMACGFTTVSVGIVLIQVFKEFNFNLGEMNKSNMKTD

SEQ ID NO: 773849 - protein, 277 aa, Homo sapiens
ARRASRSGTSYLTDIVWWAGTIAMAVGQIGNFLAYTAVPTVLVTPLGALGVPFGSILASYLLKEKLNILGKLGCLLSCAGSVVLIIHSPKSESVTTQAELEEKLTNPVFVGYLCIVLLMLLLLIFWIAPAHGPTNIMVYISICSLLGSFTVPSTKGIGLAAQDILHNNPSSQRALCLCLVLLAVLGCSIIVQFRYINKALECFDSSVFGAIYYVVFTTLVLLASAILFREWSNVGLVDFLGMACGFTTVSVGIVLIQVFKEFNFNLGEMNKSNMKTD

SEQ ID NO: 773850 - protein, 92 aa, Homo sapiens
AVVSSLVNGSTFVLQKKGIVRAKRRGTSYLTDIVWWAGTIAMAVGQIGNFLAYTAVPTVLVTPLGALGVPFGQMPKSLQRSVSMMGVLKFTP

SEQ ID NO: 773851 - protein, 290 aa, Homo sapiens
AVVSSLVNGSTFVLQKKGIVRAKRRGTSYLTDIVWWAGTIAMAVGQIGNFLAYTAVPTVLVTPLGALGVPFGSILASYLLKEKLNILGKLGCLLSCAGSVVLIIHSPKSESVTTQAELEEKLTNPVFVGYLCIVLLMLLLLIFWIAPAHGPTNIMVYISICSLLGSFTVPSTKGIGLAAQDILHNNPSSQRALCLCLVLLAVLGCSIIVQFRYINKALECFDSSVFGAIYYVVFTTLVLLASAILFREWSNVGLGGLLAKGFPNSRPVSMADTSLYMVFKQVIFYRAVRD

SEQ ID NO: 773852 - protein, 250 aa, Homo sapiens
MFTAPHLQVLLTVGTMSDGVLDKKPVFNLESQSILASYLLKEKLNILGKLGCLLSCAGSVVLIIHSPKSESVTTQAELEEKLTNPVFVGYLCIVLLMLLLLIFWIAPAHGPTNIMVYISICSLLGSFTVPSTKGIGLAAQDILHNNPSSQRALCLCLVLLAVLGCSIIVQFRYINKALECFDSSVFGAIYYVVFTTLVLLASAILFREWSNVGLVDFSPRVFPIHDQSPWQTRLYYMVFKQVIFYRAVRD

SEQ ID NO: 773853 - protein, 797 aa, Homo sapiens
MENQGTRTQQIRQVLLLFVLLGMSQAGSETWSFSVAEEMQSGSFVGNLAKDLGLKVRELSSRGARVVSNDKKQRLQLDINTGDLLLSETLDREELCGSIEPCVLHLQVLMQNPTQFLQIELQVRDINDHSPIFSEKQMLLEIPENSPVGAVFLLESAKDLDVGINAVKSYTISPNSHFHIKMRVIPDNRKYPELVLDKALDYEELPELSFILSALDGGSPPRSGTALVRVVVVDINDNSPEFEQAFYEVKIRENSILGSLILIVSAWDLDSGTNGEICYTFSHASEDIRKTFEINQKSGEITLRAPLDFETIESYSIIIQATDGGGLFGKSTVIIHVIDVNDNAPEITVSSITSPIPENTPETVVMVFSIQDIDSGDNGRIVCSIPEDLPFVLKSSVENYYTLETERPLDRESTAEYNITITVTDLGIPRLKTEHNTTVLVSDVNDNAPTFTQTSYTLFVRENNSPALHIGSVSATDRDSGTNAQVNYSLLPPQDLHLPLASLVSINTDNGHLFALRSLDYEALQAFDFRVGATDRGSPALSSEALVRVLVLDANDNSPFVLYPLQNGSAPCTELVPRAAEPGYLVTKVVAVDGDSGQNAWLSYQLLKATEPGLFGVWAHNGEVRTARLLSERDAAKHRLVVLVKDNGEPPRSATATLQVLLVDGFSQPYLPLPEAAPAQAQADSLTVYLVVALASVSSLFLFSVLLFVAVRLCRRSRAASVGSCSVPKGPFPGHLVDVSGTGTLSQSYQYEVCLTGGSETNEFKFLKPVIPNIQAKGLGKNSEENSTFRNSFGFNF

SEQ ID NO: 773854 - protein, 367 aa, Homo sapiens
MVCDNLNLPFRDEGFDAIISIGVIHHFSTKQRRIRAIKEMARVLVPGGQLMIYVWAMEQKNRRFEKQDVLVPWNRALCSQLFSESSQSGRKRQCGYPERGHPYHPPCSECSCSVCFKEQGGSKRSHSVGYEPAMARTCFANISKEGEEEYGFYSTLGKSFRSWFFSRSLDESTLRKQIERVRPLKNTEVWASSTVTVQPSRHSSLDFDHQEPFSTKEQSLDEEVFVESSSGKHLEWLRAPGTLKHLNGDHQGEMRRNGGGNFLDSTNTGVNCVDAGNIEDDNPSASKILRRISAVDSTDFNPDDTMSVEDPQTDVLDSTAFMRYYHVFREGELCSLLKENVSELRILSSGNDHGNWCIIAEKKGGCD

SEQ ID NO: 773855 - protein, 317 aa, Homo sapiens [sequence omitted]

SEQ ID NO: 773856 - protein, 367 aa, Homo sapiens; identical to SEQ ID NO: 773854

SEQ ID NO: 773857 - protein, 344 aa, Homo sapiens
DTSYVRHTEDSNEYHPGSGSPCREATDANVWSCGINCTVGDDSQDVLVPWNRALCSQLFSESSQSGRKRQCGYPERGHPYHPPCSECSCSVCFKEQGGSKRSHSVGYEPAMARTCFANISKEGEEEYGFYSTLGKSFRSWFFSRSLDESTLRKQIERVRPLKNTEVWASSTVTVQPSRHSSLDFDHQEPFSTKEQSLDEEVFVESSSGKHLEWLRAPGTLKHLNGDHQGEMRRNGGGNFLDSTNTGVNCVDAGNIEDDNPSASKILRRISAVDSTDFNPDDTMSVEDPQTDVLDSTAFMRYYHVFREGELCSLLKENVSELRILSSGNDHGNWCIIAEKKGGCD

SEQ ID NO: 773858 - protein, 73 aa, Homo sapiens
QRLAQRAGLLSSMSELIKMLAPGGHQGHPGQPFCLLISIVPLLPHLTITTAVEDLTSTGRPEGERRKGSEDKS

SEQ ID NO: 773859 - protein, 72 aa, Homo sapiens
VHNVQMDVDNCPQGCPGAGPSPATTPPDTARFSPNGGADRTVHGSLSGPSNTSSIIHSREKRGGQRPASPPF

SEQ ID NO: 773860 - protein, 112 aa, Homo sapiens
MEASSSGITNGKTKVFHPVAKDVNILFDELEAVSSPCKDDDSLLHPGNLTSTSDDASRLEAGGETVPERNKSNGLYFRDGKCRIDYILVYRKSNPQTEKREVFERNIRAEGL

SEQ ID NO: 773861 - protein, 79 aa, Homo sapiens
CLMHGRAGLGEAERSEKRDAGRNHGPDPQSRRAATGPGVTLASPAEGYTPWRRFCLSYNTVKAIKSSGGGGGATCGDTR

SEQ ID NO: 773862 - protein, 132 aa, Homo sapiens
AGPRPFFRPCRRVWSSALARLSLFRGPPAAGLRSGVAGPFFLPENQPEWRGAALSGPLCPQGPHGHPTGGPLPGRLHPQPSWKWEAAGRGKGLERAGLRRREPSGGAHRWGSPAPAGVRETARAPPRKGSFA

SEQ ID NO: 773863 - protein, 96 aa, Homo sapiens
GEGWVCPAAGLKPKSEVTPTWFSSWPARCPPGSVGGLSALPLASALSPPTPGRLAGTCTLGLGRRADCQPRGHLASLLGGVVTRHRAQDSGEGSAL

SEQ ID NO: 773864 - protein, 140 aa, Homo sapiens
SGGVLPRPAGSLFPGGGSWTQLFAGPPGSGEPRPAAANRPVESKSKVGSAGQRPGTMREARQSGLQAQPLGILRDPRLIMRLNPTPRTRDSKSPSPPTAPDPLPLSLQRRVCGRERDAGREKRGEGEHLFISFPPSICHL

SEQ ID NO: 773865 - protein, 126 aa, Homo sapiens
MPVKPPVLSSFRTATMVRMNVLADALKSINNAEKRGKRQVLIRPCSKVIVRFLTVMMKHGYIGEFEIIDDHRAGKIVVNLTGRLNKVGVQWHDLGYCNLCLPGSSDSPASASLVAEITVWGDQPQI

SEQ ID NO: 773866 - protein, 115 aa, Homo sapiens
MPVKPPVLSSFRTATMVRMNVLADALKSINNAEKRGKRQVLIRPCSKVIVRFLTVMMKHGYIGEFEIIDDHRAGKIVVNLTGRLNKCGVISPRFDVQLKDLEKWQNNLLPSRQFG

SEQ ID NO: 773867 - protein, 75 aa, Homo sapiens
LSRGSLRCWALGWARLSGATSHPALVCVEALLPPLPPLGGALARAHGSLTSCDLSEHISPWNSAGFHPTFLLFLL

SEQ ID NO: 773868 - protein, 319 aa, Homo sapiens
MASRSLGGLSGIRGGGGGGGKKSLSARNAAVERRNLITVCRFSVKTLIDRSCFETIDDSSPEFNNFAAILEQILSHRLKGQVTWFGYESPRSFWDYIRVACRKVSQNCICSIENMENVSSSRAKGRAWIRVALMEKHLSEYISTALRDFKTTRRFYEDGAIVLGEEANMLAGMLLGLNAIDFSFCLKGEGLDGSFPAVIDYTPYLKYIQSSDSISSDEEELRTLGSSGSESSTPENVGPPFLMDENSWFNKCKRVKQKYQLTLEQKGYLEELLRLRENQLSESVSQNKILLQRIEDSDLAHKLEKEQLEYIIVELQDQL

SEQ ID NO: 773869 - protein, 241 aa, Homo sapiens
MGQVTWFGYESPRSFWDYIRVACRKVSQNCICSIENMENVSSSRAKGRAWIRVALMEKHLSEYISTALRDFKTTRRFYEDGAIVLGEEANMLAGMLLGLNAIDFSFCLKGEGLDGSFPAVIDYTPYLKYIQSSDSISSDEEELRTLGSSGSESSTPENVGPPFLMDENSWFNKCKRVKQKYQLTLEQKGYLEELLRLRENQLSESVSQNKILLQRIEDSDLAHKLEKEQLEYIIVELQDQL

SEQ ID NO: 773870 - protein, 143 aa, Homo sapiens
MASRSLGGLSGIRGGGGGGGKKSLSARNAAVERRNLITVCRFSVKTLIDRSCFETIDDSSPEFNNFAAILEQILSHRLKGQVTWFGYESPRSFWDYIRVACRKVSQNCICSIENMENVSSSRAKVRHWSETRFYFFFHCMYLE

SEQ ID NO: 773871 - protein, 98 aa, Homo sapiens
IRRMRKPRRAGWETLSRKAPGPSAGLRPSPATCDTCHFPILGDGNATLPFAPGKTSRVPSDSGDFSSHPRANWSSIRDFPSAKCVGIELHASLSTSAE

SEQ ID NO: 773872 - protein, 501 aa, Homo sapiens
MPFGCVTLGDKKNYNQPSEVTDRYDLGQVIKTEEFCEIFRAKDKTTGKLHTCKKFQKRDGRKVRKAAKNEIGILKMVKHPNILQLVDVFVTRKEYFIFLELATGREVFDWILDQGYYSERDTSNVVRQVLEAVAYLHSLKIVHRNLKLENLVYYNRLKNSKIVISDFHLAKLENGLIKEPCGTPEYLAPEVVGRQRYGRPVDCWAIGVIMYILLSGNPPFYEEVEEDDYENHDKNLFRKILAGDYEFDSPYWDDISQAAKDLVTRLMEVEQDQRITAEEAISHEWISGNAASDKNIKDGVCAQIEKNFARAKWKKAVRVTTLMKRLRAPEQSSTAAAQSASATDTATPGAAGGATAAAASGATSAPEGDAARAAKSDNVAPADRSATPATDGSATPATDGSVTPATDGSITPATDGSVTPATDRSATPATDGRATPATEESTVPTTQSSAMLATKAAATPEPAMAQPDSTAPEGATGQAPPSSKGEEAAGYAQESQREEAS

SEQ ID NO: 773873 - protein, 476 aa, Homo sapiens
MPFGCVTLGDKKNYNQPSEVTDRYDLGQVIKTEEFCEIFRAKDKTTGKLHTCKKFQKRDGRKVRKAAKNEIGILKMVKHPNILQLVDVFVTRKEYFIFLELATGREVFDWILDQGYYSERDTSNVVRQVLEAVAYLHSLKIVHRNLKLENLVYYNRLKNSKIVISDFHLAKLENGLIKEPCGTPEYLGFQAIHLSMRRWKKMIMRTMIRIIFRKILAGDYEFDSPYWDDISQAAKDLVTRLMEVEQDQRITAEEAISHEWISGNAASDKNIKDGVCAQIEKNFARAKWKKAVRVTTLMKRLRAPEQSSTAAAQSASATDTATPGAAGGATAAAASGATSAPEGDAARAAKSDNVAPADRSATPATDGSATPATDGSVTPATDGSITPATDGSVTPATDRSATPATDGRATPATEESTVPTTQSSAMLATKAAATPEPAMAQPDSTAPEGATGQAPPSSKGEEAAGYAQESQREEAS

SEQ ID NO: 773874 - protein, 470 aa, Homo sapiens
MPFGCVTLGDKKNYNQPSEVTDRYDLGQVIKTEEFCEIFRAKDKTTGKLHTCKKFQKRDGRKVRKAAKNEIGILKMVKHPNILQLVDVFVTRKEYFIFLELATGREVFDWILDQGYYSERDTSNVVRQVLEAVAYLHSLKIVHRNLKLENLVYYNRLKNSKIVISDFHLAKLENGLIKEPCGTPEYLAPEVVGRQRYGRPVDCWAIGVIMYILLSGNPPFYEEVEEDDYENHDKNLFRKILAGDYEFDSPYWDDISQAAKDLVTRLMEVEQDQRITAEEAISHEWISGNAASDKNIKDGVCAQIEKNFARAKWKKAVRVTTLMKRLRAPEQSSTAAAQSASATDTATPGAADRSATPATDGSATPATDGSVTPATDGSITPATDGSVTPATDRSATPATDGRATPATEESTVPTTQSSAMLATKAAATPEPAMAQPDSTAPEGATGQAPPSSKGEEAAGYAQESQREEAS

SEQ ID NO: 773875 - protein, 470 aa, Homo sapiens; identical to SEQ ID NO: 773874

SEQ ID NO: 773876 - protein, 470 aa, Homo sapiens; identical to SEQ ID NO: 773874

SEQ ID NO: 773877 - protein, 541 aa, Homo sapiens
MPFGCVTLGDKKNYNQPSEVTDRYDLGQVIKTEEFCEIFRAKDKTTGKLHTCKKFQKRDGRKVRKAAKNEIGILKMVKHPNILQLVDVFVTRKEYFIFLELECGSGDPRFPSAQGFHLSHPLQLRKPPFWTLGVPGPCALLSQLPGVGSSPKCSCPTPDSAQRQAQGLVSLRATGREVFDWILDQGYYSERDTSNVVRQVLEAVAYLHSLKIVHRNLKLENLVYYNRLKNSKIVISDFHLAKLENGLIKEPCGTPEYLAPEVVGRQRYGRPVDCWAIGVIMYILLSGNPPFYEEVEEDDYENHDKNLFRKILAGDYEFDSPYWDDISQAAKDLVTRLMEVEQDQRITAEEAISHEWISGNAASDKNIKDGVCAQIEKNFARAKWKKAVRVTTLMKRLRAPEQSSTAAAQSASATDTATPGAADRSATPATDGSATPATDGSVTPATDGSITPATDGSVTPATDRSATPATDGRATPATEESTVPTTQSSAMLATKAAATPEPAMAQPDSTAPEGATGQAPPSSKGEEAAGYAQESQREEAS

SEQ ID NO: 773878 - protein, 193 aa, Homo sapiens
LEYNAKTIPLLRESLHPMLLSIIITVADNLNSKNSGIYAAAVAVLDAMVESLDNLCLLPALAGRVRFLSGRAVLDVTDRLAVLVASVYPRKPQAVERHVLPILWHFLNTATRNGTLPGPSGNIRGVVCRLSRSLQEHMGSRLLDFAASQPKHVLKTLQELLDSESLGGSRKATDRGVAPDSKTTGSSYPFQLD

SEQ ID NO: 773879 - protein, 124 aa, Homo sapiens
MLECSGTTSAYCNLHLPGSSNSPASASQVAGTTETSALNQYHGSSSSDKDSHGVAILTVLVMLVPGPSGTPPPVWSALELYTGPRVSQDCQKGLARIHLGEGSASLQSCWIERTFILSYIIEEL

SEQ ID NO: 773880 - protein, 223 aa, Homo sapiens
MQLFPRGLFEDALPPIVLRSQVYSLVPDRTVADRQLKELQEQGEIRIVQLGFDLDAHGIIFTEDYRTRVCDCVLKACDGRPYAGAVQKFLASVLPACGDLSFQQDQMTQTFGFRDSEITHLVNAGVLTVRDAGSWWLAVPGVGRFIKYFVKGRQAVLSMVRKAKVPGNWSYQSSWAGGRLSWCGLASPTMCTTSLGPAYWTALYPSGTSSAARDMKSALLVRL

SEQ ID NO: 773881 - protein, 37 aa, Homo sapiens
MGEEATCVTFNIPFISSHWAHFKRQRSPHPAAPPPAP

SEQ ID NO: 773882 - protein, 162 aa, Homo sapiens
PSFSLSSLGALCSCLLCLRLSGDWALPSLPLLPPPVSRSHRPQGHRYFRVMKLEASCGTATSEVPKPEKKTARDAEPSSETRPQEVEAEPRSGSGPEAEAEPLDFVVATEREFEEVLAISGGIYGGLDYLPSRYHSWLRDPDRTVVLAKRNGGVVSPGARPR

SEQ ID NO: 773883 - protein, 171 aa, Homo sapiens
DVRVGLRQRGRVPARHPPLTLGGSKGTSLLAPGVSAPAARPAWLCGISALAPAPAPARVMKLEASCGTATSEVPKPEKKTARDAEPSSETRPQEVEAEPRSGSGPEAEAEPLDFVVATEREFEEVLAISGGIYGGLDYLPSRYHSWLRDPDRTVVLAKRNGGVVSPGARPR

SEQ ID NO: 773884 - protein, 345 aa, Homo sapiens
MAQHHLWILLLCLQTWPEAAGKDSEIFTVNGILGESVTFPVNIQEPRQVKIIAWTSKTSVAYVTPGDSETAPVVTVTHRNYYERIHALGPNYNLVISDLRMEDAGDYKADINTQADPYTTTKRYNLQIYRRLGKPKITQSLMASVNSTCNVTLTCSVEKEEKNVTYNWSPLGEEGNVLQIFQTPEDQELTYTCTAQNPVSNNSDSISARQLCADIAMGFRTHHTGLLSVLAMFFLLVLILSSVFLFRLFKRRQGRIFPEGSCLNTFTKNPYAASKKTIYTYIMASRNTQPAESRIYDEILQSKVLPSKEEPVNTVYSEVQFADKMGKASTQDSKPPGTSSYEIVI

SEQ ID NO: 773885 - protein, 280 aa, Homo sapiens
MAQHHLWILLLCLQTWPEAAGKDSEIFTVNGILGESVTFPVNIQEPRQVKIIAWTSKTSVAYVTPGDSETAPVVTVTHRNYYERIHALGPNYNLVISDLRMEDAGDYKADINTQADPYTTTKRYNLQIYRRLGKPKITQSLMASVNSTCNVTLTCSVEKEEKNVTYNWSPLGEEGNVLQIFQTPEDQELTYTCTAQNPVSNNSDSISARQLCADIAMGFRTHHTGLLSVLAMFFLLVLILSSVFLFRLFKRRQGRIFPEGKMWKLTFSPPGTEAIYPRFS

SEQ ID NO: 773886 - protein, 280 aa, Homo sapiens; identical to SEQ ID NO: 773885

SEQ ID NO: 773887 - protein, 328 aa, Homo sapiens
MAQHHLWILLLCLQTWPEAAGKDSEIFTVNGILGESVTFPVNIQEPRQVKIIAWTSKTSVAYVTPGDSETAPVVTVTHRNYYERIHALGPNYNLVISDLRMEDAGDYKADINTQADPYTTTKRYNLQIYRRLGKPKITQSLMASVNSTCNVTLTCSVEKEEKNVTYNWSPLGEEGNVLQIFQTPEDQELTYTCTAQNPVSNNSDSISARQLCADIAMGFRTHHTGLLSVLAMFFLLVLILSSVFLFRLFKRRQDAASKKTIYTYIMASRNTQPAESRIYDEILQSKVLPSKEEPVNTVYSEVQFADKMGKASTQDSKPPGTSSYEIVI

SEQ ID NO: 773888 - protein, 272 aa, Homo sapiens
MAQHHLWILLLCLQTWPEAAGKDSEIFTVNGILGESVTFPVNIQEPRQVKIIAWTSKTSVAYVTPGDSETAPVVTVTHRNYYERIHALGPNYNLVISDLRMEDAGDYKADINTQADPYTTTKRYNLQIYRRLGKPKITQSLMASVNSTCNVTLTCSVEKEEKNVTYNWSPLGEEGNVLQIFQTPEDQELTYTCTAQNPVSNNSDSISARQLCADIAMGFRTHHTGLLSVLAMFFLLVLILSSVFLFRLFKRRQGASLQGRASEHSLFRSAVC

SEQ ID NO: 773889 - protein, 241 aa, Homo sapiens
MAQHHLWILLLCLQTWPEAAGKDSEIFTVNGILGESVTFPVNIQEPRQVKIIAWTSKTSVAYVTPGDSETAPVVTVTHRNYYERIHALGPNYNLVISDLRMEDAGDYKADINTQADPYTTTKRYNLQIYRRLGKPKITQSLMASVNSTCNVTLTCSVEKEEKNVTYNWSPLGEEGNVLQIFQTPEDQELTYTCTAQNPVSNNSDSISARQLCAGNQLCPSLLVSLRDHSEELQGLNVGHIL

SEQ ID NO: 773890 - protein, 51 aa, Homo sapiens
SSIPAVLKVLCLASQAHYRLQRSNDLLRRKLRRQEALRSCTSSTCVILREY

SEQ ID NO: 773891 - protein, 111 aa, Homo sapiens
MLPDLELYYKATVTKTAWYWYQNRDIDQWNSTEPSEVIPHIYNHLIFDKPDKNKKWGKDSLFNKWCWENWLAIRRNLKLDALLTPYTKINSRWLKDLNVRPKTIKTLEENL

SEQ ID NO: 773892 - protein, 89 aa, Homo sapiens
RGKANCQTETRDKEKQSEGSRQTEKRRPTEKGKDAQRKRRKDRKTAGWENTDSVVDIRPGLKELRSGEVKAGRAQSAIQIESWMYTASA

SEQ ID NO: 773893 - protein, 263 aa, Homo sapiens
ESAGPPVAAPSRFRTKRCGQATGPAGNIMAEKVNNFPPLPKFIPLKPCFYQDFEADIPPQHVSMTKRLYYLWMLNSVTLAVNLVGCLAWLIGGGGATNFGLAFLWLILFTPCSYVCWFRPIYKAFKTDSSFSFMAFFFTFMAQLVISIIQAVGIPGWGVCGWIATISFFGTNIGSAVVMLIPTVMFTVMAVFSFIALSMVHKFYRGSGGSFSKAQEEWTTGAWKNPHVQQAAQNAAMGAAQGAMNQPQTQYSATPNYTYSNEM

SEQ ID NO: 773894 - protein, 172 aa, Homo sapiens
MFLPRLRGRYSSPACQHDQAPLLPLDVTDSSFSFMAFFFTFMAQLVISIIQAVGIPGWGVCPTLASSCSGWIATISFFGTNIGSAVVMLIPTVMFTVMAVFSFIALSMVHKFYRGSGGSFSKAQEEWTTGAWKNPHVQQAAQNAAMGAAQGAMNQPQTQYSATPNYTYSNEM

SEQ ID NO: 773895 - protein, 279 aa, Homo sapiens
RPAPRRIARVQRSSAQRCGLSAAERPRQFRTKRCGQATGPAGNIMAEKVNNFPPLPKFIPLKPCFYQDFEADIPPQHVSMTKRLYYLWMLNSVTLAVNLVGCLAWLIGGGGATNFGLAFLWLILFTPCSYVCWFRPIYKAFKTDSSFSFMAFFFTFMAQLVISIIQAVGIPGWGVCGWIATISFFGTNIGSAVVMLIPTVMFTVMAVFSFIALSMVHKFYRGSGGSFSKAQEEWTTGAWKNPHVQQAAQNAAMGAAQGAMNQPQTQYSATPNYTYSNEM

SEQ ID NO: 773896 - protein, 279 aa, Homo sapiens; identical to SEQ ID NO: 773895

SEQ ID NO: 773897 - protein, 111 aa, Homo sapiens
MNSCSVAQAGVQWCDLSPRQPPSPGFKRFLCLSLPSSWDCRRPPPCLANFCIFSRDRFHHVGQAGLEPLTSSDPPALPFSWCRCCSLFLELDVPQLAVELPEPMCLSLVTE

SEQ ID NO: 773898 - protein, 279 aa, Homo sapiens; identical to SEQ ID NO: 773895

SEQ ID NO: 773899 - protein, 168 aa, Homo sapiens
MHLNLEGLGGLEGREALALCPGDGSHLLCRRTDSSFSFMAFFFTFMAQLVISIIQAVGIPGWGVCGWIATISFFGTNIGSAVVMLIPTVMFTVMAVFSFIALSMVHKFYRGSGGSFSKAQEEWTTGAWKNPHVQQAAQNAAMGAAQGAMNQPQTQYSATPNYTYSNEM

SEQ ID NO: 773900 - protein, 328 aa, Homo sapiens
ESAGPPVAAPSRFRTKRCGQATGPAGNIMAEKVNNFPPLPKFIPLKPCFYQDFEADIPPQHVSMTKRLYYLWMLNSVTLAVNLVGCLAWLIGGGGATNFGLAFLWLILFTPCSYVCWFRPIYKAFKTDSSFSFMAFFFTFMAQLVISIIQAVGIPGWGVCGWIATISFFGTNIGSAVVMLIPTVMFTVMAVFSFIALSMVHKFYRGSGGSFSKAQEEWTTGAWKNPHVQQAARLSIPPPPITRTPMRCEPATPTRWQSWGHWDRGLKPHRHLWLPSRVPPSLFSFPTLYKGPELYIYIYMYMSVPQPPPFRFCSWHSAVGCTWSCPVR

SEQ ID NO: 773901 - protein, 279 aa, Homo sapiens; identical to SEQ ID NO: 773895

SEQ ID NO: 773902 - protein, 106 aa, Homo sapiens
MMLLWNESEHSEVAKHGGKSKGCGADTQVQIPAPPCASCLPLSKLLTHSDAQFSHLQDGGNSGKLLMVLFEQLNESQCTKHQAGCSARSQVLTGGKLLRLLAKIYP

SEQ ID NO: 773903 - protein, 414 aa, Homo sapiens
CSLRSQCRAPAAPRLPARRTSGSRGAPSPQRRLPARAASDRRPRAATGRGDRAAACGRGAGQRWGLRLLSPEVPGSLRQDARGEAAEAAPTSRRTGRRAGMGIGRSEGGRRGAALGVLLALGAALLAVGSASEYDYVSFQSDIGPYQSGRFYTKPPQCVDIPADLRLCHNVGYKKMVLPNLLEHETMAEVKQQASSWVPLLNKNCHAGTQVFLCSLFAPVCLDRPIYPCRWLCEAVRDSCEPVMQFFGFYWPEMLKCDKFPEGDVCIAMTPPNATEASKPQGTTVCPPCDNELKSEAIIEHLCASEFALRMKIKEVKKENGDKKIVPKKKKPLKLGPIKKKDLKKLVLYLKNGADCPCHQLDNLSHHFLIMGRKVKSQYLLTAIHKWDKKNKEFKNFMKKMKNHECPTFQSVFK

SEQ ID NO: 773904 - protein, 321 aa, Homo sapiens
MTYHLYPAIFDVEESTSAPWTGCCCTQQPHPCQEAFRLCGFAIYPAPQVSTAVVEPYNSILTTHTTLEHSDCAFMVDNEAIYDICRRNLDIERPTYTNLNRLISQIVSSITASLRFDGALNVDLTEFQTNLVPYPRIHFPLVTYAPIISAEKAYHEQLSVAEITSSCFEPNSQMVKCDPRHGKYMACCMLYRGDVVPKDVNVAIAAIKTKRTIQFVDWCPTGFKVGINYQPPTVVPGGDLAKVQRAVCMLSNTTAIAEAWARLDHKFDLMYAKRAFVHWYVGEGMEEGEFSEAREDLAALEKDYEEVGTDSFEEENEGEEF

SEQ ID NO: 773905 - protein, 473 aa, Homo sapiens
GGCIWSSRGGQAQLRGARARTAAAMRECISVHVGQAGVQIGNACWELFCLEHGIQADGTFDAQASKINDDDSFTTFFSETGNGKHVPRAVMIDLEPTVVDEVRAGTYRQLFHPEQLITGKEDAANNYARGHYTVGKESIDLVLDRIRKLTDACSGLQGFLIFHSFGGGTGSGFTSLLMERLSLDYGKKSKLEFAIYPAPQVSTAVVEPYNSILTTHTTLEHSDCAFMVDNEAIYDICRRNLDIERPTYTNLNRLISQIVSSITASLRFDGALNVDLTEFQTNLVPYPRIHFPLVTYAPIISAEKAYHEQLSVAEITSSCFEPNSQMVKCDPRHGKYMACCMLYRGDVVPKDVNVAIAAIKTKRTIQFVDWCPTGFKVGINYQPPTVVPGGDLAKVQRAVCMLSNTTAIAEAWARLDHKFDLMYAKRAFVHWYVGEGMEEGEFSEAREDLAALEKDYEEVGTDSFEEENEGEEF

SEQ ID NO: 773906 - protein, 121 aa, Homo sapiens
MSHPEFILWLTCIFFCGSSSFCVPQVGINYQPPTVVPGGDLAKVQRAVCMLSNTTAIAEAWARLDHKFDLMYAKRAFVHWYVGEGMEEGEFSEAREDLAALEKDYEEVGTDSFEEENEGEE

SEQ ID NO: 773907 - protein, 131 aa, Homo sapiens
MAKRPGSPGSREMGLLTFRDVVIEFSLEEWQCLDHAQQNLYRDVMLENYRNLVSLGIAVSKPDLITCLEQNKEPWNIKRNEMVTKHPVMCSHFTQDLPPELGIKDSLQKVIPRRYGKSGHDNLQVKTCKSM

SEQ ID NO: 773908 - protein, 729 aa, Homo sapiens
FFKLRNSNLLARRRGIPECILLVTQRITKYPVLVERILQYTKERTEEHKDLRKALCLIKDMIATVDLKVNEYEKNQKWLEILNKIENKTYTKLKNGHVFRKQALMSEERTLLYDGLVYWKTATGRFKDILALLLTDVLLFLQEKDQKYIFAAVDQKPSVISLQKLIAREVANEERGMFLISASSAGPEMYEIHTNSKEERNNWMRRIQQAVESCPEEKGGRTSESDEDKRKAEARVAKIQQCQEILTNQDQQICAYLEEKLHIYAELGELSGFEDVHLEPHLLIKPDPGEPPQAASLLAAALKEAESLQVAVKASQMGAVSQSCEDSCGDSVLADTLSSHDVPGSPTASLVTGGREGRGCSDVDPGIQGVVTDLAVSDAGEKVECRNFPGSSQSEIIQAIQNLTRLLYSLQAALTIQDSHIEIHRLVLQQQEGLSLGHSILRGGPLQDQKSRDADRQHEELANVHQLQHQLQQEQRRWLRRCEQQQRAQATRESWLQERERECQSQEELLLRSRGELDLQLQEYQHSLERLREGQRLVEREQARMRAQQSLLGHWKHGRQRSLPAVLLPGGPEVMELNRSESLCHENSFFINEALVQMSFNTFNKLNPSVIHQDATYPTTQSHSDLVRTSEHQVDLKVDPSQPSNVSHKLWTAAGSGHQILPFHESSKDSCKNDLDTSHTESPTPHDSNSHRPQLQAFITEAKLNLPTRTMTRQDGETGDGAKENIVYL

SEQ ID NO: 773909 - protein, 711 aa, Homo sapiens
FFKLRNSNLLARRRGIPECILLVTQRITKYPVLVERILQYTKERTEEHKDLRKALCLIKDMIATVDLKVNEYEKNQKWLEILNKIENKTYTKLKNGHVFRKQALMSEERTLLYDGLVYWKTATGRFKDILALLLTDVLLFLQEKDQKYIFAAVDQKPSVISLQKLIAREVANEERGMFLISASSAGPEMYEIHTNSKEERNNWMRRIQQAVESCPEEKGGRTSESDEDKRKAEARVAKIQQCQEILTNQDQQICAYLEEKLHIYAELGELSGFEDVHLEPHLLIKPDPGEPPQAASLLAAALKEALVTGGREGRGCSDVDPGIQGVVTDLAVSDAGEKVECRNFPGSSQSEIIQAIQNLTRLLYSLQAALTIQDSHIEIHRLVLQQQEGLSLGHSILRGGPLQDQKSRDADRQHEELANVHQLQHQLQQEQRRWLRRCEQQQRAQATRESWLQERERECQSQEELLLRSRGELDLQLQEYQHSLERLREGQRLVEREQARMRAQQSLLGHWKHGRQRSLPAVLLPGGPEVMELNRSESLCHENSFFINEALVQMSFNTFNKLNPSVIHQDATYPTTQSHSDLVRTSEHQVDLKVDPSQPSNVSHKLWTAAGSGHQILPFHESSKDSCKNGSSMTKCSCTLTSPPGLWTGTTSTLKDLDTSHTESPTPHDSNSHRPQLQAFITEAKLNLPTRTMTRQDGETGDGAKENIVYL

SEQ ID NO: 773910 - protein, 729 aa, Homo sapiens; identical to SEQ ID NO: 773908

SEQ ID NO: 773911 - protein, 221 aa, Homo sapiens
DSDSPFNYSWPSFPKMKIRRRTSKQDRSFDILKKSKPPSTLLAAGRLSDMLNGGDEVYANCMVIDQVGDLDISYINIEGITATTSPESRGCTLWPQSSKHTLPTETSPSVYPLSENVEGTHLEHQLPLPGKNPSLQFFKDKTAHSSLSLLPGYTFPQRKTGISCLPSSMGLCVRNQEIFSSCSEILVCILVSINILYLIILLCNFNIMCRTIVKHSFHTDI

SEQ ID NO: 773912 - protein, 675 aa, Homo sapiens
FFKLRNSNLLARRRGIPECILLVTQRITKYPVLVERILQYTKERTEEHKDLRKALCLIKDMIATVDLKVNEYEKNQKWLEILNKIENKTYTKLKNGHVFRKQALMSEERTLLYDGLVYWKTATGRFKDILALLLTDVLLFLQEKDQKYIFAAVDQKPSVISLQKLIAREVANEERGMFLISASSAGPEMYEIHTNSKEERNNWMRRIQQAVESCPEEKGGRTSESDEDKRKAEARVAKIQQCQEILTNQDQQICAYLEEKLHIYAELGELSGFEDVHLEPHLLIKPDPGEPPQAASLLAAALKEAESLQVAVKASQMGAVSQSCEDSCGDSVLADTLSSHDVPGSPTASLVTGGREGRGCSDVDPGIQGVVTDLAVSDAGEKVECRNFPGSSQSEIIQAIQNLTRLLYSLQAALTIQDSHIEIHRLVLQQQEGLSLGHSILRGGPLQDQKSRDADRQHEELANVHQLQHQLQQEQRRWLRRCEQQQRAQATRESWLQERERECQSQEELLLRSRGELDLQLQEYQHSLERLREGQRLVEREQARMRAQQSLLGHWKHGRQRSLPAVLLPGGPEVMELNRSESLCHENSFFINEALVQMSFNTFNKLNPSVIHQDATYPTTQSHSDLVRTSEHQVDLKVDPSQPSNVSHKLWTAAGSGHQILPFHESSKDSCKNGN

SEQ ID NO: 773913 - protein, 755 aa, Homo sapiens
FFKLRNSNLLARRRGIPECILLVTQRITKYPVLVERILQYTKERTEEHKDLRKALCLIKDMIATVDLKVNEYEKNQKWLEILNKIENKTYTKLKNGHVFRKQALMSEERTLLYDGLVYWKTATGRFKDILALLLTDVLLFLQEKDQKYIFAAVDQKPSVISLQKLIAREVANEERGMFLISASSAGPEMYEIHTNSKEERNNWMRRIQQAVESCPEEKGGRTSESDEDKRKAEARVAKIQQCQEILTNQDQQICAYLEEKLHIYAELGELSGFEDVHLEPHLLIKPDPGEPPQAASLLAAALKEAESLQVAVKASQMGAVSQSCEDSCGDSVLADTLSSHDVPGSPTASLVTGGREGRGCSDVDPGIQGVVTDLAVSDAGEKVECRNFPGSSQSEIIQAIQNLTRLLYSLQAALTIQDSHIEIHRLVLQQQEGLSLGHSILRGGPLQDQKSRDADRQHEELANVHQLQHQLQQEQRRWLRRCEQQQRAQATRESWLQERERECQSQEELLLRSRGELDLQLQEYQHSLERLREGQRLVEREQARMRAQQSLLGHWKHGRQRSLPAVLLPGGPEVMELNRSESLCHENSFFINEALVQMSFNTFNKLNPSVIHQDATYPTTQSHSDLVRTSEHQVDLKVDPSQPSNVSHKLWTAAGSGHQILPFHESSKDSCKNGSSMTKCSCTLTSPPGLWTGTTSTLKDLDTSHTESPTPHDSNSHRPQLQAFITEAKLNLPTRTMTRQDGETGDGAKENIVYL

SEQ ID NO: 773914 - protein, 319 aa, Homo sapiens
DSDSPFNYSWPSFPKMKIRRRTSKQDRSFDILKKSKPPSTLLAAGRLSDMLNGGDEVYANCMVIDQVGDLDISYINIEGITATTSPESRGCTLWPQSSKHTLPTETSPSVYPLSENVEGTAHTEAQQSFMSPSSSCASNLNLSFGWHGFEKEQSHLKKRSSSLDALDADSEGEGHSEPSHICYTPGSQSSSRTGIPSGDELDSFETNTEPDFNISRAESLPLSSNLQSKESLLSGVRSRSYSCSSPKISLGKTRLVRELTVCSSSEEQRAYSLSEPPRENRIQEEEWDKYIIPAKSESEKYKVSRTFSFLMNRMTSPRN

SEQ ID NO: 773915 - protein, 399 aa, Homo sapiens
MKRTHLFIVGIYFLSSCRAEEGLNFPTYDGKDRVVSLSEKNFKQVLKKYDLLCLYYHEPVSSDKVTQKQFQLKEIVLELVAQVLEHKAIGFVMVDAKKEAKLAKKLGFDEEGSLYILKGDRTIEFDGEFAADVLVEFLLDLIEDPVEIISSKLEVQAFERIEDYIKLIGFFKSEDSEYYKAFEEAAEHFQPYIKFFATFDKGVAKKLSLKMNEVDFYEPFMDEPIAIPNKPYTEEELVEFVKEHQRPTLRRLRPEEMFETWEDDLNGIHIVAFAEKSDPDGYEFLEILKQVARDNTDNPDLSILWIDPDDFPLLVAYWEKTFKIDLFRPQIGVVNVTDADSVWMEIPDDDDLPTAEELEDWIEDVLSGKINTEDDDEDDDDDDNSDEEDNDDSDDDDDE

SEQ ID NO: 773916 - protein, 212 aa, Homo sapiens
MSSWLSAGSPSSLSVVAKKLSLKMNEVDFYEPFMDEPIAIPNKPYTEEELVEFVKEHQRPTLRRLRPEEMFETWEDDLNGIHIVAFAEKSDPDGYEFLEILKQVARDNTDNPDLSILWIDPDDFPLLVAYWEKTFKIDLFRPQIGVVNVTDADSVWMEIPDDDDLPTAEELEDWIEDVLSGKINTEDDDEDDDDDDNSDEEDNDDSDDDDDE

SEQ ID NO: 773917 - protein, 431 aa, Homo sapiens
MKRTHLFIVGIYFLSSCRAEEGLNFPTYDGKDRVVSLSEKNFKQVLKKYDLLCLYYHEPVSSDKVTQKQFQLKEIVLELVAQVLEHKAIGFVMVDAKKEAKLAKKLGFDEEGSLYILKGDRTIEFDGEFAADVLVEFLLDLIEDPVEIISSKLEVQAFERIEDYIKLIGFFKSEDSEYYKAFEEAAEHFQPYIKFFATFDKGVLWLTPVIPTLWEADGGGLHEPVELETSLGNMVAKKLSLKMNEVDFYEPFMDEPIAIPNKPYTEEELVEFVKEHQRPTLRRLRPEEMFETWEDDLNGIHIVAFAEKSDPDGYEFLEILKQVARDNTDNPDLSILWIDPDDFPLLVAYWEKTFKIDLFRPQIGVVNVTDADSVWMEIPDDDDLPTAEELEDWIEDVLSGKINTEDDDEDDDDDDNSDEEDNDDSDDDDDE

SEQ ID NO: 773918 - protein, 431 aa, Homo sapiens; identical to SEQ ID NO: 773917

SEQ ID NO: 773919 - protein, 118 aa, Homo sapiens
RACVRACVCVCASALCPEPTIPELAGPKEVKSHFSAPGRAKKRENQPVCSLLGSTRPLTVFCPLFCTRHIWERETKLLSLFHHLFSHSLCVRSSIIQQMPFQMQQSHLAGTGEKLFPC

SEQ ID NO: 773920 - protein, 50 aa, Homo sapiens
AHEGRITTLRKKKKGKDGAGAKEADKGTSKAKAEEDEEAERILPGILNDT

SEQ ID NO: 773921 - protein, 109 aa, Homo sapiens
KTKPKPLSWLYHFFHPFHTVPYAEALFERVVCGRFLTFSSFHSSQASIPSLHGDCSCQLYQNFHLAAAVVTSVVILSFHDLGTMAFTLLLEMLFPISCHSSGFTASQSP

SEQ ID NO: 773922 - protein, 135 aa, Homo sapiens
NSYSSLKFQEWWLILDLHRQTQTPGFRNTFTPFLVSPIRVLISVCMIIKYLSFLLECKLHEGRTLSLLDYGFLMPKSLAGASVNHQHYLSLAMRRGLFQHHVGLLVLFSHKQPYAVSSIVLIYRGGSDTQRGRSP

SEQ ID NO: 773923 - protein, 95 aa, Homo sapiens
CRSMHMYTHRFTSVHTCLHTCRYMHTHTHRYTSTHTHLHAHAHRYTSTHARLQAHTQVHEHTHASTHTHRYMSSHTHLHAHAHRYTSTHTPPRTQ

SEQ ID NO: 773924 - protein, 147 aa, Homo sapiens
RELLKIESRRVIRTWSDLCFGGLTFTAVRSGYEGERTEDGVATKKTVIQVTEEAGLTRTGELDCTSISLADATRPTEPLTIAKNPFLINKKSGCPHGRLLISTSLIYWLYIILSQTSTYGHKGRKKEPRKKNGRYTQDKQMSEEMIF

SEQ ID NO: 773925 - protein, 227 aa, Homo sapiens
MKDSGDSKDQQLMVALRVRPISVAELEEGATLIAHKVDEQMVVLMDPMEDPDDILRAHRSREKSYLFDVAFDFTATQEMVYQATTKSLIEGVISGYNATVFAYGPTGCGKTYTMLGTDQEPGIYVQTLNDLFRAIEETSNDMEYEVSMSYLEIMQLLMKGNRQRTQEPTAANQTSSRSHAVLQVTVRQRSRVKNILQEVRQGRLFMIDLAGSERASKTQNRGQRIEG

SEQ ID NO: 773926 - protein, 244 aa, Homo sapiens
RLSWSRALWIAPPPAAIMKDSGDSKDQQLMVALRVRPISVAELEEGATLIAHKVDEQMVVLMDPMEDPDDILRAHRSREKSYLFDVAFDFTATQEMVYQATTKSLIEGVISGYNATVFAYGPTGCGKTYTMLGTDQEPGIYVQTLNDLFRAIEETSNDMEYEVSMSYLEIMQLLMKGNRQRTQEPTAANQTSSRSHAVLQVTVRQRSRVKNILQEVRQGRLFMIDLAGSERASKTQNRGQRIEG

SEQ ID NO: 773927 - protein, 199 aa, Homo sapiens
MKDSGDSKDQQLMVALRVRPISVAELEEGATLIAHKVDEQMVVLMDPMEDPDDILRAHRSREKSYLFDVAFDFTATQEMVYQATTKSLIEGVISGYNATVFAYGPTGCGKTYTMLGTDQEPGIYVQTLNDLFRAIEETSNDMEYEVSMSYLEIYNEMIRDLLNPSLGYLELREDSKGVIQVAGITEVSTINAKEASFVW

SEQ ID NO: 773928 - protein, 205 aa, Homo sapiens
AAVLPADPVLAAVRAGAGEFRACPRAVRGEAGPGVGARPPALRLAPPAPLPEGKVAAARGRPGQRFHSAELEIGIQPSVGSGGMENCTVPHRFTSCHAVALASAKGAFRRFRQPPRMAAPDLAHGGHASRDSVCLHEEQTQAAGWWLAGLINLFQDAVTFDDVAVDFTQEEWTLLDPISENLYRDVMLENYENLASARTSPVPTQ

SEQ ID NO: 773929 - protein, 172 aa, Homo sapiens
CDPFALVALPGPSASGPRCSAWPQWTFTCARDVPHLLPPGIWVSQLYSRVLWFMCSGSGALPSEAASASLRFGLLRLCCPPPGTSGAPRAPSASAASRWALAALATSRGLPQPERRGRLGRRGVLTLVPLESPPCYEDCPLASRCSLSTDDSALPGVIGQRLLSETSLTGPQ

SEQ ID NO: 773930 - protein, 172 aa, Homo sapiens; identical to SEQ ID NO: 773929

SEQ ID NO: 773931 - protein, 180 aa, Homo sapiens [sequence omitted]

SEQ ID NO: 773932 - protein, 55 aa, Homo sapiens
MSAQGQFRLTTGSSSGSPPTSPSDPGQMPPLHPRSYFLNRELLDSVPCKDPTSSA

SEQ ID NO: 773933 - protein, 235 aa, Homo sapiens
SLCRGAGAGSVRRSPRGRTFPPSQVTKCGSRAWQKLLRPRALAWPRPVGCVLVSSCPQALPVPTVRPASLPGPAAGWRQLRRTPRSRGLGSRFFPDLLLSRVPPRPAVGTRPHPKPIAGLRAPGDPGWPCLSVGPGMRHSRQEGAPPRPGLSLEPRSCRRGAFCGCPHTTPGKGWGRGTLHDMAAGRSHFFETSVNWTRPTSHTLGEPRERLWPGGLQGVGSGGGERPQPFPVPP

SEQ ID NO: 773934 - protein, 134 aa, Homo sapiens
MRWVRARCLLGCARAPLPACPPARLLACWGCSVGLTGERARRSSVRNHIDTIVETAAQVTAPRALHQTLGSRDYFSLFRSIQLFADCKKMFLWLFLILSALISSTNADSDISVEICNVCSCVSVENVLYVNCEK

SEQ ID NO: 773935 - protein, 329 aa, Homo sapiens
SFDEVTKDYMVISWKPPLDDGGSKITNYIIEKKEVGKDVWMPVTSASAKTTCKVSKLLEGKDYIFRIHAENLYGISDPLVSDSMKAKDRFRVPDAPDQPIVTEVTKDSALVTWNKPHDGGKPITNYILEKRETMSKRWARVTKDPIHPYTKFRVPDLLEGCQYEFRVSAENEIGIGDPSPPSKPVFAKDPIAKPSPPVNPEAIDTTCNSVDLTWQPPRHDGGSKILGYIVEYQKVGDEEWRRANHTPESCPETKYKVTGLRDGQTYKFRVLAVNAAGESDPAHVPEPVLVKDRLEPPELILDANMAREQHIKVGDTLRLSAIIKGVPFP

SEQ ID NO: 773936 - protein, 67 aa, Homo sapiens
LVHLDAETRHRRVQGPAWLLKPLELGMSLCQVHLVLPSLLCLKPTGAPLEAETSPGYTARELEPGGN

SEQ ID NO: 773937 - protein, 76 aa, Homo sapiens
ALSHLNKKMSFCKPGKEPSPAIRSAGTLNLDFPASRTRLKTDTAQIASEAPWAIMDAELRVTLTVEDRNVRPLSPS

SEQ ID NO: 773938 - protein, 217 aa, Homo sapiens
MASVASCDSRPSSDELPGDPSSQEEDEDYDFEDRVSDSGSYSSASSDYDDLEPEWLDSVQKNGELFYLELSEDEEESLLPETPTVNHVRFSENEIIIEDDYKERKKYEPKLKQFTKILRRKRLLPKRCNKKNSNDNGPVSILKHQSNQKTGVIVQQRYKDVNVYVNPKKLTVIKAKEQLKLLEVLVGIIHQTKWSWRRTGKQGDGERLVVHGLLPGG

SEQ ID NO: 773939 - protein, 82 aa, Homo sapiens
REWTRGCVPGRHHLRAVWQRLWKETGLRRLVNAEGNRLTGKEAIHFFKEEGSERRNVDPWGFHSCGKYENLWFAKLLHSLCY

SEQ ID NO: 773940 - protein, 31 aa, Homo sapiens
MSRAPLARTKPGRPRETSVHEGFLLDSAAAA

SEQ ID NO: 773941 - protein, 106 aa, Homo sapiens
MVSPGPRRDHSTYCDFCFRTAFPFARNPPEVRHCRAPAEQLGVAAPDPAVGRARVPAAPGRALRARTRPRRPAHLPPTPGLTRGQPRGAGCVEAEPRSPPSSRTRP

SEQ ID NO: 773942 - protein, 116 aa, Homo sapiens
MSLHLLAKSSGALVISSVQSPTGSSAAEETASLGARTCDDDLTEQQLRSTSEEQSEEAEGAIKPTAVAEDDEKDTSERDNSEGKNSNKDSGIITPEKELKVSVAGGTQPLLLAKEE

SEQ ID NO: 773943 - protein, 97 aa, Homo sapiens
KVKLNLVQHVRSVKHQQTEGLRKLQLHQQGLAPEEDNLSEIFFVKDCPPNELETASLGARTCDDDLTEQQLRSTSGNGSYSFSKYFLVLNELLLLLS

SEQ ID NO: 773944 - protein, 168 aa, Homo sapiens
AAAGSACAMGLPTLEFSDSYLDSPDFRERLQCHEIELERTNKFIKELIKDGSLLIGALRNLSMAVQKFSQSLQDFQFECIGDAETDDEISIAQSLKEFARLLIAVEEERRRLIQNANDVLIAPLEKFRKEQIGAAKVSVTFYYSSVILLIIKDDIISDVNIFEIRMTF

SEQ ID NO: 773945 - protein, 215 aa, Homo sapiens
NVPVSGIRGSHHRKHVAASDIQGSYCMKHVPASNIPGSHHMKHVPASSILGSHHMKHVAESGIWGSHHGKHQAASGIRVPITGSTCLCLAADGIQGSHHGKHVAASGIPGSHHRKNVPVSGIRGSHHRKHVAASDIWGSYCMKHVPASSIPGSHHRKHVAASGCVWYLGFPSWEAHACIWYTGFIYFPALILYLNPSSISYEFLFSSICTLLSTS

SEQ ID NO: 773946 - protein, 157 aa, Homo sapiens
MWLVGENDSQHKRPCSACAVLSLILSTSASWRASTAAPLGPCSPVLASASSVTSPFLSYKHQRRSESLQGDGPLSSKHCEYVALWPKVVFVVVNVDTASACASCHRQLCRLDVRSQTSMRLPKGLAFGLRLLQSQGPSREVVYLVTIFDSNSAECWC

SEQ ID NO: 773947 - protein, 95 aa, Homo sapiens
MWNKNSGPTKHRYKEGCNTVALHALPVEGSYPTRREAAAGGSRGDRTDRAVNMPPSMGLQMVGLKELLAHGNTPSEVSGLRTPVWAPPCSPQCDM

SEQ ID NO: 773948 - protein, 196 aa, Homo sapiens
LRSWRRGTTARATMGDQRLQDWLRSPGMDSKPWYCNKRPSKCFAKCKHRRLRFPPMDTQNWVFVKEGMDDFRYGCPSPEDTLVCRRDEFLLPKISLRGPQADPKSGQKKLLKKAALFSKLSPAQLARKAFVEQVEAQLMAKHPLAMYPNLGEDMPPDLLLQVLKHLDPERELEDAWACCETQEKTTEVPTEPGKHP

SEQ ID NO: 773949 - protein, 216 aa, Homo sapiens
MTEYKLVVVGAGGVGKSALTIQLIQNHFVDEYDPTIEDSYRKQVVIDGETCLLDILDTAGQEEYSAMRDQYMRTGEGFLCVFAINNTKSFEDIHQYREQIKRVKDSDDVPMVLVGNKCDLAARTVESRQAQDLARSYGIPYIETSAKTRQGSRSGSSSSSGTLWDPRDPCDPAAPRAGVEDAFYTLVREIRQHKLRKLNPPDESGPGCMSCKCVLS

SEQ ID NO: 773950 - protein, 189 aa, Homo sapiens
MTEYKLVVVGAGGVGKSALTIQLIQNHFVDEYDPTIEDSYRKQVVIDGETCLLDILDTAGQEEYSAMRDQYMRTGEGFLCVFAINNTKSFEDIHQYREQIKRVKDSDDVPMVLVGNKCDLAARTVESRQAQDLARSYGIPYIETSAKTRQGVEDAFYTLVREIRQHKLRKLNPPDESGPGCMSCKCVLS

SEQ ID NO: 773951 - protein, 189 aa, Homo sapiens; identical to SEQ ID NO: 773950

SEQ ID NO: 773952 - protein, 189 aa, Homo sapiens; identical to SEQ ID NO: 773950

SEQ ID NO: 773953 - protein, 189 aa, Homo sapiens; identical to SEQ ID NO: 773950

SEQ ID NO: 773954 - protein, 231 aa, Homo sapiens
MTEYKLVVVGAGGVGKSALTIQLIQNHFVDEYDPTIEDSYRKQVVIDGETCLLDILDTAGQEEYSAMRDQYMRTGEGFLCVFAINNTKSFEDIHQYREQIKRVKDSDDVPMVLVGNKCDLAARTVESRQAQDLARSYGIPYIETSAKTRQPGEVAGESGASGQARLDPTAGSPSPRQAATGRSLLIPSLLSQGVEDAFYTLVREIRQHKLRKLNPPDESGPGCMSCKCVLS

SEQ ID NO: 773955 - protein, 102 aa, Homo sapiens
MRVALGTFEMARVQLPVCVVGLGKWLVESGASGQARLDPTAGSPSPRQAATGRSLLIPSLLSQGVEDAFYTLVREIRQHKLRKLNPPDESGPGCMSCKCVLS

SEQ ID NO: 773956 - protein, 151 aa, Homo sapiens
RPRPRHARAPPIQHHRSRTRPGASAPVPFPSPGLPRRFSAPSCRSVPASQELLCLLQLSVAERCPRFPAGGAGRCPGLPSPRRRLVRSRRSANTCRRHQRRGACRLALACPGTPWRAPPWPDLFWRTVTSALGRLPLAFLPTQQLLIWVRG

SEQ ID NO: 773957 - protein, 189 aa, Homo sapiens; identical to SEQ ID NO: 773950

SEQ ID NO: 773958 - protein, 189 aa, Homo sapiens; identical to SEQ ID NO: 773950

SEQ ID NO: 773959 - protein, 189 aa, Homo sapiens; identical to SEQ ID NO: 773950

SEQ ID NO: 773960 - protein, 58 aa, Homo sapiens
TTRTKYHRLRGSYNRSYFFTVLESGKSKVKVPAASVPGKDSLREKTAAFSLCAHGDCP

SEQ ID NO: 773961 - protein, 181 aa, Homo sapiens
ANGEIRLTTCMAHKICGRSRQLDQCDGRSQRGGTIYILGRPYSDLLKESRRSLRLSFVENSGVCLTSGDAELEIPVLSRLPKQPSRPPLLTSVLGTREKQILPQTCLGPHSALSSWPAPTGHNFRSNQYPHISHCKGKFESFSGDSLDVAVLSPLTGKKELMSTLTFQGPPGAPRHFCGLL

SEQ ID NO: 773962 - protein, 100 aa, Homo sapiens
SASSASPRVCCPRHPVGAVHGERIMAIEGGERTCGVHELICIRKVSPEAVGFLSAVGVFIILMLLLFLYINKKFCFENVGGFPDLGSEYSTRKNSQDKIC

SEQ ID NO: 773963 - protein, 117 aa, Homo sapiens
IQQRQPCPQEPPQSSNELVVFRQTLQGVGGASLDLSCAEPHHKVSNENVLSLPRVVAHHQPSAVRVSQFAYLDRFSHRADLVDLQQQTARDLLLKGLGNPLGVGDCQVIPHNLDVHP

SEQ ID NO: 773964 - protein, 74 aa, Homo sapiens
PFRTGDFFYLDNTFLLFFHIFTLLQDQKPKPHDWMSRHLAFIRVVMVLTVVDVLPPDMLESLHFGNNFKCKSLI

SEQ ID NO: 773965 - protein, 74 aa, Homo sapiens; identical to SEQ ID NO: 773964

SEQ ID NO: 773966 - protein, 185 aa, Homo sapiens
MSRAVRLPVPCPVQLGTLRNDSLEAQLHEYVKQGNYVKVKKILKKGIYVDAVNSLGQTALFVAALLGLRKFVDVLVDYGSDPNHRCFDGSTPVHAAAFSGNQWILSKLLDAGGDLRLHDERGQNPKTWALTAGKERSTQIVEFMQRCASHMQAIIQGFSYDLLKKIDSPQRLVYSPSWCGGLVQG

SEQ ID NO: 773967 - protein, 225 aa, Homo sapiens
MSRAVRLPVPCPVQLGTLRNDSLEAQLHEYVKQGNYVKVKKILKKALELPQTALRSEEEWRSKEENNRALLHPAVRRREEIGIGLGIYVDAVNSLGQTALFVAALLGLRKFVDVLVDYGSDPNHRCFDGSTPVHAAAFSGNQWILSKLLDAGGDLRLHDERGQNPKTWALTAGKERSTQIVEFMQRCASHMQAIIQGFSYDLLKKIDSPQRLVYSPSWCGGLVQG

SEQ ID NO: 773968 - protein, 155 aa, Homo sapiens
ASDVRTAHTASISPPTMASDVRTAHTASISPPTMASDVRTAHTASISPPTMASDVRTAHTASISPPTMASDVRTAHTASISPPTMASDVRTAHTASISPPTMASDVRTAHTASISPPTMASDVRIAHTASINPPTTASVCDVCSVCDVCSICNVH

SEQ ID NO: 773969 - protein, 110 aa, Homo sapiens
VHSARQHRTPEPQLFLPLARQPWCQALSEPHQEEARAGCSPSALGLWPAASSACHSPTPFPPLKTGATPAPTGQNYLKWHKTIVQQTHLFSKVFRAQTQTPPCRTHGYRG

SEQ ID NO: 773970 - protein, 236 aa, Homo sapiens
RRGPFSRFSACDLITAAGWRGASRDFFLHCSPSSFSSRLKFEERTTWLKLGSRFPKLPSEEKALTMEDSEFLAYVELLDEVEQGSVRAKASSVSLHAERTWMEKMKVEDLNVCEPASPAPEAPATSLLNDLKYSPSEEEEVTYTVINQFQQKFGAAILHIKKQNVLSVAAEGANVCRHGKLCWLQVATNCRVYLFDIFLLGSRAFHNGLQMILEDKRILKVIHDCRWLSDCLSHQY

SEQ ID NO: 773971 - protein, 61 aa, Homo sapiens
MKSRRRKAAQSLGKSICAEPGLGCFTGASGGRISPGKGTFKPRVQMPTKGTRSEGAMAPEG

SEQ ID NO: 773972 - protein, 267 aa, Homo sapiens
SGESPAVENGKWPRPCCRVRPRGWCLAQAAPRFLPTLWEERVCARFPRSTSPGPTSDRGRWAGAAGRLEGSRRHAPAARRSPGPGAGLRPPGKIELHGKPIEVEHSVPKRQRIRKLQIRNIPASFTVGDEPLVELRLNRTYPLKRNACSIFPCDSALEMFTQNEVLDSLLVQYGVVESCEQVNTDSETAVVNVTYSSKDQARQALDNLNGFQLENFTLKVAYIPDDHGRQQNPLQQTRGRRGLGAKGLLKAGVSRIRIRADTHVICL

SEQ ID NO: 773973 - protein, 149 aa, Homo sapiens
QEVFEPPHYELCTLRGTGATADFADVADDFENYHKLRRSSSKCIHDHHCGSQLSSTKGSRSNLSTRDASILTEMPTQPGKPLIPPMNRRNILVMKHNYSQDAADACDIDEIEEVPTTSHRLSRHDKAVQRFCLIGSLSKHESEYNTTRV

SEQ ID NO: 773974 - protein, 149 aa, Homo sapiens; identical to SEQ ID NO: 773973

SEQ ID NO: 773975 - protein, 79 aa, Homo sapiens
PSAGPVAGEGRRGSGTGASTWVGGCSSFQTLGEGALPKLSWHWGCAFEGDGGSRSEEDTLLTASSPSSGLCCGNGREEV

SEQ ID NO: 773976 - protein, 202 aa, Homo sapiens
FKNAVGNLAMEGGGGIPLETLKEESQSRHVLPASFEVNSLQKSNWGFLLTGLVGGTLVAVYAVATPFVTPALRKVCLPFVPATTKQIENVVKMLRCRRGSLVDIGSGDGRIVIAAAKKGFTAVGYELNPWLVWYSRYRAWREGVHGSAKFYISDLWKTYVKCVGQKEHLRNRFIILGYVLAVLKLSIMNGKYTFRKVCKSEL

SEQ ID NO: 773977 - protein, 242 aa, Homo sapiens
FKNAVGNLAMEGGGGIPLETLKEESQSRHVLPASFEVNSLQKSNWGFLLTGLVGGTLVAVYAVATPFVTPALRKVCLPFVPATTKQIENVVKMLRCRRGSLVDIGSGDGRIVIAAAKKGFTAVGYELNPWLVWYSRYRAWREGVHGSAKFYISDLWKVTFSQYSNVVIFGVPQMMLQLEKKLERELEDDARVIACRFPFPHWTPDHVTGEGIDTVWAYDASTFRGREKRPCTSMHFQLPIQA

SEQ ID NO: 773978 - protein, 233 aa, Homo sapiens
MEGGGGIPLETLKEESQSRHVLPASFEVNSLQKSNWGFLLTGLVGGTLVAVYAVATPFVTPALRKVCLPFVPATTKQIENVVKMLRCRRGSLVDIGSGDGRIVIAAAKKGFTAVGYELNPWLVWYSRYRAWREGVHGSAKFYISDLWKVTFSQYSNVVIFGVPQMMLQLEKKLERELEDDARVIACRFPFPHWTPDHVTGEGIDTVWAYDASTFRGREKRPCTSMHFQLPIQA

SEQ ID NO: 773979 - protein, 309 aa, Homo sapiens
FKNAVGNLAMEGGGGIPLETLKEESQSRHVLPASFEVNSLQKSNWGFLLTGLVGGTLVAVYAVATPFVTPALRKVCLPFVPATTKQIENVVKMLRCRRGSLVDIGSGDGRIVIFIAYYYLFTKPSSQTLSFHCCCASPLMERCSGFSAMFVRPPRGLADLESIMEVFQVNLNVYSDIEVIAAAKKGFTAVGYELNPWLVWYSRYRAWREGVHGSAKFYISDLWKVTFSQYSNVVIFGVPQMMLQLEKKLERELEDDARVIACRFPFPHWTPDHVTGEGIDTVWAYDASTFRGREKRPCTSMHFQLPIQA

SEQ ID NO: 773980 - protein, 182 aa, Homo sapiens
FKNAVGNLAMEGGGGIPLETLKEESQSRHVLPASFEVNSLQKSNWGFLLTGLVGGTLVAVYAVATPFVTPALRKVCLPFVPATTKQIENVVKMLRCRRGSLVDIGSGDGRIVIAAAKKGFTAVGYELNPWLVWYSRYRAWREGVHGSAKFYISDLWKVCKAENGPREIQGKILLFKISMTEN

SEQ ID NO: 773981 - protein, 242 aa, Homo sapiens; identical to SEQ ID NO: 773977

SEQ ID NO: 773982 - protein, 216 aa, Homo sapiens
MEGGGGIPLETLKEESQSRHVLPASFEVNSLQKSNWGFLLTGLVGGTLVAVYAVATPFVTPALRKVCLPFVPATTKQIENVVKMLRCRRGSLVDIGSGDGRIVIAAAKKGFTAVGYELNPWLVWYSRYRAWREGVHGSAKFYISDLWKMLQLEKKLERELEDDARVIACRFPFPHWTPDHVTGEGIDTVWAYDASTFRGREKRPCTSMHFQLPIQA

SEQ ID NO: 773983 - protein, 199 aa, Homo sapiens
MAKSAEVKLAIFGRAGVGKSALVVRFLTKRFIWEYDPTLESTYRHQATIDDEVVSMEILDTAGQEDTIQREGHMRWGEGFVLVYDITDRGSFEEVLPLKNILDEIKKPKNVTLILVGNKADLDHSRQVSTEEGEKLATELACAFYECSACTGEGNITEIFYELCREVRRRRMVQGKTRRRSSTTHVKQAINKMLTKISS

SEQ ID NO: 773984 - protein, 144 aa, Homo sapiens
MEILDTAGQEDTIQREGHMRWGEGFVLVYDITDRGSFEEVLPLKNILDEIKKPKNVTLILVGNKADLDHSRQVSTEEGEKLATELACAFYECSACTGEGNITEIFYELCREVRRRRMVQGKTRRRSSTTHVKQAINKMLTKISS

SEQ ID NO: 773985 - protein, 199 aa, Homo sapiens; identical to SEQ ID NO: 773983

SEQ ID NO: 773986 - protein, 199 aa, Homo sapiens; identical to SEQ ID NO: 773983

SEQ ID NO: 773987 - protein, 199 aa, Homo sapiens; identical to SEQ ID NO: 773983

SEQ ID NO: 773988 - protein, 708 aa, Homo sapiens
MLRMRVPALLVLLFCFRGRAGPSPHFLQQPEDLVVLLGEEARLPCALGAYWGLVQWTKSGLALGGQRDLPGWSRYWISGNAANGQHDLHIRPVELEDEASYECQATQAGLRSRPAQLHVLVPPEAPQVLGGPSVSLVAGVPANLTCRSRGDARPTPELLWFRDGVLLDGATFHQTLLKEGTPGSVESTLTLTPFSHDDGATFVCRARSQALPTGRDTAITLSLQYPPEVTLSASPHTVQEGEKVIFLCQATAQPPVTGYRWAKGGSPVLGARGPRLEVVADASFLTEPVSCEVSNAVGSANRSTALDVLFGPILQAKPEPVSVDVGEDASFSCAWRGNPLPRVTWTRRGGAQVLGSGATLRLPSVGPEDAGDYVCRAEAGLSGLRGGAAEARLTVNAPPVVTALHSAPAFLRGPARLQCLVFASPAPDAVVWSWDEGFLEAGSQGRFLVETFPAPESRGGLGPGLISVLHISGTQESDFSRSFNCSARNLLGEGGAQASLGRRDLLPTVRIVAGVAAATTTLLMVITGVALCCWRHSKASASFSEQKNLMRIPGSSDGSSSRGPEEEETGSREDRGPIVHTDHSDLVLEEEGTLETKDPTNGYYKVRGVSVSLSLGEAPGGGLFLPPPSPLGPPGTPTFYDFNPHLGMVPPCRLYRARAGYLTTPHPRAFTSYIKPTSFGPPDLAPGTPPFPYAAFPTPSHPRLQTHV

SEQ ID NO: 773989 - protein, 219 aa, Homo sapiens
MLRMRVPALLVLLFCFRGRAGPSPHFLQQPEDLVVLLGEGGAQASLGRRASASFSEQKNLMRIPGSSDGSSSRGPEEEETGSREDRGPIVHTDHSDLVLEEEGTLETKDPTNGYYKVRGVSVSLSLGEAPGGGLFLPPPSPLGPPGTPTFYDFNPHLGMVPPCRLYRARAGYLTTPHPRAFTSYIKPTSFGPPDLAPGTPPFPYAAFPTPSHPRLQTHV

SEQ ID NO: 773990 - protein, 623 aa, Homo sapiens
MLRMRVPALLVLLFCFRGRAGWSRYWISGNAANGQHDLHIRPVELEDEASYECQATQAGLRSRPAQLHVLVPPEAPQVLGGPSVSLVAGVPANLTCRSRGDARPTPELLWFRDGVLLDGATFHQTLLKEGTPGSVESTLTLTPFSHDDGATFVCRARSQALPTGRDTAITLSLQYPPEVTLSASPHTVQEGEKVIFLCQATAQPPVTGYRWAKGGSPVLGARGPRLEVVADASFLTEPVSCEVSNAVGSANRSTALDVLFGPILQAKPEPVSVDVGEDASFSCAWRGNPLPRVTWTRRGGAQVLGSGATLRLPSVGPEDAGDYVCRAEAGLSGLRGGAAEARLTVNAPPVVTALHSAPAFLRGPARLQCLVFASPAPDAVVWSWDEGFLEAGSQGRFLVETFPAPESRGGLGPGLISVLHISGTQESDFSRSFNCSARNLLGEGGAQASLGRRASASFSEQKNLMRIPGSSDGSSSRGPEEEETGSREDRGPIVHTDHSDLVLEEEGTLETKDPTNGYYKVRGVSVSLSLGEAPGGGLFLPPPSPLGPPGTPTFYDFNPHLGMVPPCRLYRARAGYLTTPHPRAFTSYIKPTSFGPPDLAPGTPPFPYAAFPTPSHPRLQTHV

SEQ ID NO: 773991 - protein, 219 aa, Homo sapiens; identical to SEQ ID NO: 773989

SEQ ID NO: 773992 - protein, 237 aa, Homo sapiens
STAPSLTPTESLDLYMQSQAAREHKPGASRLLLLLLLPLPPPPPPLPPPALRTRDFSCTTLSACFPPCPEKCDRSPKEFPRQVLGGNDSPVIFPALTQSAGWPPSQEDCFLRNAGHRKRLLMDLHRAAFKMENSSYLPNPLASPALMVLASTAEASRDASIPCQQPRPFGVPVSVDKDVHIPFTNGSYTFASMYHRQGGVPGTFAIVISPLLYYTSTLNLSPKSRLHPISMLNHSGV

SEQ ID NO: 773993 - protein, 115 aa, Homo sapiens
PAPASLLSSRLQYLPRFAPSLSARLKSSRFPWGLILLWARCLQHSAPRLAQLPTLAPCSAVPAMSFPLPPPLHPHHSVPSSDPFSLLASDRRTCFLTSLPAVIVSLPSLMLELTF

SEQ ID NO: 773994 - protein, 131 aa, Homo sapiens
MNESPDPTDLAGVIIELGPNDSPQTSEFKGATEEAPAKESPHTSEFKGAARVSPISESVLARLSKFEVEDAENVASYDSKIKKIVHSIVSSFAFGLFGVFLVLLDVTLILDDIIVSLKSDNFTIPSGEYSC

SEQ ID NO: 773995 - protein, 131 aa, Homo sapiens; identical to SEQ ID NO: 773994

SEQ ID NO: 773996 - protein, 113 aa, Homo sapiens
MNESPDPTDLAGVIIELGPNDSPQTSEFKGATEEAPAKESVLARLSKFEVEDAENVASYDSKIKKIVHSIVSSFAFGLFGVFLVLLDVTLILDDIIVSLKSDNFTIPSGEYSC

SEQ ID NO: 773997 - protein, 106 aa, Homo sapiens
LVSAALGQPVNGCAASSAPQQSAPVGALALSLGVTGGRASPTRSRGAAHMAAATEDTRSCQHPHNSCPPAGSSGLRTPPARTFIAQLSKPWRRGHSMCPPWKGLNL

SEQ ID NO: 773998 - protein, 106 aa, Homo sapiens
MITPLASAETNEDMAVVWKLLREGNVNIQATQGGQTALMLGVSHDREDMVQALLSCQADVNLQDHDGSSALMLACHHGNVDLVRLLLAHPACDSSLTDKGDSLSSV

SEQ ID NO: 773999 - protein, 183 aa, Homo sapiens
MITPLASAETNEDMAVVWKLLREGNVNIQATQGGQTALMLGVSHDREDMVQALLSCQADVNLQDHDGSSALMLACHHGNVDLVRLLLAHPACDSSLTDKGWPHSFVHRSEVTHPYGNCWASESPRGAGQVPGAVGAAEELAVGNKSLLLWTPPSPLKRAEVTGQRATLLEKKLCQICTYIPVV

SEQ ID NO: 774000 - protein, 570 aa, Homo sapiens
QLSLPQGPEQVLTSSVHSFLSTELRIEEAGTEQEGGPQGGTRGAGGFLWGSDRKTPPAGREETSSNLPGKEHPGRPPSSPTDATIGQYVKKIQELLQEQWNCLEHGYPELASAIKQPASKLSSIQSQLLSSLNLLLSAYSAQAHPPKEPPASSSSPPVEISPSTSLKSIMKKKDYGFRAGGNGTKKNLQFVGVNGGYETTSSEETSGEDSTPEDLSDSEAEKKCDGPDHKHVKDAHLTCEAGQGIPEGTCHAAQESGPGEEVPHSKAERYKPSEEFLNACRALSQHLPETGTATDQLLRQSLNTISQEWFRVSSRKSSSPAVVASYLHEVQPHSPHFLKLLVNLADRNGNTALHYSVSHSNFSIAKLLLETGVCNVDHQNKAGYTAVMITPLASAETNEDMAVVWKLLREGNVNIQATQGGQTALMLGVSHDREDMVQALLSCQADVNLQDHDGSSALMLACHHGNVDLVRLLLAHPACDSSLTDKGWPHSFVHRSEVTHPYGNCWASESPRGAGQVPGAVGAAEELAVGNKSLLLWTPPSPLKRAEVTGQRATLLEKKLCQICTYIPVV

SEQ ID NO: 774001 - protein, 570 aa, Homo sapiens; identical to SEQ ID NO: 774000

SEQ ID NO: 774002 - protein, 85 aa, Homo sapiens
EERPAIVVAPSRYLFPSPLSRMTEHGGLEAYHFLLKQGRSERGWRSPEEHGKWRQSSLSATGEAFTKAIDKEVTCGFSRGKGFSV

SEQ ID NO: 774003 - protein, 72 aa, Homo sapiens
MAASTQTLGMEHQTLSAQRLPWLTVQQKILKLTEQIKMAQNSPGDNVAEYLKLANSATNRQAARISKSLRRQ

SEQ ID NO: 774004 - protein, 103 aa, Homo sapiens
MPVCMHVPHRVYVCRCVCMHVHAGSALCLCACMSHIVCVCVSVCVHACVCRFSSMPVCTHVPHRVCVSVCACMCMQVQLCLRASHRVCVCLRVYMHVSVGSRC

SEQ ID NO: 774005 - protein, 72 aa, Homo sapiens
APGTAGGTSSASAGAGRGRGLQGSWAEDKARSRVGASFKSVPSQLCKFLSIAACQRKFLKNGPQLYCGVIDG

SEQ ID NO: 774006 - protein, 49 aa, Homo sapiens
LAYTILLFKTNMRENQQESILTSRECPGAVHRKVLEKAAADSPGTRLFQ

SEQ ID NO: 774007 - protein, 744 aa, Homo sapiens
MSPGASRGPRGSQAPLIAPLCCAAAALGMLLWSPACQAFNLDVEKLTVYSGPKGSYFGYAVDFHIPDARTASVLVGAPKANTSQPDIVEGGAVYYCPWPAEGSAQCRQIPFDTTNNRKIRVNGTKEPIEFKSNQWFGATVKAHKGKVVACAPLYHWRTLKPTPEKDPVGTCYVAIQNFSAYAEFSPCRNSNADPEGQGYCQAGFSLDFYKNGDLIVGGPGSFYWQGQVITASVADIIANYSFKDILRKLAGEKQTEVAPASYDDSYLGYSVAAGEFTGDSQQELVAGIPRGAQNFGYVSIINSTDMTFIQNFTGEQMASYFGYTVVVSDVNSDGLDDVLVGAPLFMEREFESNPREVGQIYLYLQVSSLLFRDPQILTGTETFGRFGSAMAHLGDLNQDGYNDIAIGVPFAGKDQRGKVLIYNGNKDGLNTKPSQVLQGVWASHAVPSGFGFTLRGDSDIDKNDYPDLIVGAFGTGKVAVYRARPVVTVDAQLLLHPMIINLENKTCQVPDSMTSAACFSLRVCASVTGQSIANTIVLMAEVQLDSLKQKGAIKRTLFLDNHQAHRVFPLVIKRQKSHQCQDFIVYLRDETEFRDKLSPINISLNYSLDESTFKEGLEVKPILNYYRENIVSEQAHILVDCGEDNLCVPDLKLSARPDKHQVIIGDENHLMLIINARNEGEGAYEAELFVMIPEEADYVGIERNNKGFRPLSCEYKMENVTRMVVCDLGNPMVSGTNVRENQKY

SEQ ID NO: 774008 - protein, 320 aa, Homo sapiens
MSPGASRGPRGSQAPLIAPLCCAAAALGMLLWSPACQAFNLDVEKLTVYSGPKGSYFGYAVDFHIPDARTASVLVGAPKANTSQPDIVEGGAVYYCPWPAEGSAQCRQIPFDTTNNRKIRVNGTKEPIEFKSNQWFGATVKAHKGKVVACAPLYHWRTLKPTPEKDPVGTCYVAIQNFSAYAEFSPCRNSNADPEGQGYCQAGFSLDFYKNGDLIVGGPGSFYWQGQVITASVADIIANYSFKDILRKLAGEKQTEVAPASYDDSYLGYSVAAGEFTGDSQQELVAGIPRGAQNFGYVSIINSTDMTFIQNFTGEQVETF

SEQ ID NO: 774009 - protein, 1063 aa, Homo sapiens
MSPGASRGPRGSQAPLIAPLCCAAAALGMLLWSPACQAFNLDVEKLTVYSGPKGSYFGYAVDFHIPDARTASVLVGAPKANTSQPDIVEGGAVYYCPWPAEGSAQCRQIPFDTTNNRKIRVNGTKEPIEFKSNQWFGATVKAHKGKVVACAPLYHWRTLKPTPEKDPVGTCYVAIQNFSAYAEFSPCRNSNADPEGQGYCQAGFSLDFYKNGDLIVGGPGSFYWQGQVITASVADIIANYSFKDILRKLAGEKQTEVAPASYDDSYLGYSVAAGEFTGDSQQELVAGIPRGAQNFGYVSIINSTDMTFIQNFTGEQMASYFGYTVVVSDVNSDGLDDVLVGAPLFMEREFESNPREVGQIYLYLQVSSLLFRDPQILTGTETFGRFGSAMAHLGDLNQDGYNDIAIGVPFAGKDQRGKVLIYNGNKDGLNTKPSQVLQGVWASHAVPSGFGFTLRGDSDIDKNDYPDLIVGAFGTGKVAVYRARPVVTVDAQLLLHPMIINLENKTCQVPDSMTSAACFSLRVCASVTGQSIANTIVLMAEVQLDSLKQKGAIKRTLFLDNHQAHRVFPLVIKRQKSHQCQDFIVYLRDETEFRDKLSPINISLNYSLDESTFKEGLEVKPILNYYRENIVSEQAHILVDCGEDNLCVPDLKLSARPDKHQVIIGDENHLMLIINARNEGEGAYEAELFVMIPEEADYVGIERNNKGFRPLSCEYKMENVTRMVVCDLGNPMVSGTNYSLGLRFAVPRLEKTNMSINFDLQIRSSNKDNPDSNFVSLQINITAVAQVEIRGVSHPPQIVLPIHNWEPEEEPHKEEEVGPLVEHIYELHNIGPSTISDTILEVGWPFSARDEFLLYIFHIQTLGPLQCQPNPNINPQDIKPAASPEDTPELSAFLRNSTIPHLVRKRDVHVVEFHRQSPAKILNCTNIECLQISCAVGRLEGGESAVLKVRSRLWAHTFLQRKNDPYALASLVSFEVKKMPYTDQPAKLPEGSIAIKTSVIWATPNVSFSIPLWVIILAILLGLLVLAILTLALWKCGFFDRARPPQEDMTDREQLTNDKTPEA

SEQ ID NO: 774010 - protein, 518 aa, Homo sapiens
MSPGASRGPRGSQAPLIAPLCCAAAALGMLLWSPACQAFNLDVEKLTVYSGPKGSYFGYAVDFHIPDARTASVLVGAPKANTSQPDIVEGGAVYYCPWPAEGSAQCRQIPFDTTNNRKIRVNGTKEPIEFKSNQWFGATVKAHKGKVVACAPLYHWRTLKPTPEKDPVGTCYVAIQNFSAYAEFSPCRNSNADPEGQGYCQAGFSLDFYKNGDLIVGGPGSFYWQGQVITASVADIIANYSFKDILRKLAGEKQTEVAPASYDDSYLGYSVAAGEFTGDSQQELVAGIPRGAQNFGYVSIINSTDMTFIQNFTGEQMASYFGYTVVVSDVNSDGLDDVLVGAPLFMEREFESNPREVGQIYLYLQVSSLLFRDPQILTGTETFGRFGSAMAHLGDLNQDGYNDIAIGVPFAGKDQRGKVLIYNGNKDGLNTKPSQVLQGVWASHAVPSGFGFTLRGDSDIDKNDYPDLIVGAFGTGKVAVYRARPVVTVDAQLLLHPMIINLENKTCQVPDSMTSAAW

SEQ ID NO: 774011 - protein, 104 aa, Homo sapiens
FFLKTESHSVAQAGMQWCNLNALQPPPPRSNDSHASASRVAGITGVYDHAWLIFVFLVERGFYHVDQAGVELLTSRDPPACTFQSGGIMDMNHCTLFNNLNDVF

SEQ ID NO: 774012 - protein, 200 aa, Homo sapiens
GDGGSMRARGVTPFCWGSGEAKAETVPFVVSTAFYFLAVTGNCTNVLLSLPLHTPTSSATGPFSTSCHSTRSFSQVLVNRGGSGKSMARVGVRCGPLRPLAPGLAWPRRLRELPFRPDVAAYTYLGRCSHRCLCQFVCGTPAITAFPRGRRQGGTPGFPRPPQPPWRLSRDLASAPRGQCTAAHAVSAPGLPARLPPFPR

SEQ ID NO: 774013 - protein, 274 aa, Homo sapiens
QGTQPSSPSFRERLETMSGRGRGWVPTQVKARCPAGFCLSCTPAWRASRNPSWKDRALQRPPVSVGQHGLGSNPILSSHIACPQAPPHPVPCSTGLERDGSHVLAGTWHKHAADGISQDPRLRRAHAQESPIRALCLKGCMPRWAHAQEGPCPGWSMSRRASFPGGSRAQEGSMPKRVPCPGGSIRKGVHAWLGGGLCPGGSHAWKGPCSGGFMPRRVYALEGPMPGRVTCTEGPVLRRIHVQECPCPGGSMPRRLHVKKDSCLGGFMPRSVPA

SEQ ID NO: 774014 - protein, 143 aa, Homo sapiens
PGLPRDVPESQECIPSRLRACLALTPDPLLLRREIGAADRGPPQPPGMGLGGRFLSRCSRRRVDRLAWPQPGRHVAPVLPGWERQPSWELPGSCRQQVEGACSLGAQVVEHGLGGLWIASAPGLRARQALPLLGSSSAEARDL

SEQ ID NO: 774015 - protein, 343 aa, Homo sapiens
PGLPRDVPESQECIPSRLRACLALTPDPLLLRREIGAADRGPPQPPGMGLGGRFLSRCSRRRVDRLAWPQPGRHVAPVLPGWERQPSWELPGSCRQQDSGLGSQGRRDLGLETTSAHSRSLLHLSSWRRPDVGEAAGAELLQRAPLQQPDPAQAAVEGGLLARLPRPQDQGAASTALTPRVSWILPSLEAAGPKRGSQRSAPRRLACRAQDPAFWRRGTAPFSSPAPLLVGKLLSLCHEKHPGVLDFDIACTLSRAHQTGGCPQSPRVACSRAAAPAGCSSLWAYQAWWSHSRPVERKSKAGSAGQWAGTMREAGQLGSKLSLSDSPGPTAYNALKSHASPER

SEQ ID NO: 774016 - protein, 457 aa, Homo sapiens
PGLPRDVPESQECIPSRLRACLALTPDPLLLRREIGAADRGPPQPPGMGLGGRFLSRCSRRRVDRLAWPQPGRHVAPVLPGWERQPSWELPGSCRQQVEGACSLGAQVVEHGLGGLWIASAPGLRARQALPLLGSSSAEARDLSQWPSAATGNGAESRFPLQGRPPSSAAATGTSGPGSEMWGVLAGSGVAWRLLPAHRRRMQLGCPGGLEDSGLGSQGRRDLGLETTSAHSRSLLHLSSWRRPDVGEAAGAELLQRAPLQQPDPAQAAVEGGLLARLPRPQDQGAASTALTPRVSWILPSLEAAGPKRGSQRSAPRRLACRAQDPAFWRRGTAPFSSPAPLLVGKLLSLCHEKHPGVLDFDIACTLSRAHQTGGCPQSPRVACSRAAAPAGCSSLWAYQAWWSHSRPVERKSKAGSAGQWAGTMREAGQLGSKLSLSDSPGPTAYNALKSHASPER

SEQ ID NO: 774017 - protein, 82 aa, Homo sapiens
ALRPQAGVGTSLEPALRSPSTRNVERLWRHGANCARSLGPRAASVHGASRSPAQWTKSGMLGRHPTGLTPQRHPERDGVSPC

SEQ ID NO: 774018 - protein, 125 aa, Homo sapiens
MARSPTLRERNALMFNNELVADVHFVVGPPGATRTVPAHKYVLAACSSVFYAMFYWDLAEVKSEIHIPDLEPAAFLILLKYVYSDEIDLEADTVLATLLAAKKYIVPALAKACVNFLGTSLKAKN

SEQ ID NO: 774019 - protein, 291 aa, Homo sapiens
MERNSSLWKNLIDEHPVCTTWKQEAEGAIYHLASILFVVGFMGGSGFFGLLYVFSLLGLGFLCSAVWAWVDVCAADIFSWNFVLFVICFMQFVHIAYQVRSITFAREFQVLYSSLFQPLGISLPVFRTIALSSEVVTLEKEHCYAMQGKTSIDKLSLLVSGRIRVTVDGEFLHYIFPLQFLDSPEWDSLRPTEEGIFQVTLTAETDCRYVSWRRKKLYLLFAQHRYISRLFSVLIGSDIADKLYALNDRVYIGKRYHYDIRLPNFYQMSTPEIRRSPLTQHFQNSRRYCDK

SEQ ID NO: 774020 - protein, 70 aa, Homo sapiens
SPLRSRCARRRRVGGEALTRGTLRASARATRVKRAPPGNFCGRRAEAPGRAGKERKYQNICRLDPNQEPR

SEQ ID NO: 774021 - protein, 291 aa, Homo sapiens; identical to SEQ ID NO: 774019

SEQ ID NO: 774022 - protein, 260 aa, Homo sapiens
MSSVKRPRGRPPSSKKSDGSGTYTKLQNTQVRVMSEKKQRKKVESESKQEKANRIISEAIAKAKERGERNIPRVMSPENFPTASVEGKEEKKGRRMKSKPKDKDSKKTKTCSKLKEKTKIGKLIITLGKKQKRKNESSDEISDAEQMPQHTLKDQDSQKRRSNRQIKRKKYAEDIEGKQSEEEVKGSMKIKKNSAPLPGEQPLQLFVENPSEEDAAIVDKILSSRTVKKEISPGVMIDTEEFFVKYKNYSYLHCEWATEE

SEQ ID NO: 774023 - protein, 734 aa, Homo sapiens
MTDPMMDFFDDANLFGETLEGLSDDAFVQPGPVSLVDELNLGAEFEPLHIDSLNHVQGTPTHQKMTDFEQLNQFDSIKFHHVNQSFGSPAEHVLSPHSQFNCSPIHPQNQPNGLFPDVSDGSPMWGHQTATTISNQNGSPFHQQGHSHSMHQNKSFVAHHDFALFQANEQQTQCTSLRSQQNRNNLNPGQNSLSQSKNFMNVSGPHRVNVNHPPQMTNASNSQQSISMQQFSQTSNPSAHFHKCSSHQEGNFNGPSPNMTSCSVSNSQQFSSHYSFSSNHISPNSLLQSSAVLASNHTNQTLSDFTGSNSFSPHRGIKQESTQHILNPNTSLNSNNFQILHSSHPQGNYSNSKLSPVHMNFPDPVDSGTQMGHFNDHVETNGFSSLEENLLHQVESQTEPFTGLDPEDLLQEGLLPHFDESTFGQDNSSHILDHDLDRQFTSHLVTRPSDMAQTQLQSQARSWHSSFSNHQHLHDRNHLCLQRQPPSSKKSDGSGTYTKLQNTQVRVMSEKKQRKKVESESKQEKANRIISEAIAKAKERGERNIPRVMSPENFPTASVEGKEEKKGRRMKSKPKDKDSKKTKTCSKLKEKTKIGKLIITLGKKQKRKNESSDEISDAEQMPQHTLKDQDSQKRRSNRQIKRKKYAEDIEGKQSEEEVKGSMKIKKNSAPLPGEQPLQLFVENPSEEDAAIVDKILSSRTVKKEISPGVMIDTEEFFVKYKNYSYLHCEWATEE

SEQ ID NO: 774024 - protein, 734 aa, Homo sapiens; identical to SEQ ID NO: 774023

SEQ ID NO: 774025 - protein, 734 aa, Homo sapiens; identical to SEQ ID NO: 774023

SEQ ID NO: 774026 - protein, 734 aa, Homo sapiens; identical to SEQ ID NO: 774023

SEQ ID NO: 774027 - protein, 368 aa, Homo sapiens
MTDPMMDFFDDANLFGETLEEENLLHQVESQTEPFTGLDPEDLLQEGLLPHFDESTFGQDNSSHILDHDLDRQFTSHLVTRPSDMAQTQLQSQARSWHSSFSNHQHLHDRNHLCLQRQPPSSKKSDGSGTYTKLQNTQVRVMSEKKQRKKVESESKQEKANRIISEAIAKAKERGERNIPRVMSPENFPTASVEGKEEKKGRRMKSKPKDKDSKKTKTCSKLKEKTKIGKLIITLGKKQKRKNESSDEISDAEQMPQHTLKDQDSQKRRSNRQIKRKKYAEDIEGKQSEEEVKGSMKIKKNSAPLPGEQPLQLFVENPSEEDAAIVDKILSSRTVKKEISPGVMIDTEEFFVKYKNYSYLHCEWATEE

SEQ ID NO: 774028 - protein, 227 aa, Homo sapiens
MSEKKQRKKVESESKQEKANRIISEAIAKAKERGERNIPRVMSPENFPTASVEGKEEKKGRRMKSKPKDKDSKKTKTCSKLKEKTKIGKLIITLGKKQKRKNESSDEISDAEQMPQHTLKDQDSQKRRSNRQIKRKKYAEDIEGKQSEEEVKGSMKIKKNSAPLPGEQPLQLFVENPSEEDAAIVDKILSSRTVKKEISPGVMIDTEEFFVKYKNYSYLHCEWATEE

SEQ ID NO: 774029 - protein, 193 aa, Homo sapiens
FFTPPLKTFGPLFSPKRFEGKEEKKGRRMKSKPKDKDSKKTKTCSKLKEKTKIGKLIITLGKKQKRKNESSDEISDAEQMPQHTLKDQDSQKRRSNRQIKRKKYAEDIEGKQSEEEVKGSMKIKKNSAPLPGEQPLQLFVENPSEEDAAIVDKILSSRTVKKEISPGVMIDTEEFFVKYKNYSYLHCEWATEE

SEQ ID NO: 774030 - protein, 658 aa, Homo sapiens
MTDPMMDFFDDANLFGETLEGLSDDAFVQPGPVSLVDELNLGAEFEPLHIDSLNHVQGTPTHQKMTDFEQLNQFDSIKFHHVNQSFGSPAEHVLSPHSQFNCSPIHPQNQPNGLFPDVSDGSPMWGHQTATTISNQNGSPFHQQGHSHSMHQNKSFVAHHDFALFQANEQQTQCTSLRSQQNRNNLNPGQNSLSQSKNFMNVSGPHRVNVNHPPQMTNASNSQQSISMQQFSQTSNPSAHFHKCSSHQEGNFNGPSPNMTSCSVSNSQQFSSHYSFSSNHISPNSLLQSSAVLASNHTNQTLSDFTGSNSFSPHRGIKQESTQHILNPNTSLNSNNFQILHSSHPQGNYSNSKLSPVHMNFPDPVDSGTQMGHFNDHVETNGFSSLEENLLHQVESQTEPFTGLDPEDLLQEGLLPHFDESTFGQDNSSHILDHDLDRQFTSHLVTRPSDMAQTQLQSQARSWHSSFSNHQHLHDRNHLCLQRQPPSSKKSDGSGTYTKLQNTQVRVMSEKKQRKKVESESKQEKANRIISEAIAKAKERGERNIPRVMSPENFPTASVEGKEEKKGRRMKSKPKDKDSKKTKTCSKLKEKTKIGKLIITLGKKQKRKNESSDEISDAEQMPQHTLKDQDSQLLIQWESSGSRLLGCCKKLRKEDQID

SEQ ID NO: 774031 - protein, 501 aa, Homo sapiens [sequence omitted]

SEQ ID NO: 774032 - protein, 760 aa, Homo sapiens
MVNAGAMSGSGNLMDFLDEPFPDVGTYEDFHTIDWLREKSRDTDRHRKITSKSKESIWEFIKSLLDAWSGWVVMLLIGLLAGTLAGVIDLAVDWMTDLKEGVCLSAFWYSHEQCCWTSNETTFEDRDKCPLWQKWSELLVNQSEGASAYILNYLMYILWALLFAFLAVSLVRVFAPYACGSGIPEIKTILSGFIIRGYLGKWTLLIKTVTLVLVVSSGLSLGKEGPLVHVACCCGNFFSSLFSKYSKNEGKRREVLSAAAAAGVSVAFGAPIGGVLFSLEEVSYYFPLKTLWRSFFAALVAAFTLRSINPFGNSRLVLFYVEYHTPWYMAELFPFILLGVFGGLWGTLFIRCNIAWCRRRKTTRLGKYPVLEVIVVTAITAIIAYPNPYTRQSTSELISELFNDCGALESSQLCDYINDPNMTRPVDDIPDRPAGVGVYTAMWQLALALIFKIVVTIFTFGMKIPSGLFIPSMAVGAIAGRMVGIGVEQLAYHHHDWIIFRNWCRPGADCVTPGLYAMVGAAACLGGVTRMTVSLVVIMFELTGGLEYIVPLMAAAVTSKWVADAFGKEGIYEAHIHLNGYPFLDVKDEFTHRTLATDVMRPRRGEPPLSVLTQDSMTVEDVETLIKETDYNGFPVVVSRDSERLIGFAQRRELILAIKNARQRQEGIVSNSIMYFTEEPPELPANSPHPLKLRRILNLSPFTVTDHTPMETVVDIFRKLGLRQCLVTRSGRLLGIITKKDVLRHMAQMANQDPESIMFN

SEQ ID NO: 774033 - protein, 760 aa, Homo sapiens; identical to SEQ ID NO: 774032

SEQ ID NO: 774034 - protein, 730 aa, Homo sapiens
MLEDAVQVGGRGRDAALQITSKSKESIWEFIKSLLDAWSGWVVMLLIGLLAGTLAGVIDLAVDWMTDLKEGVCLSAFWYSHEQCCWTSNETTFEDRDKCPLWQKWSELLVNQSEGASAYILNYLMYILWALLFAFLAVSLVRVFAPYACGSGIPEIKTILSGFIIRGYLGKWTLLIKTVTLVLVVSSGLSLGKEGPLVHVACCCGNFFSSLFSKYSKNEGKRREVLSAAAAAGVSVAFGAPIGGVLFSLEEVSYYFPLKTLWRSFFAALVAAFTLRSINPFGNSRLVLFYVEYHTPWYMAELFPFILLGVFGGLWGTLFIRCNIAWCRRRKTTRLGKYPVLEVIVVTAITAIIAYPNPYTRQSTSELISELFNDCGALESSQLCDYINDPNMTRPVDDIPDRPAGVGVYTAMWQLALALIFKIVVTIFTFGMKIPSGLFIPSMAVGAIAGRMVGIGVEQLAYHHHDWIIFRNWCRPGADCVTPGLYAMVGAAACLGGVTRMTVSLVVIMFELTGGLEYIVPLMAAAVTSKWVADAFGKEGIYEAHIHLNGYPFLDVKDEFTHRTLATDVMRPRRGEPPLSVLTQDSMTVEDVETLIKETDYNGFPVVVSRDSERLIGFAQRRELILAIKNARQRQEGIVSNSIMYFTEEPPELPANSPHPLKLRRILNLSPFTVTDHTPMETVVDIFRKLGLRQCLVTRSGRLLGIITKKDVLRHMAQMANQDPESIMFN

SEQ ID NO: 774035 - protein, 194 aa, Homo sapiens
MVNAGAMSGSGNLMDFLDEPFPDVGTYEDFHTIDWLREKSRDTDRHRKITSKSKESIWEFIKSLLDAWSGWVVMLLIGLLAGTLAGVIDLAVDWMTDLKEGVCLSAFWYSHEQCCWTSNETTFEDRDKCPLWQKWSELLVNQSEGASAYILNYLMYILWALLFAFLAVSLVRVFAPYACGSGIPEFYDLLIIAF

SEQ ID NO: 774036 - protein, 760 aa, Homo sapiens; identical to SEQ ID NO: 774032

SEQ ID NO: 774037 - protein, 650 aa, Homo sapiens
MVNAGAMSGSGNLMDFLDEPFPDVGTYEDFHTIDWLREKSRDTDRHRKITSKSKESIWEFIKSLLDAWSGWVVMLLIGLLAGTLAGVIDLAVDWMTDLKEGVCLSAFWYSHEQCCWTSNETTFEDRDKCPLWQKWSELLVNQSEVLSAAAAAGVSVAFGAPIGGVLFSLEEVSYYFPLKTLWRSFFAALVAAFTLRSINPFGNSRLVLFYVEYHTPWYMAELFPFILLGVFGGLWGTLFIRCNIAWCRRRKTTRLGKYPVLEVIVVTAITAIIAYPNPYTRQSTSELISELFNDCGALESSQLCDYINDPNMTRPVDDIPDRPAGVGVYTAMWQLALALIFKIVVTIFTFGMKIPSGLFIPSMAVGAIAGRMVGIGVEQLAYHHHDWIIFRNWCRPGADCVTPGLYAMVGAAACLGGVTRMTVSLVVIMFELTGGLEYIVPLMAAAVTSKWVADAFGKEGIYEAHIHLNGYPFLDVKDEFTHRTLATDVMRPRRGEPPLSVLTQDSMTVEDVETLIKETDYNGFPVVVSRDSERLIGFAQRRELILAIKNARQRQEGIVSNSIMYFTEEPPELPANSPHPLKLRRILNLSPFTVTDHTPMETVVDIFRKLGLRQCLVTRSGRLLGIITKKDVLRHMAQMANQDPESIMFN

SEQ ID NO: 774038 - protein, 141 aa, Homo sapiens
QISQLTKNISCRMFYLQKLQDGCTIISNGYITSIIHQHFIQDNGPRALFTILAIEAAAIMFWERIASPLLRSPNTDKGPSIFLAAVHTEFCSYCGQPVIVAPRPTGYHSSGDGVERTRVMHRPIRFPAAPAGRGARREADL

SEQ ID NO: 774039 - protein, 34 aa, Homo sapiens
MAHCESGAPDLLLLSIHSGMLPPPCKGLESTLVP

SEQ ID NO: 774040 - protein, 111 aa, Homo sapiens
QQQLIRETRISWLQAQMLNPQPEKTFIRNKAAQVFALLFVTEYLTKWPKFFVYILSVVDLNPRGVDVCLRILMAIDSELVDRDVVHTSEEARRNTLIKDTMREQCIPNLVE

SEQ ID NO: 774041 - protein, 47 aa, Homo sapiens
MICMVVPVTENDAGIRRAEIKQGIREVILCKDQDGKIGLRLKSIDND

SEQ ID NO: 774042 - protein, 106 aa, Homo sapiens
MWLRPGSCWSTREPRRAPRTSASSLSSFLGPSAVCTLLSSHPASRCRPSTFLAPGFCICPSHCLSCANATGPAHRTPHGIASPPLYLHTRPETCLSSCVSIDFCTI

SEQ ID NO: 774043 - protein, 117 aa, Homo sapiens
MPLPPCVVSTLQDFILGHPKAEDIAGQQEIHGASRKTSKRWWSRGRHTQTAVCNCAAAGCCGCWPAVHSGHTGLCHRMQAVAGGGTAGRQGLCAWKPAGLLQEEGCRMLQLRPDSGF

SEQ ID NO: 774044 - protein, 483 aa, Homo sapiens
MKVFRRKALVLCAGYALLLVLTMLNLLDYKWHKEPLQQCNPDGPLGAAAGAAGGSWGRPGPPPAGPPRAHARLDLRTPYRPPAAAVGAAPAAAAGMAGVAAPPGNGTRGTGGVGDKRQLVYVFTTWRSGSSFFGELFNQNPEVFFLYEPVWHVWQKLYPGDAVSLQGAARDMLSALYRCDLSVFQLYSPAGSGGRNLTTLGIFGAATNKVVCSSPLCPAYRKEVVGLVDDRVCKKCPPQRLARFEEECRKYRTLVIKGVRVFDVAVLAPLLRDPALDLKVIHLVRDPRAVASSRIRSRHGLIRESLQVVRSRDPRAHRMPFLEAAGHKLGAKKEGVGGPADYHALGAMEVICNSMAKTLQTALQPPDWLQGHYLVVRYEDLVGDPVKTLRRVYDFVGLLVSPEMEQFALNMTSGSGSSSKPFVVSARNATQAANAWRTALTFQQIKQVEEFCYQPMAVLGYERVNSPEEVKDLSKTLLRKPRL

SEQ ID NO: 774045 - protein, 483 aa, Homo sapiens; identical to SEQ ID NO: 774044

SEQ ID NO: 774046 - protein, 483 aa, Homo sapiens; identical to SEQ ID NO: 774044

SEQ ID NO: 774047 - protein, 483 aa, Homo sapiens; identical to SEQ ID NO: 774044

SEQ ID NO: 774048 - protein, 102 aa, Homo sapiens
RYTVGAISVLVATIVIITRVFQELSLHGSPHRFTNSPVLGTSLNCNLNPRLMQPYKQTRIMAGVGALPFGIWPNQEEVEWPGGKPQVIQNVHHVVNPVLLLL

SEQ ID NO: 774049 - protein, 32 aa, Homo sapiens
KRSCSNLQSLSQTWVVTVSGGSQIIGDISETT

SEQ ID NO: 774050 - protein, 241 aa, Homo sapiens
MEMESAAASTRFHQPHMERKMSAMACEIFNELRLEGKLCDVVIKVNGFEFSAHKNILCSCSSYFRALFTSGWNNTEKKVYNIPGISPDMMKLIIEYAYTRTVPITPDNVEKLLAAADQFNIMGIVRGCCEFLKSELCLDNCIGICKFTDYYYCPELRQKAYMFILHNFEEMVKVSAEFLELSVTELKDIIEKDELNVKQEDAVFEAILKWISHDPKKRDQTFSNLVPKVPWPNAAEYLLKH

SEQ ID NO: 774051 - protein, 252 aa, Homo sapiens
SGGTSWYIILKGSVNVVIYGKGVVCTLHEGDDFGKLALVNDAPRAASIVLREDNCHFLRVDKEDFNRILRDVEANTVRLKEHDQDVLVLEKVPAGNRASNQGNSQPQQKYTVMSGTPEKILEHFLETIRLEATLNEATDSVLNDFIMMHCVFMPNTQLCPALVAHYHAQPSQGTEQEKMDYALNNKRRVIRLVLQWAAMYGDLLQEDDVSMAFLEEFMYLYQMMPWMIAALKEQLPELEKIVQQISEDARST

SEQ ID NO: 774052 - protein, 341 aa, Homo sapiens
MLGNTENWNTFDIATKKAYLDIFLPNEQSIRIEIITSDTAERVLEVVSHKIGLCRELLGYFGLFLIRFGKEGKLSVVKKLADFELPYVSLGSSEVENCKVGLRKWYMAPSLDSVLMDCRVAVDLLYMQAIQDIEKGWAKPTQAQRQKLEAFQKEDSQTKFLELAREVRHYGYLQLDPCTCDYPESGSGAVLSVGNNEISCCITLPDSQTQDIVFQMSRVKCWQVTFLGTLLDTDGPQRTLNQNLELRFQYSEDSCWQWFVIYTKQAFLLSSCLKKMISEKMVKLAAENTEMQIEVPEQSKSKKYHIQQSQQKDYSSFLSRKSKIKIAKDDCVFGNIKEEDL

SEQ ID NO: 774053 - protein, 322 aa, Homo sapiens
MLGNTENWNTFDIATKKAYLDIFLPNEQSIRIEIITSDTAERVLEVVSHKIGLCRELLGYFGLFLIRFGKEGKLSVVKKLADFELPYVSLGSSEVENCKVGLRKWYMAPSLDSVLMDCRVAVDLLYMQAIQDIEKGWAKPTQAQRQKLEAFQKEDSQTKFLELAREVRHYGYLQLDPCTCDYPESGSGAVLSVGNNEISCCITLPDSQTQDIVFQMSRVKCWQVTFLGTLLDTDGPQRTLNQNLELRFQYSEDSCWQWFVIYTKQAFLLSSCLKKMISEKMVKLAAENTEMQKDYSSFLSRKSKIKIAKDDCVFGNIKEEDL

SEQ ID NO: 774054 - protein, 292 aa, Homo sapiens
MLGNTENWNTFDIATKKAYLDIFLPNEQSIRIEIITSDTAERVLEVVSHKIGLCRELLGYFGLFLIRFGKEGKLSVVKKLADFELPYVSLGSSEVENCKVGLRKWYMAPSLDSVLMDCRVAVDLLYMQAIQDIEKGWAKPTQAQRQKLEAFQKEDSQTKFLELAREVRHYGYLQLDPCTCDYPESGSGAVLSVGNNEISCCITLPDSQTQDIVFQMSRVKCWQVTFLGTLLDTDGPQRTLNQNLELRFQYSEDSCWQWFVIYTKQAFLLSSCLKKMISEKMVKLAAENTEMN

SEQ ID NO: 774055 - protein, 180 aa, Homo sapiens [sequence omitted]

SEQ ID NO: 774056 - protein, 110 aa, Homo sapiens
GAPASLPAFSSPGCDHSQLTPPLLWQPKNSLEKGQLAAFPRACLDPWTPVLRGVGAPSVGCMGHEHHWKQTSSFPCCSPLRLPAFLIRDFRRGMGRVAYNLPLKARCFGE

SEQ ID NO: 774057 - protein, 44 aa, Homo sapiens
LLLLNEKEKSPGCVCGYNRKHSSCQAELPRRCPRRQTQGHCHFF

SEQ ID NO: 774058 - protein, 108 aa, Homo sapiens
KATYMETTCLQLSYPRNSSSLVILSLFRWFLQTSGDASSPLHMEVGSMQHTACTHVPTCAHTHILTQPPALKHPPSLPPQSCLAQAQARGEGAYGGKQERGLGLNSKV

SEQ ID NO: 774059 - protein, 40 aa, Homo sapiens
MLPRLVFNSWPEVILSSWTAKVLGFGTTEPNPRREPLSLG

SEQ ID NO: 774060 - protein, 84 aa, Homo sapiens
TWGADALLPGAYGSAAPDGAFSLPPSSRFHLRRLLGLPSHPGPSSASRVLPGLVRNCSWRSRGTPKPANGKRRFAEIGTDDGKQ

SEQ ID NO: 774061 - protein, 167 aa, Homo sapiens
MDEADFSEHTTYKQEDLPYDGDLSQIKIGNDYSFTSKKDGLEVLNQIIFIADDPQEKAMHSETCGNTAVTIPLGKITENAANKKDEKEKQCTAALHIPANEGDASKSSISDILLHHLSKEPFLRGQGIDCETLPEISNADSFEEEAIIKSIISCYNKNSWPKEQTPE

SEQ ID NO: 774062 - protein, 112 aa, Homo sapiens
MTLCEGEENKGSVEIMRKDLNDARDLHGQAESAAAVWKGHVMDRRKKALTDYKKLRAFFVEEEEHFLQEAEKEEGLPEDELADPTERFRSLLQAVSELEKKHRNLGLSMLLQ

SEQ ID NO: 774063 - protein, 126 aa, Homo sapiens
MAAGPEPPEWEPRWRKALRGKENKGSVEIMRKDLNDARDLHGQAESAAAVWKGHVMDRRKKALTDYKKLRAFFVEEEEHFLQEAEKEEGLPEDELADPTERFRSLLQAVSELEKKHRNLGLSMLLQ

SEQ ID NO: 774064 - protein, 126 aa, Homo sapiens; identical to SEQ ID NO: 774063

SEQ ID NO: 774065 - protein, 231 aa, Homo sapiens
MQYTAARILSVERSAARTSGCSTPLPGSYRQSAPRSGPRPVRVPDPAPCASPALASSSCCWSPSGRRPSRSPALPAAPARDGPASEAALQLLCRADAGPLCAACRMAAGPEPPEWEPRWRKALRGKENKGSVEIMRKDLNDARDLHGQAESAAAVWKGHVMDRRKKALTDYKKLRAFFVEEEEHFLQEAEKEEGLPEDELADPTERFRSLLQAVSELEKKHRNLGLSMLLQ

SEQ ID NO: 774066 - protein, 157 aa, Homo sapiens
MAAGPEPPEWEPRWRKALRGKENKGSVEIMRKDLNDARDLHGQAESAAAVWKGHVMDRRKKALTDYKKLRAFFVEEEEHFLQEAEKEEGLPEDELADPTERFRSLLQAVSELEKKHRNLGLSMLLQVREPRWVCPPSGQGGRRQQRAIGGPLPEVKA

SEQ ID NO: 774067 - protein, 128 aa, Homo sapiens
MVRGWVVAARVGTALECKALRGEENKGSVEIMRKDLNDARDLHGQAESAAAVWKGHVMDRRKKALTDYKKLRAFFVEEEEHFLQEAEKEEGLPEDELADPTERFRSLLQAVSELEKKHRNLGLSMLLQ

SEQ ID NO: 774068 - protein, 232 aa, Homo sapiens
MQYTAARILSVERSAARTSGCSTPLPGSYRQSAPRSGPRPVRVPDPAPCASPALASSSCCWSPSGRRPSRSPALPSRSCALAGPAARSPGAPCGPRRGRLRPVPARAPGTGARRLRPPLLSGVRGALLGRGGRALPVPRVRRRLLAARRGARQAPAQPPPSGARGGGRGARARRPGQRGRAAAAVPRRRRPALRRLPYGCGPRAARVGTALEEGAARQGEQGVCGNHEKGLE

SEQ ID NO: 774069 - protein, 110 aa, Homo sapiens
KILKQHTHNKQKNTHYKIHHKKLGEDEARGLIGTEEGHVMDRRKKALTDYKKLRAFFVEEEEHFLQEAEKEEGLPEDELADPTERFRSLLQAVSELEKKHRNLGLSMLLQ

SEQ ID NO: 774070 - protein, 126 aa, Homo sapiens; identical to SEQ ID NO: 774063

SEQ ID NO: 774071 - protein, 126 aa, Homo sapiens; identical to SEQ ID NO: 774063

SEQ ID NO: 774072 - protein, 126 aa, Homo sapiens; identical to SEQ ID NO: 774063

SEQ ID NO: 774073 - protein, 126 aa, Homo sapiens; identical to SEQ ID NO: 774063

SEQ ID NO: 774074 - protein, 145 aa, Homo sapiens
MQYTAARILSVERSAARTSGCSTPLPGSYRQSAPRSGPRPVRVPDPAPCASPALASSSCCWSPSGRRPSRSPALPSRSCALAGPAARSPGAPCGPRRGRLRPVPARAPGTGARRLPSSRYVRMCPVRFSPEEMVPVLCPYSMNCG

SEQ ID NO: 774075 - protein, 126 aa, Homo sapiens; identical to SEQ ID NO: 774063

SEQ ID NO: 774076 - protein, 88 aa, Homo sapiens
TPPHQYALGTRPGWGHVMDRRKKALTDYKKLRAFFVEEEEHFLQEAEKEEGLPEDELADPTERFRSLLQAVSELEKKHRNLGLSMLLQ

SEQ ID NO: 774077 - protein, 107 aa, Homo sapiens [sequence omitted]

SEQ ID NO: 774078 - protein, 126 aa, Homo sapiens; identical to SEQ ID NO: 774063

SEQ ID NO: 774079 - protein, 126 aa, Homo sapiens; identical to SEQ ID NO: 774063

SEQ ID NO: 774080 - protein, 107 aa, Homo sapiens [sequence omitted]

SEQ ID NO: 774081 - protein, 403 aa, Homo sapiens
PCGPGMPSAGAAAPALEAPRRTGPRWAWGRAGAAAAELWILHDVMIWGHFSLLCVVDSLGGEEMADSVKTFLQDLARGIKDSIWGICTISKLDARIQQKREEQRRRRASSVLAQRRAQSIERKQESEPRIVSRIFQCCAWNGGVFWFSLLLFYRVFIPVLQSVTARIIGDPSLHGDVWSWLEFFLTSIFSALWVLPLFVLSKVVNAIWFQDIADLAFEVSGRKPHPFPSVSKIIADMLFNLLLQALFLIQGMFVSLFPIHLVGQLVSLLHMSLLYSLYCFEYRWFNKGIEMHQRLSNIERNWPYYFGFGLPLAFLTAMQSSYIISGCLFSILFPLFIISANEAKTPGKAYLFQLRLFSLVVFLSNRLFHKTVYLQSALSSSTSAEKFPSPHPSPAKLKATAGH

SEQ ID NO: 774082 - protein, 113 aa, Homo sapiens
PVDLTIPSVGQSIERKQESEPRIVSRIFQCCAWNGGVFWFSLLLFYRVFIPVLQSVTARIIGDPHYMEMLGLPGPILVIIETISLLIQPIALAVRLTANITAGHLLMHLIGSA

SEQ ID NO: 774083 - protein, 325 aa, Homo sapiens
PCGPGMPSAGAAAPALEAPRRTGPRWAWGRAGAAAAELWILHDVMIWGHFSLLCVVDSLGGEEMADSVKTFLQDLARGIKDSIWGICTISKLDARIQQKREEQRRRRASSVLAQRRAQSIERKQESEPRIVSRIFQCCAWNGGVFWFSLLLFYRVFIPVLQSVTARIIGDPSLHGDVWSWLEFFLTSIFSALWVLPLFVLSKVVNAIWFQDIADLAFEVSGRKPHPFPSVSKIIADMLFNLLLQALFLIQGMFVSLFPIHLVGQLVSLLHMSLLYSLYCFEYRWFNKVAAFSLSSFLYSLSAPMKQRPLAKHISSSCASSPWWSS

SEQ ID NO: 774084 - protein, 292 aa, Homo sapiens
PCGPGMPSAGAAAPALEAPRRTGPRWAWGRAGAAAAELWILHDVMIWGHFSLLCVVDSLGGEEMADSVKTFLQDLARGIKDSIWGICTISKLDARIQQKREEQRRRRASSVLAQRRAQSIERKQESEPRIVSRIFQCCAWNGGVFWFSLLLFYRVFIPVLQSVTARIIGDPSLHGDVWSWLEFFLTSIFSALWVLPLFVLSKVVNAIWFQDIADLAFEVSGRKPHPFPSVSKIIADMLFNLLLQALFLIQGMFVSLFPIHLVGQLVSLLHMSLLYSLYCFEYRWFNKEKASI

SEQ ID NO: 774085 - protein, 342 aa, Homo sapiens
MSLHGKRKEIYKYEAPWTVYAMNWSVRPDKRFRLALGSFVEEYNNKVQLVGLDEESSEFICRNTFDHPYPTTKLMWIPDTKGVYPDLLATSGDYLRVWRVGETETRLECLLNNNKNSDFCAPLTSFDWNEVDPYLLGTSSIDTTCTIWGLETGQVLGRVNLVSGHVKTQLIAHDKEVYDIAFSRAGGGRDMFASVGADGSVRMFDLRHLEHSTIIYEDPQHHPLLRLCWNKQDPNYLATMAMDGMEVVILDVRVPCTPVARLNNHRACVNGIAWAPHSSCHICTAADDHQALIWDIQQMPRAIEDPILAYTAEGEINNVQWASTQPDWIAICYNNCLEILRV

SEQ ID NO: 774086 - protein, 172 aa, Homo sapiens
MGSLHENLGPVSPDLHWLFAGTSSIDTTCTIWGLETGQVLGRVNLVSGHVKTQLIAHDKEVYDIAFSRAGGGRDMFASVGADGSVRMFDLRHLEHSTIIYEDPQHHPLLRLCWNKQDPNYLATMAMDGMEVVILDVLGSLHIVDLSFSCVGQDRVLNGSGHLLDVPDESLVV

SEQ ID NO: 774087 - protein, 342 aa, Homo sapiens; identical to SEQ ID NO: 774085

SEQ ID NO: 774088 - protein, 342 aa, Homo sapiens; identical to SEQ ID NO: 774085

SEQ ID NO: 774089 - protein, 342 aa, Homo sapiens; identical to SEQ ID NO: 774085

SEQ ID NO: 774090 - protein, 151 aa, Homo sapiens
  misc_feature (5)..(5): Xaa can be any naturally occurring amino acid
  misc_feature (11)..(11): Xaa can be any naturally occurring amino acid
SDMLXGIRDFXEPDKEQLQLFERMTTRLSSGTSSKCPEPLRTLSWPTQLKERSTMCSGHQLSPTGSPSATTTAWRYSECSVGGAVPTRQGLLYFLPLPHPQSKKKHVSSGQYVFHCFAPTVTRSCSRSSWPVTPSPSVADSVLCGASSAQG

SEQ ID NO: 774091 - protein, 342 aa, Homo sapiens; identical to SEQ ID NO: 774085

SEQ ID NO: 774092 - protein, 69 aa, Homo sapiens
PRGRGGVPKRKVVVVRSQAGLKLGVGLGRRRCLSPHPRFRVRPFLPAPSSPPFGPIDLRLGSPPAAAHC

SEQ ID NO: 774093 - protein, 342 aa, Homo sapiens; identical to SEQ ID NO: 774085

SEQ ID NO: 774094 - protein, 222 aa, Homo sapiens
MSLHGKRKEIYKYEAPWTVYAMNWSVRPDKRFRLALGSFVEEYNNKVQLVGLDEESSEFICRNTFDHPYPTTKLMWIPDTKGVYPDLLATSGDYLRVWRVGETETRLECLLNNNKNSDFCAPLTSFDWNEVDPYLLGTSSIDTTCTIWGLETGQVLGRVNLVSGHVKTQLIAHDKEVYDIAFSRAGGGREPGHLESPPPFHPGHGGQVVRVLLVPAEAKQWV

SEQ ID NO: 774095 - protein, 342 aa, Homo sapiens; identical to SEQ ID NO: 774085

SEQ ID NO: 774096 - protein, 342 aa, Homo sapiens; identical to SEQ ID NO: 774085

SEQ ID NO: 774097 - protein, 342 aa, Homo sapiens; identical to SEQ ID NO: 774085

SEQ ID NO: 774098 - protein, 306 aa, Homo sapiens
MSLHGKRKEIYKYEAPWTVYAMNWSVRPDKRFRLALGSFVEEYNNKVQLVGLDEESSEFICRNTFDHPYPTTKLMWIPDTKGVYPDLLATSGDYLRVWRVGETETRLECLLNNNKNSDFCAPLTSFDWNEVDPYLLGTSSIDTTCTIWGLETGQVLGRVNLVSGHVKTQLIAHDKEVYDIAFSRAGGGRDMFASVGADGSVRMFDLRHLEHSTIIYEDPQHHPLLRLCWNKQDPNYLATMAMDGMEVVILDVRVPCTPVARLNNHRACVNGIAWAPHSSCHICTAGNHGGEKEIWEGWRKSVLLAP

SEQ ID NO: 774099 - protein, 682 aa, Homo sapiens
GAGAETVGGGGRGRCEARRGCVRGAGGGGCQSRLSLRRGTSAASSSRRGPARPGSAASDAACPAAMRPPQCLLHTPSLASPLLLLLLWLLGGGVGAEGREDAELLVTVRGGRLRGIRLKTPGGPVSAFLGIPFAEPPMGPRRFLPPEPKQPWSGVVDATTFQSVCYQYVDTLYPGFEGTEMWNPNRELSEDCLYLNVWTPYPRPTSPTPVLVWIYGGGFYSGASSLDVYDGRFLVQAERTVLVSMNYRVGAFGFLALPGSREAPGNVGLLDQRLALQWVQENVAAFGGDPTSVTLFGESAGAASVGMHLLSPPSRGLFHRAVLQSGAPNGPWATVGMGEARRRATQLAHLVGCPPGGTGGNDTELVACLRTRPAQVLVNHEWHVLPQESVFRFSFVPVVDGDFLSDTPEALINAGDFHGLQVLVGVVKDEGSYFLVYGAPGFSKDNESLISRAEFLAGVRVGVPQVSDLAAEAVVLHYTDWLHPEDPARLREALSDVVGDHNVVCPVAQLAGRLAAQGARVYAYVFEHRASTLSWPLWMGVPHGYEIEFIFGIPLDPSRNYTAEEKIFAQRLMRYWANFARTGDPNEPRDPKAPQWPPYTAGAQQYVSLDLRPLEVRRGLRAQACAFWNRFLPKLLSATASEAPSTCPGFTHGEAAPRPGLPLPLLLLHQLLLLFLSHLRRL

SEQ ID NO: 774100 - protein, 679 aa, Homo sapiens
GAGAETVGGGGRGRCEARRGCVRGAGGGGCQSRLSLRRGTSAASSSRRGPARPGSAASDAACPAAMRPPQCLLHTPSLASPLLLLLLWLLGGGVGAEGREDAELLVTVRGGRLRGIRLKTPGGPVSAFLGIPFAEPPMGPRRFLPPEPKQPWSGVVDATTFQSVCYQYVDTLYPGFEGTEMWNPNRELSEDCLYLNVWTPYPRPTSPTPVLVWIYGGGFYSGASSLDVYDGRFLVQAERTVLVSMNYRVGAFGFLALPGSREAPGNVGLLDQRLALQWVQENVAAFGGDPTSVTLFGESAGAASVGMHLLSPPSRGLFHRAVLQSGAPNGPWATVGMGEARRRATQLAHLVGCPPGGTGGNDTELVACLRTRPAQVLVNHEWHVLPQESVFRFSFVPVVDGDFLSDTPEALINAGDFHGLQVLVGVVKDEGSYFLVYGAPGFSKDNESLISRAEFLAGVRVGVPQVSDLAAEAVVLHYTDWLHPEDPARLREALSDVVGDHNVVCPVAQLAGRLAAQGARVYAYVFEHRASTLSWPLWMGVPHGYEIEFIFGIPLDPSRNYTAEEKIFAQRLMRYWANFARTGDPNEPRDPKAPQWPPYTAGAQQYVSLDLRPLEVRRGLRAQACAFWNRFLPKLLSATDTLDEAERQWKAEFHRWSSYMVHWKNQFDHYSKQDRCSDL

SEQ ID NO: 774101 - protein, 666 aa, Homo sapiens
LSPHLCQPAPPPLQLSDNPWADSALISSLLASRPTLHPFPFFLPADAACPAAMRPPQCLLHTPSLASPLLLLLLWLLGGGVGAEGREDAELLVTVRGGRLRGIRLKTPGGPVSAFLGIPFAEPPMGPRRFLPPEPKQPWSGVVDATTFQSVCYQYVDTLYPGFEGTEMWNPNRELSEDCLYLNVWTPYPRPTSPTPVLVWIYGGGFYSGASSLDVYDGRFLVQAERTVLVSMNYRVGAFGFLALPGSREAPGNVGLLDQRLALQWVQENVAAFGGDPTSVTLFGESAGAASVGMHLLSPPSRGLFHRAVLQSGAPNGPWATVGMGEARRRATQLAHLVGCPPGGTGGNDTELVACLRTRPAQVLVNHEWHVLPQESVFRFSFVPVVDGDFLSDTPEALINAGDFHGLQVLVGVVKDEGSYFLVYGAPGFSKDNESLISRAEFLAGVRVGVPQVSDLAAEAVVLHYTDWLHPEDPARLREALSDVVGDHNVVCPVAQLAGRLAAQGARVYAYVFEHRASTLSWPLWMGVPHGYEIEFIFGIPLDPSRNYTAEEKIFAQRLMRYWANFARTGDPNEPRDPKAPQWPPYTAGAQQYVSLDLRPLEVRRGLRAQACAFWNRFLPKLLSATDTLDEAERQWKAEFHRWSSYMVHWKNQFDHYSKQDRCSDL

SEQ ID NO: 774102 - protein, 795 aa, Homo sapiens
GAGAETVGGGGRGRCEARRGCVRGAGGGGCQSRLSLRRGTSAASSSRRGPARPGSAASDAACPAAMRPPQCLLHTPSLASPLLLLLLWLLGGGVGAEGREDAELLVTVRGGRLRGIRLKTPGGPVSAFLGIPFAEPPMGPRRFLPPEPKQPWSGVVDATTFQSVCYQYVDTLYPGFEGTEMWNPNRELSEDCLYLNVWTPYPRPTSPTPVLVWIYGGGFYSGASSLDVYDGRFLVQAERTVLVSMNYRVGAFGFLALPGSREAPGNVGLLDQRLALQWVQENVAAFGGDPTSVTLFGESAGAASVGMHLLSPPSRGLFHRAVLQSGAPNGPWATVGMGEARRRATQLAHLVGCPPGGTGGNDTELVACLRTRPAQVLVNHEWHVLPQESVFRFSFVPVVDGDFLSDTPEALINAGDFHGLQVTSGSAGVKLAPLGPNGPSPPCRDPGMRASPGPFPEVPEVLPEGSDPRVVSRADRKATMGLFSLSLHPSPDLVLSLSMVPGSVTVHLSGSLSVHLFLSTCLSVPVAPSHPPLPHPQVLVGVVKDEGSYFLVYGAPGFSKDNESLISRAEFLAGVRVGVPQVSDLAAEAVVLHYTDWLHPEDPARLREALSDVVGDHNVVCPVAQLAGRLAAQGARVYAYVFEHRASTLSWPLWMGVPHGYEIEFIFGIPLDPSRNYTAEEKIFAQRLMRYWANFARTGDPNEPRDPKAPQWPPYTAGAQQYVSLDLRPLEVRRGLRAQACAFWNRFLPKLLSATDTLDEAERQWKAEFHRWSSYMVHWKNQFDHYSKQDRCSDL

SEQ ID NO: 774103 - protein, 867 aa, Homo sapiens
GAGAETVGGGGRGRCEARRGCVRGAGGGGCQSRLSLRRGTSAASSSRRGPARPGSAASDAACPAAMRPPQCLLHTPSLASPLLLLLLWLLGGGVGAEGREDAELLVTVRGGRLRGIRLKTPGGPVSAFLGIPFAEPPMGPRRFLPPEPKQPWSGVVDATTFQSVCYQYVDTLYPGFEGTEMWNPNRELSEDCLYLNVWTPYPRPTSPTPVLVWIYGGGFYSGASSLDVYDGRFLVQAERTVLVSMNYRVGAFGFLALPGSREAPGNVGLLDQRLALQWVQENVAAFGGDPTSVTLFGESAGAASVGMHLLSPPSRGLFHRAVLQSGAPNGPWATVGMGEARRRATQLAHLVGCPPGGTGGNDTELVACLRTRPAQVLVNHEWHVLPQESVFRFSFVPVVDGDFLSDTPEALINAGDFHGLQVTSGSAGVKLAPLGPNGPSPPCRDPGMRASPGPFPEVPEVLPEGSDPRVVSRADRKATMGLFSLSLHPSPDLVLSLSMVPGSVTVHLSGSLSVHLFLSTCLSVPVAPSHPPLPHPQVLVGVVKDEGSYFLVYGAPGFSKDNESLISRAEFLAGVRVGVPQVSDLAAEAVVLHYTDWLHPEDPARLREALSDVVGDHNVVCPVAQLAGRLAAQGARVYAYVFEHRASTLSWPLWMGVPHGYEIEFIFGIPLDPSRNYTAEEKIFAQRLMRYWANFARTGDPNEPRDPKAPQWPPYTAGAQQYVSLDLRPLEVRRGLRAQACAFWNRFLPKLLSATASEAPSTCPGFTHGEAAPRPGLPLPLLLLHQLLLLFLSHRGPSSNEWSDRGEGPHSGISDLVLPSSSNRETHTGQGRRRGPCLPPFSGTPTPLLFEWKWKSQYSFIKLSFGT

SEQ ID NO: 774104 - protein, 744 aa, Homo sapiens
LQEAGAARYCRMHLGRGDPAAAALSTRVNSWRAGRGAICAGQAPRSRLGAPEPGRSHLPAAWPMNARPGDVMPRPDPGDESPKSPVREPAQTHPRGFQKFPLPPRSAPRPAALRVLPRCPAFSDAACPAAMRPPQCLLHTPSLASPLLLLLLWLLGGGVGAEGREDAELLVTVRGGRLRGIRLKTPGGPVSAFLGIPFAEPPMGPRRFLPPEPKQPWSGVVDATTFQSVCYQYVDTLYPGFEGTEMWNPNRELSEDCLYLNVWTPYPRPTSPTPVLVWIYGGGFYSGASSLDVYDGRFLVQAERTVLVSMNYRVGAFGFLALPGSREAPGNVGLLDQRLALQWVQENVAAFGGDPTSVTLFGESAGAASVGMHLLSPPSRGLFHRAVLQSGAPNGPWATVGMGEARRRATQLAHLVGCPPGGTGGNDTELVACLRTRPAQVLVNHEWHVLPQESVFRFSFVPVVDGDFLSDTPEALINAGDFHGLQVLVGVVKDEGSYFLVYGAPGFSKDNESLISRAEFLAGVRVGVPQVSDLAAEAVVLHYTDWLHPEDPARLREALSDVVGDHNVVCPVAQLAGRLAAQGARVYAYVFEHRASTLSWPLWMGVPHGYEIEFIFGIPLDPSRNYTAEEKIFAQRLMRYWANFARTGDPNEPRDPKAPQWPPYTAGAQQYVSLDLRPLEVRRGLRAQACAFWNRFLPKLLSATDTLDEAERQWKAEFHRWSSYMVHWKNQFDHYSKQDRCSDL

SEQ ID NO: 774105 - protein, 634 aa, Homo sapiens
CHCALSSVGVWHWNAACPAAMRPPQCLLHTPSLASPLLLLLLWLLGGGVGAEGREDAELLVTVRGGRLRGIRLKTPGGPVSAFLGIPFAEPPMGPRRFLPPEPKQPWSGVVDATTFQSVCYQYVDTLYPGFEGTEMWNPNRELSEDCLYLNVWTPYPRPTSPTPVLVWIYGGGFYSGASSLDVYDGRFLVQAERTVLVSMNYRVGAFGFLALPGSREAPGNVGLLDQRLALQWVQENVAAFGGDPTSVTLFGESAGAASVGMHLLSPPSRGLFHRAVLQSGAPNGPWATVGMGEARRRATQLAHLVGCPPGGTGGNDTELVACLRTRPAQVLVNHEWHVLPQESVFRFSFVPVVDGDFLSDTPEALINAGDFHGLQVLVGVVKDEGSYFLVYGAPGFSKDNESLISRAEFLAGVRVGVPQVSDLAAEAVVLHYTDWLHPEDPARLREALSDVVGDHNVVCPVAQLAGRLAAQGARVYAYVFEHRASTLSWPLWMGVPHGYEIEFIFGIPLDPSRNYTAEEKIFAQRLMRYWANFARTGDPNEPRDPKAPQWPPYTAGAQQYVSLDLRPLEVRRGLRAQACAFWNRFLPKLLSATDTLDEAERQWKAEFHRWSSYMVHWKNQFDHYSKQDRCSDL

SEQ ID NO: 774106 - protein, 278 aa, Homo sapiens
KIRTIQRRLAWPLRDFHGLQVLVGVVKDEGSYFLVYGAPGFSKDNESLISRAEFLAGVRVGVPQVSDLAAEAVVLHYTDWLHPEDPARLREALSDVVGDHNVVCPVAQLAGRLAAQGARVYAYVFEHRASTLSWPLWMGVPHGYEIEFIFGIPLDPSRNYTAEEKIFAQRLMRYWANFARTGDPNEPRDPKAPQWPPYTAGAQQYVSLDLRPLEVRRGLRAQACAFWNRFLPKLLSATDTLDEAERQWKAEFHRWSSYMVHWKNQFDHYSKQDRCSDL

SEQ ID NO: 774107 - protein, 3418 aa, Homo sapiens [sequence omitted]

SEQ ID NO: 774108 - protein, 3460 aa, Homo sapiens
MPIGSKERPTFFEIFKTRCNKADLGPISLNWFEELSSEAPPYNSEPAEESEHKNNNYEPNLFKTPQRKPSYNQLASTPIIFKEQGLTLPLYQSPVKELDKFKLDLGRNVPNSRHKSLRTVKTKMDQADDVSCPLLNSCLSESPVVLQCTHVTPQRDKSVVCGSLFHTPKFVKGRQTPKHISESLGAEVDPDMSWSSSLATPPTLSSTVLIVRNEEASETVFPHDTTANVKSYFSNHDESLKKNDRFIASVTDSENTNQREAASHGFGKTSGNSFKVNSCKDHIGKSMPNVLEDEVYETVVDTSEEDSFSLCFSKCRTKNLQKVRTSKTRKKIFHEANADECEKSKNQVKEKYSFVSEVEPNDTDPLDSNVAHQKPFESGSDKISKEVVPSLACEWSQLTLSGLNGAQMEKIPLLHISSCDQNISEKDLLDTENKRKKDFLTSENSLPRISSLPKSEKPLNEETVVNKRDEEQHLESHTDCILAVKQAISGTSPVASSFQGIKKSIFRIRESPKETFNASFSGHMTDPNFKKETEASESGLEIHTVCSQKEDSLCPNLIDNGSWPATTTQNSVALKNAGLISTLKKKTNKFIYAIHDETSYKGKKIPKDQKSELINCSAQFEANAFEAPLTFANADSGLLHSSVKRSCSQNDSEEPTLSLTSSFGTILRKCSRNETCSNNTVISQDLDYKEAKCNKEKLQLFITPEADSLSCLQEGQCENDPKSKKVSDIKEEVLAAACHPVQHSKVEYSDTDFQSQKSLLYDHENASTLILTPTSKDVLSNLVMISRGKESYKMSDKLKGNNYESDVELTKNIPMEKNQDVCALNENYKNVELLPPEKYMRVASPSRKVQFNQNTNLRVIQKNQEETTSISKITVNPDSEELFSDNENNFVFQVANERNNLALGNTKELHETDLTCVNEPIFKNSTMVLYGDTGDKQATQVSIKKDLVYVLAEENKNSVKQHIKMTLGQDLKSDISLNIDKIPEKNNDYMNKWAGLLGPISNHSFGGSFRTASNKEIKLSEHNIKKSKMFFKDIEEQYPTSLACVEIVNTLALDNQKKLSKPQSINTVSAHLQSSVVVSDCKNSHITPQMLFSKQDFNSNHNLTPSQKAEITELSTILEESGSQFEFTQFRKPSYILQKSTFEVPENQMTILKTTSEECRDADLHVIMNAPSIGQVDSSKQFEGTVEIKRKFAGLLKNDCNKSASGYLTDENEVGFRGFYSAHGTKLNVSTEALQKAVKLFSDIENISEETSAEVHPISLSSSKCHDSVVSMFKIENHNDKTVSEKNNKCQLILQNNIEMTTGTFVEEITENYKRNTENEDNKYTAASRNSHNLEFDGSDSSKNDTVCIHKDETDLLFTDQHNICLKLSGQFMKEGNTQIKEDLSDLTFLEVAKAQEACHGNTSNKEQLTATKTEQNIKDFETSDTFFQTASGKNISVAKESFNKIVNFFDQKPEELHNFSLNSELHSDIRKNKMDILSYEETDIVKHKILKESVPVGTGNQLVTFQGQPERDEKIKEPTLLGFHTASGKKVKIAKESLDKVKNLFDEKEQGTSEITSFSHQWAKTLKYREACKDLELACETIEITAAPKCKEMQNSLNNDKNLVSIETVVPPKLLSDNLCRQTENLKTSKSIFLKVKVHENVEKETAKSPATCYTNQSPYSVIENSALAFYTSCSRKTSVSQTSLLEAKKWLREGIFDGQPERINTADYVGNYLYENNSNSTIAENDKNHLSEKQDTYLSNSSMSNSYSYHSDEVYNDSGYLSKNKLDSGIEPVLKNVEDQKNTSFSKVISNVKDANAYPQTVNEDICVEELVTSSSPCKNKNAAIKLSISNSNNFEVGPPAFRIASGKIVCVSHETIKKVKDIFTDSFSKVIKENNENKSKICQTKIMAGCYEALDDSEDILHNSLDNDECSTHSHKVFADIQSEEILQHNQNMSGLEKVSKISPCDVSLETSDICKCSIGKLHKSVSSANTCGIFSTASGKSVQVSDASLQNARQVFSEIEDSTKQVFSKVLFKSNEHSDQLTREENTAIRTPEHLISQKGFSYNVVNSSAFSGFSTASGKQVSILESSLHKVKGVLEEFDLIRTEHSLHYSPTSRQNVSKILPRVDKRNPEHCVNSEMEKTCSKEFKLSNNLNVEGGSSENNHSIKVSPYLSQFQQDKQQLVLGTKVSLVENIHVLGKEQASPKNVKMEIGKTETFSDVPVKTNIEVCSTYSKDSENYFETEAVEIAKAFMEDDELTDSKLPSHATHSLFTCPENEEMVLSNSRIGKRRGEPLILVGEPSIKRNLLNEFDRIIENQEKSLKASKSTPDGTIKDRRLFMHHVSLEPITCVPFRTTKERQEIQNPNFTAPGQEFLSKSHLYEHLTLEKSSSNLAVSGHPFYQVSATRNEKMRHLITTGRPTKVFVPPFKTKSHFHRVEQCVRNINLEENRQKQNIDGHGSDDSKNKINDNEIHQFNKNNSNQAAAVTFTKCEEEPLDLITSLQNARDIQDMRIKKKQRQRVFPQPGSLYLAKTSTLPRISLKAAVGGQVPSACSHKQLYTYGVSKHCIKINSKNAESFQFHTEDYFGKESLWTGKGIQLADGGWLIPSNDGKAGKEEFYRALCDTPGVDPKLISRIWVYNHYRWIIWKLAAMECAFPKEFANRCLSPERVLLQLKYRYDTEIDRSRRSAIKKIMERDDTAAKTLVLCVSDIISLSANISETSSNKTSSADTQKVAIIELTDGWYAVKAQLDPPLLAVLKNGRLTVGQKIILHGAELVGSPDACTPLEAPESLMLKISANSTRPARWYTKLGFFPDPRPFPLPLSSLFSDGGNVGCVDVIIQRAYPIQWMEKTSSGLYIFRNEREEEKEAAKYVEAQQKRLEALFTKIQEEFEEHEENTTKPYLPSRALTRQQVRALQDGAELYEAVKNAADPAYLEGYFSEEQLRALNNHRQMLNDKKQAQIQLEIRKAMESAEQKEQGLSRDVTTVWKLRIVSYSKKEKDSVILSIWRPSSDLYSLLTEGKRYRIYHLATSKSKSKSERANIQLAATKKTQYQQLPVSDEILFQIYQPREPLHFSKFLDPDFQPSCSEVDLIGFVVSVVKKTGLAPFVYLSDECYNLLAIKFWIDLNEDIIKPHMLIAASNLQWRPESKSGLLTLFAGDFSVFSASPKEGHFQETFNKMKNTVERQSLALSPPGWSTIAQSRITAVSASWAQADSRALASQVAGTQNIDILCNEAENKLMHILHANDPKWSTPTKDCTSGPYTAQIIPGTGNKLLMSSPNCEIYYQSPLSLCMAKRKSVSTPVSAQMTSKSCKGEKEIDDQKNCKKRRALDFLSRLPLPPPVSPICTFVSPAAQKAFQPPRSCGTKYETPIKKKELNSPQMTPFKKFNEISLLESNSIADEELALINTQALLSGSTGEKQFISVSESTRTAPTSSEDYLRLKRRCTTSLIKEQESSQASTEECEKNKQDTITTKKYI

SEQ ID NO: 774109 - protein, 337 aa, Homo sapiens
MSSSPVKRQRMESALDQLKQFTTVVADTGDFHAIDEYKPQDATTNPSLILAAAQMPAYQELVEEAIAYGRKLGGSQEDQIKNAIDKLFVLFGAEILKKIPGRVSTEVDARLSFDKDAMVARARRLIELYKEAGISKDRILIKLSSTWEGIQAGKELEEQHGIHCNMTLLFSFAQAVACAEAGVTLISPFVGRILDWHVANTDKKSYEPLEDPGVKSVTKIYNYYKKFSYKTIVMGASFRNTGEIKALAGCDFLTISPKLLGELLQDNAKLVPVLSAKAAQASDLEKIHLDEKSFRWLHNEDQMAVEKLSDGIRKFAADAVKLERMLTERMFNAENGK

SEQ ID NO: 774110 - protein, 313 aa, Homo sapiens
MSSSPVKRQRMESALDQLKQFTTVVADTGDFHAIDEYKPQDATTNPSLILAAAQMPAYQELVEEAIAYGRKLGGSQEDQIKNAIDKLFVLFGAEILKKIPGRVSTEVDARLSFDKDAMVARARRLIELYKEAGISKDRILIKLSSTWEGIQAGKELEEQHGIHCNMTLLFSFAQAVACAEAGVTLISPFVGRILDWHVANTDKKSYEPLEDPGVKSVTKIYNYYKKFSYKTIVMGASFRNTGEIKLVPVLSAKAAQASDLEKIHLDEKSFRWLHNEDQMAVEKLSDGIRKFAADAVKLERMLTERMFNAENGK

SEQ ID NO: 774111 - protein, 337 aa, Homo sapiens; identical to SEQ ID NO: 774109

SEQ ID NO: 774112 - protein, 337 aa, Homo sapiens; identical to SEQ ID NO: 774109

SEQ ID NO: 774113 - protein, 102 aa, Homo sapiens
WQRLVTLGSNHASKPGLSLTPSLPQDKQYKGEKNTLGSFRITCITDPMTKAAIEPQSRERRLGARSAAWLPAPRLVQKVLLLDIPCQDLETDGLFQKFFILR

SEQ ID NO: 774114 - protein, 80 aa, Homo sapiens
RDQISESGSWVDGSFSPCGGGSGMGRNQWGEVRHATNPRPIPWQLAEFSKEHSFSQSIRRLQVREAQLLRPHLTVVPPWE

SEQ ID NO: 774115 - protein, 315 aa, Homo sapiens
MPLKLRGKKKAKSKETAGLVEGEPTGAGGGSLSASRAPARRLVFHAQLAHGSATGRVEGFSSIQELYAQIAGAFEISPSEILYCTLNTPKIDMERLLGGQLGLEDFIFAHVKGIEKEVNVYKSEDSLGLTITDNGVGYAFIKRIKDGGVIDSVKTICVGDHIESINGENIVGWRHYDVAKKLKELKKEELFTMKLIEPKKAFEIELRSKAGKSSGEKIGCGRATLRLRSKGPATVEEMPSETKAKAIEKIDDVLELYMGIRDIDLATTMFEAGKDKVNPDEFAVALDETLGDFAFPDEFVFDVWGVIGDAKRRGL

SEQ ID NO: 774116 - protein, 315 aa, Homo sapiens; identical to SEQ ID NO: 774115

SEQ ID NO: 774117 - protein, 79 aa, Homo sapiens
  misc_feature (4)..(4): Xaa can be any naturally occurring amino acid
TWCXRTQLRAIEKIDDVLELYMGIRDIDLATTMFEAGKDKVNPDEFAVALDETLGDFAFPDEFVFDVWGVIGDAKRRGL

SEQ ID NO: 774118 - protein, 80 aa, Homo sapiens
SNRGVKGQDGAGAAPKHGENQRPQEWQTLDMLLEMGGQNDQRSGSLHLRGSRVTSFKGGNWGSWNLPCTPDASGALENLP

SEQ ID NO: 774119 - protein, 105 aa, Homo sapiens
MINVQGPFISEGLESPHLKVAWDTSYPAIRRPGLAQQLHPPLLFTHDTSLPTRHCWLTCDTPGSSDARQVLLVCVSRGLQRTRASRGHTHLCIWRKRSMRRNLLL

SEQ ID NO: 774120 - protein, 257 aa, Homo sapiens
MWTGSAGSWRPTPAFVPSFLGVSWPRRTRGLSHLCPGLTVAPFSGALLSPRLLPLQLLGSAPASPRASPIPGPSLARDPRGCLRQPSPLPGGSPLLSPAALPPAPGLGNLEDPEGGSGMCDTSRRLTSSLAGSTLHREPAAMLPLSCPCGAAERDAWAGWAVAAVGEALWAVLFPEKLQPQGAGAGPGLTEWDSRGGRVGVPYDVGHCCTLGRGPSAVMPKFQRSDCLGALRLPDPAGRPILGEGESGVGQKAHPDN

SEQ ID NO: 774121 - protein, 144 aa, Homo sapiens
AESATELQPFSETGTRDGSHAPDSLAPGLSYGIGPRAAGTYVFQKSVTFEDVAVYFTQAEWDGLSPAQRTLYRDVMLENYGNVASLGFPLLKPAVISQLEGGSELGGSSPLAAGTGLQGLQTVDIQTDNDLTKEMYERKRECII

SEQ ID NO: 774122 - protein, 65 aa, Homo sapiens
SEFKVSEEHDPSFLLGGHAVGSCHQVELVYRDRPKGWSHIPETTNTWWGVECPGSPADSGSPVFP

SEQ ID NO: 774123 - protein, 124 aa, Homo sapiens
PRTETKEILAHRGSPGGTAQETGEETRLGPPNLPLARKDFPNGKSHGDCCCQYRKFSLLSALKASHCTALALGSPEIAGEKKGSTGRFRHVEKECAWLYQLELGSEVELRRLVQGECSAKRRCC

SEQ ID NO: 774124 - protein, 108 aa, Homo sapiens
MLLSNGMEENLRTDPNGIIYMEWNGIIHGLNVIIIERNRMESSNGLKWNNHCTEWNGIIIGWKRMESSSNGNERSHHLMELHGIIIKWNRMESTSNGVKWNHDVEMRV

SEQ ID NO: 774125 - protein, 638 aa, Homo sapiens
MDLWQLLLTLALAGSSDAFSGSEATAAILSRAPWSLQSVNPGLKTNSSKEPKFTKCRSPERETFSCHWTDEVHHGTKNLGPIQLFYTRRNTQEWTQEWKECPDYVSAGENSCYFNSSFTSIWIPYCIKLTSNGGTVDEKCFSVDEIVQPDPPIALNWTLLNVSLTGIHADIQVRWEAPRNADIQKGWMVLEYELQYKEVNETKWKMMDPILTTSVPVYSLKVDKEYEVRVRSKQRNSGNYGEFSEVLYVTLPQMSQFTCEEDFYFPWLLIIIFGIFGLTVMLFVFLFSKQQRIKMLILPPVPVPKIKGIDPDLLKEGKLEEVNTILAIHDSYKPEFHSDDSWVEFIELDIDEPDEKTEESDTDRLLSSDHEKSHSNLGVKDGDSGRTSCCEPDILETDFNANDIHEGTSEVAQPQRLKGEADLLCLDQKNQNNSPYHDACPATQQPSVIQAEKNKPQPLPTEGAESTHQAAHIQLSNPSSLSNIDFYAQVSDITPAGSVVLSPGQKNKAGMSQCDMHPEMVSLCQENFLMDNAYFCEADAKKCIPVAPHIKVESHIQPSLNQEDIYITTESLTTAAGRPGTGEHVPGSEMPVPDYTSIHIVQSPQGLILNATALPLPDKEFLSSCGYVSTDQLNKIMP

SEQ ID NO: 774126 - protein, 638 aa, Homo sapiens; identical to SEQ ID NO: 774125

SEQ ID NO: 774127 - protein, 344 aa, Homo sapiens [sequence omitted]

SEQ ID NO: 774128 - protein, 134 aa, Homo sapiens
AAPARGCPAYRAWRFRARPGAGSESLLRVAVARRGAHKLSQVRWRRWAALGCKLGSPASSRGFGGAPLVPWPHGAEGRRPEPRSLTLAGPALPSPAPAGAPCAARVGVPGRPAGSFPPGGGGAGVWAQTGRRGP

SEQ ID NO: 774129 - protein, 110 aa, Homo sapiens
APVVLSRDHHDVSGTDSPFRETSNIYDGSAFCADMAVQNFVGDACRGATWVALHNGGGVGWGEVINGGFGLVLDGTPEAEGRARLMLSWDVSNGVARRCWSGNQKAYEII

SEQ ID NO: 774130 - protein, 104 aa, Homo sapiens
PRDLLASASHQVTCFLAKISEALHSVKIPNMHKSVTKYSYFGFGSLHTFSYLVTHLLKVSVLTLPTGKAVGFPKLPGRCWDAEVPIWEVGGKHESQRAQSCLFL

SEQ ID NO: 774131 - protein, 126 aa, Homo sapiens
MGQSIPRLMEAGARTTKLSDWFAQDRESREHKLQQELSFRGQKKAAKLVGCRETRTQVHAISWVQRGNPAGQEQGSQGTRGQQMLKRTKVSGKKESDTYKKGHLQGEKPVPYSYTGPSSGPLTPVS

SEQ ID NO: 774132 - protein, 53 aa, Homo sapiens
VLPPKLKDNTAITSSHYKTIICVTGQLENTEEENQPPQSYPQNMSGFGPFSTV

SEQ ID NO: 774133 - protein, 544 aa, Homo sapiens
RGFASVALLNPSCRESDSTDGASVVVQPPQVNSSGAKGDSHSLVARPEDVGTSLYFVNDSLQQVTFSSSVGVVVPCPAAGSPSAALRWYLATGDDIYDVPHIRHVHANGTLQLYPFSPSAFNSFIHDNDYFCTAENAAGKIRSPNIRVKAVFREPYTVRVEDQRSMRGNVAVFKCLIPSSVQEYVSVVSWEKDTVSIIPEHRFFITYHGGLYISDVQKEDALSTYRCITKHKYSGETRQSNGARLSVTDPAESIPTILDGFHSQEVWAGHTVELPCTASGYPIPAIRWLKDGRPLPADSRWTKRITGLTISDLRTEDSGTYICEVTNTFGSAEATGILMVIDPLHVTLTPKKLKTGIGSTVILSCALTGSPEFTIRWYRNTELVLPDEAISIRGLSNETLLITSAQKSHSGAYQCFATRKAQTAQDFAIIALEDGTPRIVSSFSEKVVNPGEQFSLMCAAKGAPPPTVTWALDDEPIVRDGSHRTNQYTMSDGTTISHMNVTGPQIRDGGVYRCTARNLVGSAEYQARINVRGACLHLNIRIGF

SEQ ID NO: 774134 - protein, 1650 aa, Homo sapiens
MDGTPRIVSSFSEKVVNPGEQFSLMCAAKGAPPPTVTWALDDEPIVRDGSHRTNQYTMSDGTTISHMNVTGPQIRDGGVYRCTARNLVGSAEYQARINVRGPPSIRAMRNITAVAGRDTLINCRVIGYPYYSIKWYKDALLLPDNHRQVVFENGTLKLTDVQKGMDEGEYLCSVLIQPQLSISQSVHVAVKVPPLIQPFEFPPASIGQLLYIPCVVSSGDMPIRITWRKDGQVIISGSGVTIESKEFMSSLQISSVSLKHNGNYTCIASNAAATVSRERQLIVRVPPRFVVQPNNQDGIYGKAGVLNCSVDGYPPPKVMWKHAKGSGNPQQYHPVPLTGRIQILPNSSLLIRHVLEEDIGYYLCQASNGVGTDISKSMFLTVKIPAMITSHPNTTIAIKGHAKELNCTARGERPIIIRWEKGDTVIDPDRVMRYAIATKDNGDEVVSTLKLKPADRGDSVFFSCHAINSYGEDRGLIQLTVQEPPDPPELEIREVKARSMNLRWTQRFDGNSIITGFDIEYKNKSDSWDFKQSTRNISPTINQANIVDLHPASVYSIRMYSFNKIGRSEPSKELTISTEEAAPDGPPMDVTLQPVTSQSIQVTWKAPKKELQNGVIRGYQIGYRENSPGSNGQYSIVEMKATGDSEVYTLDNLKKFAQYGVVVQAFNRAGTGPSSSEINATTLEDVPSQPPENVRALSITSDVAVISWSEPPRSTLNGVLKGYRVIFWSLYVDGEWGEMQNITTTRERVELRGMEKFTNYSVQVLAYTQAGDGVRSSVLYIQTKEDVPGPPAGIKAVPSSASSVVVSWLPPTKPNGVIRKYTIFCSSPGSGQPAPSEYETSPEQLFYRIAHLNRGQQYLLWVAAVTSAGRGNSSEKVTIEPAGKAPAKIISFGGTVTTPWMKDVRLPCNSVGDPAPAVKWTKDSEDSAIPVSMDGHRLIHTNGTLLLRAVKAEDSGYYTCTATNTGGFDTIIVNLLVQVPPDQPRLTVSKTSASSITLTWIPGDNGGSSIRGFVLQYSVDNSEEWKDVFISSSERSFKLDSLKCGTWYKVKLAAKNSVGSGRISEIIEAKTHGREPSFSKDQHLFTHINSTHARLNLQGWNNGGCPITAIVLEYRPKGTWAWQGLRANSSGEVFLTELREATWYELRMRACNSAGCGNETAQFATLDYDGSTIPPIKSAQGEGDDVKKLFTIGCPVILATLGVALLFIVRKKRKEKRLKRLRDAKSLAEMLISKNNRSFDTPVKGPPQGPRLHIDIPRVQLLIEDKEGIKQLGDDKATIPVTDAEFSQAVNPQSFCTGVSLHHPTLIQSTGPLIDMSDIRPGTNPVSRKNVKSAHSTRNRYSSQWTLTKCQASTPARTLTSDWRTVGSQHGVTVTESDSYSASLSQDTDKGRNSMVSTESASSTYEELARAYEHAKLEEQLQHAKFEITECFISDSSSDQMTTGTNENADSMTSMSTPSEPGICRFTASPPKPQDADRGKNVAVPIPHRANKSDYCNLPLYAKSEAFFRKADGREPCPVVPPREASIRNLARTYHTQARHLTLDPASKSLGLPHPGAPAAASTATLPQRTLAMPAPPAGTAPPAPGPTPAEPPTAPSAAPPAPSTEPPRAGGPHTKMGGSRDSLLEMSTSGVGRSQKQGAGAYSKSYTLV

SEQ ID NO: 774135 - protein, 101 aa, Homo sapiens
LINCRVIGYPYYSIKWYKDALLLPDNHRQVVFENGTLKLTDVQKGMDEGEYLCSVLIQPQLSISQSVHVAVKGRPPSPARAPARLTTQDAWAFPQLGLRQQ

SEQ ID NO: 774136 - protein, 2195 aa, Homo sapiens
MAGCWHMDDTCLSATTGSKPVGDRDPSPLRQRSRVGAVWPGPPLLFLGLWGWGPSGLRARAALTTRGAAGGRGERPPSPAPRMTGAGEPRREEPPPQPSAGLRSRESGAPSAGGWERAERGRGAAARPATGPPPRRIGPLYGMWLVTFLLLLDSLHKARPEDVGTSLYFVNDSLQQVTFSSSVGVVVPCPAAGSPSAALRWYLATGDDIYDVPHIRHVHANGTLQLYPFSPSAFNSFIHDNDYFCTAENAAGKIRSPNIRVKAVFREPYTVRVEDQRSMRGNVAVFKCLIPSSVQEYVSVVSWEKDTVSIIPEHRFFITYHGGLYISDVQKEDALSTYRCITKHKYSGETRQSNGARLSVTDPAESIPTILDGFHSQEVWAGHTVELPCTASGYPIPAIRWLKDGRPLPADSRWTKRITGLTISDLRTEDSGTYICEVTNTFGSAEATGILMVIDPLHVTLTPKKLKTGIGSTVILSCALTGSPEFTIRWYRNTELVLPDEAISIRGLSNETLLITSAQKSHSGAYQCFATRKAQTAQDFAIIALEDGTPRIVSSFSEKVVNPGEQFSLMCAAKGAPPPTVTWALDDEPIVRDGSHRTNQYTMSDGTTISHMNVTGPQIRDGGVYRCTARNLVGSAEYQARINVRGPPSIRAMRNITAVAGRDTLINCRVIGYPYYSIKWYKDALLLPDNHRQVVFENGTLKLTDVQKGMDEGEYLCSVLIQPQLSISQSVHVAVKVPPLIQPFEFPPASIGQLLYIPCVVSSGDMPIRITWRKDGQVIISGSGVTIESKEFMSSLQISSVSLKHNGNYTCIASNAAATVSRERQLIVRVPPRFVVQPNNQDGIYGKAGVLNCSVDGYPPPKVMWKHAKGSGNPQQYHPVPLTGRIQILPNSSLLIRHVLEEDIGYYLCQASNGVGTDISKSMFLTVKIPAMITSHPNTTIAIKGHAKELNCTARGERPIIIRWEKGDTVIDPDRVMRYAIATKDNGDEVVSTLKLKPADRGDSVFFSCHAINSYGEDRGLIQLTVQEPPDPPELEIREVKARSMNLRWTQRFDGNSIITGFDIEYKNKSDSWDFKQSTRNISPTINQANIVDLHPASVYSIRMYSFNKIGRSEPSKELTISTEEAAPDGPPMDVTLQPVTSQSIQVTWKAPKKELQNGVIRGYQIGYRENSPGSNGQYSIVEMKATGDSEVYTLDNLKKFAQYGVVVQAFNRAGTGPSSSEINATTLEDVPSQPPENVRALSITSDVAVISWSEPPRSTLNGVLKGYRVIFWSLYVDGEWGEMQNITTTRERVELRGMEKFTNYSVQVLAYTQAGDGVRSSVLYIQTKEDVPGPPAGIKAVPSSASSVVVSWLPPTKPNGVIRKYTIFCSSPGSGQPAPSEYETSPEQLFYRIAHLNRGQQYLLWVAAVTSAGRGNSSEKVTIEPAGKAPAKIISFGGTVTTPWMKDVRLPCNSVGDPAPAVKWTKDSEDSAIPVSMDGHRLIHTNGTLLLRAVKAEDSGYYTCTATNTGGFDTIIVNLLVQVPPDQPRLTVSKTSASSITLTWIPGDNGGSSIRGFVLQYSVDNSEEWKDVFISSSERSFKLDSLKCGTWYKVKLAAKNSVGSGRISEIIEAKTHGREPSFSKDQHLFTHINSTHARLNLQGWNNGGCPITAIVLEYRPKGTWAWQGLRANSSGEVFLTELREATWYELRMRACNSAGCGNETAQFATLDYDGSTIPPIKSAQGEGDDVKKLFTIGCPVILATLGVALLFIVRKKRKEKRLKRLRDAKSLAEMLISKNNRSFDTPVKGPPQGPRLHIDIPRVQLLIEDKEGIKQLGDDKATIPVTDAEFSQAVNPQSFCTGVSLHHPTLIQSTGPLIDMSDIRPGTNPVSRKNVKSAHSTRNRYSSQWTLTKCQASTPARTLTSDWRTVGSQHGVTVTESDSYSASLSQDTDKGRNSMVSTESASSTYEELARAYEHAKLEEQLQHAKFEITECFISDSSSDQMTTGTNENADSMTSMSTPSEPGICRFTASPPKPQDADRGKNVAVPIPHRANKSDYCNLPLYAKSEAFFRKADGREPCPVVPPREASIRNLARTYHTQARHLTLDPASKSLGLPHPGAPAAASTATLPQRTLAMPAPPAGTAPPAPGPTPAEPPTAPSAAPPAPSTEPPRAGGPHTKMGGSRDSLLEMSTSGVGRSQKQGAGAYSKSYTLV

SEQ ID NO: 774137 - protein, 57 aa, Homo sapiens
PSKPQLKDATSKKLSQIDLPPSPNSVIFPKGCAPAFSQLTRPSPCSVPGPPAGIKAV

SEQ ID NO: 774138 - protein, 264 aa, Homo sapiens
LGPLPGRPQHHTHCKPGLFFIHHHRPGLNITAWGLVPSGGTSGLMRGDSPHYRSIFIRQYMQQWKFCETCSNPGAAGRTVPKPTLDPTARKWVQNCLARSHPCVNRPTTPRALPDLPSTSQPLPSPLPQPAGPTLAGGCSLLTSLARAMPSTSRKAYREMLQVTVIFEHEKLTQRTFWLRERSWGSRLLSWLCSAMPGRKMGTSSDPGWLRACREEPLEREPLWAGRTATGVSIYWYRGEEEKAGGPGDGPSKSVTPELLLSPQ

SEQ ID NO: 774139 - protein, 441 aa, Homo sapiens
CVLMAFLDHRGLRHSSAKVRSRTAYLFSRFVKSLNKQMNPFIEDILNRIQDLLELSPPENGHQSLLSSDDQLFIYETAGVLIVNSEYPAERKQALMRNLLTPLMEKFKILLEKLMLAQDEDRQASLADCLNHAVGFASPTSKAFSNKQTIKQCGCSEVCLDCLQTFLPALSCPLQKDILRSGVRTFLHRMVICLGEEVFPFIPAASERMLKDCEAEDLQEFILLINQITAKFKIQVSPFLQQMFMPLLHAIFEVLLRPAEENDQSAALEKQMLRRSYFAFLQTVTGSGMSEVIANQGAENVERVLVTVIQGAVEYPDPIAQKTCFIILSKLVELWGGKDGPVGFADFVYKHIVPACFLAPLKQTFDLADAQTVLALSECAVTLKTIHLKRGPECVQYLQQEYLPSLQVAPEIIQEFCQALQQPDAKVFKNYLKVFFQRAKP

SEQ ID NO: 774140 - protein, 441 aa, Homo sapiens; identical to SEQ ID NO: 774139

SEQ ID NO: 774141 - protein, 441 aa, Homo sapiens; identical to SEQ ID NO: 774139

SEQ ID NO: 774142 - protein, 104 aa, Homo sapiens
  misc_feature (10)..(10): Xaa can be any naturally occurring amino acid
MPACFKRKPXFKRRQGPKRTSIQSEREEVSSWRRADDRKDDRVEERDPPRRVPPPALSRDRERDRDREREGEKEKASWRAEKDRESLRRTKNETDEDGWTTVRR

SEQ ID NO: 774143 - protein, 342 aa, Homo sapiens
MNSNLPAENLTIAVNMTKTLPTAVTHGFNSTNDPPSMSITRLFPALLECFGIVLCGYIAGRANVITSTQAKGLGNFVSRFALPALLFKNMVVLNFSNVDWSFLYSILIAKASVFFIVCVLTLLVASPDSRFSKAGLFPIFATQSNDFALGYPIVEALYQTTYPEYLQYIYLVAPISLMMLNPIGFIFCEIQKWKDTQNASQNKIKIVGLGLLRVLQNPIVFMVFIGIAFNFILDRKVPVYVENFLDGLGNSFSGSALFYLGLTMVGKIKRLKKSAFVVLILLITAKLLVLPLLCREMVELLDKGDSVVNHTSLSNYAFLYGVFPVAPGVAIFATQFNMEVEI

SEQ ID NO: 774144 - protein, 342 aa, Homo sapiens; identical to SEQ ID NO: 774143

SEQ ID NO: 774145 - protein, 342 aa, Homo sapiens; identical to SEQ ID NO: 774143

SEQ ID NO: 774146 - protein, 77 aa, Homo sapiens
RQMPSPMPGLHYLVSRTRTRKRRGNWQPARRGPGPHISPFAHSPSFPTHSLEGRLLHPALAWPQGEPPPPPIPPPET

SEQ ID NO: 774147 - protein, 107 aa, Homo sapiens
MSFRIYCILFLDLSARTRATLLLEATPTAHILSSSFHSLQTSRIVSYNCLFTHFPPPSQFRLQAREDNFKVFLQTDPLAAPEVFYGPVSRVNPRRRGWISPGYGWGI

SEQ ID NO: 774148 - protein, 116 aa, Homo sapiens
GLCSSVSVGPSHLNASDFLPPYHFLFLCSVHRSPWWELRRRQAKRGRRGESRGEAERVAGVGICRAGTAPGPRKALGGEGRPGRPPKQWPSPLERHCVKAPGIRKKYLNNNNRKPT

SEQ ID NO: 774149 - protein, 117 aa, Homo sapiens
VKGLRLNSKKANSKGPERLCLRRSHTDSQQVNEELFGIINHQGEANRSHREVSFHAVQLAIIKKTNVTGVDENAEKRHLARCEGERASISVATTQTIWRCLQKSKMELLAQGGGSHL

SEQ ID NO: 774150 - protein, 135 aa, Homo sapiens
  misc_feature (12)..(12): Xaa can be any naturally occurring amino acid
  misc_feature (14)..(14): Xaa can be any naturally occurring amino acid
GGEGGRERRPAXHXSFRKCNNKGPSWKQRAAFTRQSNLPPACALMLDFSASRTCQNFQSLLAQMPSFCMPFRRASVMPAEERMLFVQCFLPFRCLFYPEAPSFWKSLLLAFALISSVVRRKEVPDLSHDLKFDHV

SEQ ID NO: 774151 - protein, 113 aa, Homo sapiens
WESFLNTAESFLPSPIRTFAILASLPGLFFKRLHLSCPLKIMFSEKSFMTTTPSRGRSYFSFEAFLFFLSWDLAQFELSSVYDALLGFVDPARMSFIKAGTTSLRSHCSVSSP

SEQ ID NO: 774152 - protein, 113 aa, Homo sapiens
SGGAEKRCPRRRRLALSGCPSPDPDIQASAPFPERVLCFIKNEIRKRERKIFLMESGNVKSGTCEEEKILQSWSSTSAEDIWNALVQHEKEEISDEARHPVSGRTDIRAQASS

SEQ ID NO: 774153 - protein, 202 aa, Homo sapiens
MDPSADTWDLSSPLISLWINRFYIYLGFAVSISLWICVQIVIEMQGFATVLAEAVTSLDLPVAIINLKEYDPDDHLIEEVTSKNVCVFLVATYTDGLPTESAEWFCKWLEEASIDFRFGKTYLKGMRDAVFGLGNSAYASHFNKVGKNVDKWLWMLGVHRVMSRGEGDCDVVKSKHGSIEANFRAWKTKFISQLQALQKGER

SEQ ID NO: 774154 - protein, 192 aa, Homo sapiens
HPHRSSLTCPHCLKQSNTFDPFLCVSLPIPLRQTRFLSVTLVFPSKSQRFLRVGLAVPILSTVAALRKMVAEEGGVPADEVILVELYPSGFQRSFFDEEDLNTIAEGDNVYAFQVPPSPSQGTLSAHPLGLSASPRLAAREGQRFSLSLHSESKVLILFCNLVGSGQQASRFGPPFLIREDRAVSWAQLQQS

SEQ ID NO: 774155 - protein, 759 aa, Homo sapiens
AGGGSPPSPGSSRLRRERCIVGRGAGVGKMAAPSLLNWRRVSSFTGPVPRARHGHRAVAIRELMIIFGGGNEGIADELHVYNTATNQWFLPAVRGDIPPGCAAHGFVCDGTRILVFGGMVEYGRYSNELYELQASRWLWKKVKPHPPPSGLPPCPRLGHSFSLYGNKCYLFGGLANESEDSNNNVPRYLNDFYELELQHGSGVVGWSIPVTKGVVPSPRESHTAVIYCKKDSGSPKMYVFGGMCGARLDDLWQLDLETMSWSKPETKGTVPLPRSLHTASVIGNKMYIFGGWVPHKGENTETSPHDCEWRCTSSFSYLNLDTTEWTTLVSDSQEDKKNSRPRPRAGHCAVAIGTRLYFWSGRDGYKKALNSQVCCKDLWYLDTEKPPAPSQVQLIKATTNSFHVKWDEVSTVEGYLLQLSTDLPYQAASSDSSAAPNMQGVRMDPHRQGSNNIVPNSINDTINSTKTEQPATKETSMKNKPDFKALTDSNAILYPSLASNASNHNSHVVDMLRKNEGPHTSANVGVLSSCLDVRTVIPETSVSSTVSSTQTMVTQQTIKTESSSTNGAVVKDETSLTTFSTKSEVDETYALPATKISRVETHATATPFSKETPSNPVATVKAGERQWCDVGIFKNNTALVSQFYLLPKGKQSISKNVEGIHLSWEPPTSPSGNILEYSAYLAIRTAQIQDNPSQLVFMRIYCGLKTSCIVTAGQLANAHIDYTSRPAIVFRISAKNEKGYGPATQVRWLQGNNKKAPLN

SEQ ID NO: 774156 - protein, 821 aa, Homo sapiens
AGGGSPPSPGSSRLRRERCIVGRGAGVGKMAAPSLLNWRRVSSFTGPVPRARHGHRAVAIRELMIIFGGGNEGIADELHVYNTATNQWFLPAVRGDIPPGCAAHGFVCDGTRILVFGGMVEYGRYSNELYELQASRWLWKKVKPHPPPSGLPPCPRLGHSFSLYGNKCYLFGGLANESEDSNNNVPRYLNDFYELELQHGSGVVGWSIPVTKGVVPSPRESHTAVIYCKKDSGSPKMYVFGGMCGARLDDLWQLDLETMSWSKPETKGTVPLPRSLHTASVIGNKMYIFGGWVPHKGENTETSPHDCEWRCTSSFSYLNLDTTEWTTLVSDSQEDKKNSRPRPRAGHCAVAIGTRLYFWSGRDGYKKALNSQVCCKDLWYLDTEKPPAPSQVQLIKATTNSFHVKWDEVSTVEGYLLQLSTDLPYQAASSDSSAAPNMQGVRMDPHRQGSNNIVPNSINDTINSTKTEQPATKETSMKNKPDFKALTDSNAILYPSLASNASNHNSHVVDMLRKNEGPHTSANVGVLSSCLDVRTVIPETSVSSTVSSTQTMVTQQTIKTESSSTNGAVVKDETSLTTFSTKSEVDETYALPATKISRVETHATATPFSKETPSNPVATVKAGERQWCDVGIFKNNTALVSQFYLLPKGKQSISKVGNADVPDYSLLKKQDLVPGTGYRFRVAAINGCGIGPFSKISEFKTCIPGFPGAPSAVRISKNVEGIHLSWEPPTSPSGNILEYSAYLAIRTAQIQDNPSQLVFMRIYCGLKTSCIVTAGQLANAHIDYTSRPAIVFRISAKNEKGYGPATQVRWLQGNNKKAPLN

SEQ ID NO: 774157 - protein, 563 aa, Homo sapiens [sequence omitted]

SEQ ID NO: 774158 - protein, 111 aa, Homo sapiens
LHLLGSSNSPASACQVAGIMGMSHHARLSFVVLVEIGFHHVGQAGLELLTSGDLPASASQSAWITGVNYCTWPVLSFIYRWDLTLLPRIVSNSGAQAVLLPWPPEVLRLQA

SEQ ID NO: 774159 - protein, 1374 aa, Homo sapiens
LVYTSNDSYIVHSGDLRKIHKAASRGQVRKLEKMTKRKKTINLNIQDAQKRTALHWACVNGHEEVVTFLVDRKCQLDVLDGEHRTPLMKALQCHQEACANILIDSGADINLVDVYGNTALHYAVYSEILSVVAKLLSHGAVIEVHNKASLTPLLLSITKRSEQIVEFLLIKNANANAVNKYKCTALMLAVCHGSSEIVGMLLQQNVDVFAADICGVTAEHYAVTCGFHHIHEQIMEYIRKLSKNHQNTNPEGTSAGTPDEAAPLAERTPDTAESLVEKTPDEAAPLVERTPDTAESLVEKTPDEAASLVEGTSDKIQCLEKATSGKFEQSAEETPREITSPAKETSEKFTWPAKGRPRKIAWEKKEDTPREIMSPAKETSEKFTWAAKGRPRKIAWEKKETPVKTGCVARVTSNKTKVLEKGRSKMIACPTKESSTKASANDQRFPSESKQEEDEEYSCDSRSLFESSAKIQVCIPESIYQKVMEINREVEEPPKKPSAFKPAIEMQNSVPNKAFELKNEQTLRADPMFPPESKQKDYEENSWDSESLCETVSQKDVCLPKATHQKEIDKINGKLEESPNKDGLLKATCGMKVSIPTKALELKDMQTFKAEPPGKPSAFEPATEMQKSVPNKALELKNEQTLRADEILPSESKQKDYEENSWDTESLCETVSQKDVCLPKAAHQKEIDKINGKLEGSPVKDGLLKANCGMKVSIPTKALELMDMQTFKAEPPEKPSAFEPAIEMQKSVPNKALELKNEQTLRADEILPSESKQKDYEESSWDSESLCETVSQKDVCLPKATHQKEIDKINGKLEESPDNDGFLKAPCRMKVSIPTKALELMDMQTFKAEPPEKPSAFEPAIEMQKSVPNKALELKNEQTLRADQMFPSESKQKKVEENSWDSESLRETVSQKDVCVPKATHQKEMDKISGKLEDSTSLSKILDTVHSCERARELQKDHCEQRTGKMEQMKKKFCVLKKKLSEAKEIKSQLENQKVKWEQELCSVRLTLNQEEEKRRNADILNEKIREELGRIEEQHRKELEVKQQLEQALRIQDIELKSVESNLNQVSHTHENENYLLHENCMLKKEIAMLKLEIATLKHQYQEKENKYFEDIKILKEKNAELQMTLKLKEESLTKRASQYSGQLKVLIAENTMLTSKLKEKQDKEILEAEIESHHPRLASAVQDHDQIVTSRKSQEPAFHIAGDACLQRKMNVDVSSTIYNNEVLHQPLSEAQRKSKSLKINLNYAGDALRENTLVSEHAQRDQRETQCQMKEAEHMYQNEQDNVNKHTEQQESLDQKLFQLQSKNMWLQQQLVHAHKKADNKSKITIDIHFLERKMQHHLLKEKNEEIFNYNNHLKNRIYQYEKEKAETENS

SEQ ID NO: 774160 - protein, 631 aa, Homo sapiens
MQKSVPNKALELKNEQTLRADEILPSESKQKDYEESSWDSESLCETVSQKDVCLPKATHQKEIDKINGKLEESPDNDGFLKAPCRMKVSIPTKALELMDMQTFKAEPPEKPSAFEPAIEMQKSVPNKALELKNEQTLRADQMFPSESKQKKVEENSWDSESLRETVSQKDVCVPKATHQKEMDKISGKLEDSTSLSKILDTVHSCERARELQKDHCEQRTGKMEQMKKKFCVLKKKLSEAKEIKSQLENQKVKWEQELCSVRLTLNQEEEKRRNADILNEKIREELGRIEEQHRKELEVKQQLEQALRIQDIELKSVESNLNQVSHTHENENYLLHENCMLKKEIAMLKLEIATLKHQYQEKENKYFEDIKILKEKNAELQMTLKLKEESLTKRASQYSGQLKVLIAENTMLTSKLKEKQDKEILEAEIESHHPRLASAVQDHDQIVTSRKSQEPAFHIAGDACLQRKMNVDVSSTIYNNEVLHQPLSEAQRKSKSLKINLNYAGDALRENTLVSEHAQRDQRETQCQMKEAEHMYQNEQDNVNKHTEQQESLDQKLFQLQSKNMWLQQQLVHAHKKADNKSKITIDIHFLERKMQHHLLKEKNEEIFNYNNHLKNRIYQYEKEKAETENS

SEQ ID NO: 774161 - protein, 626 aa, Homo sapiens
ARSRGSTRVLIGLRADEILPSESKQKDYEESSWDSESLCETVSQKDVCLPKATHQKEIDKINGKLEESPDNDGFLKAPCRMKVSIPTKALELMDMQTFKAEPPEKPSAFEPAIEMQKSVPNKALELKNEQTLRADQMFPSESKQKKVEENSWDSESLRETVSQKDVCVPKATHQKEMDKISGKLEDSTSLSKILDTVHSCERARELQKDHCEQRTGKMEQMKKKFCVLKKKLSEAKEIKSQLENQKVKWEQELCSVRLTLNQEEEKRRNADILNEKIREELGRIEEQHRKELEVKQQLEQALRIQDIELKSVESNLNQVSHTHENENYLLHENCMLKKEIAMLKLEIATLKHQYQEKENKYFEDIKILKEKNAELQMTLKLKEESLTKRASQYSGQLKVLIAENTMLTSKLKEKQDKEILEAEIESHHPRLASAVQDHDQIVTSRKSQEPAFHIAGDACLQRKMNVDVSSTIYNNEVLHQPLSEAQRKSKSLKINLNYAGDALRENTLVSEHAQRDQRETQCQMKEAEHMYQNEQDNVNKHTEQQESLDQKLFQLQSKNMWLQQQLVHAHKKADNKSKITIDIHFLERKMQHHLLKEKNEEIFNYNNHLKNRIYQYEKEKAETENS

SEQ ID NO: 774162 - protein, 1532 aa, Homo sapiens
MGHSKQIRILLLNEMEKLEKTLFRLEQGYELQFRLGPTLQGKAVTVYTNYPFPGETFNREKFRSLDWENPTEREDDSDKYCKLNLQQSGSFQYYFLQGNEKSGGGYIVVDPILRVGADNHVLPLDCVTLQTFLAKCLGPFDEWESRLRVAKESGYNMIHFTPLQTLGLSRSCYSLANQLELNPDFSRPNRKYTWNDVGQLVEKLKKEWNVICITDVVYNHTAANSKWIQEHPECAYNLVNSPHLKPAWVLDRALWRFSCDVAEGKYKEKGIPALIENDHHMNSIRKIIWEDIFPKLKLWEFFQVDVNKAVEQFRRLLTQENRRVTKSDPNQHLTIIQDPEYRRFGCTVDMNIALTTFIPHDKGPAAIEECCNWFHKRMEELNSEKHRLINYHQEQAVNCLLGNVFYERLAGHGPKLGPVTRKHPLVTRYFTFPFEEIDFSMEESMIHLPNKACFLMAHNGWVMGDDPLRNFAEPGSEVYLRRELICWGDSVKLRYGNKPEDCPYLWAHMKKYTEITATYFQGVRLDNCHSTPLHVAEYMLDAARNLQPNLYVVAELFTGSEDLDNVFVTRLGISSLIREAMSAYNSHEEGRLVYRYGGEPVGSFVQPCLRPLMPAIAHALFMDITHDNECPIVHRSAYDALPSTTIVSMACCASGSTRGYDELVPHQISVVSEERFYTKWNPEALPSNTGEVNFQSGIIAARCAISKLHQELGAKGFIQVYVDQVDEDIVAVTRHSPSIHQSVVAVSRTAFRNPKTSFYSKEVPQMCIPGKIEEVVLEARTIERNTKPYRKDENSINGTPDITVEIREHIQLNESKIVKQAGVATKGPNEYIQEIEFENLSPGSVIIFRVSLDPHAQVAVGILRNHLTQFSPHFKSGSLAVDNADPILKIPFASLASRLTLAELNQILYRCESEEKEDGGGCYDIPNWSALKYAGLQGLMSVLAEIRPKNDLGHPFCNNLRSGDWMIDYVSNRLISRSGTIAEVGKWLQAMFFYLKQIPRYLIPCYFDAILIGAYTTLLDTAWKQMSSFVQNGSTFVKHLSLGSVQLCGVGKFPSLPILSPALMDVPYRLNEITKEKEQCCVSLAAGLPHFSSGIFRCWGRDTFIALRGILLITGRYVEARNIILAFAGTLRHGLIPNLLGEGIYARYNCRDAVWWWLQCIQDYCKMVPNGLDILKCPVSRMYPTDDSAPLPAGTLDQPLFEVIQEAMQKHMQGIQFRERNAGPQIDRNMKDEGFNITAGVDEETGFVYGGNRFNCGTWMDKMGESDRARNRGIPATPRDGSAVEIVGLSKSAVRWLLELSKKNIFPYHEVTVKRHGKAIKVSYDEWNRKIQDNFEKLFHVSEDPSDLNEKHPNLVHKRGIYKDSYGASSPWCDYQLRPNFTIAMVVAPELFTTEKAGKALEIAEKKLLGPLGMKTLDPDDMVYCGIYDNALDNDNYNLAKGFNYHQGPEWLWPIGYFLRAKLYFSRLMGPETTAKTIVLVKNVLSRHYVHLERSPWKGLPELTNENAQYCPFSCETQAWSIATILETLYDL

SEQ ID NO: 774163 - protein, 1532 aa, Homo sapiens; identical to SEQ ID NO: 774162

SEQ ID NO: 774164 - protein, 1532 aa, Homo sapiens; identical to SEQ ID NO: 774162

SEQ ID NO: 774165 - protein, 1532 aa, Homo sapiens; identical to SEQ ID NO: 774162

SEQ ID NO: 774166 - protein, 1515 aa, Homo sapiens
MSLLTCAFYLGYELQFRLGPTLQGKAVTVYTNYPFPGETFNREKFRSLDWENPTEREDDSDKYCKLNLQQSGSFQYYFLQGNEKSGGGYIVVDPILRVGADNHVLPLDCVTLQTFLAKCLGPFDEWESRLRVAKESGYNMIHFTPLQTLGLSRSCYSLANQLELNPDFSRPNRKYTWNDVGQLVEKLKKEWNVICITDVVYNHTAANSKWIQEHPECAYNLVNSPHLKPAWVLDRALWRFSCDVAEGKYKEKGIPALIENDHHMNSIRKIIWEDIFPKLKLWEFFQVDVNKAVEQFRRLLTQENRRVTKSDPNQHLTIIQDPEYRRFGCTVDMNIALTTFIPHDKGPAAIEECCNWFHKRMEELNSEKHRLINYHQEQAVNCLLGNVFYERLAGHGPKLGPVTRKHPLVTRYFTFPFEEIDFSMEESMIHLPNKACFLMAHNGWVMGDDPLRNFAEPGSEVYLRRELICWGDSVKLRYGNKPEDCPYLWAHMKKYTEITATYFQGVRLDNCHSTPLHVAEYMLDAARNLQPNLYVVAELFTGSEDLDNVFVTRLGISSLIREAMSAYNSHEEGRLVYRYGGEPVGSFVQPCLRPLMPAIAHALFMDITHDNECPIVHRSAYDALPSTTIVSMACCASGSTRGYDELVPHQISVVSEERFYTKWNPEALPSNTGEVNFQSGIIAARCAISKLHQELGAKGFIQVYVDQVDEDIVAVTRHSPSIHQSVVAVSRTAFRNPKTSFYSKEVPQMCIPGKIEEVVLEARTIERNTKPYRKDENSINGTPDITVEIREHIQLNESKIVKQAGVATKGPNEYIQEIEFENLSPGSVIIFRVSLDPHAQVAVGILRNHLTQFSPHFKSGSLAVDNADPILKIPFASLASRLTLAELNQILYRCESEEKEDGGGCYDIPNWSALKYAGLQGLMSVLAEIRPKNDLGHPFCNNLRSGDWMIDYVSNRLISRSGTIAEVGKWLQAMFFYLKQIPRYLIPCYFDAILIGAYTTLLDTAWKQMSSFVQNGSTFVKHLSLGSVQLCGVGKFPSLPILSPALMDVPYRLNEITKEKEQCCVSLAAGLPHFSSGIFRCWGRDTFIALRGILLITGRYVEARNIILAFAGTLRHGLIPNLLGEGIYARYNCRDAVWWWLQCIQDYCKMVPNGLDILKCPVSRMYPTDDSAPLPAGTLDQPLFEVIQEAMQKHMQGIQFRERNAGPQIDRNMKDEGFNITAGVDEETGFVYGGNRFNCGTWMDKMGESDRARNRGIPATPRDGSAVEIVGLSKSAVRWLLELSKKNIFPYHEVTVKRHGKAIKVSYDEWNRKIQDNFEKLFHVSEDPSDLNEKHPNLVHKRGIYKDSYGASSPWCDYQLRPNFTIAMVVAPELFTTEKAGKALEIAEKKLLGPLGMKTLDPDDMVYCGIYDNALDNDNYNLAKGFNYHQGPEWLWPIGYFLRAKLYFSRLMGPETTAKTIVLVKNVLSRHYVHLERSPWKGLPELTNENAQYCPFSCETQAWSIATILETLYDL

SEQ ID NO: 774167 - protein, 1516 aa, Homo sapiens
MAPLLSINLFIGYELQFRLGPTLQGKAVTVYTNYPFPGETFNREKFRSLDWENPTEREDDSDKYCKLNLQQSGSFQYYFLQGNEKSGGGYIVVDPILRVGADNHVLPLDCVTLQTFLAKCLGPFDEWESRLRVAKESGYNMIHFTPLQTLGLSRSCYSLANQLELNPDFSRPNRKYTWNDVGQLVEKLKKEWNVICITDVVYNHTAANSKWIQEHPECAYNLVNSPHLKPAWVLDRALWRFSCDVAEGKYKEKGIPALIENDHHMNSIRKIIWEDIFPKLKLWEFFQVDVNKAVEQFRRLLTQENRRVTKSDPNQHLTIIQDPEYRRFGCTVDMNIALTTFIPHDKGPAAIEECCNWFHKRMEELNSEKHRLINYHQEQAVNCLLGNVFYERLAGHGPKLGPVTRKHPLVTRYFTFPFEEIDFSMEESMIHLPNKACFLMAHNGWVMGDDPLRNFAEPGSEVYLRRELICWGDSVKLRYGNKPEDCPYLWAHMKKYTEITATYFQGVRLDNCHSTPLHVAEYMLDAARNLQPNLYVVAELFTGSEDLDNVFVTRLGISSLIREAMSAYNSHEEGRLVYRYGGEPVGSFVQPCLRPLMPAIAHALFMDITHDNECPIVHRSAYDALPSTTIVSMACCASGSTRGYDELVPHQISVVSEERFYTKWNPEALPSNTGEVNFQSGIIAARCAISKLHQELGAKGFIQVYVDQVDEDIVAVTRHSPSIHQSVVAVSRTAFRNPKTSFYSKEVPQMCIPGKIEEVVLEARTIERNTKPYRKDENSINGTPDITVEIREHIQLNESKIVKQAGVATKGPNEYIQEIEFENLSPGSVIIFRVSLDPHAQVAVGILRNHLTQFSPHFKSGSLAVDNADPILKIPFASLASRLTLAELNQILYRCESEEKEDGGGCYDIPNWSALKYAGLQGLMSVLAEIRPKNDLGHPFCNNLRSGDWMIDYVSNRLISRSGTIAEVGKWLQAMFFYLKQIPRYLIPCYFDAILIGAYTTLLDTAWKQMSSFVQNGSTFVKHLSLGSVQLCGVGKFPSLPILSPALMDVPYRLNEITKEKEQCCVSLAAGLPHFSSGIFRCWGRDTFIALRGILLITGRYVEARNIILAFAGTLRHGLIPNLLGEGIYARYNCRDAVWWWLQCIQDYCKMVPNGLDILKCPVSRMYPTDDSAPLPAGTLDQPLFEVIQEAMQKHMQGIQFRERNAGPQIDRNMKDEGFNITAGVDEETGFVYGGNRFNCGTWMDKMGESDRARNRGIPATPRDGSAVEIVGLSKSAVRWLLELSKKNIFPYHEVTVKRHGKAIKVSYDEWNRKIQDNFEKLFHVSEDPSDLNEKHPNLVHKRGIYKDSYGASSPWCDYQLRPNFTIAMVVAPELFTTEKAGKALEIAEKKLLGPLGMKTLDPDDMVYCGIYDNALDNDNYNLAKGFNYHQGPEWLWPIGYFLRAKLYFSRLMGPETTAKTIVLVKNVLSRHYVHLERSPWKGLPELTNENAQYCPFSCETQAWSIATILETLYDL

SEQ ID NO: 774168 - protein, 1532 aa, Homo sapiens; identical to SEQ ID NO: 774162

SEQ ID NO: 774169 - protein, 1532 aa, Homo sapiens; identical to SEQ ID NO: 774162

SEQ ID NO: 774170 - protein, 1183 aa, Homo sapiens
MNIALTTFIPHDKGPAAIEECCNWFHKRMEELNSEKHRLINYHQEQAVNCLLGNVFYERLAGHGPKLGPVTRKHPLVTRYFTFPFEEIDFSMEESMIHLPNKACFLMAHNGWVMGDDPLRNFAEPGSEVYLRRELICWGDSVKLRYGNKPEDCPYLWAHMKKYTEITATYFQGVRLDNCHSTPLHVAEYMLDAARNLQPNLYVVAELFTGSEDLDNVFVTRLGISSLIREAMSAYNSHEEGRLVYRYGGEPVGSFVQPCLRPLMPAIAHALFMDITHDNECPIVHRSAYDALPSTTIVSMACCASGSTRGYDELVPHQISVVSEERFYTKWNPEALPSNTGEVNFQSGIIAARCAISKLHQELGAKGFIQVYVDQVDEDIVAVTRHSPSIHQSVVAVSRTAFRNPKTSFYSKEVPQMCIPGKIEEVVLEARTIERNTKPYRKDENSINGTPDITVEIREHIQLNESKIVKQAGVATKGPNEYIQEIEFENLSPGSVIIFRVSLDPHAQVAVGILRNHLTQFSPHFKSGSLAVDNADPILKIPFASLASRLTLAELNQILYRCESEEKEDGGGCYDIPNWSALKYAGLQGLMSVLAEIRPKNDLGHPFCNNLRSGDWMIDYVSNRLISRSGTIAEVGKWLQAMFFYLKQIPRYLIPCYFDAILIGAYTTLLDTAWKQMSSFVQNGSTFVKHLSLGSVQLCGVGKFPSLPILSPALMDVPYRLNEITKEKEQCCVSLAAGLPHFSSGIFRCWGRDTFIALRGILLITGRYVEARNIILAFAGTLRHGLIPNLLGEGIYARYNCRDAVWWWLQCIQDYCKMVPNGLDILKCPVSRMYPTDDSAPLPAGTLDQPLFEVIQEAMQKHMQGIQFRERNAGPQIDRNMKDEGFNITAGVDEETGFVYGGNRFNCGTWMDKMGESDRARNRGIPATPRDGSAVEIVGLSKSAVRWLLELSKKNIFPYHEVTVKRHGKAIKVSYDEWNRKIQDNFEKLFHVSEDPSDLNEKHPNLVHKRGIYKDSYGASSPWCDYQLRPNFTIAMVVAPELFTTEKAGKALEIAEKKLLGPLGMKTLDPDDMVYCGIYDNALDNDNYNLAKGFNYHQGPEWLWPIGYFLRAKLYFSRLMGPETTAKTIVLVKNVLSRHYVHLERSPWKGLPELTNENAQYCPFSCETQAWSIATILETLYDL

SEQ ID NO: 774171 - protein, 1532 aa, Homo sapiens; identical to SEQ ID NO: 774162

SEQ ID NO: 774172 - protein, 1532 aa, Homo sapiens; identical to SEQ ID NO: 774162

SEQ ID NO: 774173 - protein, 78 aa, Homo sapiens
LSPFPTQPSTTTIPHTGTTTTATTPTYNYGHLLHNVQLQPHPTQLPPPPPPLTTTIIISHTTLNYNHTPQILGIILYD

SEQ ID NO: 774174 - protein, 161 aa, Homo sapiens
MHFQAGAQLLPVLVPSHLCLGLGHLTAQCGASPCFSLHLPVCWLLLSKHRLGLWGRQGCTGWPPPSRSGRQHWGEKAWKGKCEGQMLSRLCTTASQYKEHSFSIHSACRICHIPRAPCRMVACSCGPCCLGGWSRMPELKQSFCLSLSKCWDYRYEAPCQA

SEQ ID NO: 774175 - protein, 124 aa, Homo sapiens
WDSPVAAGVGQLDGRITAASCMHSGSGLRCLLHESTLSPVGHMDHGVVTSVFRGVQGRICCAPKGLGSRTHTTTLLLYSINQSKPRDQPRFKEVDRPHHVMSGTAMSHCKGVGPGSTIHWESEL

SEQ ID NO: 774176 - protein, 113 aa, Homo sapiens
DTQMKVSGLDEGLMYEYRVYAENIAGIGKCSKSCEPVPARDPCDPPGQPEVTNITRKSVSLKWSKPHYDGGAKITGYIVERRELPDGRWLKCNYTNIQETYFEVTELTEDQRY

SEQ ID NO: 774177 - protein, 88 aa, Homo sapiens
PKQPTKPQPYRLYWALPFGQLAGHSPKAEHSILSLFKPTSSSDHNGNQSPQTTMQRRIHGNLKRKDTEMMLQWLQQEKLFASRYLKYT

SEQ ID NO: 774178 - protein, 88 aa, Homo sapiens; identical to SEQ ID NO: 774177

SEQ ID NO: 774179 - protein, 149 aa, Homo sapiens
MVPVQPAEPPEVLKSEPYGEKADVWAVGCILYQMATLSPPFYSTNMLSLATKIVEAVYEPVPEGIYSEKVTDTISRCLTPDAEARPDIVEVSSMISDVMMKYLDNLSTSQLSLEKKLERERRRTQRYFMEANRNTVTCHHELAVLSHVS

SEQ ID NO: 774180 - protein, 95 aa, Homo sapiens
LGLTNKLLFQESLQKTATRLSAFSWEEAKVQLSWVVLNLATSAMLPKFYPNEIKVTYLRCTGDEVGATSVLAPKISPLGLSSEKVGDDIAKATGD

SEQ ID NO: 774181 - protein, 108 aa, Homo sapiens
LLEMLTYEKKTYSSFSSRISLASEDHQPSSSFLNRILSHLLLPSRSKTELRKVRLVFGATKLSDISSVISFLSPETLHIVFPAGRSGRQTALNFPMHSIIKMHLFCQG

SEQ ID NO: 774182 - protein, 101 aa, Homo sapiens
GRTAPARPGKPLATFPAATATAPGDARPVPFTCSLSPGIIIVPLQTSPHPPSWRPRRCSNVLSHPPQRETNEPPPTFKREQNNTPLKKRGDPTSAGAGDHQ

SEQ ID NO: 774183 - protein, 75 aa, Homo sapiens
MTTFKEAMTFKDVAVVFTEEELGLLDLAQRKLYRDVMLENFRNLLSVGHQAFHRDTFHFLREEKIWMMKTAIQRE

SEQ ID NO: 774184 - protein, 103 aa, Homo sapiens
MEGHCLLGPVPSVPVPRRTLLQPFSLPPFLPLLAHPALPSPCKLGGCGKGTAWSQVSLCTHTHPLTCKLLDEQTPKAPSSDSAGIQVNSGRLAKDQPRAILQK

SEQ ID NO: 774185 - protein, 107 aa, Homo sapiens
MSEPDTSSGFSGSVENGTFLELFPTSLSTSVDPSSGHLSNVYIYVSIFLSLLAFLLLLLIIALQRLKNIISSSSSYPEYPSDAGSSFTNLEVCSISSQRSTFSNLSS

SEQ ID NO: 774186 - protein, 146 aa, Homo sapiens
APEMAEAGVRERGRGRGRALATFPTASEDRRGLPQLRGDTRVRGAGPGAGDCGRRGGARRPPSEPPNSRPAKAAGPCREDPTADGGEDAPGGVGTGSDSRATAASAGAPAPGKSSHKSLNLKLHSQRKGLQGRAPCAATACSFEAL

SEQ ID NO: 774187 - protein, 146 aa, Homo sapiens; identical to SEQ ID NO: 774186

SEQ ID NO: 774188 - protein, 113 aa, Homo sapiens
ITGTPVIASEPKAGGVCATLTYACITRGMTTRGGHSPQHARLPSRTQRKVPVLFGSLMKTNTEETNGKPKREGEMWLTICLWSWQPRAFGHPHQLFFKDGVSLCCPGCVCDLV

SEQ ID NO: 774189 - protein, 82 aa, Homo sapiens
MNNNIYYQSSNLVCLELEYSCLRHILEELEKSKKWITEKSLHSSSDDHMGPFYYRLHFCDTMELFMENINWNMFELRVHLLK

SEQ ID NO: 774190 - protein, 263 aa, Homo sapiens
PERQPSGELEEKTDRMPQDELGQERRDLEPENREEGQERRVSDIQSKAGISRESLVSSTTEDILFQKDKSTPVYPLTMTWSFGWNSSLPVYYIREERQRVLLYVCAHTAIIYNVFRNNQYHLQGHANIISCLCVSEDRRWIATADKGPDCLVIIWDSFTGIPVHTIFDSCPEGNGIMAMAMTHDAKYLATISDAEVQKVCIWKWTLAVETPACTLELPTEYGVQNYVTFNPTNNKELVSNSKTRAIYYAWYEERDTLAHSAPL

SEQ ID NO: 774191 - protein, 262 aa, Homo sapiens
PERQPSGELEEKTDRMPQDELGQERRDLEPENREEGQERRVSDIQSKAGISRESLVSSTTEDILFQKDKSTPVYPLTMTWSFGWNSSLPVYYIREERQRVLLYVCAHTAIIYNVFRNNQYHLQGHANIISCLCVSEDRRWIATADKGPDCLVIIWDSFTGIPVHTIFDSCPEGNGIMAMAMTHDAKYLATISDAEVQKVCIWKWTLAVETPACTLELPTEYGVQNYVTFNPTNNKELVSNSKTRAIYYAWVSRNILICFKCG

SEQ ID NO: 774192 - protein, 999 aa, Homo sapiens
MPEDIPLLPGSPRRLSPQAGSRGGQGPKHGQQCLKMPGPRAPGLQGGSNRDPGQPCGGESTRSSSVINNYLDANEPVSLEARLSRMHFHDSQRKVDYVLAYHYRKRGVHLAQGFPGHSLAIVSNGETGKEPHAGGPGDIELGPLDALEEERKEQREEFEHNLMEAGLELEKDLENKSQGSIFVRIHAPWQVLAREAEFLKIKVPTKKEMYEIKAGGSIAKKFSAALQKLSSHLQPRVPEHSNNKMKNLSYPFSREKMYLYNIQEKDTFFDNATRSRIVHEILKRTACSRANNTMGINSLIANNIYEAAYPLHDGEYDSPEDDMNDRKLLYQEWARYGVFYKFQPIDLIRKYFGEKIGLYFAWLGLYTSFLIPSSVIGVIVFLYGCATIEEDIPSREMCDQQNAFTMCPLCDKSCDYWNLSSACGTAQASHLFDNPATVFFSIFMALWATMFLENWKRLQMRLGYFWDLTGIEEEEERAQEHSRPEYETKVREKMLKESNQSAVQKLETNTTECGDEDDEDKLTWKDRFPGYLMNFASILFMIALTFSIVFGVIVYRITTAAALSLNKATRSNVRVTVTATAVIINLVVILILDEIYGAVAKWLTKIEVPKTEQTFEERLILKAFLLKFVNAYSPIFYVAFFKGRFVGRPGSYVYVFDGYRMEECAPGGCLMELCIQLSIIMLGKQLIQNNIFEIGVPKLKKLFRKLKDETEAGETDSAHSKHPEQWDLDYSLEPYTGLTPEYMEMIIQFGFVTLFVASFPLAPVFALLNNVIEVRLDAKKFVTELRRPDAVRTKDIGIWFDILSGIGKFSVISNAFVIAITSDFIPRLVYQYSYSHNGTLHGFVNHTLSFFNVSQLKEGTQPENSQFDQEVQFCRFKDYREPPWAPNPYEFSKQYWFILSARLAFVIIFQNLVMFLSVLVDWMIPDIPTDISDQIKKEKSLLVDFFLKEEHEKLKLMDEPALRSPGGGDRSRSRAASSAPSGQSQLGSMMSSGSQHTNV

SEQ ID NO: 774193 - protein, 550 aa, Homo sapiens
MFLENWKRLQMRLGYFWDLTGIEEEEERAQEHSRPEYETKVREKMLKESNQSAVQKLETNTTECGDEDDEDKLTWKDRFPGYLMNFASILFMIALTFSIVFGVIVYRITTAAALSLNKATRSNVRVTVTATAVIINLVVILILDEIYGAVAKWLTKIEVPKTEQTFEERLILKAFLLKFVNAYSPIFYVAFFKGRFVGRPGSYVYVFDGYRMEECAPGGCLMELCIQLSIIMLGKQLIQNNIFEIGVPKLKKLFRKLKDETEAGETDSAHSKHPEQWDLDYSLEPYTGLTPEYMEMIIQFGFVTLFVASFPLAPVFALLNNVIEVRLDAKKFVTELRRPDAVRTKDIGIWFDILSGIGKFSVISNAFVIAITSDFIPRLVYQYSYSHNGTLHGFVNHTLSFFNVSQLKEGTQPENSQFDQEVQFCRFKDYREPPWAPNPYEFSKQYWFILSARLAFVIIFQNLVMFLSVLVDWMIPDIPTDISDQIKKEKSLLVDFFLKEEHEKLKLMDEPALRSPGGGDRSRSRAASSAPSGQSQLGSMMSSGSQHTNV

SEQ ID NO: 774194 - protein, 573 aa, Homo sapiens
FTEIILSATCRMGWKAESLESATMFLENWKRLQMRLGYFWDLTGIEEEEERAQEHSRPEYETKVREKMLKESNQSAVQKLETNTTECGDEDDEDKLTWKDRFPGYLMNFASILFMIALTFSIVFGVIVYRITTAAALSLNKATRSNVRVTVTATAVIINLVVILILDEIYGAVAKWLTKIEVPKTEQTFEERLILKAFLLKFVNAYSPIFYVAFFKGRFVGRPGSYVYVFDGYRMEECAPGGCLMELCIQLSIIMLGKQLIQNNIFEIGVPKLKKLFRKLKDETEAGETDSAHSKHPEQWDLDYSLEPYTGLTPEYMEMIIQFGFVTLFVASFPLAPVFALLNNVIEVRLDAKKFVTELRRPDAVRTKDIGIWFDILSGIGKFSVISNAFVIAITSDFIPRLVYQYSYSHNGTLHGFVNHTLSFFNVSQLKEGTQPENSQFDQEVQFCRFKDYREPPWAPNPYEFSKQYWFILSARLAFVIIFQNLVMFLSVLVDWMIPDIPTDISDQIKKEKSLLVDFFLKEEHEKLKLMDEPALRSPGGGDRSRSRAASSAPSGQSQLGSMMSSGSQHTNV

SEQ ID NO: 774195 - protein, 148 aa, Homo sapiens
GRVCDLVKQLPSTQDAQEPLEAAVGPQCLPLNPYGTCRVQGLSPSLRGEKACERATGSQNLVMFLSVLVDWMIPDIPTDISDQIKKEKSLLVDFFLKEEHEKLKLMDEPALRSPGGGDRSRSRAASSAPSGQSQLGSMMSSGSQHTNV

SEQ ID NO: 774196 - protein, 64 aa, Homo sapiens
SNVRVTVTATAVIINLVVILILDEIYGAVAKWLTKIGTVSPRLLAVLGPLYVNACKAFGDKIKK

SEQ ID NO: 774197 - protein, 157 aa, Homo sapiens
MKQSSGTHRKFRVRSQVWSRARELTENAESGPRYGAELGNSQKIPSPVPGVEQSSGTHRKFRVRSQVWSRARELTENAESGPRYGAELGNSQKIPSPVPGMEQSSGTHRKCRVPSQVWSKAQELIELLLPFPFPATGTLFPQHTQVGKEFKNRMPSC

SEQ ID NO: 774198 - protein, 322 aa, Homo sapiens
MGTHQRHGIHIQINKSDRGRYLEGKWRHTGTRTPEINRKTSNRAGPRSRQMSNGGRRSTTRGQPDRRLQRMSRRQQKRRSTGNESKSGTRACRQRPTAKEVPPLMSQHTTQEDMTSTLSNTTHTAQTGHHSRGRTQAAAGQQKQSEQHIASSDTAGLTTEPRSTSIPRPEREHGLHAQRSARTHQQAKDQLDNQHHGCHTHHHVGDHKTPEKRWKTERDQQTHSKDTNKAAQHQSSRKRQKTTEQQRSHTHDHKSTTLTNNGHTTTNHRNVTRAHHPDAETHSNTHQAAQTTREAHDGTGQATQTQHNTTTANANTHTTSSH

SEQ ID NO: 774199 - protein, 122 aa, Homo sapiens
MDQLPGGPQPSQHSKRSRCTWGSQQGRGEGSLTQALMGRGNPCRVWGQYAGRRGGESQAARPARQSWGDWRRAVSACGQRPPRTWTDAPTIVPAVRLWKGLVWWDEARPWKLEVKGAVGGQV

SEQ ID NO: 774200 - protein, 127 aa, Homo sapiens
MLCDEEAQKRKAKESGMALPQGRLTFMDVAIEFSQEEWKSLDPGQRALYRDVMLENYRNLVFLGICLPDLSIISMLKQRREPLILQSQVKIVKNTDGRECVRSVNTGRSCVLGSNAENKPIKNQLGL

SEQ ID NO: 774201 - protein, 183 aa, Homo sapiens
  misc_feature (151)..(151): Xaa can be any naturally occurring amino acid
NGSVCLMDVAKREIICAFAPPGAFPLEVPWKPVFAVSPDHPCFLLRGDYSHETASTDDAGIQYSVFYFNFEACPLLENISKNCTIPQRDLDNMAFPQALPLEKRCERFLQKSYRKLEKNPEKEEEHWARLQRYSLSLQSENFKKEAATALXSLKRRFQPRGSCSQDTEAKRNVTEPQLHRPAL

SEQ ID NO: 774202 - protein, 37 aa, Homo sapiens
GGGSARSPGSCPPPGGAGRTPQSYRLLRLQRGRRVAS

SEQ ID NO: 774203 - protein, 119 aa, Homo sapiens
RWFFSPRVQSLSSLAGKPFTCTFLTVLQGSLSCDLTSLYKPQETACRARLLAMSIPLNLPLLGLPYSLRHNIIEIRPVTSPTVASKCSSERKSHTSLTFHQKLEMLKLNEEGMSKAETG

SEQ ID NO: 774204 - protein, 124 aa, Homo sapiens
MPEANYLLSVSWGYIKFKHGCLIGSSPISLNMSRSGNQVSRVYIKHILRYSNMTLAQLPSSNSARHHGRHHAQRPTVLTNQGESNKLRMPQTLTLTYIPRHPKVGQSTTSTPRQMSSARNQHDA

SEQ ID NO: 774205 - protein, 51 aa, Homo sapiens
MQGAAARSLSKWEKWDVRPILKYSKKLPFESGFGFCMSLGQNEDQWVQFVK

SEQ ID NO: 774206 - protein, 67 aa, Homo sapiens
SEVDVLGMWRRWPWSSYVRDCDLGDTIPRYTLKEKLAVPICLLQIISQIQENWRDQPVLVKIITRNL

SEQ ID NO: 774207 - protein, 152 aa, Homo sapiens
MKKEELKQHDGFRSSWKETTNTNIFETRYVTSYYRFSETEALLVWLLCSLQQRRNHISHSEGPLSTTAVWHQNGGCNTSVENGWISKLVSGNLSPIDAEDNYTCTYVGPGMRIYPTFSTSMSVLQSLQPVAWQQCLQGQRKQFSLQTLLQDH

SEQ ID NO: 774208 - protein, 152 aa, Homo sapiens; identical to SEQ ID NO: 774207

SEQ ID NO: 774209 - protein, 152 aa, Homo sapiens; identical to SEQ ID NO: 774207

SEQ ID NO: 774210 - protein, 222 aa, Homo sapiens
FTVCQIGLSEVFRYVKERQTKYIAHSCNFYLFPTTFGILDSEFSFQASSVQFLNQYGFNYNKFLKNGIPYMNEEQEKKIRHDILTGNWRVRSSPDKDQIKVVIDEVTRWLELAKEGDWMTLPGITGFQAFEVQLVLRQALPNIWTVLKDEGPLVGHNMMMDLLHLHEKFFRPLPESYDQFKQNIHSLFPVLIDTKSVTKDIWKEMNFPRVSNLSEVYEVLNR

SEQ ID NO: 774211 - protein, 187 aa, Homo sapiens
GAPAHRFLHACCQLSWEQGLPLPMCPFIFICTACGSCSVCTCGPCFLVSSPVSWLLVVSGLCGRSLRGTADSVWVFVLVVSYPGWIQTPALSASLVRAAADISEQLCPAFRHLLCSVETSLQGGAQAFQGSASLGPKFSDSACCGPSFPRSHPWLGSSTGGPNFILWLPEPAALCPVLCLCPAHGGS

SEQ ID NO: 774212 - protein, 41 aa, Homo sapiens
YLNQGSLCVPLFLASSLFPWTVIVYGDTSSTHLNPASIVGG

SEQ ID NO: 774213 - protein, 109 aa, Homo sapiens
WVLLKEFRFMYRQRYGWELEFMFKREPEHKSLKTLKPNNVTQNKNPLPKEKFKPAAEICMSNKKQMLVTKTVGIMSLGYVRGLHSSPSQHKSGDLEEKKWFHGPGPGPC

SEQ ID NO: 774214 - protein, 116 aa, Homo sapiens
MDNNSWFLLTRKISYSFLSRSYSAAAYSSSGTDEPVDLKLAPSSPPAPTPRGSDPGPAPAAAPAPRRNELRSRRALGFTSTGISQASPPPAPYVSSITSPPAGLTSDEAVPMASVA

SEQ ID NO: 774215 - protein, 54 aa, Homo sapiens
MSSPGIDGDPKPPCLPRNGLVKLPGQPNGLGAASITKGTPATKNRPCQPPPPPT

SEQ ID NO: 774216 - protein, 165 aa, Homo sapiens
GGARGGRGEEEAPAWFPAKRPYLSGHSLSLPGGRLGAADPLPPGSSFPCAAEGARPGRDAGRRARPGPAGQSSTPAAPARRRPCRAPHDGRSPGGQRGMSQEPGPRACQEDVEPGHRRRPQASMLASKRSGEAAGPAQRPGCGQHHQGHASHQEPPLPATTPTHP

SEQ ID NO: 774217 - protein, 52 aa, Homo sapiens
MRERGQDSLAGLVLYVGLFGHPGMLHRAKYSRFRNESITSLDEGSSGGSVGN

SEQ ID NO: 774218 - protein, 46 aa, Homo sapiens
GDARVAGWLTPLIVERDGEAPRTAGIRMEGGNRSEKSVEGCEGGGS

SEQ ID NO: 774219 - protein, 123 aa, Homo sapiens
LQVRPRGPRAGPRQEVGEGESQGGGKTFLRVLPKGARRERDLGKVQSASHGEGRAVQSGREASKLDTAPLWEAASKMELADVPWFVHLTMDTRKDFEKKSLKKNFFNAIPKLLTNAILWTSES

SEQ ID NO: 774220 - protein, 105 aa, Homo sapiens
CSGMTGQSQETQIGREPTSGPVAAFPSALPTKAKAGQPGRGCCRLTPLSLFVSCTCAHTTPYVASTAVSRREDVALSYIVQLCAFLERAVINVVFKFPTPSSPQQ

SEQ ID NO: 774221 - protein, 74 aa, Homo sapiens
TLSQSGSPSRGAAERLERRGWVLVETGGRGACPLVGVAARWAGWLLPPGDQGPGDFVPGPGSLSFRGHSEETAR

SEQ ID NO: 774222 - protein, 73 aa, Homo sapiens
CEITQVGAGRSEPSGQCGVRQQMSVTGQCRDSDGRGSHNMGSLRSAAESEWSETDSTWDGTQYSSPRNSCLKI

SEQ ID NO: 774223 - protein, 214 aa, Homo sapiens
AARHLATDGVGLADLVPLVTSAHGDNGELGQDDGPVDGSGHLLGALNTQTDVTVVARNGHKRLEPGSLAGSGLLLHRHNLQNLGLERGPPGKNNDLRFRDGQGEETDLLQGSDLHVLDQAAQLADGHPLLILGLASASSVASAPAWSTAVTPASDATAETSTEATMVPHPRAPGPPGLPPQPNAGCAGVIRHLVFSRRRSYMWNILTQQIVRTC

SEQ ID NO: 774224 - protein, 236 aa, Homo sapiens
MDVKFRDVIVVKAGEVLKINADIAGRPLPVISWAKDGIEIEERARTEIISTDNHTLLTVKDCIRRDTGQYVLTLKNVAGTRSVAVNCKVLDKPGPPAGPLEINGLTAEKCSLSWGRPQEDGGADIDYYIVEKRETSHLAWTICEGELQMTSCKVTKLLKGNEYIFRVTGVNKYGVGEPLESVAIKALDPFTVPSPPTSLEITSVTKESMTLCWSRPESDGGSEISGYIIERREKNS

SEQ ID NO: 774225 - protein, 85 aa, Homo sapiens
EFGVGKVQMNFLHLLSSEATHIITIHCLNTPRWTSTQTSGPGLPIGFKGWNGQIFKVNTLLEPKVLSDDCKIQDGSWHKATFLFH

SEQ ID NO: 774226 - protein, 45 aa, Homo sapiens
SEGKLVSRPRALLHGLRGHRALSLCPSPAQSPRSASPPGPAPQHP

SEQ ID NO: 774227 - protein, 365 aa, Homo sapiens
MTGRDSLSDGRTSSRALVPGGSPRGSRPRGFAITDLLGLEAELPAPAGPGQGSGCEGPAVAPCPGPGLDGSSLARGALPLGLGLLCGFGTQPPAAARAPCLLLADVPFLPPRGPEPAAPLAPSRPPPALGRQKRSDSVSTSDEDSQSEDRNDLKASPTLGKRKKRRHRTVFTAHQLEELEKAFSEAHYPDVYAREMLAVKTELPEDRIQVWFQNRRAKWRKREKRWGGSSVMAEYGLYGAMVRHCIPLPDSVLNSAEGGLLGSCAPWLLGMHKKSMGMIRKPGSEDKLAGLWGSDHFKEGSSQSESGSQRGSDKVSPENGLEDVAIDLSSSARQETKKVHPGAGAQGGSNSTALEGPQPGKVGAT

SEQ ID NO: 774228 - protein, 239 aa, Homo sapiens
MTGRDSLSDGRTSSRALVPGGSPRGSRPRGFAITDLLGLEAELPAPAGPGQGSGCEGPAVAPCPGPGLDGSSLARGALPLGLGLLCGFGTQPPAAARAPCLLLADVPFLPPRGPEPAAPLAPSRPPPALGRQKRSDSVSTSDEDSQSEDRNDLKASPTLGKRKKRRHRTVFTAHQLEELEKAFSEAHYPDVYAREMLAVKTELPEDRIQVSGVPFLRSKDTTENVSFPHSVSQSAVPSL

SEQ ID NO: 774229 - protein, 280 aa, Homo sapiens
MTGRDSLSDGRTSSRALVPGGSPRGSRPRGFAITDLLGLEAELPAPAGPGQGSGCEGPAVAPCPGPGLDGSSLARGALPLGLGLLCGFGTQPPAAARAPCLLLADVPFLPPRGPEPAAPLAPSRPPPALGRQKRSDSVSTSDEDSQSEDRNDLKASPTLGKRKKRRHRTVFTAHQLEELEKAFSEAHYPDVYAREMLAVKTELPEDRIQVWFQNRRAKWRKREKRWGGSSVMAEYGLYGAMVRHCIPLPDSVLNSAEGGLLGSCAPWLLEGETLGCREMK

SEQ ID NO: 774230 - protein, 153 aa, Homo sapiens
CLLGSSDSPASASRVTGITGARHHSRLIFVFLVEIGFHHLDQAGLGPLSSSDPPALASQSAGIIGMNHHVWPHISICWEGSSREELRLLVASASTLERRPCTMQKTPPFPPYPISFLASAQRPVWGGSSSCPSADLWTSDGMGRGPLQVIPLR

SEQ ID NO: 774231 - protein, 789 aa, Homo sapiens
AGGARLRPARGRPPRLLPPRPGPCRPPPVPAPTVNERRAPPRAGWERRSDAGLSRGARPAEMYGVCGCCGALRPRYKRLVDNIFPEDPEDGLVKTNMEKLTFYALSAPEKLDRIGAYLSERLIRDVGRHRYGYVCIAMEALDQLLMACHCQSINLFVESFLKMVAKLLESEKPNLQILGTNSFVKFANIEEDTPSYHRSYDFFVSRFSEMCHSSHDDLEIKTKIRMSGIKGLQGVVRKTVNDELQANIWDPQHMDKIVPSLLFNLQHVEEAESRSPSPLQAPEKEKESPAELAERCLRELLGRAAFGNIKNAIKPVLIHLDNHSLWEPKVFAIRCFKIIMYSIQPQHSHLVIQQLLGHLDANSRSAATVRAGIVEVLSEAAVIAATGSVGPTVLEMFNTLLRQLRLSIDYALTGSYDGAVSLGTKIIKEHEERMFQEAVIKTVGSFASTLPTYQRSEVILFIMSKVPRPSLHQAVDTGRTGENRNRLTQIMLLKSLLQVSTGFQCNNMMSALPSNFLDRLLSTALMEDAEIRLFVLEILISFIDRHGNRHKFSTISTLSDISVLKLKVDKCSRQDTVFMKKHSQQLYRHIYLSCKEETNVQKHYEALYGLLALISIELANEEVVVDLIRLVLAVQDVAQVNEENLPVYNRCALYALGAAYLNLISQLTTVPAFCQHIHEVIETRKKEAPYMLPEDVFVERPRLSQNLDGVVIELLFRQSKISEVLGGSGYNSDRLCLPYIPQLTDEDRLSKRRSIGETISLQVEVESRNSPEKEEVSVRATVLGQPHLL

SEQ ID NO: 774232 - protein, 840 aa, Homo sapiens
PRLSQNLDGVVIELLFRQSKISEVLGGSGYNSDRLCLPYIPQLTDEDRLSKRRSIGENIFPEDPEDGLVKTNMEKLTFYALSAPEKLDRIGAYLSERLIRDVGRHRYGYVCIAMEALDQLLMACHCQSINLFVESFLKMVAKLLESEKPNLQILGTNSFVKFANIEEDTPSYHRSYDFFVSRFSEMCHSSHDDLEIKTKIRMSGIKGLQGVVRKTVNDELQANIWDPQHMDKIVPSLLFNLQHVEEAESRSPSPLQAPEKEKESPAELAERCLRELLGRAAFGNIKNAIKPVLIHLDNHSLWEPKVFAIRCFKIIMYSIQPQHSHLVIQQLLGHLDANSRSAATVRAGIVEVLSEAAVIAATGSVGPTVLEMFNTLLRQLRLSIDYALTGSYDGAVSLGTKIIKEHEERMFQEAVIKTVGSFASTLPTYQRSEVILFIMSKVPRPSLHQAVDTGRTGENRNRLTQIMLLKSLLQVSTGFQCNNMMSALPSNFLDRLLSTALMEDAEIRLFVLEILISFIDRHGNRHKFSTISTLSDISVLKLKVDKCSRQDTVFMKKHSQQLYRHIYLSCKEETNVQKHYEALYGLLALISIELANEEVVVDLIRLVLAVQDVAQVNEENLPVYNRCALYALGAAYLNLISQLTTVPAFCQHIHEVIETRKKEAPYMLPEDVFVERPRLSQNLDGVVIELLFRQSKISEVLGGSGYNSDRLCLPYIPQLTDEDRLSKRRSIGETISLQVEVESRNSPEKEERVPAEEITYETLKKAIVDSVAVEEQERERRRQVVEKFQKAPFEEIAAHCGARASLLQSKLNQIFEITIRAPPSPSGTLMVLRSARTIHP

SEQ ID NO: 774233 - protein, 81 aa, Homo sapiens
SSVLCSRSRGGLRRAMVSNLIVQQERRAGLGTHLPSVLCKAGQAGSRMRGSHGLTMAGGLGMPSSEKHGGSPLSCVSLLPP

SEQ ID NO: 774234 - protein, 107 aa, Homo sapiens
ALAPTFPGPDQEALLTVFPILIPGVCGCCGALRPRYKRLVDNIFPEDPEVGHVSGRHRGSHGPGRASDGGSLEARPPAGWGRQGLSGSLGTEPSQRNWNLGYSHGQW

SEQ ID NO: 774235 - protein, 110 aa, Homo sapiens
MHHASHASHASIITACALKSCRRCSRVSVNSFHTWALCRFPCWLSHMHTGGWHAALHLLLLGAQKPLSVVVFHLGIIEPSWEVPGPENLCCIISPPRGNSQSKIFTENRT

SEQ ID NO: 774236 - protein, 119 aa, Homo sapiens
TFFLHLHRVFPTRNKQVQGLSSEHNGEYSHIARMVKALRRDGTTWTAWQLGPRTKLWGAPAFRGRRGDPASGTHRGGMARDPGGKPGGMLFLSSEDAAFKVPSWEQKPGPYQTPSLPAH

SEQ ID NO: 774237 - protein, 56 aa, Homo sapiens
PPPSARAEPSLIPEPEGDWDRENGDGGRPRRRRTRARNPGGPARSRPRPAGCGTLS

SEQ ID NO: 774238 - protein, 111 aa, Homo sapiens
MLSLPPTLSPERPQRVFFPSSCPCVLIVQLPLISENMRCLVFCSCPGLLRIMASSSIHVPAKDMILFLFMAAKILLLGDLLAFYSGLEFPLKLVFLGYIAEGWDWLDSTLL

SEQ ID NO: 774239 - protein, 108 aa, Homo sapiens
  misc_feature (8)..(8): Xaa can be any naturally occurring amino acid
MSALTLLXYHCYTLCSKTLNLKGCFQSCQVVSLPRPVSIYDRPKEDHLQLESSHLGDCVLPGWAICTGVRFISLKGKPFESFEYQHQEEQYKLEKLGVSPERELNKHS

SEQ ID NO: 774240 - protein, 72 aa, Homo sapiens
LVLITPAPFCFSVSCLFQKSVELKGLNDSSLPSVTGKLHGRNRILTQTRCGVPSGNASYSQWASYSCGPSSL

SEQ ID NO: 774241 - protein, 237 aa, Homo sapiens
MAFFSRLNLQEGLQTFFVLQWIPVYIFLGAIPILLIPYFLLFSKFWPLAVLSLAWLTYDWNTHSQGGRRSAWVRNWTLWKYFRNYFPVKLVKTHDLSPKHNYIIANHPHGILSFGVFINFATEATGIARIFPSITPFVGTLERIFWIPIVREYVMSMGVCPVSSSALKYLLTQKGSGNAVVIVVGGAAEALLCRPGASTLFLKQRKGFVKMALQTGAYLVPSYSFGENEVFNHGDLP

SEQ ID NO: 774242 - protein, 120 aa, Homo sapiens
QDGGARTNEAAVEDRLATAEKMAVDQDVVGQVSVSSWIACGSPRPTPGQPFGLMCPVNSLGAEDMPINGRDCCMFRRVICVPSTQSPLLGLSCKIMAQSYNQGIDSETSPHLIQILQLYL

SEQ ID NO: 774243 - protein, 179 aa, Homo sapiens
REFTAGAGAQAWRAAGPEPCPSGRQLRPERSAGGPAVLGDPVHPPQPLAWVLSPSLPGPAGPAAAPSAGSAKPTPTRNPSWPTSAPGSPGSRSRLSLHNSLRAEGAGSGLGQPRKGLPQCSGGLKGSSSANKVGAQAEEAPRASEGCEDCQNAVTSHQESKYYQRHRGPELVLQLGKNT

SEQ ID NO: 774244 - protein, 256 aa, Homo sapiens
PVYDLRVKSTGLREGCEYEYRVYAENAAGLSLPSETSPLIRAEDPVFLPSPPSKPKIVDSGKTTITIAWVKPLFDGGAPITGYTVEYKKSDDTDWKTSIQSLRGTEYTISGLTTGAEYVFRVKSVNKVGASDPSDSSDPQIAKEREEEPLFDIDSEMRKTLIVKAGASFTMTVPFRGRPVPNVLWSKPDTDLRTRAYVDTTDSRTSLTIENANRNDSGKYTLTIQNVLSAASLTLVVKVLDTPGPPTNITVQDVTK

SEQ ID NO: 774245 - protein, 158 aa, Homo sapiens
LTGLLGELRMLGTEHGARHVAHTVLWDGVSVAGGNEEVLGVVAAGLCSRSDSGGREELGLHSQGQRGIKVSEEEVSCSKGHFQKINQQDDIGWTGMVERDWKVRPNVRVTAGPARGAKDTFKGPGQRSRAEEARVSRNRRGHMNTRGQVERRTQNSLE

SEQ ID NO: 774246 - protein, 100 aa, Homo sapiens
DLPFNPAYGFISQKEINPSTKNTYGHHSAIHSSKDRSTWLPINSGLDKENVVHINHGVLGSHKKNKIMSFAASHMDAAGSHNLSKLRTENQVLHVLTNGS

SEQ ID NO: 774247 - protein, 746 aa, Homo sapiens
PAAAAAAPLRTARRRLAMDARGGGGRPGESPGATPAPGPPPPPPPAPPQQQPPPPPPPAPPPGPGPAPPQHPPRAEALPPEAADEGGPRGRLRSRDSSCGRPGTPGAASTAKGSPNGECGRGEPQCSPAGPEGPARGPKVSFSCRGAASGPAPGPGPAEEAGSEEAGPAGEPRGSQASFMQRQFGALLQPGVNKFSLRMFGSQKAVEREQERVKSAGAWIIHPYSDFRFYWDFTMLLFMVGNLIIIPVGITFFKDETTAPWIVFNVVSDTFFLMDLVLNFRTGIVIEDNTEIILDPEKIKKKYLRTWFVVDFVSSIPVDYIFLIVEKGIDSEVYKTARALRIVRFTKILSLLRLLRLSRLIRYIHQWEEIFHMTYDLASAVMRICNLISMMLLLCHWDGCLQFLVPMLQDFPRNCWVSINGMVNHSWSELYSFALFKAMSHMLCIGYGRQAPESMTDIWLTMLSMIVGATCYAMFIGHATALIQSLDSSRRQYQEKYKQVEQYMSFHKLPADFRQKIHDYYEHRYQGKMFDEDSILGELNGPLREEIVNFNCRKLVASMPLFANADPNFVTAMLTKLKFEVFQPGDYIIREGTIGKKMYFIQHGVVSVLTKGNKEMKLSDGSYFGEICLLTRGRRTASVRADTYCRLYSLSVDNFNEVLEEYPMMRRAFETVAIDRLDRIGKKNSILLHKVQHDLNSGVFNNQENAIIQEIVKYDREMVQQAELGQRVGLACEGAPFTSVPQFPQL

SEQ ID NO: 774248 - protein, 906 aa, Homo sapiens
PAAAAAAPLRTARRRLAMDARGGGGRPGESPGATPAPGPPPPPPPAPPQQQPPPPPPPAPPPGPGPAPPQHPPRAEALPPEAADEGGPRGRLRSRDSSCGRPGTPGAASTAKGSPNGECGRGEPQCSPAGPEGPARGPKVSFSCRGAASGPAPGPGPAEEAGSEEAGPAGEPRGSQASFMQRQFGALLQPGVNKFSLRMFGSQKAVEREQERVKSAGAWIIHPYSDFRFYWDFTMLLFMVGNLIIIPVGITFFKDETTAPWIVFNVVSDTFFLMDLVLNFRTGIVIEDNTEIILDPEKIKKKYLRTWFVVDFVSSIPVDYIFLIVEKGIDSEVYKTARALRIVRFTKILSLLRLLRLSRLIRYIHQWEEIFHMTYDLASAVMRICNLISMMLLLCHWDGCLQFLVPMLQDFPRNCWVSINGMVNHSWSELYSFALFKAMSHMLCIGYGRQAPESMTDIWLTMLSMIVGATCYAMFIGHATALIQSLDSSRRQYQEKYKQVEQYMSFHKLPADFRQKIHDYYEHRYQGKMFDEDSILGELNGPLREEIVNFNCRKLVASMPLFANADPNFVTAMLTKLKFEVFQPGDYIIREGTIGKKMYFIQHGVVSVLTKGNKEMKLSDGSYFGEICLLTRGRRTASVRADTYCRLYSLSVDNFNEVLEEYPMMRRAFETVAIDRLDRIGKKNSILLHKVQHDLNSGVFNNQENAIIQEIVKYDREMVQQAELGQRVGLFPPPPPPPQVTSAIATLQQAAAMSFCPQVARPLVGPLALGSPRLVRRPPPGPAPAAASPGPPPPASPPGAPASPRAPRTSPYGGLPAAPLAGPALPARRLSRASRPLSASQPSLPHGAPGPAASTRPASSSTPRLGPTPAARAAAPSPDRRDSASPGAAGGLDPQDSARSRLSSNL

SEQ ID NO: 774249 - protein, 256 aa, Homo sapiens
PPGKETLPFRSDGIPALWRGPLVCVSLSFWGVDGAWDPAGNQLKTFSLEALGPEDFAWGIGPAMAFRRAEGTSMIQALAMTVAEIPVFLYTTFGQSAFSQLRLTPGLRKVLFATALGTVALALAAHQLKRRRRRKKQVGPEMGGEQLGTVPLPILLARKVPSVKKDGVSLCCQAGVQWRNLGSLQPSPARFKRFSCLSLLRSWDYRIIQPESQSPSRRAENLSGISSIEPRSNRVSTVWLHDGGNIQPKRVLGLWM

SEQ ID NO: 774250 - protein, 655 aa, Homo sapiens
GAGVRAVSGARGYLALWRGPLVCVSLSFWGVDGAWDPAGNQLKTFSLEALGPEDFAWGIGPAMAFRRAEGTSMIQALAMTVAEIPVFLYTTFGQSAFSQLRLTPGLRKVLFATALGTVALALAAHQLKRRRRRKKQVGPEMGGEQLGTVPLPILLARKVPSVKKGYSSRRVQSPSSKSNDTLSGISSIEPSKHSGSSHSVASMMAVNSSSPTAACSGLWDARGMEESLTTSDGNAESLYMQGMELFEEALQKWEQALSVGQRGDSGSTPMPRDGLRNPETASEPLSEPESQRKEFAEKLESLLHRAYHLQEEFGSTFPADSMLLDLERTLMLPLTEGSLRLRADDEDSLTSEDSFFSATELFESLQTGDYPIPLSRPAAAYEEALQLVKEGRVPCRTLRTELLGCYSDQDFLAKLHCVRQAFEGLLEDKSNQLFFGKVGRQMVTGLMTKAEKSPKGFLESYEEMLSYALRPETWATTRLELEGRGVVCMSFFDIVLDFILMDAFEDLENPPASVLAVLRNRWLSDSFKETALATACWSVLKAKRRLLMVPDGFISHFYSVSEHVSPVLAFGFLGPKPQLAEVCAFFKHQIVQYLRDMFDLDNVRYTSLPALADDILQLSRRRSEILLGYLGVPAASSAGVNGALPRENGPLGELQ

SEQ ID NO: 774251 - protein, 659 aa, Homo sapiens
GAGVRAVSGARGYLALWRGPLVCVSLSFWGVDGAWDPAGNQLKTFSLEALGPEDFAWGIGPAMAFRRAEGTSMIQALAMTVAEIPVFLYTTFGQSAFSQLRLTPGLRKVLFATALGTVALALAAHQLKRRRRRKKQVGPEMGGEQLGTVPLPILLARKVPSVKKGYSSRRVQSPSSKSNDTLSGISSIEPSKHSGSSHSVASMMAVNSSSPTAACSGLWDARGMEESLTTSDGNAESLYMQGMELFEEALQKWEQALSVGQRGDSGSTPMPRDGLRNPETASEPLSEPESQRKEFAEKLESLLHRAYHLQEEFGSTFPADSMLLDLERTLMLPLTEGSLRLRADDEDSLTSEDSFFSATELFESLQTGDYPIPLSRPAAAYEEALQLVKEGRVPCRTLRTELLGCYSDQDFLAKLHCVRQAFEGLLEDKSNQLFFGKVGRQMVTGLMTKAEKSPKGFLESYEEMLSYALRPETWATTRLELEGRGVVCMSFFDIVLDFILMDAFEDLENPPASVLAVLRNRWLSDSFKETALATACWSVLKAKRRLLMVPDGFISHFYSVSEHVSPVLAFGFLGPKPQLAEVCAFFKHQIVQYLRDMFDLDNVRYTSLPALADDILQLSRRRSEILLGYLGVPAASSAGVNGALPRENGPLPRHRIHGH

SEQ ID NO: 774252 - protein, 596 aa, Homo sapiens
GAGVRAVSGARGYLALWRGPLVCVSLSFWGVDGAWDPAGNQLKTFSLEALGPEDFAWGIGPAMAFRRAEGTSMIQALAMTVAEIPVFLYTTFGQSAFSQLRLTPGLRKVLFATALGTVALALAAHQLKRRRRRKKQVGPEMGGEQLGTVPLPILLARKVPSVKKGYSSRRVQSPSSKSNDTLSGISSIEPSKHSGSSHSVASMMAVNSSSPTAACSGLWDARGMEESLTTSDGNAESLYMQGMELFEEALQKWEQALSVGQRGDSGSTPMPRDGLRNPETASEPLSEPESQRKEFAEKLESLLHRAYHLQEEFGSTFPADSMLLDLERTLMLPLTEGSLRLRADDEDSLTSEDSFFSATELFESLQTGDYPIPLSRPAAAYEEALQLVKEGRVPCRTLRTELLGCYSDQDFLAKLHCVRQAFEGLLEDKSNQLFFGKVGRQMVTGLMTKAEKSPKGFLESYEEMLSYALRPETWATTRLELEGRGVVCMSFFDIVLDFILMDAFEDLENPPASVLAVLRNRWLSDSFKETVGHCPALRPTLAHISPCGCLAPSPLSLALAPGLGPHPLDPRLPGLGDQSLPWRSLQGAPLLPGAPV

SEQ ID NO: 774253 - protein, 655 aa, Homo sapiens; identical to SEQ ID NO: 774250

SEQ ID NO: 774254 - protein, 663 aa, Homo sapiens
AGTGPRSYDGKETLPSCSDGIPALWRGPLVCVSLSFWGVDGAWDPAGNQLKTFSLEALGPEDFAWGIGPAMAFRRAEGTSMIQALAMTVAEIPVFLYTTFGQSAFSQLRLTPGLRKVLFATALGTVALALAAHQLKRRRRRKKQVGPEMGGEQLGTVPLPILLARKVPSVKKGYSSRRVQSPSSKSNDTLSGISSIEPSKHSGSSHSVASMMAVNSSSPTAACSGLWDARGMEESLTTSDGNAESLYMQGMELFEEALQKWEQALSVGQRGDSGSTPMPRDGLRNPETASEPLSEPESQRKEFAEKLESLLHRAYHLQEEFGSTFPADSMLLDLERTLMLPLTEGSLRLRADDEDSLTSEDSFFSATELFESLQTGDYPIPLSRPAAAYEEALQLVKEGRVPCRTLRTELLGCYSDQDFLAKLHCVRQAFEGLLEDKSNQLFFGKVGRQMVTGLMTKAEKSPKGFLESYEEMLSYALRPETWATTRLELEGRGVVCMSFFDIVLDFILMDAFEDLENPPASVLAVLRNRWLSDSFKETALATACWSVLKAKRRLLMVPDGFISHFYSVSEHVSPVLAFGFLGPKPQLAEVCAFFKHQIVQYLRDMFDLDNVRYTSLPALADDILQLSRRRSEILLGYLGVPAASSAGVNGALPRENGPLGELQ

SEQ ID NO: 774255 - protein, 131 aa, Homo sapiens
FFFLKQVTLPSLGPILGGKNQHIPELSKSFELQVHIQGSHSSACSQGTATANPAEEASLGTAQAARCTHFPEGSPFFRKQLFQASEQGLGIRVVGWQLTACSVEPGANSDPKASRGPVAGPSAQQDTHARG

SEQ ID NO: 774256 - protein, 138 aa, Homo sapiens
LWQGYGRDVVMSRTWRAPRFSPECTPLGPLCSPDLEGRDRFPDEEEGEGGPEWGQPVYKATGDACVTPALLLLTGYSSRRVQSPSSKSNDTLSGISSIEPSKHSGSSHSVASVSSRCQGSRAPGPGLPLLRTLPSASL

SEQ ID NO: 774257 - protein, 134 aa, Homo sapiens
MIAARGLAPSWPPAHMHRVTRHLCSGTSSSSPRGGKSIHCCDPSSSPNRKATRWAPVPAWPLEVTAKNNVGSQKQRHYAWPHWGQAGEIRDTQWGEDDAQTQPWGARAGGRALTSLSHSLAQAAPSVGRVPPSL

SEQ ID NO: 774258 - protein, 40 aa, Homo sapiens
EIAPLHSSLGDKSETPSQRKRKRETVKGLQHQANAQSRKL

SEQ ID NO: 774259 - protein, 113 aa, Homo sapiens [sequence omitted]

SEQ ID NO: 774260 - protein, 103 aa, Homo sapiens
GNEERHSSKTIPVNSTFFSWRFGLGQQERVLELQAWEDDVTEATEGIWLDVDYEVSSGLSISHLLEVKLISWSLKMGSETLCIQGSASESLVLNLHTSKSDQT

SEQ ID NO: 774261 - protein, 50 aa, Homo sapiens
MTSNWSLPLQKPLERKASNSCPCVGAIVAQRSSPSKKREGPKARNPNQET

SEQ ID NO: 774262 - protein, 118 aa, Homo sapiens
GVHTFPAVLQSSGLYSLSSVVTVPSSSLGTQTYTCNVNHKPSNTKVDKRVEPKSCDKTHTCPPCPAPELLGGPSVFLFPPKPKDTLMISRTPEVTCVVVDVSHEDPEVKFNWYVDGVE

SEQ ID NO: 774263 - protein, 176 aa, Homo sapiens
MSRPLSDQEKRKQISVRGLAGVENVTELKKNFNRPEFTLPVHFYGHVEHTSQGAKWVDTQVVLAMPYDTPVPGYRNNVVNTMRLWSAKAPNDFNLKDFNVGGYIQAVLDRNLAENISRVLYPNDNFFEGKELRLKQEYFVVAATLQDIIRRFKSSKFGCRDPVRTNFDAFPDKVPC

SEQ ID NO: 774264 - protein, 110 aa, Homo sapiens
MPVSNTGAQCLQCLCIVRVTLLHFPTNSSSPSETTSAWTLLSISLLTFWSKPFNKSLGSSKLSHIFLSSSEPSKLFQPLPVTHFQSCFHIFGYLYSSSPLYWYQLIVLVC

SEQ ID NO: 774265 - protein, 111 aa, Homo sapiens
PPRPANFVFLVEGVSPCWSGWSQTPDLKWSPDSASQSVEITGVSHCARPQWVLSAGCPDRVDLSGQGSCHGEGLVHAEPVERETRLEVFFFFLRRSLTLSPRVECSDEISA

SEQ ID NO: 774266 - protein, 78 aa, Homo sapiens
CQLPELEKPTYKERCHVSPGEPGPSVGLAGPSQCDPTSMGSLFPPAQPWGAGLPLEGNSFQRLKGLQGRVIPASQVYP

SEQ ID NO: 774267 - protein, 93 aa, Homo sapiens
IRYTDPLIKVNDTIQIDLETGKITDFIKFDTGHLCMVTGGANLGRIGVITNRERHPGSFDIVHMEDANGNSFATQLSNIFVIGKGNKLWISLP

SEQ ID NO: 774268 - protein, 105 aa, Homo sapiens
MPGSSKSEYLILSQTCPKNPINSSHLIKGVHWKCNMVFLSCCCLNLQVSELEERNFYFVEKIQENFGKRKERIHSPHPPKKPFIKQPLDAWQKTIYTTCSRKIPS

SEQ ID NO: 774269 - protein, 161 aa, Homo sapiens
SRAYNGNLSPSMGSTCSLGLPQWPHYPAPADHRPPNLLPSPSSLPRAGPAHPQAHLPSLRASQEGWGTRRDSREGPGQGPRVQLPSQLCLASSVCACKTRLCSRTSVCSPENWEHPILPSGSARASFSLLGGRAEARLGREQTGVSWVIFSGPHLLDHMET

SEQ ID NO: 774270 - protein, 414 aa, Homo sapiens
FQGIRRLKELILSSNKITYLHNKTFHPVPNLRNLDLSYNKLQTLQSEQFKGLRKLIILHLRSNSLKTVPIRVFQDCRNLDFLDLGYNRLRSLSRNAFAGLLKLKELHLEHNQFSKINFAHFPRLFNLRSIYLQWNRIRSISQGLTWTWSSLHNLDLSGNDIQGIEPGTFKCLPNLQKLNLDSNKLTNISQETVNAWISLISITLSGNMWECSRSICPLFYWLKNFKGNKESTMICAGPKHIQGEKVSDAVETYNICSEVQVVNTERSHLVPQTPQKPLIIPRPTIFKPDVTQSTFETPSPSPGFQIPGAEQEYEHVSFHKIIAGSVALFLSVAMILLVIYVSWKRYPASMKQLQQHSLMKRRRKKARESERQMNSPLQEYYVDYKPTNSETMDISVNGSGPCTYTISGSRECEV

SEQ ID NO: 774271 - protein, 414 aa, Homo sapiens; identical to SEQ ID NO: 774270

SEQ ID NO: 774272 - protein, 156 aa, Homo sapiens
MNDTEKPADTPSEEEDFGDPRTYDPDFKGPVANRSCTDVLCCMIFLLCIIGYIVLGLVAWVHGDPRRAAYPTDSQGHFCGQKGTPNENKTISFYFNLLRCTSPSVLLNLQCPTTQICVSKCPEKFLTYVEMQLLYTKRTKATGKTTVSSVRPLLSL

SEQ ID NO: 774273 - protein, 114 aa, Homo sapiens
MIFLLCIIGYIVLGLVAWVHGDPRRAAYPTDSQGHFCGQKGTPNENKTISFYFNLLRCTSPSVLLNLQCPTTQICVSKCPEKFLTYVEMQLLYTKRTKATGKTTVSSVRPLLSL

SEQ ID NO: 774274 - protein, 101 aa, Homo sapiens
GICGCPRVQFSFTDWTWRVTRLGDLVKIMKLRNPWPGKAFSRSCGSRVYVSLPQVDCCMQGLQHMVFIIVFHCSWLCAWRGVELMHPHPWFSDSLKSGGRD

SEQ ID NO: 774275 - protein, 132 aa, Homo sapiens
MIEVYWSRCCKPYRKYGGICFWGGLGKLPVMAEGEGGAGVSHGESGGKSARWEVCHRISRELTHYRENSTKGIALSCSYKSTLKIQSLPTRPHFQRRGDSSTGDWWGDPNSSTLLLLFAICSLSHWPQVLLQ

SEQ ID NO: 774276 - protein, 462 aa, Homo sapiens
MRKEKTHINTVIIGHVDSGKSTTTGHLIYKCGGIDKRTIEKFEKEAAEMGKGSFKYAWVLDKLKAERERGITIDISLWKFETSKYYVTIIDAPGHRDFIKNMITGTSQADCAVLIVAAGVGEFEAGISKNGQTREHALLAYTLGVKQLIVGVNKMDSTEPPYSQKRYEEIVKEVSTYIKKIGYNPDTVAFVPISGWNGDNMLEPSANMPWFKGWKVTRKDGNASGTTLLEALDCILPPTRPTDKPLCLPLQDVYKIGGIGTVPVGRVETGVLKPGMVVTFAPVNVTTEVKSVEMHHEALSEALPGDNVGFNVKNVSVKDVRRGNVAGDSKNDPPMEAAGFTAQVIILNHPGQISAGYAPVLDCHTAHIACKFAELKEKIDRRSGKKLEDGPKFLKSGDAAIVDMVPGKPMCVESFSDYPPLGRFAVRDMRQTVAVGVIKAVDKKAAGAGKVTKSAQKAQKAK

SEQ ID NO: 774277 - protein, 108 aa, Homo sapiens
GVRSNLLPNGPAPQAPRVGLLRGPSLTLEAPSSSPYQTPCPRQPTASPVSAMGPSKAVADTRTCQSLRCSGPEQLFQLPVWCGWHLFPRQFNNVSRGTVSNGCHLSVA

SEQ ID NO: 774278 - protein, 58 aa, Homo sapiens
LICSYNGDFNTPLSEMDRCSGQKTSKNIDEFNSAVKQLDIIDIYETTSSNNSTIHILL

SEQ ID NO: 774279 - protein, 44 aa, Homo sapiens
GPTRAGTALARKAAAFLLRELQAQSVPPGYSRPKVTGLGKRPQN

SEQ ID NO: 774280 - protein, 176 aa, Homo sapiens
MTSLPGLLCSSTYKVTARFQDIQNNQDQVTGSGHCNDRRPLTFPIPGTFNNTWEIQELDFGTFVSDDTRHSAQSSEFIGCHLRIYPCQVTKQCRLPHKWKTNKSNSSITCLGHIKTFFCTSTTTTTLWSSEFSTKLSKTSLKQPQVVCCGLVESKPSPLLSPRLSWGAAHRGEYPV

SEQ ID NO: 774281 - protein, 133 aa, Homo sapiens
SGAGSAAGGGASFGSSSEQLAACSPWQEGPSAPRCGQAAAAGDERRDFGGPGAPFPGLVFRIRKRGSRMSPGGGGSKENEAVAGGGGGRGRLRPVRRPPQPRRGGDDSYPIVGCLASELFLNLEDFKPQLRNP

SEQ ID NO: 774282 - protein, 459 aa, Homo sapiens
RYYEAVVIRAIAVESLNLDSAVVGSPSPLSLSLSLSVSGSLSARAHRAALLPPSLCGCAGVCVCGCVWGVGVPYALPPLPPPPAPPSFPSPPPPSPLPPPGPHRPSPPLPPLSLPLPEFSPLLSGQSMVFRSPLDLYSSHFLLPNFADSHHRSILLASSGGGNGAGGGGGAGGGSGGGNGAGGGGAGGAGGGGGGGSRAPPEELSMFQLPTLNFSPEQVASVCETLEETGDIERLGRFLWSLPVAPGACEAINKHESILRARAVVAFHTGNFRDLYHILENHKFTKESHGKLQAMWLEAHYQEAEKLRGRPLGPVDKYRVRKKFPLPRTIWDGEQKTHCFKERTRSLLREWYLQDPYPNPSKKRELAQATGLTPTQVGNWFKNRRQRDRAAAAKNRLQHQAIGPSGMRSLAEPGCPTHGSAESPSTAASPTTSVSSLTERADTGTSILSVTSSDSECDV

SEQ ID NO: 774283 - protein, 567 aa, Homo sapiens
RYYEAVVIRAIAVESLNLDSAVVGSPSPLSLSLSLSVSGSLSARAHRAALLPPSLCGCAGVCVCGCVWGVGVPYALPPLPPPPAPPSFPSPPPPSPLPPPGPHRPSPPLPPLSLPLPEFSPLLSGQSMVFRSPLDLYSSHFLLPNFADSHHRSILLASSGGGNGAGGGGGAGGGSGGGNGAGGGGAGGAGGGGGGGSRAPPEELSMFQLPTLNFSPEQVASVCETLEETGDIERLGRFLWSLPVAPGACEAINKHESILRARAVVAFHTGNFRDLYHILENHKFTKESHGKLQAMWLEAHYQEAEKLRGRPLGPVDKYRVRKKFPLPRTIWDGEQKTHCFKERTRSLLREWYLQDPYPNPSKKRELAQATGLTPTQVGNWFKNRRQRDRAAAAKNRLVAGPAAWLQPQRPGKGRGVEMGLAERPLRAREAVTPGQSEKVSACPGRAEEGAGLAVGVLIALTKRGFRQGRECVLATRVPAAPGRLSPALHPCLPPQPCRQLGDPLEPRDREGRKALFAIWFLFLCVAKPREKSTSVRERKVNLGPYHKGKRPEATAQRACFPATLHVA

SEQ ID NO: 774284 - protein, 294 aa, Homo sapiens
MPRGDSEQVRYCARFSYLWLKFSLIIYSTVFWLIGALVLSVGIYAEVERQKYKTLESAFLAPAIILILLGVVMFMVSFIGVLASLRDNLYLLQAFMYILGICLIMELIGGVVALTFRNQTIDFLNDNIRRGIENYYDDLDFKNIMDFVQKKFKCCGGEDYRDWSKNQYHDCSAPGPLACGVPYTCCIRNTTEVVNTMCGYKTIDKERFSVQDVIYVRGCTNAVIIWFMDNYTIMAGILLGILLPQFLGVLLTLLYITRVEDIIMEHSVTDGLLGPGAKPSVEAAGTGCCLCYPN

SEQ ID NO: 774285 - protein, 140 aa, Homo sapiens [sequence omitted]

SEQ ID NO: 774286 - protein, 178 aa, Homo sapiens
MRETIDFLNDNIRRGIENYYDDLDFKNIMDFVQKKFKCCGGEDYRDWSKNQYHDCSAPGPLACGVPYTCCIRNTTEVVNTMCGYKTIDKERFSVQDVIYVRGCTNAVIIWFMDNYTIMAGILLGILLPQFLGVLLTLLYITRVEDIIMEHSVTDGLLGPGAKPSVEAAGTGCCLCYPN

SEQ ID NO: 774287 - protein, 294 aa, Homo sapiens; identical to SEQ ID NO: 774284

SEQ ID NO: 774288 - protein, 294 aa, Homo sapiens; identical to SEQ ID NO: 774284

SEQ ID NO: 774289 - protein, 140 aa, Homo sapiens
QNLGSPSHAAYGKLRITAVEGLAWTLCTWQSRGCGSCQPRSSAGLTQLLPMQRFSVQDVIYVRGCTNAVIIWFMDNYTIMAGILLGILLPQFLGVLLTLLYITRVEDIIMEHSVTDGLLGPGAKPSVEAAGTGCCLCYPN

SEQ ID NO: 774290 - protein, 251 aa, Homo sapiens
MPRGDSEQVRYCARFSYLWLKFSLIIYSTVFWLIGALVLSVGIYAEVERQKYKTLESAFLAPAIILILLGVVMFMVSFIGVLASLRDNLYLLQAFMYILGICLIMELIGGVVALTFRNQTIDFLNDNIRRGIENYYDDLDFKNIMDFVQKKFKCCGGEDYRDWSKNQYHDCSAPGPLACGVPYTCCIRNTTEVVNTMCGYKTIDKERFSVQDVIYVRGCTNAVIIWFMDNYTIMAGILLGILLPQITGVSD

SEQ ID NO: 774291 - protein, 255 aa, Homo sapiens
MPRGDSEQVRYCARFSYLWLKFSLIIYSTVFWLIGALVLSVGIYAEVERQKYKTLESAFLAPAIILILLGVVMFMVSFIGVLASLRDNLYLLQAFMYILGICLIMELIGGVVALTFRNQTIDFLNDNIRRGIENYYDDLDFKNIMDFVQKKFKCCGGEDYRDWSKNQYHDCSAPGPLACGVPYTCCIRNTTEVVNTMCGYKTIDKERFSVQDVIYVRGCTNAVIIWFMDNYTIMAGILLGILLPQGGQAVGSEKV

SEQ ID NO: 774292 - protein, 169 aa, Homo sapiens
MPRGDSEQVRYCARFSYLWLKFSLIIYSTVFWLIGALVLSVGIYAEVERQKYKTLESAFLAPAIILILLGVVMFMVSFIGVLASLRDNLYLLQAFMYILGICLIMELIGGVVALTFRNQTIDFLNDNIRRGIENYYDDLDFKNIMDFVQKKFKCCGGEHHQYNWWCSLG

SEQ ID NO: 774293 - protein, 235 aa, Homo sapiens
EGTFKGFIFLGVVMFMVSFIGVLASLRDNLYLLQAFMYILGICLIMELIGGVVALTFRNQTIDFLNDNIRRGIENYYDDLDFKNIMDFVQKKFKCCGGEDYRDWSKNQYHDCSAPGPLACGVPYTCCIRNTTEVVNTMCGYKTIDKERFSVQDVIYVRGCTNAVIIWFMDNYTIMAGILLGILLPQFLGVLLTLLYITRVEDIIMEHSVTDGLLGPGAKPSVEAAGTGCCLCYPN

SEQ ID NO: 774294 - protein, 150 aa, Homo sapiens
MDFVQKKFKCCGGEDYRDWSKNQYHDCSAPGPLACGVPYTCCIRNTTEVVNTMCGYKTIDKERFSVQDVIYVRGCTNAVIIWFMDNYTIMAGILLGILLPQFLGVLLTLLYITRVEDIIMEHSVTDGLLGPGAKPSVEAAGTGCCLCYPN

SEQ ID NO: 774295 - protein, 294 aa, Homo sapiens; identical to SEQ ID NO: 774284

SEQ ID NO: 774296 - protein, 294 aa, Homo sapiens; identical to SEQ ID NO: 774284

SEQ ID NO: 774297 - protein, 94 aa, Homo sapiens
RTRGSTHAFATRRIYVRGCTNAVIIWFMDNYTIMAGILLGILLPQFLGVLLTLLYITRVEDIIMEHSVTDGLLGPGAKPSVEAAGTGCCLCYPN

SEQ ID NO: 774298 - protein, 244 aa, Homo sapiens
MPRGDSEQVRYCARFSYLWLKFSLIIYSTVFWLIGALVLSVGIYAEVERQKYKTLESAFLAPAIILILLGVVMFMVSFIGVLASLRDNLYLLQAFMYILGICLIMELIGGVVALTFRNQTIDFLNDNIRRGIENYYDDLDFKNIMDFVQKKFKCCGGEDYRDWSKNQYHDCSAPGPLACGVPYTCNWGEGVCPSGQEGRASGEGQEGRAVHAATPMARLASSQPPRCLEPSCKGGCFLEPSFFT

SEQ ID NO: 774299 - protein, 185 aa, Homo sapiens
MLEGRCQTQPRSSPSGREASLWSSGFGMKLEAVTPFLGKYRPFVGRCCQTCTPKSWESLFHRSITDLGFCNVILVKEENTRFRGWLVRRLCYFLWSLEQHIPLWQDVPQKIMESTGVQNLLSGRVPGGTGEGQVPDLVKKEVQRILGHIQAPPRPFLLFSWALLRFLNCLFLNVQLHKGQMKMVQ

SEQ ID NO: 774300 - protein, 181 aa, Homo sapiens
MLEGRCQTQPRSSPSGREASLWSSGFGMKLEAVTPFLGKYRPFVGRCCQTCTPKSWESLFHRSITDLGFCNVILVKEENTRFRGWLVRRLCYFLWSLEQHIPLWQDVPQKIMESTGVQNLLSGRVPGGTGEGQVPDLVKKEVQRILGHIQAPPRPFLFMLLSQGLGVLRVAWDSRACSPAL

SEQ ID NO: 774301 - protein, 153 aa, Homo sapiens
NHPQLSAMIRGQDAEMLRYITNLEVKELRHPRTGCKFKFFFRRNPYFRNKLIVKEYEVRSSGRVVSLSTPIIWRRGHEPQSFIRRNQDLICSFFTWFSDHSLPESDKIAEIIKEDLWPNPLQYYLLREGVRRARRRPLREPVEIPRPFGFQSG

SEQ ID NO: 774302 - protein, 1464 aa, Homo sapiens
PDTVYEFAVRISQGERDGKWSTSVFQRTPESAPTTAPENLNVWPVNGKPTVVAASWDALPETEGKVKEYILSYAPALKPFGAKSLTYPGDTTSALVDGLQPGERYLFKIRATNRRGLGPHSKAFIVAMPTTSKADVQQNTEDNGKPEKPEPSSPSPRAPASSQHPSVPASPQGRNAKDLLLDLKNKILANGGAPRKPQLRAKKAEELDLQSTEITGEEELGSREDSPMSPSDTQDQKRTLRPPSRHGHSVVAPGRTAVRARMPALPRREGVDKPGFSLATQPRPGAPPSASASPAHHASTQGTSHRPSLPASLNDNDLVDSDEDERAVGSLHPKGAFAQPRPALSPSRQSPSSVLRDRSSVHPGAKPASPARRTPHSGAAEEDSSASAPPSRLSPPHGGSSRLLPTQPHLSSPLSKGGKDGEDAPATNSNAPSRSTMSSSVSSHLSSRTQVSEGAEASDGESHGDGDREDGGRQAEATAQTLRARPASGHFHLLRHKPFAANGRSPSRFSIGRGPRLQPSSSPQSTVPSRAHPRVPSHSDSHPKLSSGIHGDEEDEKPLPATVVNDHVPSSSRQPISRGWEDLRRSPQRGASLHRKEPIPENPKSTGADTHPQGKYSSLASKAQDVQQSTDADTEGHSPKAQPGSTDRHASPARPPAARSQQHPSVPRRMTPGRAPQQQPPPPVATSQHHPGPQSRDAGRSPSQPRLSLTQAGRPRPTSQGRSHSSSDPYTASSRGMLPTALQNQDEDAQGSYDDDSTEVEAQDVRAPAHAARAKEAAGPFPSTSRGGKDADGSLAKEEREPAIALAPRGGSLAPVKRPLPPPPGSSPRASHVPSRLPPRSAATVSPVAGTHPWPQYTTRAPPGHFSTTPMLSLRQRMMHARFRNPLSRQPARPSYRQGYNGRPNVEGKVLPGSNGKPNGQRIINGPQGTKWVVDLDRGLVLNAEGRYLQDSHGNPLRIKLGGDGRTIVDLEGTPVVSPDGLPLFGQGRHGTPLANAQDKPILSLGGKPLVGLEVIKKTTHPPTTTMQPTTTTTPLPTTTTPRPTTATTRRTTTRRPTTTVRTTTRTTTTTTPKPTTPIPTCPPGTLERHDDDGNLIMSSNGIPECYAEEDEFSGLETDTAVPTEEAYVIYDEDYEFETSRPPTTTEPSTTATTPRVIPEEGAISSFPEEEFDLAGRKRFVAPYVTYLNKDPSAPCSLTDALDHFQVDSLDEIIPNDLKKSDLPPQHAPRNITVVAVEGCHSFVIVDWDKATPGDVVTGYLVYSASYEDFIRNKWSTQASSVTHLPIENLKPNTRYYFKVQAQNPHGYGPISPSVSFVTESDNPLLVVRPPGGEPIWIPFAFKHDPSYTDCHGRQYVKRTWYRKFVGVVLCNSLRYKIYLSDNLKDTFYSIGDSWGRGEDHCQFVDSHLDGRTGPQSYVEALPTIQGYYRQYRQEPVRFGNIGFGTPYYYVGWYECGVSIPGKW

SEQ ID NO: 774303 - protein, 1468 aa, Homo sapiens
PDTVYEFAVRISQGERDGKWSTSVFQRTPESAPTTAPENLNVWPVNGKPTVVAASWDALPETEGKVKEYILSYAPALKPFGAKSLTYPGDTTSALVDGLQPGERYLFKIRATNRRGLGPHSKAFIVAMPTTSKADVQQNTEDNGKPEKPEPSSPSPRAPASSQHPSVPASPQGRNAKDLLLDLKNKILANGGAPRKPQLRAKKAEELDLQSTEITGEEELGSREDSPMSPSDTQDQKRTLRPPSRHGHSVVAPGRTAVRARMPALPRREGVDKPGFSLATQPRPGAPPSASASPAHHASTQGTSHRPSLPASLNDNDLVDSDEDERAVGSLHPKGAFAQPRPALSPSRQSPSSVLRDRSSVHPGAKPASPARRTPHSGAAEEDSSASAPPSRLSPPHGGSSRLLPTQPHLSSPLSKGGKDGEDAPATNSNAPSRSTMSSSVSSHLSSRTQVSEGAEASDGESHGDGDREDGGRQAEATAQTLRARPASGHFHLLRHKPFAANGRSPSRFSIGRGPRLQPSSSPQSTVPSRAHPRVPSHSDSHPKLSSGIHGDEEDEKPLPATVVNDHVPSSSRQPISRGWEDLRRSPQRGASLHRKEPIPENPKSTGADTHPQGKYSSLASKAQDVQQSTDADTEGHSPKAQPGSTDRHASPARPPAARSQQHPSVPRRMTPGRAPQQQPPPPVATSQHHPGPQSRDAGRSPSQPRLSLTQAGRPRPTSQGRSHSSSDPYTASSRGMLPTALQNQDEDAQGSYDDDSTEVEAQDVRAPAHAARAKEAAGPFPSTSRGGKDADGSLAKEEREPAIALAPRGGSLAPVKRPLPPPPGSSPRASHVPSRLPPRSAATVSPVAGTHPWPQYTTRAPPGHFSTTPMLSLRQRMMHARFRNPLSRQPARPSYRQGYNGRPNVEGKVLPGSNGKPNGQRIINGPQGTKWVVDLDRGLVLNAEGRYLQDSHGNPLRIKLGGDGRTIVDLEGTPVVSPDGLPLFGQGRHGTPLANAQDKPILSLGGKPLVGLEVIKKTTHPPTTTMQPTTTTTPLPTTTTPRPTTATTRRTTTRRPTTTVRTTTRTTTTTTPKPTTPIPTCPPGTLERHDDDGNLIMSSNGIPECYAEEDEFSGLETDTAVPTEEAYVIYDEDYEFETSRPPTTTEPSTTATTPRVIPEEGAISSFPEEEFDLAGRKRFVAPYVTYLNKDPSAPCSLTDALDHFQVDSLDEIIPNDLKKSDLPPQHAPRNITVVAVEGCHSFVIVDWDKATPGDVVTGYLVYSASYEDFIRNKWSTQASSVTHLPIENLKPNTRYYFKVQAQNPHGYGPISPSVSFVTESDNPLLVVRPPGGEPIWIPFAFKHDPSYTDCHGRQYVKRTWYRKFVGVVLCNSLRYKIYLSDNLKDTFYSIGDSWGRGEDHCQFVDSHLDGTKMSLSTSKQVAFHICHRNQRRDGVGSPLENASLPGPLHLSSLQCHNLSDLVLSMIL

SEQ ID NO: 774304 - protein, 103 aa, Homo sapiens
MAPELQLGFPKRHKRQVGKTPPQAGVGAGPEVLALPQGYGNHTQKWFSLFESSVLSQEQLIRGLLSEGGCKDEFYLLVQGPLTLFPSPVALPGYYRQYRQEPV

SEQ ID NO: 774305 - protein, 1499 aa, Homo sapiens
PDTVYEFAVRISQGERDGKWSTSVFQRTPESAPTTAPENLNVWPVNGKPTVVAASWDALPETEGKVKEYILSYAPALKPFGAKSLTYPGDTTSALVDGLQPGERYLFKIRATNRRGLGPHSKAFIVAMPTTSKADVQQNTEDNGKPEKPEPSSPSPRAPASSQHPSVPASPQGRNAKDLLLDLKNKILANGGAPRKPQLRAKKAEELDLQSTEITGEEELGSREDSPMSPSDTQDQKRTLRPPSRHGHSVVAPGRTAVRARMPALPRREGVDKPGFSLATQPRPGAPPSASASPAHHASTQGTSHRPSLPASLNDNDLVDSDEDERAVGSLHPKGAFAQPRPALSPSRQSPSSVLRDRSSVHPGAKPASPARRTPHSGAAEEDSSASAPPSRLSPPHGGSSRLLPTQPHLSSPLSKGGKDGEDAPATNSNAPSRSTMSSSVSSHLSSRTQVSEGAEASDGESHGDGDREDGGRQAEATAQTLRARPASGHFHLLRHKPFAANGRSPSRFSIGRGPRLQPSSSPQSTVPSRAHPRVPSHSDSHPKLSSGIHGDEEDEKPLPATVVNDHVPSSSRQPISRGWEDLRRSPQRGASLHRKEPIPENPKSTGADTHPQGKYSSLASKAQDVQQSTDADTEGHSPKAQPGSTDRHASPARPPAARSQQHPSVPRRMTPGRAPQQQPPPPVATSQHHPGPQSRDAGRSPSQPRLSLTQAGRPRPTSQGRSHSSSDPYTASSRGMLPTALQNQDEDAQGSYDDDSTEVEAQDVRAPAHAARAKEAAGPFPSTSRGGKDADGSLAKEEREPAIALAPRGGSLAPVKRPLPPPPGSSPRASHVPSRLPPRSAATVSPVAGTHPWPQYTTRAPPGHFSTTPMLSLRQRMMHARFRNPLSRQPARPSYRQGYNGRPNVEGKVLPGSNGKPNGQRIINGPQGTKWVVDLDRGLVLNAEGRYLQDSHGNPLRIKLGGDGRTIVDLEGTPVVSPDGLPLFGQGRHGTPLANAQDKPILSLGGKPLVGLEVIKKTTHPPTTTMQPTTTTTPLPTTTTPRPTTATTRRTTTRRPTTTVRTTTRTTTTTTPKPTTPIPTCPPGTLERHDDDGNLIMSSNGIPECYAEEDEFSGLETDTAVPTEEAYVIYDEDYEFETSRPPTTTEPSTTATTPRVIPEEGAISSFPEEEFDLAGRKRFVDERHKHMDPSRRAGGVFLSLASRLMEPPSSRKRPNAPYVTYLNKDPSAPCSLTDALDHFQVDSLDEIIPNDLKKSDLPPQHAPRNITVVAVEGCHSFVIVDWDKATPGDVVTGYLVYSASYEDFIRNKWSTQASSVTHLPIENLKPNTRYYFKVQAQNPHGYGPISPSVSFVTESDNPLLVVRPPGGEPIWIPFAFKHDPSYTDCHGRQYVKRTWYRKFVGVVLCNSLRYKIYLSDNLKDTFYSIGDSWGRGEDHCQFVDSHLDGRTGPQSYVEALPTIQGYYRQYRQEPVRFGNIGFGTPYYYVGWYECGVSIPGKW

SEQ ID NO: 774306 - protein, 1467 aa, Homo sapiens
PDTVYEFAVRISQGERDGKWSTSVFQRTPESAPTTAPENLNVWPVNGKPTVVAASWDALPETEGKVKEYILSYAPALKPFGAKSLTYPGDTTSALVDGLQPGERYLFKIRATNRRGLGPHSKAFIVAMPTTSKADVQQNTEDNGKPEKPEPSSPSPRAPASSQHPSVPASPQGRNAKDLLLDLKNKILANGGAPRKPQLRAKKAEELDLQSTEITGEEELGSREDSPMSPSDTQDQKRTLRPPSRHGHSVVAPGRTAVRARMPALPRREGVDKPGFSLATQPRPGAPPSASASPAHHASTQGTSHRPSLPASLNDNDLVDSDEDERAVGSLHPKGAFAQPRPALSPSRQSPSSVLRDRSSVHPGAKPASPARRTPHSGAAEEDSSASAPPSRLSPPHGGSSRLLPTQPHLSSPLSKGGKDGEDAPATNSNAPSRSTMSSSVSSHLSSRTQVSEGAEASDGESHGDGDREDGGRQAEATAQTLRARPASGHFHLLRHKPFAANGRSPSRFSIGRGPRLQPSSSPQSTVPSRAHPRVPSHSDSHPKLSSGIHGDEEDEKPLPATVVNDHVPSSSRQPISRGWEDLRRSPQRGASLHRKEPIPENPKSTGADTHPQGKYSSLASKAQDVQQSTDADTEGHSPKAQPGSTDRHASPARPPAARSQQHPSVPRRMTPGRAPQQQPPPPVATSQHHPGPQSRDAGRSPSQPRLSLTQAGRPRPTSQGRSHSSSDPYTASSRGMLPTALQNQDEDAQGSYDDDSTEVEAQDVRAPAHAARAKEAAGPFPSTSRGGKDADGSLAKEEREPAIALAPRGGSLAPVKRPLPPPPGSSPRASHVPSRLPPRSAATVSPVAGTHPWPQYTTRAPPGHFSTTPMLSLRQRMMHARFRNPLSRQPARPSYRQGYNGRPNVEGKVLPGSNGKPNGQRIINGPQGTKWVVDLDRGLVLNAEGRYLQDSHGNPLRIKLGGDGRTIVDLEGTPVVSPDGLPLFGQGRHGTPLANAQDKPILSLGGKPLVGLEVIKKTTHPPTTTMQPTTTTTPLPTTTTPRPTTATTRRTTTRRPTTTVRTTTRTTTTTTPKPTTPIPTCPPGTLERHDDDGNLIMSSNGIPECYAEEDEFSGLETDTAVPTEEAYVIYDEDYEFETSRPPTTTEPSTTATTPRVIPEEGAISSFPEEEFDLAGRKRFVAPYVTYLNKDPSAPCSLTDALDHFQVDSLDEIIPNDLKKSDLPPQHAPRNITVVAVEGCHSFVIVDWDKATPGDVVTGYLVYSASYEDFIRNKWSTQASSVTHLPIENLKPNTRYYFKVQAQNPHGYGPISPSVSFVTESDNPLLVVRPPGGEPIWIPFAFKHDPSYTDCHGRQYVKRTWYRKFVGVVLCNSLRYKIYLSDNLKDTFYSIGDSWGRGEDHCQFVDSHLDGRTGPQSYVEALPTIQGYYRQYRQEPVRFGNIGFGTPYYYVGWYECGGVGDNMYDPL

SEQ ID NO: 774307 - protein, 1083 aa, Homo sapiens
MPAMRGLLAPQNTFLDTIATRFDGTHSNFVLGNAQVAGLFPVVYCSDGFCDLTGFSRAEVMQRGCACSFLYGPDTSELVRQQIRKALDEHKEFKAELILYRKSGLPFWCLLDVIPIKNEKGEVALFLVSHKDISETKNRGGPDRWKETGGGRRRYGRARSKGFNANRRRSRAVLYHLSGHLQKQPKGKHKLNKGVFGEKPNLPEYKVAAIRKSPFILLHCGALRATWDGFILLATLYVAVTVPYSVCVSTAREPSAARGPPSVCDLAVEVLFILDIVLNFRTTFVSKSGQVVFAPKSICLHYVTTWFLLDVIAALPFDLLHAFKVNVYFGAHLLKTVRLLRLLRLLPRLDRYSQYSAVVLTLLMAVFALLAHWVACVWFYIGQREIESSESELPEIGWLQELARRLETPYYLVGRRPAGGNSSGQSDNCSSSSEANGTGLELLGGPSLRSAYITSLYFALSSLTSVGFGNVSANTDTEKIFSICTMLIGALMHAVVFGNVTAIIQRMYARRFLYHSRTRDLRDYIRIHRIPKPLKQRMLEYFQATWAVNNGIDTTELLQSLPDELRADIAMHLHKEVLQLPLFEAASRGCLRALSLALRPAFCTPGEYLIHQGDALQALYFVCSGSMEVLKGGTVLAILGKGDLIGCELPRREQVVKANADVKGLTYCVLQCLQLAGLHDSLALYPEFAPRFSRGLRGELSYNLGAGGGSAEVDTSSLSGDNTLMSTLEEKETDGEQGPTVSPAPADEPSSPLLSPGCTSSSSAAKLLSPRRTAPRPRLGGRGRPGRAGALKAEAGPSAPPRALEGLRLPPMPWNVPPDLSPRVVDGIEDGCGSDQPKFSFRVGQSGPECSSSPSPGPESGLLTVPHGPSEARNTDTLDKLRQAVTELSEQVLQMREGLQSLRQAVQLVLAPHREGPCPRASGEGPCPASTSGLLQPLCVDTGASSYCLQPPAGSVLSGTWPHPRPGPPPLMAPWPWGPPASQSSPWPRATAFWTSTSDSEPPASGDLCSEPSTPASPPPSEEGARTGPAEPVSQAEATSTGEPPPGSGGLALPWDPHSLEMVLIGCHGSGTVQWTQEEGTGV

SEQ ID NO: 774308 - protein, 307 aa, Homo sapiens
MVSFLLGSWSVPRSCSLCVWTLGHPVPYDPTVAACPLICCPGTWVHRVVDGIEDGCGSDQPKFSFRVGQSGPECSSSPSPGPESGLLTVPHGPSEARNTDTLDKLRQAVTELSEQVLQMREGLQSLRQAVQLVLAPHREGPCPRASGEGPCPASTSGLLQPLCVDTGASSYCLQPPAGSVLSGTWPHPRPGPPPLMAPWPWGPPASQSSPWPRATAFWTSTSDSEPPASGDLCSEPSTPASPPPSEEGARTGPAEPVSQAEATSTGEPPPGSGGLALPWDPHSLEMVLIGCHGSGTVQWTQEEGTGV

SEQ ID NO: 774309 - protein, 412 aa, Homo sapiens
MPAMRGLLAPQNTFLDTIATRFDGTHSNFVLGNAQVAGLFPVVYCSDGFCDLTGFSRAEVMQRGCACSFLYGPDTSELVRQQIRKALDEHKEFKAELILYRKSGLPFWCLLDVIPIKNEKGEVALFLVSHKDISETKNRGGPDRWKETGGGRRRYGRARSKGFNANRRRSRAVLYHLSGHLQKQPKGKHKLNKGVFGEKPNLPEYKVAAIRKSPFILLHCGALRATWDGFILLATLYVAVTVPYSVCVSTAREPSAARGPPSVCDLAVEVLFILDIVLNFRTTFVSKSGQVVFAPKSICLHYVTTWFLLDVIAALPFDLLHAFKVNVYFGAHLLKTVRLLRLLRLLPRLDRYSQYSAVVLTLLMAVFALLAHWVACVWFYIGQREIESSESELPEIGVADLTLRRPSAPKNL

SEQ ID NO: 774310 - protein, 295 aa, Homo sapiens
MPAMRGLLAPQNTFLDTIATRFDGTHSNFVLGNAQVAGLFPVVYCSDGFCDLTGFSRAEVMQRGCACSFLYGPDTSELVRQQIRKALDEHKEFKAELILYRKSGLPFWCLLDVIPIKNEKGEVALFLVSHKDISETKNRGGPDRWKETGGGRRRYGRARSKGFNANRRRSRAVLYHLSGHLQKQPKGKHKLNKGVFGEKPNLPEYKVAAIRKSPFILLHCGALRATWDGFILLATLYVAVTVPYSVCVSTAREPSAARGPPSVCDLAVEVLFILVTVRTKTMYGKGRGQCQLLRK

SEQ ID NO: 774311 - protein, 191 aa, Homo sapiens
LSFHDGLRGGGFPTLAAEDRGQPGSVKDPKMAGRKLALKTIDWVAFAEIIPQNQKAIASSLKSWNETLTSRLAALPENPPAIDWAYYKANVAKAGLVDDFEKKFNALKVPVPEDKYTAQVDAEEKEDVKSCAEWVSLSKARIVEYEKEMEKMKNLIPFDQMTIEDLNEAFPETKLDKKKYPYWPHQPIENL

SEQ ID NO: 774312 - protein, 191 aa, Homo sapiens; identical to SEQ ID NO: 774311

SEQ ID NO: 774313 - protein, 161 aa, Homo sapiens
MAGRKLALKTIDWVAFAEIIPQNQKAIASSLKSWNETLTSRLAALPENPPAIDWAYYKANVAKAGLVDDFEKKFNALKVPVPEDKYTAQVDAEEKEDVKSCAEWVSLSKARIVEYEKEMEKMKNLIPFDQMTIEDLNEAFPETKLDKKKYPYWPHQPIENL

SEQ ID NO: 774314 - protein, 137 aa, Homo sapiens
MAGRKLALKTIDWVAFAEIIPQNQKAIASSLKSWNETLTSRLAALPENPPAIDWAYYKANVAKAGLVDDFEKKVKSCAEWVSLSKARIVEYEKEMEKMKNLIPFDQMTIEDLNEAFPETKLDKKKYPYWPHQPIENL

SEQ ID NO: 774315 - protein, 186 aa, Homo sapiens
ELRYPLHVPGAAEDRGQPGSVKDPKMAGRKLALKTIDWVAFAEIIPQNQKAIASSLKSWNETLTSRLAALPENPPAIDWAYYKANVAKAGLVDDFEKKFNALKVPVPEDKYTAQVDAEEKEDVKSCAEWVSLSKARIVEYEKEMEKMKNLIPFDQMTIEDLNEAFPETKLDKKKYPYWPHQPIENL

SEQ ID NO: 774316 - protein, 176 aa, Homo sapiens
LQEFGTMSVSVKDPKMAGRKLALKTIDWVAFAEIIPQNQKAIASSLKSWNETLTSRLAALPENPPAIDWAYYKANVAKAGLVDDFEKKFNALKVPVPEDKYTAQVDAEEKEDVKSCAEWVSLSKARIVEYEKEMEKMKNLIPFDQMTIEDLNEAFPETKLDKKKYPYWPHQPIENL

SEQ ID NO: 774317 - protein, 191 aa, Homo sapiens; identical to SEQ ID NO: 774311

SEQ ID NO: 774318 - protein, 191 aa, Homo sapiens; identical to SEQ ID NO: 774311

SEQ ID NO: 774319 - protein, 193 aa, Homo sapiens
LSFHDGLRGGGFPTLAAEDRGQPGSVKDPKMAGRKLALKTIDWVAFAEIIPQNQKAIASSLKSWNETLTSRLAALPENPPAIDWAYYKANVAKAGLVDDFEKKFNALKVPVPEDKYTAQVDAEEKEDVKSCAEWVSLSKARIVEYEKEMEKMKNLIPFDQMTIEDLNEAFPETKLDKKKYPSIEGTELESDHV

SEQ ID NO: 774320 - protein, 95 aa, Homo sapiens
ISDILNKAVRNKDGIRKITQVVFKYLIICLKALKANYGTQWLHQREVWLGAQVACPDHSVAEPCENRHSVGLRMRNLQKQPGAAILSWFSIWASL

SEQ ID NO: 774321 - protein, 161 aa, Homo sapiens; identical to SEQ ID NO: 774313

SEQ ID NO: 774322 - protein, 95 aa, Homo sapiens; identical to SEQ ID NO: 774320

SEQ ID NO: 774323 - protein, 137 aa, Homo sapiens; identical to SEQ ID NO: 774314

SEQ ID NO: 774324 - protein, 187 aa, Homo sapiens
  misc_feature (6)..(6): Xaa can be any naturally occurring amino acid
  misc_feature (10)..(10): Xaa can be any naturally occurring amino acid
VDTAAXTRQXGAAEDRGQPGSVKDPKMAGRKLALKTIDWVAFAEIIPQNQKAIASSLKSWNETLTSRLAALPENPPAIDWAYYKANVAKAGLVDDFEKKFNALKVPVPEDKYTAQVDAEEKEDVKSCAEWVSLSKARIVEYEKEMEKMKNLIPFDQMTIEDLNEAFPETKLDKKKYPYWPHQPIENL

SEQ ID NO: 774325 - protein, 145 aa, Homo sapiens
DPLNIVSQKAIASSLKSWNETLTSRLAALPENPPAIDWAYYKANVAKAGLVDDFEKKFNALKVPVPEDKYTAQVDAEEKEDVKSCAEWVSLSKARIVEYEKEMEKMKNLIPFDQMTIEDLNEAFPETKLDKKKYPYWPHQPIENL

SEQ ID NO: 774326 - protein, 191 aa, Homo sapiens; identical to SEQ ID NO: 774311

SEQ ID NO: 774327 - protein, 191 aa, Homo sapiens; identical to SEQ ID NO: 774311

SEQ ID NO: 774328 - protein, 100 aa, Homo sapiens
TLPLFYGSIVRFFLYGDHDGEVYATGGEVQIAMEPQALYDEVRTVPIAKLDRTVAEKAVKKYVEDEMARLPDRLSVTWPEGDELLPNEVRPAGTPIGMFV

SEQ ID NO: 774329 - protein, 180 aa, Homo sapiens
PRLECNGVISAHCNLRLLGSSNSPASVSRVAGTTGARHHAWLIFVFLVETGFHHVGQAGLELLTSSDPPISASQSAGITGMSHHAYPDVVILLSPFNRQESTKWGSPLSKNSGSQAGLCHTDVHQAWAHLTPPALHAPVAPAKGLWPLLHGLEPVAEPQSSTEDNSKDGCAFRVFLCLRS

SEQ ID NO: 774330 - protein, 172 aa, Homo sapiens
MLLLPPRPPHPRSSSPEAMDPPPPKAPPFPKAEGPSSTPSSAAGPRPPRLGRHLLIDANGVPYTYTVQLEEEPRGPPQREAPPGEPGPRKGYSCPECARVFASPLRLQSHRVSHSDLKPFTCGACGKAFKRSSHLSRHRATHRARAGPPHTCPLCPRRFQDAAELAQHVRLH

SEQ ID NO: 774331 - protein, 259 aa, Homo sapiens
RGVGAPAPGGGTSALGSRASGRRLFPGTPPTPRTPAPPVPASPAPPARSCPEVSVPPPALARGSPGPPGTSARSSGPERPPHGLPLQMLLLPPRPPHPRSSSPEAMDPPPPKAPPFPKAEGPSSTPSSAAGPRPPRLGRHLLIDANGVPYTYTVQLEEEPRGPPQREAPPGEPGPRKGYSCPECARVFASPLRLQSHRVSHSDLKPFTCGACGKAFKRSSHLSRHRATHRARAGPPHTCPLCPRRFQDAAELAQHVRLH

SEQ ID NO: 774332 - protein, 259 aa, Homo sapiens; identical to SEQ ID NO: 774331

SEQ ID NO: 774333 - protein, 172 aa, Homo sapiens; identical to SEQ ID NO: 774330

SEQ ID NO: 774334 - protein, 154 aa, Homo sapiens
MDPPPPKAPPFPKAEGPSSTPSSAAGPRPPRLGRHLLIDANGVPYTYTVQLEEEPRGPPQREAPPGEPGPRKGYSCPECARVFASPLRLQSHRVSHSDLKPFTCGACGKAFKRSSHLSRHRATHRARAGPPHTCPLCPRRFQDAAELAQHVRLH

SEQ ID NO: 774335 - protein, 172 aa, Homo sapiens; identical to SEQ ID NO: 774330

SEQ ID NO: 774336 - protein, 43 aa, Homo sapiens
MPRAMEEQQTLKHNEGKTDSQVGRTFSVRHVHPFEVVDTPSNQ

SEQ ID NO: 774337 - protein, 68 aa, Homo sapiens
SLQALVTPPPPVRKKTFFKFINYKKSENEKIKMLNKLALRSSRSALARGSGESGASESPRAGDWATSA

SEQ ID NO: 774338 - protein, 119 aa, Homo sapiens
MLLLPHGSPTVYLESNPLWRLSCQLNPCTFRGWFWRAVLTPKHPSSLPGVKGLRFAPAPYAPDVIMHLGWAATSQLSLVPRRDRRLRDNELSEEPRNPGSEQLRRMRAAKWWRIWPGKR

SEQ ID NO: 774339 - protein, 153 aa, Homo sapiens
MTIHILILLLLLAFSAQGDLDTAARRGQHQVPQHRGHVCYLGVCRTHRLAEIIYWIRCLHQGALGEGQPRAPGPLQLWAPPVARGGSPARFPGFRPAARGLAQCPARWVTSGTARPLLGFSLPICMLELLLHISSPLTPAPETVFPSPSPGCD

SEQ ID NO: 774340 - protein, 78 aa, Homo sapiens
AYPFPSRFKVFADYEDYIKCQEKVSALYKNPREWTRMVIRNIATSGKFSSDRTIAQYAREIWGVEPSRQRLPAPDEAI

SEQ ID NO: 774341 - protein, 111 aa, Homo sapiens
ATNQQQQQQQKTKRTQRLRSSLALRRWLCKSQLASANFPASLLPVSLHPFSTPLGGRRVLDNNSLGITLPGCNRNCYNSEILCKHWPFCLECLLLSFLTACSYLSFKARKK

SEQ ID NO: 774342 - protein, 84 aa, Homo sapiens
RMFRVCAQGVGPGARVWVCVHVGVGLRACGCVYVCGGVCTRVGVCVCVDVCVRVDVCMWLCVCTCARVYVHVGICLCGYGCAHV

SEQ ID NO: 774343 - protein, 97 aa, Homo sapiens
HRLTQLIFVFLVETGFRHVGQAGLELLTSGDLPTSASENAGTTGVSHCTRPTPPLNTITVTISFSIGILGTHCDHSSYLLATVSNAAVNMGVHPTIP

SEQ ID NO: 774344 - protein, 84 aa, Homo sapiens
ISLSVSRAAVQVGGMDCKSQKSQATSTLQVATPHPAKHRFFLPTFPSAPTVHTIPYACPFGKLASRTASFLERQQEADGHSSTL

SEQ ID NO: 774345 - protein, 101 aa, Homo sapiens
MRDREDTCAPLRVALVQGAGREWGSARPGALETHGRSIPPGHSLHPPSELRNLPRALAFPPLGAEGGCTPQGSPLRPADSAEQSPSPVLATPIPSRPPALP

SEQ ID NO: 774346 - protein, 110 aa, Homo sapiens
QRPRRHTGASEARGKWAKGGGTTAAAAAAEGQGIERAVGGGSASQPRLLLLFLLLLQTREPQSSLSRREHPEGREAAAQPRAGQCPQPPWIATTRWWRRRWKVITPRKSQ

SEQ ID NO: 774347 - protein, 39 aa, Homo sapiens
MDSDDEMVEEAVEGTSISPGPGEEAQRAWSAEGVAGCEQ

SEQ ID NO: 774348 - protein, 117 aa, Homo sapiens
GRPVPPPPQPACRAPTARPESRGPSDSDGAGRGRGARKPLCTVSAGHKFVPRLPGAWALRENRAEGARRRGRGRRRRAQEWGKVRKEATAAPPGTRKVASASRPPALRRGCGGVGAG

SEQ ID NO: 774349 - protein, 104 aa, Homo sapiens
MPGNRRDAVRKATGCRSWKGKVGGSAASCLRAGHTRRGCPGQGGIWLILPVPCALGAAPPSAQRSPPACFLEAGLPSVPRLACPPPAPRGQGKGSRSGLPGEFP

SEQ ID NO: 774350 - protein, 278 aa, Homo sapiens
LRLGTRLGLNRPRKRTAVSTGEEPALSRSEKDDEDTWERAAAGLGRAGAGWRLCSSACCCLWELGASAEGLPADRDPLPRLPCPPCRGGRKMPVKKKRKSPGVAAAVAEDGGLKKCKISSYCRSQPPARLISGEEHFSSKKCLAWFYEYAGPDEVVGPEGMEKFCEDIGVEPENIIMLVLAWKLEAESMGFFTKEEWLKGMTSLQRSLALSPGPLHSSLGDRARLRLKQKKMFLKSIAGPQGPWQKPNCNPFLKDRFPRGVVTQAPERGSHPVASTLA

SEQ ID NO: 774351 - protein, 122 aa, Homo sapiens
LRLGRGRVLIGRGTIRLRVRLSLLLAVTGGAAALSALSPPGENEPQCPPARSQPCPGQRKTTRIPGSGRRPGWAAPVRAGDSAPPLAAVSGNWVPALRGFQRTGTPFPGSPAHPAGEGGRCR

SEQ ID NO: 774352 - protein, 237 aa, Homo sapiens
MPVKKKRKSPGVAAAVAEDGGLKKCKISSYCRSQPPARLISGEEHFSSKKCLAWFYEYAGPDEVVGPEGMEKFCEDIGVEPENIIMLVLAWKLEAESMGFFTKEEWLKGMTSLQCDCTEKLQNKFDFLRSQLNDISSFKNIYRYAFDFARDKDQRSLDIDTAKSMLALLLGRTWPLFSVFYQYLEQSKYRVMNKDQWYNVLEFSRTVHADLSNYDEDGAWPVLLDEFVEWQKVRQTS

SEQ ID NO: 774353 - protein, 237 aa, Homo sapiens; identical to SEQ ID NO: 774352

SEQ ID NO: 774354 - protein, 168 aa, Homo sapiens
MEKFCEDIGVEPENIIMLVLAWKLEAESMGFFTKEEWLKGMTSLQCDCTEKLQNKFDFLRSQLNDISSFKNIYRYAFDFARDKDQRSLDIDTAKSMLALLLGRTWPLFSVFYQYLEQSKYRVMNKDQWYNVLEFSRTVHADLSNYDEDGAWPVLLDEFVEWQKVRQTS

SEQ ID NO: 774355 - protein, 124 aa, Homo sapiens
MCDCTEKLQNKFDFLRSQLNDISSFKNIYRYAFDFARDKDQRSLDIDTAKSMLALLLGRTWPLFSVFYQYLEQSKYRVMNKDQWYNVLEFSRTVHADLSNYDEDGAWPVLLDEFVEWQKVRQTS

SEQ ID NO: 774356 - protein, 170 aa, Homo sapiens
MPVKKKRKSPGVAAAVAEDGGLKKCKISSYCRSQPPARLISGEEHFSSKKCLAWFYEYAGPDEVVGPEGMEKFCEDIGVEPENIIMLVLAWKLEAESMGFFTKEEWLKGMTSLQRSLALSPGPLHSSLGDRARLRLKQKKMFLKSIAGPQGPWQKPNCNPFLKDRFPRGG

SEQ ID NO: 774357 - protein, 124 aa, Homo sapiens
MPVKKKRKSPGVAAAVAEDGGLKKCKISSYCRSQPPARLISGEEHFSSKKCLAWFYEYAGPDEVVGPEGMEKFCEDIGVEPENIIMLVLAWKLEAESMGFFTKEEWLKGMTSLQFRVPAHKVTI

SEQ ID NO: 774358 - protein, 237 aa, Homo sapiens; identical to SEQ ID NO: 774352

SEQ ID NO: 774359 - protein, 237 aa, Homo sapiens; identical to SEQ ID NO: 774352

SEQ ID NO: 774360 - protein, 211 aa, Homo sapiens
MHIYCRSQPPARLISGEEHFSSKKCLAWFYEYAGPDEVVGPEGMEKFCEDIGVEPENIIMLVLAWKLEAESMGFFTKEEWLKGMTSLQCDCTEKLQNKFDFLRSQLNDISSFKNIYRYAFDFARDKDQRSLDIDTAKSMLALLLGRTWPLFSVFYQYLEQSKYRVMNKDQWYNVLEFSRTVHADLSNYDEDGAWPVLLDEFVEWQKVRQTS

SEQ ID NO: 774361 - protein, 157 aa, Homo sapiens
MPVKKKRKSPGVAAAVAEDGGLKKCKISSYCRSQPPARLISGEEHFSSKKCLAWFYEYAGPDEVVGPEGMEKFCEDIGVEPENIIMLVLAWKLEAESMGFFTKEEWLKGMTSLQRSLALSPGYSTVARSWLTATSASWVQAILLPQPPELGLRACAS

SEQ ID NO: 774362 - protein, 482 aa, Homo sapiens
MNEVSVIKEGWLHKRGEYIKTWRPRYFLLKSDGSFIGYKERPEAPDQTLPPLNNFSVAECQLMKTERPRPNTFVIRCLQWTTVIERTFHVDSPDEREEWMRAIQMVANSLKQRAPGEDPMDYKCGSPSDSSTTEEMEVAVSKARAKVTMNDFDYLKLLGKGTFGKVILVREKATGRYYAMKILRKEVIIAKDEVAHTVTESRVLQNTRHPFLTALKYAFQTHDRLCFVMEYANGGELFFHLSRERVFTEERARFYGAEIVSALEYLHSRDVVYRDIKLENLMLDKDGHIKITDFGLCKEGISDGATMKTFCGTPEYLAPEVLEDNDYGRAVDWWGLGVVMYEMMCGRLPFYNQDHERLFELILMEEIRFPRTLSPEAKSLLAGLLKKDPKQRLGGGPSDAKEVMEHRFFLSINWQDVVQKKLLPPFKPQVTSEVDTRYFDDEFTAQSITITPPDRYDSLGLLELDQRTHFPQFSFSEKRKTC

SEQ ID NO: 774363 - protein, 236 aa, Homo sapiens
TSLGATVAPDLLSANNPRLGKAKAPWSLWTLARPQAPGEYIKTWRPRYFLLKSDGSFIGYKERPEAPDQTLPPLNNFSVAECQLMKTERPRPNTFVIRCLQWTTVIERTFHVDSPDEREEWMRAIQMVANSLKQRAPGEDPMDYKCGSPSDSSTTEEMEVAVSKARAKVTMNDFDYLKLLGKGTFGKVILVREKATGRYYAMKILRKEVIIAKDEVAHTVTESRVLQNTRHPFLTR

SEQ ID NO: 774364 - protein, 481 aa, Homo sapiens
MNEVSVIKEGWLHKRGEYIKTWRPRYFLLKSDGSFIGYKERPEAPDQTLPPLNNFSVAECQLMKTERPRPNTFVIRCLQWTTVIERTFHVDSPDEREEWMRAIQMVANSLKQRAPGEDPMDYKCGSPSDSSTTEEMEVAVSKARAKVTMNDFDYLKLLGKGTFGKVILVREKATGRYYAMKILRKEVIIAKDEVAHTVTESRVLQNTRHPFLTALKYAFQTHDRLCFVMEYANGGELFFHLSRERVFTEERARFYGAEIVSALEYLHSRDVVYRDIKLENLMLDKDGHIKITDFGLCKEGISDGATMKTFCGTPEYLAPEVLEDNDYGRAVDWWGLGVVMYEMMCGRLPFYNQDHERLFELILMEEIRFPRTLSPEAKSLLAGLLKKDPKQRLGGGPSDAKEVMEHRFFLSINWQDVVQKKLLPPFKPQVTSEVDTRYFDDEFTAQSITITPPDRYDSLGLLELDQRTHFPQFSYSASIRE

SEQ ID NO: 774365 - protein, 481 aa, Homo sapiens; identical to SEQ ID NO: 774364

SEQ ID NO: 774366 - protein, 481 aa, Homo sapiens; identical to SEQ ID NO: 774364

SEQ ID NO: 774367 - protein, 481 aa, Homo sapiens; identical to SEQ ID NO: 774364

SEQ ID NO: 774368 - protein, 532 aa, Homo sapiens
MNEVSVIKEGWLHKRGEYIKTWRPRYFLLKSDGSFIGYKERPEAPDQTLPPLNNFSVAECQLMKTERPRPNTFVIRCLQWTTVIERTFHVDSPDEREEWMRAIQMVANSLKQRAPGEDPMDYKCGSPSDSSTTEEMEVAVSKARAKVTMNDFDYLKLLGKGTFGKVILVREKATGRYYAMKILRKEVIIAKDEVAHTVTESRVLQNTRHPFLTALKYAFQTHDRLCFVMEYANGGELFFHLSRERVFTEERARFYGAEIVSALEYLHSRDVVYRDIKLENLMLDKDGHIKITDFGLCKEGISDGATMKTFCGTPEYLAPEGVWGWWGEERVRPRVGGSPRPVCFQPRCPEGRTVMPASGPRAQPSFLLHPQVLEDNDYGRAVDWWGLGVVMYEMMCGRLPFYNQDHERLFELILMEEIRFPRTLSPEAKSLLAGLLKKDPKQRLGGGPSDAKEVMEHRFFLSINWQDVVQKKLLPPFKPQVTSEVDTRYFDDEFTAQSITITPPDRYDSLGLLELDQRTHFPQFSYSASIRE

SEQ ID NO: 774369 - protein, 485 aa, Homo sapiens
MNEVSVIKEGWLHKRGEYIKTWRPRYFLLKSDGSFIGYKERPEAPDQTLPPLNNFSVAECQLMKTERPRPNTFVIRCLQWTTVIERTFHVDSPDEREEWMRAIQMVANSLKQRAPGEDPMDYKCGSPSDSSTTEEMEVAVSKARAKVTMNDFDYLKLLGKGTFGKVILVREKATGRYYAMKILRKEVIIAKDEVAHTVTESRVLQNTRHPFLTALKYAFQTHDRLCFVMEYANGGELFFHLSRERVFTEERARFYGAEIVSALEYLHSRDVVYRDIKLENLMLDKDGHIKITDFGLCKEGISDGATMKTFCGTPEYLAPEVLEDNDYGRAVDWWGLGVVMYEMMCGRLPFYNQDHERLFELILMEEIRFPRTLSPEAKSLLAGLLKKDPKQRLGGGPSDAKEVMEHRFFLSINWQDVVQKKLLPPFKPQVTSEVDTRYFDDEFTAQSITITPPDRFREGFLEEEANVSAGRRNDVWDASNGRSMA

SEQ ID NO: 774370 - protein, 437 aa, Homo sapiens
MNEVSVIKEGWLHKRGEYIKTWRPRYFLLKSDGSFIGYKERPEAPDQTLPPLNNFSVAECQLMKTERPRPNTFVIRCLQWTTVIERTFHVDSPDEREEWMRAIQMVANSLKQRAPGEDPMDYKCGSPSDSSTTEEMEVAVSKARAKVTMNDFDYLKLLGKGTFGKVILVREKATGRYYAMKILRKEVIIAKDEVAHTVTESRVLQNTRHPFLTALKYAFQTHDRLCFVMEYANGGELFFHLSRERVFTEERARFYGAEIVSALEYLHSRDVVYRDIKLENLMLDKDGHIKITDFGLCKEGISDGATMKTFCGTPEYLAPEVLEDNDYGRAVDWWGLGVVMYEMMCGRLPFYNQDHERLFELILMEEIRFPRTLSPEAKSLLAGLLKKDPKQRLGGGPSDAKEVMEHRFFLSINWQDVVQKKLLPPFKPQVTSEVDTR

SEQ ID NO: 774371 - protein, 286 aa, Homo sapiens
MNEVSVIKEGWLHKRGEYIKTWRPRYFLLKSDGSFIGYKERPEAPDQTLPPLNNFSVAECQLMKTERPRPNTFVIRCLQWTTVIERTFHVDSPDEREEWMRAIQMVANSLKQRAPGEDPMDYKCGSPSDSSTTEEMEVAVSKARAKVTMNDFDYLKLLGKGTFGKVILVREKATGRYYAMKILRKEVIIAKDEVAHTVTESRVLQNTRHPFLTALKYAFQTHDRLCFVMEYANGGELFFHLSRERVFTEERARFYGAEIVSALEYLHSRDVVYRDIKRLVAGCAPG

SEQ ID NO: 774372 - protein, 548 aa, Homo sapiens
MNEVSVIKEGWLHKRGEYIKTWRPRYFLLKSDGSFIGYKERPEAPDQTLPPLNNFSVAECQLMKTERPRPNTFVIRCLQWTTVIERTFHVDSPDEREEWMRAIQMVANSLKQRAPGEDPMDYKCGSPSDSSTTEEMEVAVSKARAKVTMNDFDYLKLLGKGTFGKVILVREKATGRYYAMKILRKEVIIAKDEVAHTVTESRVLQNTRHPFLTALKYAFQTHDRLCFVMEYANGGELFFHLSRERVFTEERARFYGAEIVSALEYLHSRDVVYRDIKLENLMLDKDGHIKITDFGLCKEGISDGATMKTFCGTPEYLAPEVLEDNDYGRAVDWWGLGVVMYEMMCGRLPFYNQDHERLFELILMEEIRFPRTLSPEAKSLLAGLLKKDPKQRLGGGPSDAKEVMEHRFFLSINWQDVVQKKLLPPFKPQVTSEVDTRYFDDEFTAQSITITPPDRYDSLGLLELDQRTHFPQFSSTFCSLKVEHECTSMSVLWDSCACLGLRVSAGRRHTWVCVHVCLCEGSVSSSVHGVWAWAPSLARAFHPVGEGC

SEQ ID NO: 774373 - protein, 271 aa, Homo sapiens
QLALTSRWTSGPGLCPLGAMGWAHPLLCGGGGPPALAVTILHRFYGAEIVSALEYLHSRDVVYRDIKLENLMLDKDGHIKITDFGLCKEGISDGATMKTFCGTPEYLAPEVLEDNDYGRAVDWWGLGVVMYEMMCGRLPFYNQDHERLFELILMEEIRFPRTLSPEAKSLLAGLLKKDPKQRLGGGPSDAKEVMEHRFFLSINWQDVVQKKLLPPFKPQVTSEVDTRYFDDEFTAQSITITPPDRYDSLGLLELDQRTHFPQFSYSASIRE

SEQ ID NO: 774374 - protein, 484 aa, Homo sapiens
MNEVSVIKEGWLHKRGEYIKTWRPRYFLLKSDGSFIGYKERPEAPDQTLPPLNNFSVAECQLMKTERPRPNTFVIRCLQWTTVIERTFHVDSPDEREEWMRAIQMVANSLKQRAPGEDPMDYKCGSPSDSSTTEEMEVAVSKARAKVTMNDFDYLKLLGKGTFGKVILVREKATGRYYAMKILRKEVIIAKDEVAHTVTESRVLQNTRHPFLTALKYAFQTHDRLCFVMEYANGGELFFHLSRERVFTEERARFYGAEIVSALEYLHSRDVVYRDIKLENLMLDKDGHIKITDFGLCKEGISDGATMKTFCGTPEYLAPEVLEDNDYGRAVDWWGLGVVMYEMMCGRLPFYNQDHERLFELILMEEIRFPRTLSPEAKSLLAGLLKKDPKQRLGGGPSDAKEVMEHRFFLTTFCSLKVEHECTSMSVLWDSCACLGLRVSAGRRHTWVCVHVCLCEGSVSSSVHGVWAWAPSLARAFHPVGEGC

SEQ ID NO: 774375 - protein, 73 aa, Homo sapiens
RSLGHWVDVVEKKLLPPFKPQVTSEVDTRYFDDEFTAQSITITPPDRYDSLGLLELDQRTHFPQFSYSASIRE

SEQ ID NO: 774376 - protein, 148 aa, Homo sapiens
MNEVSVIKEGWLHKRGEYIKTWRPRYFLLKSDGSFIGYKERPEAPDQTLPPLNNFSVAECQLMKTERPRPNTFVIRCLQWTTVIERTFHVDSPDEREEWMRAIQMVANSLQPHLCAQTRIWKTPPPAQAWAVGRLEIQVLIHTSPSEG

SEQ ID NO: 774377 - protein, 548 aa, Homo sapiens; identical to SEQ ID NO: 774372

SEQ ID NO: 774378 - protein, 505 aa, Homo sapiens
MNEVSVIKEGWLHKRGEYIKTWRPRYFLLKSDGSFIGYKERPEAPDQTLPPLNNFSVAECQLMKTERPRPNTFVIRCLQWTTVIERTFHVDSPDEREEWMRAIQMVANSLKQRAPGEDPMDYKCGSPSDSSTTEEMEVAVSKARAKVTMNDFDYLKLLGKGTFGKVILVREKATGRYYAMKILRKEVIIAKDEVAHTVTESRVLQNTRHPFLTALKYAFQTHDRLCFVMEYANGGELFFHLSRERVFTEERARFYGAEIVSALEYLHSRDVVYRDIKLENLMLDKDGHIKITDFGLCKEGISDGATMKTFCGTPEYLAPEVLEDNDYGRAVDWWGLGVVMYEMMCGRLPFYNQDHERLFELILMEEIRFPRTLSPEAKSLLAGLLKKDPKQRLGGGPSDAKEVMEHRFFLSINWQDVVQKKLLPPFKPQVTSEVDTRYFDDEFTAQSITITPPDRYDSLGLLELDQRTHFPQFSLCMVCGLGPHPWPEHFILWGRGADLVGGAPL

SEQ ID NO: 774379 - protein, 471 aa, Homo sapiens
MNEVSVIKEGWLHKRGEYIKTWRPRYFLLKSDGSFIGYKERPEAPDQTLPPLNNFSVAECQLMKTERPRPNTFVIRCLQWTTVIERTFHVDSPDEREEWMRAIQMVANSLKQRAPGEDPMDYKCGSPSDSSTTEEMEVAVSKARAKVTMNDFDYLKLLGKGTFGKVILVREKATGRYYAMKILRKEVIIAKDEVAHTVTESRVLQNTRHPFLTALKYAFQTHDRLCFVMEYANGGELFFHLSRERVFTEERARFYGAEIVSALEYLHSRDVVYRDIKLENLMLDKDGHIKITDFGLCKEGISDGATMKTFCGTPEYLAPEVLEDNDYGRAVDWWGLGVVMYEMMCGRLPFYNQDHERLFELILMEEIRFPRTLSPEAKSLLAGLLKKDPKQRLGGGPSDAKEVMEHRFFLSINWQDVVQKKLLPPFKPQVTSEVDTRYFDDEFTAAAAAGAVAAAGKHKEREPAQRGDGRG

SEQ ID NO: 774380 - protein, 534 aa, Homo sapiens
MNEVSVIKEGWLHKRGEYIKTWRPRYFLLKSDGSFIGYKERPEAPDQTLPPLNNFSVAECQLMKTERPRPNTFVIRCLQWTTVIERTFHVDSPDEREEWMRAIQMVANSLKQRAPGEDPMDYKCGSPSDSSTTEEMEVAVSKARAKVTMNDFDYLKLLGKGTFGKVILVREKATGRYYAMKILRKEVIIAKDEVAHTVTESRVLQNTRHPFLTALKYAFQTHDRLCFVMEYANGGELFFHLSRERVFTEERARFYGAEIVSALEYLHSRDVVYRDIKLENLMLDKDGHIKITDFGLCKEGISDGATMKTFCGTPEYLAPEVLEDNDYGRAVDWWGLGVVMYEMMCGRLPFYNQDHERLFELILMEEIRFPRTLSPEAKSLLAGLLKKDPKQRLGGGPSDAKEVMEHRFFLSINWQDVVQKKLLPPFKPQVTSEVDTRYFDDEFTAQSITITPPDRSNWSWTSGAPPGTGDDAAKPWTRGAKEEHGGLIRSPRHEKKTTGPVNTGPCHPQGFEHLTPMQYKAMQAAGQIPASCAS

SEQ ID NO: 774381 - protein, 509 aa, Homo sapiens
MNEVSVIKEGWLHKRGEYIKTWRPRYFLLKSDGSFIGYKERPEAPDQTLPPLNNFSVAECQLMKTERPRPNTFVIRCLQWTTVIERTFHVDSPDEREEWMRAIQMVANSLKQRAPGEDPMDYKCGSPSDSSTTEEMEVAVSKARAKVTMNDFDYLKLLGKGTFGKVILVREKATGRYYAMKILRKEVIIAKDEVAHTVTESRVLQNTRHPFLTALKYAFQTHDRLCFVMEYANGGELFFHLSRERVFTEERARFYGAEIVSALEYLHSRDVVYRDIKLENLMLDKDGHIKITDFGLCKEGISDGATMKTFCGTPEYLAPEVLEDNDYGRAVDWWGLGVVMYEMMCGRLPFYNQDHERLFELILMEEIRFPRTLSPEAKSLLAGLLKKDPKQRLGGGPSDAKEVMEHRFFLSINWQDVVQKKLLPPFKPQVTSEVDTRYFDDEFTAQSITITPPDRCTWVLGQHLLSERKWAVLAIPKSLSGPRPSVVYRHGFPTGPREGAAGVHPVREA

SEQ ID NO: 774382 - protein, 400 aa, Homo sapiens
MNEVSVIKEGWLHKRGEYIKTWRPRYFLLKSDGSFIGYKERPEAPDQTLPPLNNFSVAECQLMKTERPRPNTFVIRCLQWTTVIERTFHVDSPDEREEWMRAIQMVANSLKQRAPGEDPMDYKCGSPSDSSTTEEMEVAVSKARAKVTMNDFDYLKLLGKGTFGKVILVREKATGRYYAMKILRKEVIIAKDEVAHTVTESRVLQNTRHPFLTALKYAFQTHDRLCFVMEYANGGELFFHLSRERVFTEERARFYGAEIVSALEYLHSRDVVYRDIKLENLMLDKDGHIKITDFGLCKEGISDGATMKTFCGTPEYLAPEVLEDNDYGRAVDWWGLGVVMYEMMCGRLPFYNQDHERLFELILMEEIRFPRTLSPEAKSLLAGLLKKDPKQSGLWSRQNH

SEQ ID NO: 774383 - protein, 322 aa, Homo sapiens
MNEVSVIKEGWLHKRGEYIKTWRPRYFLLKSDGSFIGYKERPEAPDQTLPPLNNFSVAECQLMKTERPRPNTFVIRCLQWTTVIERTFHVDSPDEREEWMRAIQMVANSLKQRAPGEDPMDYKCGSPSDSSTTEEMEVAVSKARAKVTMNDFDYLKLLGKGTFGKVILVREKATGRYYAMKILRKEVIIAKDEVAHTVTESRVLQNTRHPFLTALKYAFQTHDRLCFVMEYANGGELFFHLSRERVFTEERARFYGAEIVSALEYLHSRDVVYRDIKLENLMLDKDGHIKITDFGLCKEGISDGATMKTFCGTPEYLAPESC

SEQ ID NO: 774384 - protein, 286 aa, Homo sapiens; identical to SEQ ID NO: 774371

SEQ ID NO: 774385 - protein, 286 aa, Homo sapiens; identical to SEQ ID NO: 774371

SEQ ID NO: 774386 - protein, 286 aa, Homo sapiens; identical to SEQ ID NO: 774371

SEQ ID NO: 774387 - protein, 286 aa, Homo sapiens
MNEVSVIKEGWLHKRGEYIKTWRPRYFLLKSDGSFIGYKERPEAPDQTLPPLNNFSVAECQLMKTERPRPNTFVIRCLQWTTVIERTFHVDSPDEREEWMRAIQMVANSLKQRAPGEDPMDYKCGSPSDSSTTEEMEVAVSKARAKVTMNDFDYLKLLGKGTFGKVILVREKATGRYYAMKILRKEVIIAKDEVAHTVTESRVLQNTRHPFLTALKYAFQTHDRLCFVMEYANGGELFFHLSRERVFTEERARFYGAEIVSALEYLHSRDVVYRDIKFPSRNTVCH

SEQ ID NO: 774388 - protein, 214 aa, Homo sapiens
MNEVSVIKEGWLHKRGEYIKTWRPRYFLLKSDGSFIGYKERPEAPDQTLPPLNNFSVAECQLMKTERPRPNTFVIRCLQWTTVIERTFHVDSPDEREEWMRAIQMVANSLKQRAPGEDPMDYKCGSPSDSSTTEEMEVAVSKARAKVTMNDFDYLKLLGKGTFGKVILVREKATGRYYAMKILRKEVIIAKDEVAHTVTESRVLQNTRHPFLTR

SEQ ID NO: 774389 - protein, 158 aa, Homo sapiens
MNEVSVIKEGWLHKRGEYIKTWRPRYFLLKSDGSFIGYKERPEAPDQTLPPLNNFSVAECQLMKTERPRPNTFVIRCLQWTTVIERTFHVDSPDEREEWMRAIQMVANSLKQRAPGEDPMDYKCGSPSDSSTTEEMEVAVSKARAKVTMDDSLPGTEL

SEQ ID NO: 774390 - protein, 171 aa, Homo sapiens
MKTERPRPNTFVIRCLQWTTVIERTFHVDSPDEREEWMRAIQMVANSLKQRAPGEDPMDYKCGSPSDSSTTEEMEVAVSKARAKVTMNDFDYLKLLGKGTFGKVILVREKATGRYYAMKILRKEVIIAKVRAPGIALASLCGGCGLEPDPEAWTLTRAFCCCGLISPTNSP

SEQ ID NO: 774391 - protein, 481 aa, Homo sapiens; identical to SEQ ID NO: 774364

SEQ ID NO: 774392 - protein, 481 aa, Homo sapiens; identical to SEQ ID NO: 774364

SEQ ID NO: 774393 - protein, 481 aa, Homo sapiens; identical to SEQ ID NO: 774364

SEQ ID NO: 774394 - protein, 459 aa, Homo sapiens
MNEVSVIKEGWLHKRGEYIKTWRPRYFLLKSDGSFIGYKERPEAPDQTLPPLNNFSVAECQLMKTERPRPNTFVIRCLQWTTVIERTFHVDSPDEREEWMRAIQMVANSLKQRAPGEDPMDYKCGSPSDSSTTEEMEVAVSKARAKVTMNDFDYLKLLGKGTFGKVILVREKATGRYYAMKILRKEVIIAKALKYAFQTHDRLCFVMEYANGGELFFHLSRERVFTEERARFYGAEIVSALEYLHSRDVVYRDIKLENLMLDKDGHIKITDFGLCKEGISDGATMKTFCGTPEYLAPEVLEDNDYGRAVDWWGLGVVMYEMMCGRLPFYNQDHERLFELILMEEIRFPRTLSPEAKSLLAGLLKKDPKQRLGGGPSDAKEVMEHRFFLSINWQDVVQKKLLPPFKPQVTSEVDTRYFDDEFTAQSITITPPDRYDSLGLLELDQRTHFPQFSYSASIRE

SEQ ID NO: 774395 - protein, 494 aa, Homo sapiens
MNEVSVIKEGWLHKRGEYIKTWRPRYFLLKSDGSFIGYKERPEAPDQTLPPLNNFSVAECQLMKTERPRPNTFVIRCLQWTTVIERTFHVDSPDEREEWMRAIQMVANSLKQRAPGEDPMDYKCGSPSDSSTTEEMEVAVSKARAKVTMNDFDYLKLLGKGTFGKVILVREKATGRYYAMKILRKEVIIAKDEVAHTVTESRVLQNTRHPFLTALKYAFQTHDRLCFVMEYANGGELFFHLSRERVFTEERARFYGAEIVSALEYLHSRDVVYRDIKLENLMLDKDGHIKITDFGLCKEGISDGATMKTFCGTPEYLAPEGHGPSPHFSSILQVLEDNDYGRAVDWWGLGVVMYEMMCGRLPFYNQDHERLFELILMEEIRFPRTLSPEAKSLLAGLLKKDPKQRLGGGPSDAKEVMEHRFFLSINWQDVVQKKLLPPFKPQVTSEVDTRYFDDEFTAQSITITPPDRYDSLGLLELDQRTHFPQFSYSASIRE

SEQ ID NO: 774396 - protein, 470 aa, Homo sapiens
MKTERPRPNTFVIRCLQWTTVIERTFHVDSPDEREEWMRAIQMVANSLKQRAPGEDPMDYKCGSPSDSSTTEEMEVAVSKARAKVTMNDFDYLKLLGKGTFGKVILVREKATGRYYAMKILRKEVIIAKDEVAHTVTESRVLQNTRHPFLTALKYAFQTHDRLCFVMEYANGGELFFHLSRERVFTEERARFYGAEIVSALEYLHSRDVVYRDIKLENLMLDKDGHIKITDFGLCKEGISDGATMKTFCGTPEYLAPEGVWGWWGEERVRPRVGGSPRPVCFQPRCPEGRTVMPASGPRAQPSFLLHPQVLEDNDYGRAVDWWGLGVVMYEMMCGRLPFYNQDHERLFELILMEEIRFPRTLSPEAKSLLAGLLKKDPKQRLGGGPSDAKEVMEHRFFLSINWQDVVQKKLLPPFKPQVTSEVDTRYFDDEFTAQSITITPPDRYDSLGLLELDQRTHFPQFSYSASIRE

SEQ ID NO: 774397 - protein, 249 aa, Homo sapiens
QYEISKSFMVTLARALLTHFHLVREKATGRYYAMKILRKEVIIAKLENLMLDKDGHIKITDFGLCKEGISDGATMKTFCGTPEYLAPEVLEDNDYGRAVDWWGLGVVMYEMMCGRLPFYNQDHERLFELILMEEIRFPRTLSPEAKSLLAGLLKKDPKQRLGGGPSDAKEVMEHRFFLSINWQDVVQKKLLPPFKPQVTSEVDTRYFDDEFTAQSITITPPDRYDSLGLLELDQRTHFPQFSYSASIRE

SEQ ID NO: 774398 - protein, 233 aa, Homo sapiens [sequence omitted]

SEQ ID NO: 774399 - protein, 297 aa, Homo sapiens
  misc_feature (35)..(35): Xaa can be any naturally occurring amino acid
  misc_feature (50)..(50): Xaa can be any naturally occurring amino acid
  misc_feature (52)..(52): Xaa can be any naturally occurring amino acid
MAQFFQMKRAVSHDLNGVVTEGHQAFSLAVSALLXVGIVTIHSPQEPVWXMXRFNPPLKGELGLEAQDSAPSSVFLRRSRRAVGSHGAQPEWHGLEAPLHKGLAAARGHVVQPAGPVRSADVRPGKPRRAASPRAPRRVPSGPSCAAPRFRYHTKVRAGRGFSLEELRVAGIHKKVARTIGISVDPRRRNKSTESLQANVQRLKEYRSKLILFPRKPSAPKKGDSSAEELKLATQLTGPVMPVRNVYKKEKARVITEEEKNFKAFASLRMARANARLFGIRAKRAKEAAEQDVEKKK

SEQ ID NO: 774400 - protein, 75 aa, Homo sapiens
ACTPAADLSRMTYDKAGGRHSQEGGPDHRHFCGSEEAEQVHGVPAGQRAAAEGVPLQTHPLPQEALGPQEGRQFC

SEQ ID NO: 774401 - protein, 344 aa, Homo sapiens
  misc_feature (3)..(3): Xaa can be any naturally occurring amino acid
  misc_feature (35)..(35): Xaa can be any naturally occurring amino acid
  misc_feature (50)..(50): Xaa can be any naturally occurring amino acid
  misc_feature (52)..(52): Xaa can be any naturally occurring amino acid
NGXVFPMKRAVSHDLNGVVTEGHQAFSLAVSALLXVGIVTIHSPQEPVWXMXRFNPPLKGELGLEAQDSAPSSVFLRRSRRAVGSHGAQPEWHGLEAPLHKGLAAARGHVVQPAGPVRSARRKARQAKARRIAPRPASGPIRPIVRCPTVSVPHEGARRPRLQPGGAQVAGIHKKVARTIGISVDPRRRNKSTESLQANVQRLKEYRSKLILFPRVAGIHKKVARTIGISVDPRRRNKSTESLQANVQRLKEYRSKLILFPRKPSAPKKGDSSAEELKLATQLTGPVMPVRNVYKKEKARVITEEEKNFKAFASLRMARANARLFGIRAKRAKEAAEQDVEKKK

SEQ ID NO: 774402 - protein, 145 aa, Homo sapiens
LARRQLIYRGGPTTRRVAGIHKKVARTIGISVDPRRRNKSTESLQANVQRLKEYRSKLILFPRKPSAPKKGDSSAEELKLATQLTGPVMPVRNVYKKEKARVITEEEKNFKAFASLRMARANARLFGIRAKRAKEAAEQDVEKKK

SEQ ID NO: 774403 - protein, 272 aa, Homo sapiens
  misc_feature (35)..(35): Xaa can be any naturally occurring amino acid
  misc_feature (50)..(50): Xaa can be any naturally occurring amino acid
  misc_feature (52)..(52): Xaa can be any naturally occurring amino acid
MAQFFQMKRAVSHDLNGVVTEGHQAFSLAVSALLXVGIVTIHSPQEPVWXMXRFNPPLKGELGLEAQDSAPSSVFLRRSRRAVGSHGAQPEWHGLEAPLHKGLAAARGHVVQPAGPVRSADVRPGKPRRAASPRAPRRVPSGPSCAAPRFRYHTKVRAGRGFSLEELRVAGIHKKVARTIGISVDPRRRNKSTESLQANVQRLKEYRSKLILFPRKPSAPKKGDSSAEELKLATQLTGPVMPVRNVYKKEKARVITEEEKNFKAFASLRGPL

SEQ ID NO: 774404 - protein, 265 aa, Homo sapiens
SRRAVGSHGAQPEWHGLEAPLHKGLAAARGHVVQPAGPVRSAGEPCARGCPWGSCPRLRLGLRVADARRGALSATVAERWPGGLQARVTAAALLSTRRKARQAKARRIAPRPASGPIRPIVRCPTVSVPHEGARRPRLQPGGAQGEYWQRCGVRKAPKSPLLAQSRDDILRNRCTALMKAHLNPFPSDVLRLFIQASGLEKARACLHLSLVLGPGGRVAGIHKKVARTIGISVDPRRRNKSTESLQANVQRLKEYRSKLILFPRK

SEQ ID NO: 774405 - protein, 227 aa, Homo sapiens
  misc_feature (3)..(3): Xaa can be any naturally occurring amino acid
  misc_feature (35)..(35): Xaa can be any naturally occurring amino acid
  misc_feature (50)..(50): Xaa can be any naturally occurring amino acid
  misc_feature (52)..(52): Xaa can be any naturally occurring amino acid
NGXVFPMKRAVSHDLNGVVTEGHQAFSLAVSALLXVGIVTIHSPQEPVWXMXRFNPPLKGELGLEAQDSAPSSVFLRRSRRAVGSHGAQPEWHGLEAPLHKGLAAARGHVVQPAGPVRSARRKARQAKARRIAPRPASGPIRPIVRCPTVSVPHEGARRPRLQPGGAQGGRHSQEGGPDHRHFCGSEEAEQVHGVPAGQRAAAEGVPLQTHPLPQEALGPQEGRQFC

SEQ ID NO: 774406 - protein, 216 aa, Homo sapiens
RLFRSAVFLRRSRRAVGSHGAQPEWHGLEAPLHKGLAAARGHVVQPAGPVRSARRKARQAKARRIAPRPASGPIRPIVRCPTVSVPHVAGIHKKVARTIGISVDPRRRNKSTESLQANVQRLKEYRSKLILFPRKPSAPKKGDSSAEELKLATQLTGPVMPVRNVYKKEKARVITEEEKNFKAFASLRMARANARLFGIRAKRAKEAAEQDVEKKK

SEQ ID NO: 774407 - protein, 212 aa, Homo sapiens
QRHRPGASANAGVDGPLLLRRQRSAAARALGAAGRPSLEGSGRRPGGVRAPGVRPLTRSPLVRSRRAVGSHGAQPEWHGLEAPLHKGLAAARGHVVQPAGPVRSARRKARQAKARRIAPRPASGPIRPIVRCPTVSVPHEGARRPRLQPGGAQGGRHSQEGGPDHRHFCGSEEAEQVHGVPAGQRAAAEGVPLQTHPLPQEALGPQEGRQFC

SEQ ID NO: 774408 - protein, 297 aa, Homo sapiens; identical to SEQ ID NO: 774399
  misc_feature (35)..(35): Xaa can be any naturally occurring amino acid
  misc_feature (50)..(50): Xaa can be any naturally occurring amino acid
  misc_feature (52)..(52): Xaa can be any naturally occurring amino acid

SEQ ID NO: 774409 - protein, 229 aa, Homo sapiens
  misc_feature (3)..(3): Xaa can be any naturally occurring amino acid
  misc_feature (35)..(35): Xaa can be any naturally occurring amino acid
  misc_feature (50)..(50): Xaa can be any naturally occurring amino acid
  misc_feature (52)..(52): Xaa can be any naturally occurring amino acid
NGXVFPMKRAVSHDLNGVVTEGHQAFSLAVSALLXVGIVTIHSPQEPVWXMXRFNPPLKGELGLEAQDSAPSSVFLRRSRRAVGSHGAQPEWHGLEAPLHKGLAAARGHVVQPAGPVRSARRKARQAKARRIAPRPASGPIRPIVRCPTVSVPHEGARRPRLQPGGAQGGRHSQEGGPDHRHFCGSEEAEQVHGVPAGQRAAAEGVPLQTHPLPQEALGPGPFNASGPF

SEQ ID NO: 774410 - protein, 89 aa, Homo sapiens
SVVCEYQQKPPGQQPEVRWLWWAWWLSTSRSRVDSNRKCRGSGLWAVVAKHAFLAEWWHSACPLWASLRFCSPASAVLRFVMESQHPLP

SEQ ID NO: 774411 - protein, 88 aa, Homo sapiens
SHIVTPSPTSAEEAIWEAHHPAQEEMKPGGRRMSGMTPHLCNSHVLLLPLAWLIRGPAPGSIQSVFLLLASHLLCFLRDVSVAASEPT

SEQ ID NO: 774412 - protein, 109 aa, Homo sapiens
MAKRGLSQRLMKTLVGGPRMNPLSLGISPEREKTPTAVTRKMTILATVPQVLTSPRGTVDNDADTIVKKTGHQQRPAGEGLTFQIHCCSELRSPGPGATEHLKNNSFDQ

SEQ ID NO: 774413 - protein, 141 aa, Homo sapiens
MQGLLCSPSHRGWHPRWELSFITKPEDNGETDREGLQAATAGRCVDADGMGRWRRGPASLPSCPSQRTPGPQLGRPTRLLSLRFSIDKIMSRHPQTTGRRHQPGRVQLERRRPRGYTVLRQNAEVNDRILFAKLYYEAKGI

SEQ ID NO: 774414 - protein, 182 aa, Homo sapiens
MAEEQVNRSAGLAPDCEASATAETTVSSVGTCEAAAKSPEPKDYDSTCVFCRIAGRQDPGTELLHCENEDLICFKDIKPAATHHYLVVPKKHIGNCRTLRKDQVELVENMVTVGKTILERNNFTDFTNVRMGFHMPPFCSISHLHLHVLAPVDQLGFLSKLVYRVNSYWFITADHLIEKLRT

SEQ ID NO: 774415 - protein, 182 aa, Homo sapiens; identical to SEQ ID NO: 774414

SEQ ID NO: 774416 - protein, 182 aa, Homo sapiens; identical to SEQ ID NO: 774414

SEQ ID NO: 774417 - protein, 102 aa, Homo sapiens
MGFEERLSRTPNKLHYVKRSRASVMSPRRAGRSATWQTSCVITNEAQGSGRLSAAPLRALYWQPVLRPASGFEVPHRVSFPLPKAWITAQRQARGDVSRMRT

SEQ ID NO: 774418 - protein, 89 aa, Homo sapiens
SWDTTWHCGGSGGDTQTRAIEGPWTRKRRGRWGQEACGAMCGGRLGGGSCWGGAERPQQPTGESAAGVLVWGPGPDVEAMEGCRGWQWG

SEQ ID NO: 774419 - protein, 155 aa, Homo sapiens
INYIVERRETSRLVWTVVDANVQTLSCKVTKLLEGNEYTFRIMAVNKYGVGEPLESEPVVAKNPFVVPDAPKAPEVTTVTKDSMIVVWERPASDGGSEILGYVLEKRDKEGIRWTRCHKRLIGELRLRVTGLIENHDYEFRVSAENAAGLSEPSP

SEQ ID NO: 774420 - protein, 70 aa, Homo sapiens
PNCYKCNSNGKKCRTTAVGLGSQRLGQSLCQQILSKLPLGGHSGWLLRAPTTKDLAPAKPDVTAGSASCC

SEQ ID NO: 774421 - protein, 69 aa, Homo sapiens
PGGLRKLGGLAWPARGEVRRLRGGVACAPDCAVGPAFDEVAAAGSLGPSLVPARAAAAFQTQGMRPVGV

SEQ ID NO: 774422 - protein, 35 aa, Homo sapiens
MQLCRASPVRCRVFQTLLSKMSKCVLPTLALCPCC

SEQ ID NO: 774423 - protein, 109 aa, Homo sapiens
RATDPINSLKGKQDPCDSTDESSNITLRERSHTQVQVKFKNRQELIYGGRNQNSSCFWDKERINWKKKHEGIFWDKRKILPLNWNVGYMGAYHCHNSLHGKLHICAFLF

SEQ ID NO: 774424 - protein, 38 aa, Homo sapiens
PPPEFKRFSCLSLPSSGDYSPPRSVQVTQWHPKQRQDR

SEQ ID NO: 774425 - protein, 110 aa, Homo sapiens
GSLWTPPSNALIQQTGPLCCALGLIAEANLSSFSPSLRDAFHAQPRDQARSYKSISRSPCSNYGTTVIIEPRGNYGNIISRINTTIPPSTFSPHEESEESRTCRINSIIC

SEQ ID NO: 774426 - protein, 192 aa, Homo sapiens
MSDANLDSSKKNFLEGEVDDEESVILTLVPVKDDANMEQMEPSVSSTSDVKLEKPKKYNPGHLLQTNEQFTAPQKARCKIPALPLPTILPPINKVCRDTLRDWCQQLGLSTNGKKIEVYLRLHRHAYPEQRQDMPEMSQETRLQRCSRKRKAVTKRARLQRSYEMNERAEETNTVEVITSAPGAMLASWARI

SEQ ID NO: 774427 - protein, 142 aa, Homo sapiens
MQWLQELFSNPGTFQVFFPNSSASNSFISSPNMATRAPDITCTSEFQETRQREKRRACTLTLKKTSKKNHLKFPNLVPKLTWLLSSLENAVFKLKNAMTKSEIDHAYNDNWKTEMKPYKPSTHAIFVLPVDLRTLVKKMWRL

SEQ ID NO: 774428 - protein, 88 aa, Homo sapiens
TLVLREAWPPATAGRSGRPAVLGRRGRQLPGGTDERLWGSRIRAPLPRGGGDAWSRADVAGPGCRGGQAPLPVSRPHHPERAPAPLSS

SEQ ID NO: 774429 - protein, 106 aa, Homo sapiens
KYMPNVKARIRVTFGKTEATVIGRGIGGTREAGSVLFPHGQWSCKCFIGNKSVNCSFSSYVFSVCLLDFTIKTVKANLKLICILNKTDRNLPQNKLVISLKCFLTH

SEQ ID NO: 774430 - protein, 80 aa, Homo sapiens
GRSVGVTEGRQHRRVHGANIRPEIRCYQGFAFTWGCLLHSWATQKDRRKMWFLESLIGMIQKFLYEDPAYDELHEDLEEN

SEQ ID NO: 774431 - protein, 72 aa, Homo sapiens
KVGWKYQTVTATLEEKRKEKAKIHYQNKKQLMGWPGAVLTPVILALWEAEAGRSGGQEIETILANMVKPSLY

SEQ ID NO: 774432 - protein, 43 aa, Homo sapiens
MANELRGDATDVRRLSFEWQETRGGRAQLDCGLGRGSFSKPTL

SEQ ID NO: 774433 - protein, 195 aa, Homo sapiens
SVNGSLPINYTFFENHVAISPAISKYDREPAEFNLTKKNPGEEEEYRCEAKNRLPNYATYSHPVTMPSTGGDSCPFCLKLLLPGLLLLLVVIILILAFWVLPKYKTRKAMRNNVPRDRGDTAMEVGIYANILEKQAKEESVPEVGSRPCVSTAQDEAKHSQELQYATPVFQEVAPREQEACDSYKSGYVYSELNF

SEQ ID NO: 774434 - protein, 218 aa, Homo sapiens
SVNGSLPINYTFFENHVAISPAISKYDREPAEFNLTKKNPGEEEEYRCEAKNRLPNYATYSHPVTMPSTGGDSCPFCLKLLLPGLLLLLVVIILILAFWVLPKYKTRKAMRNNVPRDRGDTAMEVGIYANILEKQAKEESVPEVGSRPCVSTAQDEAKHSQELQYATPVFQEVAPREQEACDSYKSGYVYSELLTSDDLPASASQSAGTTSLSQRARP

SEQ ID NO: 774435 - protein, 195 aa, Homo sapiens; identical to SEQ ID NO: 774433

SEQ ID NO: 774436 - protein, 108 aa, Homo sapiens
VPVTMDLGFRARVGDGHSRARVLRIRKSGLGLGLVRTDPVSGVWVPGTVNRGSDRVLILEFRGQDLQTGVQRQGPRVNGQLLESGGWGSGIQGPGLQVSGLGIKTGVW

SEQ ID NO: 774437 - protein, 1578 aa, Homo sapiens
MEELETSLFQTRKAHRIEQMVARWLRRSRDSSARAKVAAADGPARNPTQTLIPVRHTVKIDKDTLLQDYGFHISESLPLTVVAVTAGGSAHGKLFPGDQILQMNNEPAEDLSWERAVDILREAEDSLSITVVRCTSGVPKSSFLTEEKRARLKTNPVKVHFAEEVLISGHSQGNSLLCMPNVLKLYLENGQTKAFKFEANTTVKDIILTVKEKLSIRSIEYFALALEEQYSISRLHLLHEEELIQQVVEREESHDYRCLFRVCFVPKDPLDLLKEDPVAFEYLYLQSCSDVLQERFAVEMKCSSALRLAALHIQERIYACAQPQKISLKYIEKDWGIENFISPTLLRNMKGKDIKKAISFHMKRNQNLLEPRQKQLISAAQLRLNYLQILGELKTYGGRIFNATLMLQDRESYIALLVGAKYGISQVINSKLNIMSTLAEFANISRVELTEESEKVSVVKVYLQDVKVLTLLLESNSAKDLACLIAGYYRLLVDPVTSIFLWPGNKQQAHRVSAEEGYESRACSDSEESSEVDCVLEPLSDRRLVKLAPCRSLIKEEQPPGNSPTPEVARRGPSTCGASSTTDSAESEASDSANTESRGYRTSGSSESMDALEEDDLDTCSSSRSTFFHFGSPGLAESIDSDSQEERSGIETSGFLCLLDLAQRANPQCQKTEFSESAALETFGWAPELSTVRLDPRLYEGSHADYYSLCSSVSPASYLSDSSESTASRQGGAPPAWGQQGWTEAQPSSMLEPLALHPPLAFEDGSSDEEYYDAADKLTPPGPPSGPRDVSTAEPSATSLQNKASTSSPENSLPCGPDGRQPSRRGGVKKYAKTLRKRRSFLQTDYTSQVSFPLVPSASLESVDDVCYYDREPYLALGAPSPTVSSLQDMQGEPGLLETKALGLLAPLRETKSTNPASRVMEMEPETMETKSVIDSRVSSISAIRFRIDPNNKENSGVVPAASSSASTPHCSNPGSSGPDTAQARPSQILPLSQDLDGIAPKEPTIEHGDSSFSLSSGDPNPDRACLASNPGLNNVSQGDTLELQLEPHVQLEMGLESFCTNHIQETAPKYTEPLLSPRDEPRSDECGINPGEKIASIPTKEEPQGQLSLERDREVTNKNGTNVFQEESRKDSGDSPGDVSNNVSQTLDISSPAGKIVTSLSLDAPVTGTEQIPPHPPRDPQGQSREPPGQGCQAQEQKLFVELDLDPDFFLGKQTVSPAVPPEGIKAEAPNHVTGQDIAPRDSPEWVCFNPEPSLPEPLPCPQEDPHLETSNHCLLSEGKSDSSSICLSAEKSFLCFAPESHPEVSASLRVATSLGFAGMNEMVAPRIGMDQCSCQFSYATCFRGPQPETEEEDRDLEAHPMAPLTSPPSAGSPVVLPWRPARAHSCTTAPLSRKSHIWPEYCSRALRQLKATPASTPEGFIQLMESLLELQDILETSWGVGNKHPPEKCTWHFTESRSRLCMGSQKLLSSCRHVIRMDQSPEEMQGAVRDTFQHLVQLAGLCFQFTDCSRCSARHREAAGNLRDVVYTYHQFIEAAKSTCERGYHDLSVKLLARQCTALTAAVFCLTQKFRASTAL

SEQ ID NO: 774438 - protein, 280 aa, Homo sapiens
TRKERLDRTLSASIIALRSSGRCTIDNRVTRVAWLNRSTILYAGNDKWCLDPRVVLLSNTQTQYSIEIQNVDVYDEGPYTCSVQTDNHPKTSRVHLIVQVSPKIVEISSDISINEGNNISLTCIATGRPEPTVTWRHISPKAVGFVSEDEYLEIQGITREQSGDYECSASNDVAAPVVRRVKVTVNYPPYISEAKGTGVPVGQKGTLQCEASAVPSAEFQWYKDDKRLIEGKKGVKVENRPFLSKLIFFNVSEHDYGNYTCVASNKLGHTNASIMLFDVK

SEQ ID NO: 774439 - protein, 201 aa, Homo sapiens
LLPGGRRRGGRGRPLSLASARLRCGLRRAFPSELPSLGPPRSAPAARPLPPRPPPQPLPRRAPPDSGGRSAHLGSEEVDRGGCRRIRRIPGPDRTKPARPSPPRATPAPPASSTSHLLLFPIVFRWRARLRNLQSVGCPPFELRDCRPPLGSWMKPTPSPSGVPVRSGDATFPKAMDNVTVRQGESATLRWRNFQERSEGA

SEQ ID NO: 774440 - protein, 60 aa, Homo sapiens
MVTTPGPCWAEHLAVAFSSLEASTGRSGCKEGVQKRGENTSVQGSGTCFPSLTQGIFLVT

SEQ ID NO: 774441 - protein, 344 aa, Homo sapiens
MGVCGYLFLPWKCLVVVSLRLLFLVPTGVPVRSGDATFPKAMDNVTVRQGESATLRCTIDNRVTRVAWLNRSTILYAGNDKWCLDPRVVLLSNTQTQYSIEIQNVDVYDEGPYTCSVQTDNHPKTSRVHLIVQVSPKIVEISSDISINEGNNISLTCIATGRPEPTVTWRHISPKAVGFVSEDEYLEIQGITREQSGDYECSASNDVAAPVVRRVKVTVNYPPYISEAKGTGVPVGQKGTLQCEASAVPSAEFQWYKDDKRLIEGKKGVKVENRPFLSKLIFFNVSEHDYGNYTCVASNKLGHTNASIMLFGPGAVSEVSNGTSRRAGCVWLLPLLVLHLLLKF

SEQ ID NO: 774442 - protein, 337 aa, Homo sapiens
MHNSISWAIFTGLAALCLFQGVPVRSGDATFPKAMDNVTVRQGESATLRCTIDNRVTRVAWLNRSTILYAGNDKWCLDPRVVLLSNTQTQYSIEIQNVDVYDEGPYTCSVQTDNHPKTSRVHLIVQVSPKIVEISSDISINEGNNISLTCIATGRPEPTVTWRHISPKAVGFVSEDEYLEIQGITREQSGDYECSASNDVAAPVVRRVKVTVNYPPYISEAKGTGVPVGQKGTLQCEASAVPSAEFQWYKDDKRLIEGKKGVKVENRPFLSKLIFFNVSEHDYGNYTCVASNKLGHTNASIMLFGPGAVSEVSNGTSRRAGCVWLLPLLVLHLLLKF

SEQ ID NO: 774443 - protein, 475 aa, Homo sapiens
LLPGGRRRGGRGRPLSLASARLRCGLRRAFPSELPSLGPPRSAPAARPLPPRPPPQPLPRRAPPDSGGRSAHLGSEEVDRGGCRRIAQDPGPGSHEARAAVSSARHPCASRELHFPSAIGCRSSGKLWLSRMGVCGYLFLPWKCLVVVSLRLLFLVPTGVPVRSGDATFPKAMDNVTVRQGESATLRCTIDNRVTRVAWLNRSTILYAGNDKWCLDPRVVLLSNTQTQYSIEIQNVDVYDEGPYTCSVQTDNHPKTSRVHLIVQVSPKIVEISSDISINEGNNISLTCIATGRPEPTVTWRHISPKAVGFVSEDEYLEIQGITREQSGDYECSASNDVAAPVVRRVKVTVNYPPYISEAKGTGVPVGQKGTLQCEASAVPSAEFQWYKDDKRLIEGKKGVKVENRPFLSKLIFFNVSEHDYGNYTCVASNKLGHTNASIMLFGPGAVSEVSNGTSRRAGCVWLLPLLVLHLLLKF

SEQ ID NO: 774444 - protein, 154 aa, Homo sapiens [sequence omitted]

SEQ ID NO: 774445 - protein, 316 aa, Homo sapiens
MHNSISWAIFTGLAALCLFQGVPVRSGDATFPKAMDNVTVRQGESATLRCTIDNRVTRVAWLNRSTILYAGNDKWCLDPRVVLLSNTQTQYSIEIQNVDVYDEGPYTCSVQTDNHPKTSRVHLIVQVSPKIVEISSDISINEGNNISLTCIATGRPEPTVTWRHISPKAVGFVSEDEYLEIQGITREQSGDYECSASNDVAAPVVRRVKVTVNYPPYISEAKGTGVPVGQKGTLQCEASAVPSAEFQWYKDDKRLIEGKKGVKVENRPFLSKLIFFNVSEHDYGNYTCVASNKLGHTNASIMLFEVKTTALTPWKG

SEQ ID NO: 774446 - protein, 344 aa, Homo sapiens; identical to SEQ ID NO: 774441

SEQ ID NO: 774447 - protein, 376 aa, Homo sapiens
MHNSISWAIFTGLAALCLFQGVPVRSGDATFPKAMDNVTVRQGESATLRCTIDNRVTRVAWLNRSTILYAGNDKWCLDPRVVLLSNTQTQYSIEIQNVDVYDEGPYTCSVQTDNHPKTSRVHLIVQVSPKIVEISSDISINEGNNISLTCIATGRPEPTVTWRHISPKAVGFVSEDEYLEIQGITREQSGDYECSASNDVAAPVVRRVKVTVNYPPYISEAKGTGVPVGQKGTLQCEASAVPSAEFQWYKDDKRAEISSQFGYDGKASSPWWTNGVKTASGINQPDLLAESSRLIEGKKGVKVENRPFLSKLIFFNVSEHDYGNYTCVASNKLGHTNASIMLFGPGAVSEVSNGTSRRAGCVWLLPLLVLHLLLKF

SEQ ID NO: 774448 - protein, 126 aa, Homo sapiens
MTKELKSHSQFGYDGKASSPWWTNGVKTASGINQPDLLAESSRLIEGKKGVKVENRPFLSKLIFFNVSEHDYGNYTCVASNKLGHTNASIMLFGPGAVSEVSNGTSRRAGCVWLLPLLVLHLLLKF

SEQ ID NO: 774449 - protein, 105 aa, Homo sapiens
  misc_feature (19)..(19): Xaa can be any naturally occurring amino acid
SIPYGSWVVLELGFFRMGXFVLWVAGKVASGLAPQCRAAGRGVGRQGGREAPMFTCLGKKLLVGGLHCGLGSWGPLPGQWGQLSRVPKALEWPRFLPAQAFSPKY

SEQ ID NO: 774450 - protein, 171 aa, Homo sapiens
MAVATDFYLAWCSVATACRDPGVPMNGTRNGDGREPGDTVVFQCDPGYELQGEERITCIQVENRYFWQPSPPVCIAPCGGNLTGSSGFILSPNFPHPYPHSRDCDWTITVNADYVISLAFISFSIEPNYDFLYIYDGPDSNSPLIGSFQDSKLPERIESSSNTMHLAFRSD

SEQ ID NO: 774451 - protein, 125 aa, Homo sapiens
MEFCSVAWAGLELLSSGNLPTSASQSAGITGLSHWTWLLLLLSLMVLEVHWAQVCSSQSGVSMQLWSAGSWSLLMSSSLTCLMTDADVAVLCDLSETCQPKHLHMASPPGLGFIRAWCLDFKSKC

SEQ ID NO: 774452 - protein, 150 aa, Homo sapiens
HTTHHAYIHHTPHNPTQHINTSHTHTPHTTHTTRHIHTIHTPHRYITHTPHTDTPKAHRYHTHPHRKHTDTTHTPTESTQIPHTPPQKARRYPPHTHRKCTDTTHTHTQKAHTAFTPHIYFFALKSRSMSKAACEAGQCSREGRIISHTK

SEQ ID NO: 774453 - protein, 222 aa, Homo sapiens
VHVLLIAASPVPGTVLGTKYLLLLVNCMNELLYTFLTSSFGGLVLDIKRKAPWYWSDYRDALSLQCLASFLFLYCACMSPVITFGGLLGEATEGRISAIESLFGASMTGIAYSLFAGQALTILGSTGPVLVFEQDSVQILKDYALSYLSLRACIGLWTAFLCIVLVATDASSLVCYITRFTEEAFASLICIIFIYEAIEKLIHLAETYPIHMHSQLDHLSLY

SEQ ID NO: 774454 - protein, 105 aa, Homo sapiens
MGSSQAHWPRSRRQSLPALQVQMLLPQTDREQRVKNILHTQQEMGNPTQARKSAQPEAGTHPGHPRWAVASTSRNPQPPTSSKEPPRLNSGCQVLCPALPSHTES

SEQ ID NO: 774455 - protein, 122 aa, Homo sapiens
EKETERERERQMNRRTTLCIWVMLQGGLNRLSMSCFEESKEFWGYCCARENRFERKKTEAGSLTEQEVTRSCLGRHPARGIAQGSAEGSLWGSGWGGEMAWPWAVGLGTGVQPQLSSKPPSV

SEQ ID NO: 774456 - protein, 483 aa, Homo sapiens
MTKMDIRGAVDAAVPTNIIAAKAAEVRANKVNWQSYLQGQMISAEDCEFIQRFEMKRSPEEKQEMLQTEGSQCAKTFINLMTHICKEQTVQYILTMVDDMLQENHQRVSIFFDYARCSKNTAWPYFLPMLNRQDPFTVHMAARIIAKLAAWGKELMEGSDLNYYFNWIKTQLSSQKLRGSGVAVETGTVSSSDSSQYVQCVAGCLQLMLRVNEYRFAWVEADGVNCIMGVLSNKCGFQLQYQMIFSIWLLAFSPQMCEHLRRYNIIPVLSDILQESVKEKVTRIILAAFRNFLEKSTERETRQEYALAMIQCKVLKQLENLEQQKYDDEDISEDIKFLLEKLGESVQDLSSFDEYSSELKSGRLEWSPVHKSEKFWRENAVRLNEKNYELLKILTKLLEVSDDPQVLAVAAHDVGEYVRHYPRGKRVIEQLGGKQLVMNHMHHEDQQVRYNALLAVQKLMVHNWEYLGKQLQSEQPQTAAARS

SEQ ID NO: 774457 - protein, 465 aa, Homo sapiens
MTKMDIRGAVDAAVPTNIIAAKAAEVRANKVNWQSYLQGQMISAEDCEFIQRFEMKRSPEEKQEMLQTEGSQCAKTFINLMTHICKEQTVQYILTMVDDMLQENHQRVSIFFDYARCSKNTAWPYFLPMLNRQDPFTVHMAARIIAKLAAWGKELMEGSDLNYYFNWIKTQLSSQSSQYVQCVAGCLQLMLRVNEYRFAWVEADGVNCIMGVLSNKCGFQLQYQMIFSIWLLAFSPQMCEHLRRYNIIPVLSDILQESVKEKVTRIILAAFRNFLEKSTERETRQEYALAMIQCKVLKQLENLEQQKYDDEDISEDIKFLLEKLGESVQDLSSFDEYSSELKSGRLEWSPVHKSEKFWRENAVRLNEKNYELLKILTKLLEVSDDPQVLAVAAHDVGEYVRHYPRGKRVIEQLGGKQLVMNHMHHEDQQVRYNALLAVQKLMVHNWEYLGKQLQSEQPQTAAARS

SEQ ID NO: 774458 - protein, 82 aa, Homo sapiens
  misc_feature (14)..(14): Xaa can be any naturally occurring amino acid
  misc_feature (24)..(24): Xaa can be any naturally occurring amino acid
GRASPGPTVPFFTXTGCQNTFGGXRVIEQLGGKQLVMNHMHHEDQQVRYNALLAVQKLMVHNWEYLGKQLQSEQPQTAAARS

SEQ ID NO: 774459 - protein, 73 aa, Homo sapiens
  misc_feature (1)..(1): Xaa can be any naturally occurring amino acid
  misc_feature (3)..(3): Xaa can be any naturally occurring amino acid
  misc_feature (5)..(5): Xaa can be any naturally occurring amino acid
  misc_feature (10)..(10): Xaa can be any naturally occurring amino acid
XLXGXHKAAXLGGVTAVIEQLGGKQLVMNHMHHEDQQVRYNALLAVQKLMVHNWEYLGKQLQSEQPQTAAARS

SEQ ID NO: 774460 - protein, 483 aa, Homo sapiens; identical to SEQ ID NO: 774456

SEQ ID NO: 774461 - protein, 483 aa, Homo sapiens; identical to SEQ ID NO: 774456

SEQ ID NO: 774462 - protein, 300 aa, Homo sapiens
MTKMDIRGAVDAAVPTNIIAAKAAEVRANKVNWQSYLQGQMISAEDCEFIQRFEMKRSPEEKQEMLQTEGSQCAKTFINLMTHICKEQTVQYILTMVDDMLQENHQRVSIFFDYARCSKNTAWPYFLPMLNRQDPFTVHMAARIIAKLAAWGKELMEGSDLNYYFNWIKTQLSSQKLRGSGVAVETGTVSSSDSSQYVQCVAGCLQLMLRVNEYRFAWVEADGVNCIMGVLSNKCGFQLQYQMIFSIWLLAFSPQMCEHLRRYNIIPVLSDILQESVKEKVTRIILAAFRNLDKTFGSVR

SEQ ID NO: 774463 - protein, 409 aa, Homo sapiens
  misc_feature (1)..(1): Xaa can be any naturally occurring amino acid
  misc_feature (5)..(6): Xaa can be any naturally occurring amino acid
  misc_feature (8)..(8): Xaa can be any naturally occurring amino acid
  misc_feature (11)..(11): Xaa can be any naturally occurring amino acid
XVLPXXRXGPXMDGSQCAKTFINLMTHICKEQTVQYILTMVDDMLQENHQRVSIFFDYARCSKNTAWPYFLPMLNRQDPFTVHMAARIIAKLAAWGKELMEGSDLNYYFNWIKTQLSSQSSQYVQCVAGCLQLMLRVNEYRFAWVEADGVNCIMGVLSNKCGFQLQYQMIFSIWLLAFSPQMCEHLRRYNIIPVLSDILQESVKEKVTRIILAAFRNFLEKSTERETRQEYALAMIQCKVLKQLENLEQQKYDDEDISEDIKFLLEKLGESVQDLSSFDEYSSELKSGRLEWSPVHKSEKFWRENAVRLNEKNYELLKILTKLLEVSDDPQVLAVAAHDVGEYVRHYPRGKRVIEQLGGKQLVMNHMHHEDQQVRYNALLAVQKLMVHNWEYLGKQLQSEQPQTAAARS

SEQ ID NO: 774464 - protein, 483 aa, Homo sapiens; identical to SEQ ID NO: 774456

SEQ ID NO: 774465 - protein, 483 aa, Homo sapiens; identical to SEQ ID NO: 774456

SEQ ID NO: 774466 - protein, 483 aa, Homo sapiens; identical to SEQ ID NO: 774456

SEQ ID NO: 774467 - protein, 483 aa, Homo sapiens; identical to SEQ ID NO: 774456

SEQ ID NO: 774468 - protein, 425 aa, Homo sapiens
MTKMDIRGAVDAAVPTNIIAAKAAEVRANKVNWQSYLQGQMISAEDCEFIQRFEMKRSPEEKQEMLQTEGSQCAKTFINLMTHICKEQTVQYILTMVDDMLQENHQRVSIFFDYARCSKNTAWPYFLPMLNRQDPFTVHMAARIIAKLAAWGKELMEGSDLNYYFNWIKTQLSSQKLRGSGVAVETGTVSSSDSSQYVQCVAGCLQLMLRVNEYRFAWVEADGVNCIMGVLSNKCGFQLQYQMIFSIWLLAFSPQMCEHLRRYNIIPVLSDILQESVKEKVTRIILAAFRNFLEKSTERETRQEYALAMIQCKVLKQLENLEQQKYDDEDISEDIKFLLEKLGESVQDLSSFDEYSSELKSGRLEWSPVHKSEKFWRENAVRLNEKNYELLKILTKLLEVSDDPQVLAVAAHDVASRPGDLYERR

SEQ ID NO: 774469 - protein, 153 aa, Homo sapiens
DSQHREQQQLRLGESVQDLSSFDEYSSELKSGRLEWSPVHKSEKFWRENAVRLNEKNYELLKILTKLLEVSDDPQVLAVAAHDVGEYVRHYPRGKRVIEQLGGKQLVMNHMHHEDQQVRYNALLAVQKLMVHNWEYLGKQLQSEQPQTAAARS

SEQ ID NO: 774470 - protein, 79 aa, Homo sapiens
  misc_feature (14)..(14): Xaa can be any naturally occurring amino acid
RRSEVRGGVLSSWXAIPVYKPPVIEQLGGKQLVMNHMHHEDQQVRYNALLAVQKLMVHNWEYLGKQLQSEQPQTAAARS

SEQ ID NO: 774471 - protein, 100 aa, Homo sapiens
NSRPLDLLKILTKLLEVSDDPQVLAVAAHDVGEYVRHYPRGKRVIEQLGGKQLVMNHMHHEDQQVRYNALLAVQKLMVHNWEYLGKQLQSEQPQTAAARS

SEQ ID NO: 774472 - protein, 483 aa, Homo sapiens; identical to SEQ ID NO: 774456

SEQ ID NO: 774473 - protein, 359 aa, Homo sapiens
MTKMDIRGAVDAAVPTNIIAAKAAEVRANKVNWQSYLQGQMISAEDCEFIQRFEMKRSPEEKQEMLQTEGSQCAKTFINLMTHICKEQTVQYILTMVDDMLQENHQRVSIFFDYARCSKNTAWPYFLPMLNRQDPFTVHMAARIIAKLAAWGKELMEGSDLNYYFNWIKTQLSSQKLRGSGVAVETGTVSSSDSSQYVQCVAGCLQLMLRVNEYRFAWVEADGVNCSFDEYSSELKSGRLEWSPVHKSEKFWRENAVRLNEKNYELLKILTKLLEVSDDPQVLAVAAHDVGEYVRHYPRGKRVIEQLGGKQLVMNHMHHEDQQVRYNALLAVQKLMVHNWEYLGKQLQSEQPQTAAARS

SEQ ID NO: 774474 - protein, 256 aa, Homo sapiens
MGVLSNKCGFQLQYQMIFSIWLLAFSPQMCEHLRRYNIIPVLSDILQESVKEKVTRIILAAFRNFLEKSTERETRQEYALAMIQCKVLKQLENLEQQKYDDEDISEDIKFLLEKLGESVQDLSSFDEYSSELKSGRLEWSPVHKSEKFWRENAVRLNEKNYELLKILTKLLEVSDDPQVLAVAAHDVGEYVRHYPRGKRVIEQLGGKQLVMNHMHHEDQQVRYNALLAVQKLMVHNWEYLGKQLQSEQPQTAAARS

SEQ ID NO: 774475 - protein, 483 aa, Homo sapiens; identical to SEQ ID NO: 774456

SEQ ID NO: 774476 - protein, 483 aa, Homo sapiens; identical to SEQ ID NO: 774456

SEQ ID NO: 774477 - protein, 426 aa, Homo sapiens
MTKMDIRGAVDAAVPTNIIAAKAAEVRANKVNWQSYLQGQMISAEDCEFIQRFEMKRSPEEKQEMLQTEGSQCAKTFINLMTHICKEQTVQYILTMVDDMLQENHQRVSIFFDYARCSKNTAWPYFLPMLNRQDPFTVHMAARIIAKLAAWGKELMEGSDLNYYFNWIKTQLSSQKLRGSGVAVETGTVSSSDSSQYVQCVAGCLQLMLRVNEYRFAWVEADGVNCIMGVLSNKCGFQLQYQMIFSIWLLAFSPQMCEHLRRYNIIPVLSDILQESVKEKVTRIILAAFRNFLEKSTERETRQEYALAMIQCKVLKQLENLEQQKYDDEDISEDIKFLLEKLGESVQDLSSFDEYSSELKSGRLEWSPVHKSEKFWRENAVRLNEKNYELLKILTKLLEVSDDPQVLAVAAHDVGEYVRHYPRGKR

SEQ ID NO: 774478 - protein, 57 aa, Homo sapiens
LNPSHDKLYSFSLSLCLTQNFLEKSTERETRQEYALAMIQCKVLKQLENLEQQKYDD

SEQ ID NO: 774479 - protein, 34 aa, Homo sapiens
MAAGPGPAEADDGRAPGEAELAVSGNRRQWHFHP

SEQ ID NO: 774480 - protein, 563 aa, Homo sapiens
SFLRDIDGSFLGNAGSVIPQAEYEWDGNSQVGIGDYRIPKAMLTFLNGSRIPVTEKAPHKGIIRDSTCKYLPEWQSYQCFGMEYAMMVIESLDPDTETRRLSPVAIMGNGYVDLINGPQDHGWCAGYTCQRRLSLFHSIVALNKSYEVYFTGTSPQNLRLMLLNVDHNKAVLVGIFFSTLQRLDVYVNNLLVCPKTTIWNAQQKHCELNNHLYKDQFLPNLDSTVLGENYFDGTYQMLYLLVKGTIPVEIHTATVIFVSFQLSVATEDDFYTSHNLVKNLALFLKIPSDKIRISKIRGKSLRRKRSMGFIIEIEIGDPPIQFISNGTTAIGQMQLSELQEIAGSLGQAVILGNISSILGFNISSMSITNPLPSPSDSGWIKVTAQPVERSAFPVHHVAFVSSLLVITQPVAAQPGQPFPQQPSVKATDSDGNCVSVGITALTLRAILKDSNNNQVNGLSGNTTIPFSSCWANYTDLTPLRTGKNYKIEFILDNVVGVESRTFSLLAESVSSSGSSSSSNSKASTVGTYAQIMTVVISCLVGRMWLLEIFMAAVSTLNITLRSY

SEQ ID NO: 774481 - protein, 231 aa, Homo sapiens
MQLSELQEIAGSLGQAVILGNISSILGFNISSMSITNPLPSPSDSGWIKVTAQPVERSAFPVHHVAFVSSLLVITQPVAAQPGQPFPQQPSVKATDSDGNCVSVGITALTLRAILKDSNNNQVNGLSGNTTIPFSSCWANYTDLTPLRTGKNYKIEFILDNVVGVESRTFSLLAESVSSSGSSSSSNSKASTVGTYAQIMTVVISCLVGRMWLLEIFMAAVSTLNITLRSY

SEQ ID NO: 774482 - protein, 39 aa, Homo sapiens
MHPSSAFLFYLGEPSVDWMIPDETTQIFLTHSTDSNANL

SEQ ID NO: 774483 - protein, 67 aa, Homo sapiens
RHVGHGAGSGSGGRAADLVCGGGRGRGGLFSGGVGAHAVAGGSEEEEERAGRAALRKEVEEAAGVLP

SEQ ID NO: 774484 - protein, 122 aa, Homo sapiens
GRGDDGVDSSGDDDNGGDGDDGGGDVNGSGDGHGEDDDGIGDGEDDDGGGGGDNDDDDVKEKEREEDREIKRSKYVTTLTTSKGVWVFTVSFLQIFHWFEIVQNNKLRKINPEESLSHIFHH

SEQ ID NO: 774485 - protein, 107 aa, Homo sapiens
MKELQYKCLFDLTEMHIHSHLLTYKLIQFPWYLEVRRGRVSGRERGRLWHHQVALAYPHPCCLFHSSTSSQQSYTSHWPSRLQSWSVAGTGLYLASKQISFSSFLRS

SEQ ID NO: 774486 - protein, 441 aa, Homo sapiens
QRPAAPGVAWTPVRGYCGVASLGPGKFGTGEWRRRAAGPMEARGELGPARESAGGDLLLALLARRADLRREIPLCAGCDQHILDRFILKALDRHWHSKCLKCSDCHTPLAERCFSRGESVYCKDDFFKRFGTKCAACQLGIPPTQVVRRAQDFVYHLHCFACVVCKRQLATGDEFYLMEDSRLVCKADYETAKQREAEATAKRPRTTITAKQLETLKSAYNTSPKPARHVREQLSSETGLDMRVVQVWFQNRRAKEKRLKKDAGRQRWGQYFRNMKRSRGGSKSDKDSVQEGQDSDAEVSFPDEPSLAEMGPANGLYGSLGEPTQALGRPSGALGNFSLEHGGLAGPEQYRELRPGSPYGVPPSPAAPQSLPGPQPLLSSLVYPDTSLGLVPSGAPGGPPPMRVLAGNGPSSDLSTGSSGGYPDFPASPASWLDEVDHAQF

SEQ ID NO: 774487 - protein, 432 aa, Homo sapiens
GSLPRTTRRDLGAPNPPGDADLGGARLAPLGLVAAMLLETGLERDRARPGAAAVCTLGGTREIPLCAGCDQHILDRFILKALDRHWHSKCLKCSDCHTPLAERCFSRGESVYCKDDFFKRFGTKCAACQLGIPPTQVVRRAQDFVYHLHCFACVVCKRQLATGDEFYLMEDSRLVCKADYETAKQREAEATAKRPRTTITAKQLETLKSAYNTSPKPARHVREQLSSETGLDMRVVQVWFQNRRAKEKRLKKDAGRQRWGQYFRNMKRSRGGSKSDKDSVQEGQDSDAEVSFPDEPSLAEMGPANGLYGSLGEPTQALGRPSGALGNFSLEHGGLAGPEQYRELRPGSPYGVPPSPAAPQSLPGPQPLLSSLVYPDTSLGLVPSGAPGGPPPMRVLAGNGPSSDLSTGSSGGYPDFPASPASWLDEVDHAQF

SEQ ID NO: 774488 - protein, 135 aa, Homo sapiens
ARAGGPSPHSSSGQNGPRSPQPVLLCLSREASSSPLKTDWTQRKRRQTLLSACPRPFPRWVSTCPEGTGGSERGAQGPGLPSQLVPRTQKQRGVPINLCPTQSPLMTFRLKSQDTAISLRCLMKQLAHQPVQAPA

SEQ ID NO: 774489 - protein, 315 aa, Homo sapiens
MTTEIGWWKLTFLRKKKSTPKHKKICWARAPGAPGEVSNTPMPVGRAGAHGSARYNMGHKRGPKGTPGGRAHKGGGVLSPNIKKARRGGPTGAVRDTTSQRGSHEGGQKRGGTTHQGGAQGSTEIKKITPGRARGGCDHTRKAQMKEARTSRATESGSSKQTANRMSDKRPRHTTNTHRQSNEKQYTSHRRCVRRRSQRAGPERDNSNTKKGDEQERKRQQTPEKDKEQRKQGAKNRNEEREQRRRKQAEEKREQKQQDEQAKMQDNTAAKSEAEGDREGKQERGQAERRDTGNDEREESTARCEKEKKAKDGEE

SEQ ID NO: 774490 - protein, 103 aa, Homo sapiens
MTTEIGWWKLTFLRKKKSTPKVLYEIPDTYAQTEGDAEPPRPDAGGPNSDFNTRLEKIVDKSTKGKHVKVSNSGRFKEKKKVRATLAENPNLFDDHEEGRSSK

SEQ ID NO: 774491 - protein, 103 aa, Homo sapiens; identical to SEQ ID NO: 774490

SEQ ID NO: 774492 - protein, 103 aa, Homo sapiens; identical to SEQ ID NO: 774490

SEQ ID NO: 774493 - protein, 103 aa, Homo sapiens; identical to SEQ ID NO: 774490

SEQ ID NO: 774494 - protein, 147 aa, Homo sapiens
AVWGGLPARRGRDARRSPGSGQRAARVRGGLSFFATRPGSAALRLEGTRRQSSALGGVRGPAASSADSDRAGESGRGAGASAGPWAPLWARILYATGFQGLRGLEPCQSPVLCAPLALGCVKRQERAAQMGSPDAFSPFSRSPRVAR

SEQ ID NO: 774495 - protein, 96 aa, Homo sapiens
SGSDGYSSCAGALGTHFWMPRPLPFASGTGDTRDVLRPSRPCSTSTTRSPVLSHMLPFLSQKHPSSRWKIEGLKSGKSQEQAIPGRYEENQEREGN

SEQ ID NO: 774496 - protein, 175 aa, Homo sapiens
MDTSPISSTNILTKPTGPRELFTVLAIKAAAITFWEQIASPVLRSPNTDKGLSIFTAAVHVEFCSPPRATSIAAPRLTGDHSGGCDSVERTRAILQEVLNPSLFSNNTILLHSQKTPKVVDTASKNASWGRWTKTLPRQAPRGRVVAGYNTEDNLVSKRAIARAIVLKTHKMQHV

SEQ ID NO: 774497 - protein, 74 aa, Homo sapiens
SAACSPGSRWRLSLHTSPQAEGAGSGLGQPIKGLPQCSGGLKGSSSAAKVGAQAEEAPRASEGSEDCQHAVTSQ

SEQ ID NO: 774498 - protein, 102 aa, Homo sapiens [sequence omitted]

SEQ ID NO: 774499 - protein, 117 aa, Homo sapiens
MIPVQCGRSSLQGHLQQEGREFRQFRYRSVWETWPCGGRNTVQGHGSACLCYHIICLFLVGPKDLCPKLSPETSAFLFKLQLSFLTKNHVNPPGLWFVFLPLSIISFPPRSLLRFNT

SEQ ID NO: 774500 - protein, 117 aa, Homo sapiens; identical to SEQ ID NO: 774499

SEQ ID NO: 774501 - protein, 781 aa, Homo sapiens
MATQGHLTFKDVAIEFSQEEWKCLEPVQKALYKDVMLENYRNLVFLGISPKCVIKELPPTENSNTGERFQTVALERHQSYDIENLYFREIQKHLHDLEFQWKDGETNDKEVPVPHENNLTGKRDQHSQGDVENNHIENQLTSNFESRLAELQKVQTEGRLYECNETEKTGNNGCLVSPHIREKTYVCNECGKAFKASSSLINHQRIHTTEKPYKCNECGKAFHRASLLTVHKVVHTRGKSYQCDVCGKIFRKNSYFVRHQRSHTGQKPYICNECGKSFSKSSHLAVHQRIHTGEKPYKCNLCGKSFSQRVHLRLHQTVHTGERPFKCNECGKTFKRSSNLTVHQVIHAGKKPYKCDVCGKAFRHRSNLVCHRRIHSGEKQYKCNECGKVFSKRSSLAVHRRIHTVEKPCKCNECGKVFSKRSSLAVHQRIHTGQKTYKCNKCGKVYSKHSHLAVHWRIHTGEKAYKCNECGKVFSIHSRLAAHQRIHTGEKPYKCNECGKVFSQHSRLAVHRRIHTGEKPYKCKECGKVFSDRSAFARHRRIHTGEKPYKCKECGKVFSQCSRLTVHLRIHSGEKPYKCNECGKVYSQYSHLVGHRRVHTGEKPYKCHECGKAFNQGSTLNRHQRIHTGEKPYKCNQCGNSFSQRVHLRLHQTVHTGDRPYKCNECGKTFKRSSNLTAHQIIHAGKKPYKCDECGKVFRHSSHLVSHQRIHTGEKRYKCIECGKAFGRLFSLSKHQRIHSGKKPYKCNECGKSFICRSGLTKHRIRHTGESLTTKLNVTRP

SEQ ID NO: 774502 - protein, 110 aa, Homo sapiens
RGSAEAGSKGSGPRSVESSMTTLMWTVGKKRNTPTHIHVRVCICVCNVCVCVYCWYTHKISQGGTPETDIMGTSGEEEPGVTGYRDEEKETEGSGCASTPREEKWVLCKF

SEQ ID NO: 774503 - protein, 420 aa, Homo sapiens
AAELPAQRVLHRSSQAHEAHGLPSASGPGGWTTDYEAALCGAHFLYKRVAVDPGAQTGVRRGGDACTLGLCTFAAAAFFFFFFVEKWKPGVERGELLIKKKKKKSVGVGWAPNYTSGLCKCWEGAGWCARTSNFFSIYAGLFSYNFFKKKGCGIEMWALVKIFSKISGGFRGAVGGGSILKQNGARKYVDVLTKGIKNNLFCPLYSIAETCGDRMSAPGGGNLRFWRPHRARRHPFYLAGGGTTTSPLLWLPQVIIRRRQFFYKPPSEKRKTSGRFPSFKRHQAGSCSHLRQRRASKNITLHFVSPFLKRNPLENIIQNKKKTFSADTARVEIDPPGAATKNREGAARGKNASTTKRGEQGPPPQGKHTTVFLCGAPPLKKRARRGKTHLHKHTSGREKQPAASRITGGVPPRGLTQPWG

SEQ ID NO: 774504 - protein, 113 aa, Homo sapiens
QQNSRLREFSTAPPRLTRLTGYPAPAAQEAGPQVRRGPRPASGNSALAWLCPPHSHRISVPTRPQSRLLPAARHGTLPQDSHLPVLKSRPASEPPAVPFSYAYTSLRIWPKEV

SEQ ID NO: 774505 - protein, 325 aa, Homo sapiens
AAGFPLACKQEHRVFLSGCENADENPRMLCHRGGQLIVPIIPLCPEHSCRGRRLQNLLSGPWPKQPMELHNLSSPSPSLSSSVLPPSFSPSPSSAPSAFTTVGGSSGGPCHPTSSSLVSAFLAPILALEFVLGLVGNSLALFIFCIHTRPWTSNTVFLVSLVAADFLLISNLPLRVDYYLLHETWRFGAAACKVNLFMLSTNRTASVVFLTAIALNRYLKVVQPHHVLSRASVGAAARVAGGLWVGILLLNGHLLLSTFSGPSCLSYRVGTKPSASLRWHQALYLLEFFLPLALILFAIVSIGLTIRNRGLGGQAGPQRAMRVLA

SEQ ID NO: 774506 - protein, 222 aa, Homo sapiens
TTSPFAPTMSSPKRSSKPSMSLAPSGSSMPTADPKPPASLKSTKSATPNRSLVPTKPATSRNSVMSPSSSKSTKSTSTKRAPSNRPSSRSRVRSKARTPSRVSTDTRTSKASKASDVRCHQRRGTHSRGRTPGRRGSRSSKRSPSRASTPGRIRTHGARPGMASRVRTPTSQQKGSRGKSYGRPRTSNRERSDSQPRNLSKKSYRPPGGSGIGRSSELAVTP

SEQ ID NO: 774507 - protein, 134 aa, Homo sapiens
PRRGGGRAEAAISALWEAKAGGCSLPSGPAGPSAPPAAASRAALAGAAAKTETAPLPAELHPPGGRAAAAAVGRGSGSASYLQLGLAGVSAATVPAPHCPAPQRSRANHHPRPPWPDGLPKPNFSRIVSTIRYK

SEQ ID NO: 774508 - protein, 108 aa, Homo sapiens
HVAQAGLEFLDLSDPLASASQKCWDYRCEPRCPALKPFLKLFNPVAHSGWAWRTGHGNPVSRQRPHQWVPTVQGALLGGWRALCQSHVAMSFSPLWAQHTPEEVTAPL

SEQ ID NO: 774509 - protein, 383 aa, Homo sapiens
RNNPCVLCTDKNLPESHASEKPAVALIGLHTSSFTSSLSLRYFTYGILFGCGCSFAFQPSLVILGHYFQRRLGLANGVVSAGSSIFSMSFPFLIRMLGDKIKLAQTFQVLSTFMFVLMLLSLTYRPLLPSSQDTPSKRGVRTLHQRFLAQLRKYFNMRVFRQRTYRIWAFGIAAAALGYFVPYVHLMKYVEEEFSEIKETWVLLVCIGATSGLGRLVSGHISDSIPGLKKIYLQVLSFLLLGLMSMMIPLCRDFGGLIVVCLFLGLCDGFFITIMAPIAFELVGPMQASQAIGYLLGMMALPMIAGPPIAGLLRNCFGDYHVAFYFAGVPPIIGAVILFFVPLMHQRMFKKEQRDSSKDKMLAPDPDPNGELLPGSPNPEEPI

SEQ ID NO: 774510 - protein, 613 aa, Homo sapiens
MGRGGGGLDVGGGGEGSRDRLSRDGLASWGAEPGGGGSGSGSSSPPSSSSCSSRNKYQPQSGSSGPSSHSPPAAMALQSQASEEAKGPWQEADQEQQEPVGSPEPESEPEPEPEPEPVPVPPPEPQPEPQPLPDPAPLPELEFESERVHEPEPTPTVETRGTARGFQPPEGGFGWVVVFAATWCNGSIFGIHNSVGILYSMLLEEEKEKNRQVEFQAAWVGALAMGMIFFCSPIVSIFTDRLGCRITATAGAAVAFIGLHTSSFTSSLSLRYFTYGILFGCGCSFAFQPSLVILGHYFQRRLGLANGVVSAGSSIFSMSFPFLIRMLGDKIKLAQTFQVLSTFMFVLMLLSLTYRPLLPSSQDTPSKRGVRTLHQRFLAQLRKYFNMRVFRQRTYRIWAFGIAAAALGYFVPYVHLMKYVEEEFSEIKETWVLLVCIGATSGLGRLVSGHISDSIPGLKKIYLQVLSFLLLGLMSMMIPLCRDFGGLIVVCLFLGLCDGFFITIMAPIAFELVGPMQASQAIGYLLGMMALPMIAGPPIAGLLRNCFGDYHVAFYFAGVPPIIGAVILFFVPLMHQRMFKKEQRDSSKDKMLAPDPDPNGELLPGSPNPEEPI

SEQ ID NO: 774511 - protein, 613 aa, Homo sapiens; identical to SEQ ID NO: 774510

SEQ ID NO: 774512 - protein, 197 aa, Homo sapiens [sequence omitted]

SEQ ID NO: 774513 - protein, 613 aa, Homo sapiens; identical to SEQ ID NO: 774510

SEQ ID NO: 774514 - protein, 113 aa, Homo sapiens
MFKSLTKVNKVKPIGENNENEQSSRRNEEGSHPSNQSQQTTAQEENKGEEKSLKTKSTPVTSEEPHTNIQDKLSKKNSSGDLTTNPDPQNAAEPTGTVPEQKEMDPGKEGPNS

SEQ ID NO: 774515 - protein, 809 aa, Homo sapiens
MFKSLTKVNKVKPIGENNENEQSSRRNEEGSHPSNQSQQTTAQEENKGEEKSLKTKSTPVTSEEPHTNIQDKLSKKNSSGDLTTNPDPQNAAEPTGTVPEQKEMDPGKEGPNSPQNKPPAAPVINEYADAQLHNLVKRMRQRTALYKKKLVEGDLSSPEASPQTAKPTAVPPVKESDDKPTEHYYRLLWFKVKKMPLTEYLKRIKLPNSIDSYTDRLYLLWLLLVTLAYNWNCCFIPLRLVFPYQTADNIHYWLIADIICDIIYLYDMLFIQPRLQFVRGGDIIVDSNELRKHYRTSTKFQLDVASIIPFDICYLFFGFNPMFRANRMLKYTSFFEFNHHLESIMDKAYIYRVIRTTGYLLFILHINACVYYWASNYEGIGTTRWVYDGEGNEYLRCYYWAVRTLITIGGLPEPQTLFEIVFQLLNFFSGVFVFSSLIGQMRDVIGAATANQNYFRACMDDTIAYMNNYSIPKLVQKRVRTWYEYTWDSQRMLDESDLLKTLPTTVQLALAIDVNFSIISKVDLFKGCDTQMIYDMLLRLKSVLYLPGDFVCKKGEIGKEMYIIKHGEVQVLGGPDGTKVLVTLKAGSVFGEISLLAAGGGNRRTANVVAHGFANLLTLDKKTLQEILVHYPDSERILMKKARVLLKQKAKTAEATPPRKDLALLFPPKEETPKLFKTLLGGTGKASLARLLKLKREQAAQKKENSEGGEEEGKENEDKQKENEDKQKENEDKGKENEDKDKGREPEEKPLDRPECTASPIAVEEEPHSVRRTVLPRGTSRQSLIISMAPSAEGGEEVLTIEVKEKAKQ

SEQ ID NO: 774516 - protein, 720 aa, Homo sapiens
MFKSLTKVNKVKPIGENNENEQSSRRNEEGSHPSNQSQQTTAQEENKGEEKSLKTKSTPVTSEEPHTNIQDKLSKKNSSGDLTTNPDPQNAAEPTGTVPEQKEMDPGKEGPNSPQNKPPAAPVINEYADAQLHNLVKRMRQRTALYKKKLVEGDLSSPEASPQTAKPTAVPPVKESDDKPTEHYYRLLWFKVKKMPLTEYLKRIKLPNSIDSYTDRLYLLWLLLVTLAYNWNCCFIPLRLVFPYQTADNIHYWLIADIICDIIYLYDMLFIQPRLQFVRGGDIIVDSNELRKHYRTSTKFQLDVASIIPFDICYLFFGFNPMFRANRMLKYTSFFEFNHHLESIMDKAYIYRVIRTTGYLLFILHINACVYYWASNYEGIGTTRWVYDGEGNEYLRCYYWAVRTLITIGGLPEPQTLFEIVFQLLNFFSGVFVFSSLIGQMRDVIGAATANQNYFRACMDDTIAYMNNYSIPKLVQKRVRTWYEYTWDSQRMLDESDLLKTLPTTVQLALAIDVNFSIISKVDLFKGCDTQMIYDMLLRLKSVLYLPGDFVCKKGEIGKEMYIIKHGEVQVLGGPDGTKVLVTLKAGSVFGEISLLAAGGGNRRTANVVAHGFANLLTLDKKTLQEILVHYPDSERILMKKARVLLKQKAKTAEATPPRKDLALLFPPKEETPKLFKTLLGGTGKASLARLLKLKREQAAQGQFLPVSFTAGIFLGHLRL

SEQ ID NO: 774517 - protein, 113 aa, Homo sapiens; identical to SEQ ID NO: 774514

SEQ ID NO: 774518 - protein, 118 aa, Homo sapiens
MSCMLSVPKGTRTTFHPGRKCSTAVSPATTSEDLRICTAHPRETGALQPPDVKVTRLLSGLVFLACVFILHMPVISVRFSFFPVKSCDDFLGQLPNGHVLFPLNLQLGAKVDFVCDEG

SEQ ID NO: 774519 - protein, 109 aa, Homo sapiens
QHRLLSPALTAETLQPQLQPLRRGLRGRNDSSKPAADPSPACTPPAVVHCRWSSALSSSHPHGLLTAQLSASLPSLLYRWSSQQPTYRFGGTREGLTYSKHMSWWFVVQ

SEQ ID NO: 774520 - protein, 81 aa, Homo sapiens
SPQRWGELCRIGLEVEVLEINSQVEGTGEALGQSSGNPHCEGGKGNSGPVLRGPQSERKEDTRAIFAEKHQPARGGLDPGD

SEQ ID NO: 774521 - protein, 79 aa, Homo sapiens
LERLQEGEWTEGRQWLKWKRSNEAMSSRIGQPAEWLEGRGQSLGGEEVKTQRSQHLKVGMATNDGMMTGLCWEQQASRS

SEQ ID NO: 774522 - protein, 124 aa, Homo sapiens
CSPRSFSEVHVNIALPKRAHHLVSRVSQGLGNSLTGALGLPGIGRGPCQAQLCRIGHSLTDSVESSFLSRMQASHSQFTKDLKVGHVCDHCHENIEQQILGQEPNLLLQRCSCGEICFCLFNKH

SEQ ID NO: 774523 - protein, 70 aa, Homo sapiens
IAAPFPDLRLFSYFLFQADFETVKYIKDKFWGVPLAHFPYSVNQELFSAPPDLTYSYFIKKKLEAGNTAK

SEQ ID NO: 774524 - protein, 145 aa, Homo sapiens
AIRTHLCACVCVCHQDACMCVSACHQDTCVCMCMCMPSGRVCTCVPSGRMGVGMCVRAIRTRACVCMRVHAIRFEEHWPLSSLGLPVQQPCPNASPQIATGSSALEPTLCKDAAPLPLRVALHLAGTLIILGRLGIHSESRLDFL

SEQ ID NO: 774525 - protein, 111 aa, Homo sapiens
MGAMAKPDCIITCDSKNLTIKTESTLKTTQFSGTLGEKFEENTADGRRTQTVCNFTDGALVQHQEWDGKESTITRKLKDGKLVVERVMNHVACTRIYEKHNKDSIITLDRS

SEQ ID NO: 774526 - protein, 41 aa, Homo sapiens
MSGEAGQTQLRRLCQLWVVLSEPYPHISCKGTGNKGLGTPG

SEQ ID NO: 774527 - protein, 41 aa, Homo sapiens
QNMTSFPFQLLEVAQEMELLCQCLPDPVSEQPAWPLFMSLG

SEQ ID NO: 774528 - protein, 70 aa, Homo sapiens
WRPTQTLRVYGAPLACLEPWQPPPDVPAPGSMEHFLEEVGLSQPFLDGHGQALDGYLGMRVPRAETWKLK

SEQ ID NO: 774529 - protein, 86 aa, Homo sapiens
EVTRSGQVIGAGRTEVESQPPPKLGSKLLRPQTQTQCRFRGGLPWRSSRGPDEGPCRATGIRESRLTTCACAPRWRERVGSKVAKR

SEQ ID NO: 774530 - protein, 84 aa, Homo sapiens
QEMRLELMLPMKGAQPKSHHQPPGPCSSKEQKLTHWSCTWHCLSLLSKELGWVTPPPLPSTQEELLINYLLGWQLARYHGFQAS

SEQ ID NO: 774531 - protein, 69 aa, Homo sapiens
RRWSTFPRLREYPVHTRHDHHPWGETETPRHRMTMPRFQDLFYNCVGNLAWGLSSCWNSLRVYVDRAMW

SEQ ID NO: 774532 - protein, 104 aa, Homo sapiens
MNVRNLVAFLYTNNTQAESKINNAVTFTTQTHTHTHTHTKPRNTSNQGDERSLQGELQKMLKEITDDNPCHGLEDSMSLKWHTAQSTLQIHWYFYQITNIIFQG

SEQ ID NO: 774533 - protein, 172 aa, Homo sapiens
MRGNSLVAIVRPWRTDGTNSQASARAEIKMFFETNENKDTTYQNLWDTFKAVCRGKFIALNAHKRKQERSKIDTLTSQLKELEKQEQTHSKPSRRQEITKIRAELKEIETQKTLQKINESRSCFFERINKIDRPLARLIKKKREKNQIDAIKNDKGDITTDPTEIQTTIREY

SEQ ID NO: 774534 - protein, 38 aa, Homo sapiens
MAMTSTKYTARKHLVNKARLHSPRSLKPRFYTTQVFVS

SEQ ID NO: 774535 - protein, 222 aa, Homo sapiens
SGVKERRAGLKQSPRTGLEVPGSRVGGGGAALHRRGGAGTPAAVPPPSWTSCGTSARAWPPERCLILEGTIPQSEAAGGVTVNTIGAENKQRRSRSWSSSSDRTRRRRREDSYHVRRRCSRTFSRSSSQHSSRKAKSVEDDTEGHLIYHVGDWLQERYEIVSTLGKGTFGRVVQCVDHRRRGARVALKIIKNVEKYKEAARLEIKVLEKINEKDPGKNLCVQ

SEQ ID NO: 774536 - protein, 177 aa, Homo sapiens
SKDPQVTAFRGGASALLSALGQEEQCSVALGEGQEVALSMKVEMSSGDLDLRLGFDLSDGEQEFLDRRKQVVSKALQQVLGLSEALDSGQVPVVAVLGSGGGTRAMSSLYGSLAGLQELGLLDTVTYLSGVSGSTWCISTLYRDPAWSQVALQGPIERAQVHVCSSKMGALSTERLQ

SEQ ID NO: 774537 - protein, 42 aa, Homo sapiens
MPYSWAGAQVGPTHLQGKLAPLTTLLPAHPHSRPREGGMTVI

SEQ ID NO: 774538 - protein, 105 aa, Homo sapiens [sequence omitted]

SEQ ID NO: 774539 - protein, 670 aa, Homo sapiens
MAEVVAEVAEMPTQMSPGAVEMSTPMSAEMMEMSTEVTEMTPGEALASSLFFQHHQFMCSECGSLYNTLEEVLSHQEQHMLAVSEEEALTTQNVGLEPELVPGAEGPFQCGECSQLILSPGELLAHQDAHLRESANQIQYQCWDCQELFPSPELWVAHRKAQHLSATVAEPPVPPPLPPPTPLPPPSPPSEVKMEPYECPECSTLCATPEEFLEHQGTHFDSLEKEERNGLEEEEEDDEEDEEDDEEMEDEEAMAEVGDDAVGGDESTAGWAQGCGDCPQHQPSAGARRQHRRTAHSPASATHPFHCSQCQRSFSSANRLQAHGRAHVGGTHECTTCSKVFKKAASLEQHLRLHRGEARYLCVDCGRGFGTELTLVAHRRAHTANPLHRCRCGKTFSNMTKFLYHRRTHAGKSGAPPTGATAPPAPAEPTPPPPPPAPPAQLPCPQCSKSFASASRLSRHRRAVHGPPERRHRCGVCGKGFKKLIHVRNHLRTHTGERPFQCHSCGKTFASLANLSRHQLTHTGARPYQCLDCGKRFTQSSNLQQHRRLHLRPVAFARAPRLPITGLYNKSPYYCGTCGRWFRAMAGLRLHQRVHARARTLTLQPPRSPSPAPPPPPEPQQTIMCTELGETIAIIETSQPLALEDTLQLCQAALGASEAGGLLQLDTAFV

SEQ ID NO: 774540 - protein, 318 aa, Homo sapiens
ALLSSNQTASFGSCSLSLPCSARERTPEGGGWPGGRLSEPLPAMLLLWVSVVAALALAVLAPGAGEQRRRAAKAPNVVLVVSDSFDGRLTFHPGSQVVKLPFINFMKTRGTSFLNAYTNSPICCPSRAAMWSGLFTHLTESWNNFKGLDPNYTTWMDVMERHGYRTQKFGKLDYTSGHHSISNRVEAWTRDVAFLLRQEGRPMVNLIRNRTKVRVMERDWQNTDKAVNWLRKEAINYTEPFVIYLGLNLPHPYPSPSSGENFGSSTFHTSLYWLEKVSHDAIKIPKWSPLSEMHPVDYYSSYTKNCTGRFTKKEIKNI

SEQ ID NO: 774541 - protein, 89 aa, Homo sapiens
ALLSSNQTASFGSCSLSLPCSARERTPEGGGWPGGRLSEPLPAMLLLWVSVVAALALAVLAPGAGEQRRRAAKAPNVVLVVSDSFIPDD

SEQ ID NO: 774542 - protein, 68 aa, Homo sapiens
CAEARGVGAMTPSRLPWLLSWVSATAWRAARIRAPGPGSSRKGFVAVYSLSFKNGKSAEVSQRQISIT

SEQ ID NO: 774543 - protein, 117 aa, Homo sapiens
CAEARGVGAMTPSRLPWLLSWVSATAWRAARSPLLCHSLRKTSSSQGGKSELVKQSLKKPKLPEGRFDAPEDSHLEKEPLEKFPDDVNPVTKEKGGPRGPEPTRYGDWERKGRCIDF

SEQ ID NO: 774544 - protein, 117 aa, Homo sapiens; identical to SEQ ID NO: 774543

SEQ ID NO: 774545 - protein, 117 aa, Homo sapiens; identical to SEQ ID NO: 774543

SEQ ID NO: 774546 - protein, 67 aa, Homo sapiens
MLFDSISKMVAGATSGHREWMRQLTSLQTESEQGTGGEGCLSSSWEEIKKNIKKLEPPGNAQAKAQT

SEQ ID NO: 774547 - protein, 477 aa, Homo sapiens
MNFLRRRLSDSSFIANLPNGYMTDLQRPEPQQPPPPPPPGPGAASASAAPPTASPGPERKPPPASAPAAQPAPTPSVGSSFFSSLSQAVKQTAASAGLVDAPAPAPAAARKAKVLLVVDEPHADWAKCFRGKKVLGDYDIKVEQAEFSELNLVAHADGTYAVDMQVLRNGTKVVRSFRPDFVLIRQHAFGMAENEDFRHLIIGMQYAGLPSINSLESIYNFCDKPWVFAQLVAIYKTLGGEKFPLIEQTYYPNHKEMLTLPTFPVVVKIGHAHSGMGKVKVENHYDFQDIASVVALTQTYATAEPFIDSKYDIRVQKIGNNYKAYMRTSISGNWKTNTGSAMLEQIAMSDRYKLWVDTCSEMFGGLDICAVKAVHGKDGKDYIFEVMDCSMPLIGEHQVEDRQLITELVISKMNQLLSRTPALSPQRPLTTQQPQSGTLKDPDSSKTPPQRPPPQGCLQYILDCNGIAVGPKQVQAS

SEQ ID NO: 774548 - protein, 582 aa, Homo sapiens
MMNFLRRRLSDSSFIANLPNGYMTDLQRPEPQQPPPPPPPGPGAASASAAPPTASPGPERKPPPASAPAAQPAPTPSVGSSFFSSLSQAVKQTAASAGLVDAPAPAPAAARKAKVLLVVDEPHADWAKCFRGKKVLGDYDIKVEQAEFSELNLVAHADGTYAVDMQVLRNGTKVVRSFRPDFVLIRQHAFGMAENEDFRHLIIGMQYAGLPSINSLESIYNFCDKPWVFAQLVAIYKTLGGEKFPLIEQTYYPNHKEMLTLPTFPVVVKIGHAHSGMGKVKVENHYDFQDIASVVALTQTYATAEPFIDSKYDIRVQKIGNNYKAYMRTSISGNWKTNTGSAMLEQIAMSDRYKLWVDTCSEMFGGLDICAVKAVHGKDGKDYIFEVMDCSMPLIGEHQVEDRQLITELVISKMNQLLSRTPALSPQRPLTTQQPQSGTLKDPDSSKTPPQRPPPQGGPGQPQGMQPPGKVLPPRRLPPGPSLPPSSSSSSSSSSSAPQRPGGPTTHGDAPSSSSSLAEAQPPLAAPPQKPQPHPQLNKSQSLTNAFSFSESSFFRSSANEDEAKAETIRSLRKSFASLFSD

SEQ ID NO: 774549 - protein, 113 aa, Homo sapiens
SESLLAKPPPQPPQSPQISPSSSSSSSAPQRPGGPTTHGDAPSSSSSLAEAQPPLAAPPQKPQPHPQLNKSQSLTNAFSFSESSFFRSSANEDEAKAETIRSLRKSFASLFSD

SEQ ID NO: 774550 - protein, 101 aa, Homo sapiens
MVFSIFSYLTITTINFRTFLSPQKGTLYPLAITSNPTSSSPKELLMYFMSLRICLFWSAVAGSRFTAGSGFRGHAILLPNPPSRWDYRRPPIRPANFLILR

SEQ ID NO: 774551 - protein, 252 aa, Homo sapiens
DPKGLLLSASKQDMIRKRIKVCELLLHECELQTQKLGRKIEMALMVFDMEGLSLKHLWKPAVEVYQQFFSILEANYPETLKNLIVIRAPKLFPVAFNLVKSFMSEETRRKIVILGDNWKQELTKFISPDQLPVEFGGTMTDPDGNPKCLTKINYGGEVPKSYYLCEQVRLQYEHTRSVGRGSSLQVENEILFPGCVLRWQFASDGGDIGFGVFLKTKMGEQQSAREMTEVLPSQRYNAHMVPEDGSLTCLQA

SEQ ID NO: 774552 - protein, 172 aa, Homo sapiens
MPRASCCHCLCGPESWTCPSDSGVAAWAGSVTLGCYTFWELDRSGCLGGLWHPGMLYILGTGQEWLLGWALAPWDVIHSGNCNQPLEKSELQEVTLGWDLGTWPGQHGDTRLQQELWSVLGSLGAGLRPWAGFLQAEVLGKWGSQASCRLPHYVASDSSSLMKAIWFITLKL

SEQ ID NO: 774553 - protein, 172 aa, Homo sapiens; identical to SEQ ID NO: 774552

SEQ ID NO: 774554 - protein, 172 aa, Homo sapiens; identical to SEQ ID NO: 774552

SEQ ID NO: 774555 - protein, 172 aa, Homo sapiens; identical to SEQ ID NO: 774552

SEQ ID NO: 774556 - protein, 172 aa, Homo sapiens; identical to SEQ ID NO: 774552

SEQ ID NO: 774557 - protein, 111 aa, Homo sapiens
PCYVAQAAEQHNLSSLQPPPPGFKQFSCLSLPSSWDYRCPPPHPANFFVFLVETGFHHVGQADFKLQTSSDPAPQASQSARITGVSQHARLPFAFDIVFISELQTIQAYQV

SEQ ID NO: 774558 - protein, 50 aa, Homo sapiens
QAKGTVVGMERGTRSLAAVGNPMKRGPGHMWLGLRCQEPRTRFHDSLASI

SEQ ID NO: 774559 - protein, 39 aa, Homo sapiens
RAPLTEETRWRLKAIRSGAPAIRIEPSPSNRFRRPGPSC

SEQ ID NO: 774560 - protein, 32 aa, Homo sapiens
TFATGSQPVGPESAGKKRLGARELGSPVPRPG

SEQ ID NO: 774561 - protein, 79 aa, Homo sapiens
IRSRAGTPELADSSRDMCVSAGCAISFRPPGTQAARGQTSQSSGITGLSHCTWPKHTFLILLSFHQHSLFLFTPYSKSF

SEQ ID NO: 774562 - protein, 125 aa, Homo sapiens
MVKLSIVLTPQFLSHDQSQLTKELQQHVKSVTCPCEYLRKVINSLAVYRHRETDFGVGVRDHPGQHGKTPSPQKLDNLIIIIIGFLRRYTFNILFCTSCLCVSILTFCRGILVITNKNKLYKTKK

SEQ ID NO: 774563 - protein, 86 aa, Homo sapiens
VTQLVSSNIAGLKSKVPGHASMRDRLQGRLILALGSLSWAARITSIVRDPKLCSHLPFPVSAWAMITVTLATLHGHYNTLCHSLLV

SEQ ID NO: 774564 - protein, 107 aa, Homo sapiens
MRLRFWLLIWLLLGFISHQPTPVINSLAVYRHRETDFGVGVRDHPGQHGKTPSPQKLDNLIIIIIGFLRRYTFNILFCTSCLCVSILTFCRGILVITNKNKLYKTKK

SEQ ID NO: 774565 - protein, 155 aa, Homo sapiens
MRLRFWLLIWLLLGFISHQPTPVINSLAVYRHRETDFGVGVRDHPGQHGKTPSPQKLDNLIIIIIGFLRRYTFNILFCTSCLCVSFLKTIFWSRNGHDGSMDVQQRAWRSNRSRQKGLRSICMHTKKRVSSFRGNKIGLKDVITLRRHVETKVRP

SEQ ID NO: 774566 - protein, 100 aa, Homo sapiens
HTKKYKKILDRPPIQVINSLAVYRHRETDFGVGVRDHPGQHGKTPSPQKLDNLIIIIIGFLRRYTFNILFCTSCLCVSILTFCRGILVITNKNKLYKTKK

SEQ ID NO: 774567 - protein, 107 aa, Homo sapiens; identical to SEQ ID NO: 774564

SEQ ID NO: 774568 - protein, 90 aa, Homo sapiens
RCEWFRAEKGGGGEGGLRDFATLLPDSVSGFAVSQGFYKSWFWTVYYGDVESRWGQQQSHQRSLLEKMKLQPKIRNLNRKINTRKINLIN

SEQ ID NO: 774569 - protein, 36 aa, Homo sapiens
SPQKETLPPQQSVLVSPSVLERFSLHGGPRVPRFPP

SEQ ID NO: 774570 - protein, 345 aa, Homo sapiens
MKGELLLFSSVIVLLQVVCSCPDKCYCQSSTNFVDCSQQGLAEIPSHLPPQTRTLHLQDNQIHHLPAFAFRSVPWLMTLNLSNNSLSNLAPGAFHGLQHLQVLNLTQNSLLSLESRLFHSLPQLRELDLSSNNISHLPTSLGETWENLTILAVQQNQLQQLDRALLESMPSVRLLLLKDNLWKCNCHLLGLKLWLEKFVYKGGLTDGIICESPDTWKGKDLLRIPHELYQPCPLPAPDPVSSQAQWPGSAHGVVLRPPENHNAGERELLECELKPKPRPANLRHAIATVIITGVVCGIVCLMMLAAAIYGCTYAAITAQYHGGPLAQTNDPGKVEEKERFDSSPA

SEQ ID NO: 774571 - protein, 206 aa, Homo sapiens
MKGELLLFSSVIVLLQVVCSCPDKCYCQSSTNFVDCSQQGLAEIPSHLPPQTRTLHLQDNQIHHLPAFAFRSVPWLMTLNLSNNSLSNLAPGAFHGLQHLQVLNLTQNSLLSLESRLFHSLPQLRELDLSSNNISHLPTSLGETWENLTILAVQQNQLQQLDRALLESMPSVRLLLLKDNLWKCNCHLLGLKLWLEKFVYKGKGPP

SEQ ID NO: 774572 - protein, 269 aa, Homo sapiens
MTLNLSNNSLSNLAPGAFHGLQHLQVLNLTQNSLLSLESRLFHSLPQLRELDLSSNNISHLPTSLGETWENLTILAVQQNQLQQLDRALLESMPSVRLLLLKDNLWKCNCHLLGLKLWLEKFVYKGGLTDGIICESPDTWKGKDLLRIPHELYQPCPLPAPDPVSSQAQWPGSAHGVVLRPPENHNAGERELLECELKPKPRPANLRHAIATVIITGVVCGIVCLMMLAAAIYGCTYAAITAQYHGGPLAQTNDPGKVEEKERFDSSPA

SEQ ID NO: 774573 - protein, 228 aa, Homo sapiens
MSEWMKKGPLEWQDYIYKEVRVTASEKNEYKGWVLTTDPVSAKVLLSPRLECSGEISALCNLHLAGSSDSPALASRVAGTTGICHHVWLILYFLWRRGFAMLPSIVLVNFLEDGSMSVTGIMGHAVQTVETMNEGDHRVREKLMHLFTSGDCKAYSPEDLEERKNSLKKWLEKNHIPITEQGDAPRTLCVAGVLTIDPPYGPENCSSSNEIILSRVQDLIEGHLTASQ

SEQ ID NO: 774574 - protein, 167 aa, Homo sapiens
MSEWMKKGPLEWQDYIYKEVRVTASEKNEYKGWVLTTDPVSANIVLVNFLEDGSMSVTGIMGHAVQTVETMNEGDHRVREKLMHLFTSGDCKAYSPEDLEERKNSLKKWLEKNHIPITEQGDAPRTLCVAGVLTIDPPYGPENCSSSNEIILSRVQDLIEGHLTASQ

SEQ ID NO: 774575 - protein, 68 aa, Homo sapiens
PGALTLELRAKALELERKLTELTQLYKSLQQKAEVKGQRGGEGFNWDLRNRGLLEGVKGACVDVAAGT

SEQ ID NO: 774576 - protein, 167 aa, Homo sapiens; identical to SEQ ID NO: 774574

SEQ ID NO: 774577 - protein, 167 aa, Homo sapiens; identical to SEQ ID NO: 774574

SEQ ID NO: 774578 - protein, 167 aa, Homo sapiens; identical to SEQ ID NO: 774574

SEQ ID NO: 774579 - protein, 127 aa, Homo sapiens
MSEWMKKGPLEWQDYIYKEVRVTASEKNEYKGWVLTTDPVSAKVLLSPRLECSGEISALCNLHLAGSSDSPALASRVAGTTGICHHVWLIFVFFVETGLRHVAQVGLKLLISKDLPTLASQSAGITG

SEQ ID NO: 774580 - protein, 69 aa, Homo sapiens
DAWPIKGKNKADSAFLVADWMHPLVLIYEENDHEGQMAVKQEELASGSEENAVPLPHGLRCPACSEKLL

SEQ ID NO: 774581 - protein, 81 aa, Homo sapiens
FGPETEILEYLSEWTDVLALVQLTNFSLVPVQWRTAYAGVCGFLWATFICFSQQSGDGTFKSAFTILYTKGTSATEGYPKK

SEQ ID NO: 774582 - protein, 106 aa, Homo sapiens
WRQSLTLLPKLVCSSAILAHCNIRLLGLSKSPASASRVAGIIGTRHHAWIIFVFLVEMGFHHVGQADLKLLTLSDPPASASQSAGITGVSRHAQPHASSRLGWCLY

SEQ ID NO: 774583 - protein, 73 aa, Homo sapiens
KGLDTRSWPQRAASGRRSSSASRTPHGHRRVFETDRCPPGSFHRHQKAREHTSQAPKSHSDLGSLQPLPPEFN

SEQ ID NO: 774584 - protein, 168 aa, Homo sapiens
LDNWLNKVNPHKVSPASSVDSNIPSSQGYKKEGREQGTGNSYTDTSGPKETSSATPGRDSKTIQKGSESGRGRQKSPAQSDSTTQRRTVGKKQPKKAEKAAAEEPRGGLKIESETPVDLASSMPSSRHKAATKGSRKPNIKKESKSSPRPTAEKKKYKSTSKSSQKSR

SEQ ID NO: 774585 - protein, 141 aa, Homo sapiens
SGARAPRPGGGRGAHATATVWSGLASAAALTARALLKRSLACAAAPQRCGWRRLLCSSLGSRGQGGQAHRGAHLRVVRYGTASVFGTPRLVASQIQHVPSGPAPRPGASHPATPSIQTLRQPLHLSPDIAVPGASSAGAGA

SEQ ID NO: 774586 - protein, 301 aa, Homo sapiens
MELEKDLALRVQEVAELRRRLESNKPAGDVDMSLSLLQEISSLQEKLEVTRTDHQREITSLKEHFGAREETHQKEIKALYTATEKLSKENESLKSKLEHANKENSDVIALWKSKLETAIASHQQAMEELKVSFSKGLGTETAEFAELKTQIEKMRLDYQHEIENLQNQQDSERAAHAKEMEALRAKLMKVIKEKENSLEAIRSKLDKAEDQHLVEMEDTLNKLQEAEIKVKELEVLQAKCNEQTKVIDNFTSQLKATEEKLLDLDALRKASSEGKSEMKKLRQQLEAAEKQIKHLEIEKNA

SEQ ID NO: 774587 - protein, 47 aa, Homo sapiens
KVEDLQFRVEEESITKGDLEVKPLQLSYSFYGYQYSEHGRNNAPIEM

SEQ ID NO: 774588 - protein, 67 aa, Homo sapiens
SALAIHRHLAYSSHPDILAFPSMSWNWKPKWTSCEQWWKLLTGRRWSFSTSLKRRKGDPRLFPGASV

SEQ ID NO: 774589 - protein, 387 aa, Homo sapiens
GTRYSSAPRLFIAPRHSCLPQHVLELEAKMDQLRTMVEAADREKVELLNQLEEEKRKVEDLQFRVEEESITKGDLEVATVSEKSRIMELEKDLALRVQEVAELRRRLESNKPAGDVDMSLSLLQEISSLQEKLEVTRTDHQREITSLKEHFGAREETHQKEIKALYTATEKLSKENESLKSKLEHANKENSDVIALWKSKLETAIASHQQAMEELKVSFSKGLGTETAEFAELKTQIEKMRLDYQHEIENLQNQQDSERAAHAKEMEALRAKLMKVIKEKENSLEAIRSKLDKAEDQHLVEMEDTLNKLQEAEIKVKELEVLQAKCNEQTKVIDNFTSQLKATEEKLLDLDALRKASSEGKSEMKKLRQQLEAAEKQIKHLEIEKNA

SEQ ID NO: 774590 - protein, 159 aa, Homo sapiens
MASLSAPEISVFLRNPSVAYNLSHPTTPLGYKFNNFLYKGAHYFWLHFYNILQAGPLSIHSKRTLKILALTVYLLLKVCSDSPLPTGFLFFKLRLLSLTFEDLFSSACLPVQPRLPQSVKSMRTGPRCVSAHTPHMVDSELPLSELEKEAHESTPEISE

SEQ ID NO: 774591 - protein, 121 aa, Homo sapiens [sequence omitted]

SEQ ID NO: 774592 - protein, 148 aa, Homo sapiens [sequence omitted]

SEQ ID NO: 774593 - protein, 95 aa, Homo sapiens
RNFPGLQSLPCMSCKSSQNVTRDEEMGTAIRPGDGPPWSWAFKRMSAAEDVSREPFSDCLGKASLVVEDASLLGRGGSSSCRQEAAPTGSCSKSH

SEQ ID NO: 774594 - protein, 124 aa, Homo sapiens
IYKDVFCHFPHLKERVSCSPVLLPRRLGKRGPKLLGHVDGDSTPTGLHTVGLVGGVGLGQRGAISASWAVINGLSTCGIETWALQAGGPRHTPTHPQNRVDTPWSDGAGGDPCSKERTKSQSGG

SEQ ID NO: 774595 - protein, 251 aa, Homo sapiens
RVKTKMSDSEVWGMTLSFPGSACGEDGEWVHTSQICATITLKHTMATKGMRLKSTKEVFPLAHVCNDTNKMTLINPQGAKLNIYKRKVEQAIQSYEKRLNKIVWRALSQEEKEKLDANKPIQYLENKTVLNQALERLNWPISLKELSMLESEILAGKMYIQQAMELQEAAKKNYANKAPGEQQKLQGNPTKKTKSKRPDPLKGQKVIARCDENGFYFPGVVKKCVSRTQALVGFSYGDTKVVSTSFITPVG

SEQ ID NO: 774596 - protein, 88 aa, Homo sapiens
MNMSKQPVSNVRAIQANINIPMGAFRPGAGQPPRRKECTPEVEEGVPPTSDEEKKPIPGAKKLPGPAVNLSEIQNIKSELKYVPKAEQ

SEQ ID NO: 774597 - protein, 81 aa, Homo sapiens
AGLGEDGEEMGRRDLVSGGSNEGNGKEDWAMKTDSDEAMSGLLPVVGQMISMITELATMGSMINGLRIEAATPAQVHGHPA

SEQ ID NO: 774598 - protein, 67 aa, Homo sapiens
KDPAFGGIHETPSSPISGQPCGDDQNASPSKLSKEELIQSMDRVNREIAKVQHQILKLKKKQVNVFA

SEQ ID NO: 774599 - protein, 122 aa, Homo sapiens
GDIQTALWRGTHDMNLKPPASGQCQITKALVSRSFSPRSAGVCWRSTPDPVSLGIISGSCRTAKIAACSFLWKLHPKGAPAKMPAGALLYEVSFNPCWELSPRQEAWGSGTHLRGSLSLSRA

SEQ ID NO: 774600 - protein, 283 aa, Homo sapiens [sequence omitted]

SEQ ID NO: 774601 - protein, 220 aa, Homo sapiens
CLPVEHVNQLTTEPATGPFSETQSSLRDSEEEVDVVGDSSASKEQCKENTNNELDTSLESMPASGEPEPSPVLDCVSAQMMSLSEPQEHRYTLRTSPRRAAPTRGSPTKNSSPYRENGQFEENNLSPNETNATVSDNVSQSPTNPGEISQNEKGICCDSQNNGSEGVSKPPSEARLNIGHLPSAKESASQHITEEEDDDPDVYYFESDHVALKHNKEYVS

SEQ ID NO: 774602 - protein, 283 aa, Homo sapiens [sequence omitted]

SEQ ID NO: 774603 - protein, 251 aa, Homo sapiens
MLPLSDGPEGSSSRPQMIRGRLCDDTKPETFNQLWTVEEQKKLEQLLIKYPPEEVESRRWQKIADELGNRTAKQSSTSRRQHPLNKHLFKPSTFMTSHEPPVYMDEDDDRSCFHSHMNTAVEDASDDESIPIMYRNLPEYKELLQFKKLKKQKLQQMQAESGFVQHVGFKCDNCGIEPIQGVRWHCQDCPPEMSLDFCDSCSDCLHETDIHKEDHQLEPIYRSETFLDRDYCVSQGTSYNYLDPNYFPANR

SEQ ID NO: 774604 - protein, 283 aa, Homo sapiens [sequence omitted]

SEQ ID NO: 774605 - protein, 495 aa, Homo sapiens
MAEPTSDFETPIGWHASPELTPTLGPLSDTAPPRDRWMFWAMLPPPPPPLTSSLPAAGSKPSSESQPPMEAQSLPGAPPPFDAQILPGAQPPFDAQSPLDSQPQPSGQPWNFHASTSWYWRQSSDRFPRHQKSFNPAVKNSYYPRKYDAKFTDFSLPPSRKQKKKKRKEPVFHFFCDTCDRGFKNQEKYDKHMSEHTKCPELDCSFTAHEKIVQFHWRNMHAPGMKKIKLDTPEEIARWREERRKNYPTLANIERKKKLKLEKEKRGAVLTTTQYGKMKGMSRHSQMAKIRSPGKNHKWKNDNSRQRAVTGSGSHLCDLKLEGPPEANADPLGVLINSDSESDKEEKPQHSVIPKEVTPALCSLMSSYGSLSGSESEPEETPIKTEADVLAENQVLDSSAPKSPSQDVKATVRNFSEAKSENRKKSFEKTNPKRKKDYHNYQTLFEPRTHHPYLLEMLLAPDIRHERNVILQCVRYIIKKDFFGLDTNSAKSKDV

SEQ ID NO: 774606 - protein, 218 aa, Homo sapiens
MAEPTSDFETPIGWHASPELTPTLGPLSDTAPPRDRWMFWAMLPPPPPPLTSSLPAAGSKPSSESQPPMEAQSLPGAPPPFDAQILPGAQPPFDAQSPLDSQPQPSGQPWNFHASTSWYWRQSSDRFPRHQKSFNPAVKNSYYPRKYDAKFTDFSLPPSRKQKKKLKPEWVLCAELKAFHWRSPRIIEKPQGYLATMWVPPIGAVGHYTLGALGTDVY

SEQ ID NO: 774607 - protein, 495 aa, Homo sapiens; identical to SEQ ID NO: 774605

SEQ ID NO: 774608 - protein, 405 aa, Homo sapiens
MLATFQTALQAEAGTQTVLAEKPEKQLSVLDHIESLFGTFASIQSRDVKNSYYPRKYDAKFTDFSLPPSRKQKKKKRKEPVFHFFCDTCDRGFKNQEKYDKHMSEHTKCPELDCSFTAHEKIVQFHWRNMHAPGMKKIKLDTPEEIARWREERRKNYPTLANIERKKKLKLEKEKRGAVLTTTQYGKMKGMSRHSQMAKIRSPGKNHKWKNDNSRQRAVTGSGSHLCDLKLEGPPEANADPLGVLINSDSESDKEEKPQHSVIPKEVTPALCSLMSSYGSLSGSESEPEETPIKTEADVLAENQVLDSSAPKSPSQDVKATVRNFSEAKSENRKKSFEKTNPKRKKDYHNYQTLFEPRTHHPYLLEMLLAPDIRHERNVILQCVRYIIKKDFFGLDTNSAKSKDV

SEQ ID NO: 774609 - protein, 120 aa, Homo sapiens
GRRAARTISSVPAIAIVSDPWSQLCCCQPPSPVRLYPGLCSCGFEQIDERHRKKALAACVWVTTRGQHVRDQCRPRCLLEHTGSLLGKLQILSDCEVEESKSLHCFLLNDQPTKEFRMPK

SEQ ID NO: 774610 - protein, 247 aa, Homo sapiens
MSLPSRQTAIIVNPPPPEYINTKKNGRLTNQLQYLQKVVLKDLWKHSFSWPFQRPVDAVKLKLPDYYTIIKNPMDLNTIKKRLENKYYAKASECIEDFNTMFSNCYLYNKPGDDIVLMAQALEKLYSNFIRRIQTKIKDLLQQMEEGLKTADPHDCSAYTGWTGIALLYLQLYRVTCDQTYLLRSLDYVKRTLRNLNGRRVTFLCGGCWPPGCWSCDFITNSEVTVSPGMCHKTFAAPEIGCLPRIR

SEQ ID NO: 774611 - protein, 947 aa, Homo sapiens
MSLPSRQTAIIVNPPPPEYINTKKNGRLTNQLQYLQKVVLKDLWKHSFSWPFQRPVDAVKLKLPDYYTIIKNPMDLNTIKKRLENKYYAKASECIEDFNTMFSNCYLYNKPGDDIVLMAQALEKLFMQKLSQMPQEEQVVGVKERIKKGTQQNIAVSSAKEKSSPSATEKVFKQQEIPSVFPKTSISPLNVVQGASVNSSSQTAAQVTKGVKRKADTTTPATSAVKASSEFSPTFTEKSVALPPIKENMPKNVLPDSQQQYNVVKTVKVTEQLRHCSEILKEMLAKKHFSYAWPFYNPVDVNALGLHNYYDVVKNPMDLGTIKEKMDNQEYKDAYKFAADVRLMFMNCYKYNPPDHEVVTMARMLQDVFETHFSKIPIEPVESMPLCYIKTDITETTGRENTNEASSEGNSSDDSEDERVKRLAKLQEQLKAVHQQLQVLSQVPFRKLNKKKEKSKKEKKKEKVNNSNENPRKMCEQMRLKEKSKRNQPKKRKQQFIGLKSEDEDNAKPMNYDEKRQLSLNINKLPGDKLGRVVHIIQSREPSLSNSNPDEIEIDFETLKASTLRELEKYVSACLRKRPLKPPAKKIMMSKEELHSQKKQELEKRLLDVNNQLNSRKRQTKSDKTQPSKAVENVSRLSESSSSSSSSSESESSSSDLSSSDSSDSESEMFPKFTEVKPNDSPSKEHVKKMKNECILPEGRTGVTQIGYCVQDTTSANTTLVHQTTPSHVMPPNHHQLAFNYQELEHLQTVKNISPLQILPPSGDSEQLSNGITVMHPSGDSDTTMLESECQAPVQKDIKIKNADSWKSLGKPVKPSGVMKSSDELFNQFRKAAIEKEVKARTQELIRKHLEQNTKELKASQENQRDLGNGLTVESFSNKIQNKCSGEEQKEHQQSSEAQDKSKLWLLKDRDLARQKEQERRRREAMVGTIDMTLQSDIMTMFENNFD

SEQ ID NO: 774612 - protein, 947 aa, Homo sapiens; identical to SEQ ID NO: 774611

SEQ ID NO: 774613 - protein, 947 aa, Homo sapiens; identical to SEQ ID NO: 774611

SEQ ID NO: 774614 - protein, 446 aa, Homo sapiens
MSLPSRQTAIIVNPPPPEYINTKKNGRLTNQLQYLQKVVLKDLWKHSFSWPFQRPVDAVKLKLPDYYTIIKNPMDLNTIKKRLENKYYAKASECIEDFNTMFSNCYLYNKPGDDIVLMAQALEKLFMQKLSQMPQEEQVVGVKERIKKGTQQNIAVSSAKEKSSPSATEKVFKQQEIPSVFPKTSISPLNVVQGASVNSSSQTAAQVTKGVKRKADTTTPATSAVKASSEFSPTFTEKSVALPPIKENMPKNVLPDSQQQYNVVKTVKVTEQLRHCSEILKEMLAKKHFSYAWPFYNPVDVNALGLHNYYDVVKNPMDLGTIKEKMDNQEYKDAYKFAADVRLMFMNCYKYNPPDHEVVTMARMLQDVFETHFSKIPIEPVESMPLCYIKTDITETTGRENTNEASSEGNSSDDSEDERVKRLAKLQEQLKAVHQQLQVLSQVPFR

SEQ ID NO: 774615 - protein, 947 aa, Homo sapiens; identical to SEQ ID NO: 774611

SEQ ID NO: 774616 - protein, 989 aa, Homo sapiens
MSLPSRQTAIIVNPPPPEYINTKKNGRLTNQLQYLQKVVLKDLWKHSFSWPFQRPVDAVKLKLPDYYTIIKNPMDLNTIKKRLENKYYAKASECIEDFNTMFSNCYLYNKPGDDIVLMAQALEKLFMQKLSQMPQEEQVVGVKERIKKGTQQNIAVSSAKEKSSPSATEKVFKQQEIPSVFPKTSISPLNVVQGASVNSSSQTAAQVTKGVKRKADTTTPATSAVKASSEFSPTFTEKSVALPPIKENMPKNVLPDSQQQYNVVKTVKVTEQLRHCSEILKEMLAKKHFSYAWPFYNPVDVNALGLHNYYDVVKNPMDLGTIKVNVALKGRTSFSDYKSNSSLQRNLKIKKKMKEIKIIQVTLSGEKMDNQEYKDAYKFAADVRLMFMNCYKYNPPDHEVVTMARMLQDVFETHFSKIPIEPVESMPLCYIKTDITETTGRENTNEASSEGNSSDDSEDERVKRLAKLQEQLKAVHQQLQVLSQVPFRKLNKKKEKSKKEKKKEKVNNSNENPRKMCEQMRLKEKSKRNQPKKRKQQFIGLKSEDEDNAKPMNYDEKRQLSLNINKLPGDKLGRVVHIIQSREPSLSNSNPDEIEIDFETLKASTLRELEKYVSACLRKRPLKPPAKKIMMSKEELHSQKKQELEKRLLDVNNQLNSRKRQTKSDKTQPSKAVENVSRLSESSSSSSSSSESESSSSDLSSSDSSDSESEMFPKFTEVKPNDSPSKEHVKKMKNECILPEGRTGVTQIGYCVQDTTSANTTLVHQTTPSHVMPPNHHQLAFNYQELEHLQTVKNISPLQILPPSGDSEQLSNGITVMHPSGDSDTTMLESECQAPVQKDIKIKNADSWKSLGKPVKPSGVMKSSDELFNQFRKAAIEKEVKARTQELIRKHLEQNTKELKASQENQRDLGNGLTVESFSNKIQNKCSGEEQKEHQQSSEAQDKSKLWLLKDRDLARQKEQERRRREAMVGTIDMTLQSDIMTMFENNFD

SEQ ID NO: 774617 - protein, 538 aa, Homo sapiens
MLADKHAKEIEEESETTVEADLTDKQKHQLKHRELFLSRQYESLPATHIRGKCSVALLNETESVLSYLDKEDTFFYSLVYDPSLKTLLADKGEIRVGPRYQADIPEMLLEGESDEREQSKLEVKVWDPNSPLTDRQIDQFLVVARAVGTFARALDCSSSVRQPSLHMSAAAASRDITLFHAMDTLYRHSYDLSSAISVLVPLGGPVLCRDEMEEWSASEASLFEEALEKYGKDFNDIRQDFLPWKSLTSIIEYYYMWKTTDRYVQQKRLKAAEAESKLKQVYIPTYSKPNPNQISTSNGKPGAVNGAVGTTFQPQNPLLGRACESCYATQSHQWYSWGPPNMQCRLCAICWLYWKKYGGLKMPTQSEEEKLSPSPTTEDPRVRSHVSRQAMQGMPVRNTGSPKSAVKTRQAFFLHTTYFTKFARQVCKNTLRLRQAARRPFVAINYAAIRAEYADRHAELSGSPLKSKSTRKPLACIIGYLEIHPAKKPNVIRSTPSLQTPTTKRMLTTPNHTSLSILGKRNYSHHNGLDELTCCVSD

SEQ ID NO: 774618 - protein, 608 aa, Homo sapiens
DSIVTPTVSHLLWIWRSTCTGSVYYVYFENSSSNPYLIRRIEELNKTASGNVEAKVVCFYRRRDISNTLIMLADKHAKEIEEESETTVEADLTDKQKHQLKHRELFLSRQYESLPATHIRGKCSVALLNETESVLSYLDKEDTFFYSLVYDPSLKTLLADKGEIRVGPRYQADIPEMLLEGESDEREQSKLEVKVWDPNSPLTDRQIDQFLVVARAVGTFARALDCSSSVRQPSLHMSAAAASRDITLFHAMDTLYRHSYDLSSAISVLVPLGGPVLCRDEMEEWSASEASLFEEALEKYGKDFNDIRQDFLPWKSLTSIIEYYYMWKTTDRYVQQKRLKAAEAESKLKQVYIPTYSKPNPNQISTSNGKPGAVNGAVGTTFQPQNPLLGRACESCYATQSHQWYSWGPPNMQCRLCAICWLYWKKYGGLKMPTQSEEEKLSPSPTTEDPRVRSHVSRQAMQGMPVRNTGSPKSAVKTRQAFFLHTTYFTKFARQVCKNTLRLRQAARRPFVAINYAAIRAEYADRHAELSGSPLKSKSTRKPLACIIGYLEIHPAKKPNVIRSTPSLQTPTTKRMLTTPNHTSLSILGKRNYSHHNGLDELTCCVSD

SEQ ID NO: 774619 - protein, 538 aa, Homo sapiens; identical to SEQ ID NO: 774617

SEQ ID NO: 774620 - protein, 432 aa, Homo sapiens
MLLEGESDEREQSKLEVKVWDPNSPLTDRQIDQFLVVARAVGTFARALDCSSSVRQPSLHMSAAAASRDITLFHAMDTLYRHSYDLSSAISVLVPLGGPVLCRDEMEEWSASEASLFEEALEKYGKDFNDIRQDFLPWKSLTSIIEYYYMWKTTDRYVQQKRLKAAEAESKLKQVYIPTYSKPNPNQISTSNGKPGAVNGAVGTTFQPQNPLLGRACESCYATQSHQWYSWGPPNMQCRLCAICWLYWKKYGGLKMPTQSEEEKLSPSPTTEDPRVRSHVSRQAMQGMPVRNTGSPKSAVKTRQAFFLHTTYFTKFARQVCKNTLRLRQAARRPFVAINYAAIRAEYADRHAELSGSPLKSKSTRKPLACIIGYLEIHPAKKPNVIRSTPSLQTPTTKRMLTTPNHTSLSILGKRNYSHHNGLDELTCCVSD

SEQ ID NO: 774621 - protein, 529 aa, Homo sapiens
DSIVTPTVSHLLWIWRSTCTGSVYYVYFENSSSNPYLIRRIEELNKTASGNVEAKVVCFYRRRDISNTLIMLADKHAKEIEEESETTVEADLTDKQKHQLKHRELFLSRQYESLPATHIRGKCSVALLNETESVLSYLDKEDTFFYSLVYDPSLKTLLADKGEIRVGPRYQADIPEMLLEGESDEREQSKLEVKVWDPNSPLTDRQIDQFLVVARAVGTFARALDCSSSVRQPSLHMSAAAASRDITLFHAMDTLYRHSYDLSSAISVLVPLGGPVLCRDEMEEWSASEASLFEEALEKYGKDFNDIRQDFLPWKSLTSIIEYYYMWKTTDRYVQQKRLKAAEAESKLKQVYIPTYSKPNPNQISTSNGKPGAVNGAVGTTFQPQNPLLGRACESCYATQSHQWYSWGPPNMQCRLCAICWLYWKKYGGLKMPTQSEEEKLSPSPTTEDPRVRSHVSRQAMQGMPVRNTGSPKSAVKTRQAFFLHTTYFTKFARQVCKNTLRLRQAARRPFVAINYAAIRAECKMLLNS

SEQ ID NO: 774622 - protein, 532 aa, Homo sapiens
QVARLGGAGSDYVYFENSSSNPYLIRRIEELNKTASGNVEAKVVCFYRRRDISNTLIMLADKHAKEIEEESETTVEADLTDKQKHQLKHRELFLSRQYESLPATHIRGKCSVALLNETESVLSYLDKEDTFFYSLVYDPSLKTLLADKGEIRVGPRYQADIPEMLLEGESDEREQSKLEVKVWDPNSPLTDRQIDQFLVVARAVGTFARALDCSSSVRQPSLHMSAAAASRDITLLPWKSLTSIIEYYYMWKTTDRYVQQKRLKAAEAESKLKQVYIPTYSKPNPNQISTSNGKPGAVNGAVGTTFQPQNPLLGRACESCYATQSHQWYSWGPPNMQCRLCAICWLYWKKYGGLKMPTQSEEEKLSPSPTTEDPRVRSHVSRQAMQGMPVRNTGSPKSAVKTRQAFFLHTTYFTKFARQVCKNTLRLRQAARRPFVAINYAAIRAEYADRHAELSGSPLKSKSTRKPLACIIGYLEIHPAKKPNVIRSTPSLQTPTTKRMLTTPNHTSLSILGKRNYSHHNGLDELTCCVSD

SEQ ID NO: 774623 - protein, 355 aa, Homo sapiens
DSIVTPTVSHLLWIWRSTCTGSVYYVYFENSSSNPYLIRRIEELNKTASGNVEAKVVCFYRRRDISNTLIMLADKHAKEIEEESETTVEADLTDKQKHQLKHRELFLSRQYESLPATHIRGKCSVALLNETESVLSYLDKEDTFFYSLVYDPSLKTLLADKGEIRVGPRYQADIPEMLLEGESDEREQSKLEVKVWDPNSPLTDRQIDQFLVVARAVGTFARALDCSSSVRQPSLHMSAAAASRDITLFHAMDTLYRHSYDLSSAISVLVPLGGPVLCRDEMEEWSASEASLFEEALEKYGKDFNDIRQDFLPWKSLTSIIEYYYMWKTTDRYVQQKRLKAAEAESKLKQVYIPT

SEQ ID NO: 774624 - protein, 279 aa, Homo sapiens
QVARLGGAGSDYVYFENSSSNPYLIRRIEELNKTASGNVEAKVVCFYRRRDISNTLIMLADKHAKEIEEESETTVEADLTDKQKHQLKHRELFLSRQYESLPATHIRGKCSVALLNETESVLSYLDKEDTFFYSLVYDPSLKTLLADKGEIRVGPRYQADIPEMLLEGESDEREQSKLEVKVWDPNSPLTDRQIDQFLVVARAVGTFARALDCSSSVRQPSLHMSAAAASRDITLLPWKSLTSIIEYYYMWKTTDRYVQQKRLKAAEAESKLKQVYIPT

SEQ ID NO: 774625 - protein, 529 aa, Homo sapiens; identical to SEQ ID NO: 774621

SEQ ID NO: 774626 - protein, 608 aa, Homo sapiens; identical to SEQ ID NO: 774618

SEQ ID NO: 774627 - protein, 608 aa, Homo sapiens; identical to SEQ ID NO: 774618

SEQ ID NO: 774628 - protein, 608 aa, Homo sapiens; identical to SEQ ID NO: 774618

SEQ ID NO: 774629 - protein, 507 aa, Homo sapiens
DSIVTPTVSHLLWIWRSTCTGSVYYVYFENSSSNPYLIRRIEELNKTASGNVEAKVVCFYRRRDISNTLIMLADKHAKEIEEESETTVEADLTDKQKHQLKHRELFLSRQYESLPATHIRGKCSVALLNETESVLSYLDKEDTFFYSLVYDPSLKTLLADKGEIRVGPRYQADIPEMLLEGESDEREQSKLEVKVWDPNSPLTDRQIDQFLVVARAVGTFARALDCSSSVRQPSLHMSAAAASRDITLFHAMDTLYRHSYDLSSAISVLVPLGGPVLCRDEMEEWSASEASLFEEALEKYGKDFNDIRQDFLPWKSLTSIIEYYYMWKTTDRYVQQKRLKAAEAESKLKQVYIPTYSKPNPNQISTSNGKPGAVNGAVGTTFQPQNPLLGRACESCYATQSHQWYSWGPPNMQCRLCAICWLYWKKYGGLKMPTQSEEEKLSPSPTTEDPRVRSHVSRQAMQGMPVRNTGSPKSAVKTRQAFFLHTTYFTKFARQMQTDMLNYLEVH

SEQ ID NO: 774630 - protein, 450 aa, Homo sapiens
DSIVTPTVSHLLWIWRSTCTGSVYYVYFENSSSNPYLIRRIEELNKTASGNVEAKVVCFYRRRDISNTLIMLADKHAKEIEEESETTVEADLTDKQKHQLKHRELFLSRQYESLPATHIRGKCSVALLNETESVLSYLDKEDTFFYSLVYDPSLKTLLADKGEIRVGPRYQADIPEMLLEGESDEREQSKLEVKVWDPNSPLTDRQIDQFLVVARAVGTFARALDCSSSVRQPSLHMSAAAASRDITLFHAMDTLYRHSYDLSSAISVLVPLGGPVLCRDEMEEWSASEASLFEEALEKYGKDFNDIRQDFLPWKSLTSIIEYYYMWKTTDRYVQQKRLKAAEAESKLKQVYIPTYSKPNPNQISTSNGKPGAVNGAVGTTFQPQNPLLGRACESCYATQSHQWYSWGPPNMQCRLCAICWLYWKKYGGLKMPTQSEEEKLSPSPTTEVQ

SEQ ID NO: 774631 - protein, 368 aa, Homo sapiens
DSIVTPTVSHLLWIWRSTCTGSVYYVYFENSSSNPYLIRRIEELNKTASGNVEAKVVCFYRRRDISNTLIMLADKHAKEIEEESETTVEADLTDKQKHQLKHRELFLSRQYESLPATHIRGKCSVALLNETESVLSYLDKEDTFFYSLVYDPSLKTLLADKGEIRVGPRYQADIPEMLLEGESDEREQSKLEVKVWDPNSPLTDRQIDQFLVVARAVGTFARALDCSSSVRQPSLHMSAAAASRDITLFHAMDTLYRHSYDLSSAISVLVPLGGPVLCRDEMEEWSASEASLFEEALEKYGKDFNDIRQDFLPWKSLTSIIEYYYMWKTTDRYVQQKRLKAAEAESKLKQVYIPTYYTVSPVVFLGPT

SEQ ID NO: 774632 - protein, 365 aa, Homo sapiens
DSIVTPTVSHLLWIWRSTCTGSVYYVYFENSSSNPYLIRRIEELNKTASGNVEAKVVCFYRRRDISNTLIMLADKHAKEIEEESETTVEADLTDKQKHQLKHRELFLSRQYESLPATHIRGKCSVALLNETESVLSYLDKEDTFFYSLVYDPSLKTLLADKGEIRVGPRYQADIPEMLLEGESDEREQSKLEVKVWDPNSPLTDRQIDQFLVVARAVGTFARALDCSSSVRQPSLHMSAAAASRDITLFHAMDTLYRHSYDLSSAISVLVPLGGPVLCRDEMEEWSASEASLFEEALEKYGKDFNDIRQDFLPWKSLTSIIEYYYMWKTTDRYVQQKRLKAAEAESKLKQVYIPTYMRLTIIPLQ

SEQ ID NO: 774633 - protein, 432 aa, Homo sapiens; identical to SEQ ID NO: 774620

SEQ ID NO: 774634 - protein, 365 aa, Homo sapiens; identical to SEQ ID NO: 774632

SEQ ID NO: 774635 - protein, 322 aa, Homo sapiens
  misc_feature (26)..(26): Xaa can be any naturally occurring amino acid
FTSPLSLPPSPCPLPRLLLSVVRLTXTWQTLFSIIEYYYMWKTTDRYVQQKRLKAAEAESKLKQVYIPTYSKPNPNQISTSNGKPGAVNGAVGTTFQPQNPLLGRACESCYATQSHQWYSWGPPNMQCRLCAICWLYWKKYGGLKMPTQSEEEKLSPSPTTEDPRVRSHVSRQAMQGMPVRNTGSPKSAVKTRQAFFLHTTYFTKFARQVCKNTLRLRQAARRPFVAINYAAIRAEYADRHAELSGSPLKSKSTRKPLACIIGYLEIHPAKKPNVIRSTPSLQTPTTKRMLTTPNHTSLSILGKRNYSHHNGLDELTCCVSD

SEQ ID NO: 774636 - protein, 608 aa, Homo sapiens; identical to SEQ ID NO: 774618

SEQ ID NO: 774637 - protein, 608 aa, Homo sapiens; identical to SEQ ID NO: 774618

SEQ ID NO: 774638 - protein, 527 aa, Homo sapiens
DSIVTPTVSHLLWIWRSTCTGSVYYVYFENSSSNPYLIRRIEELNKTASGNVEAKVVCFYRRRDISNTLIMLADKHAKEIEEESETTVEADLTDKQKHQLKHRELFLSRQYESLPATHIRGKCSVALLNETESVLSYLDKEDTFFYSLVYDPSLKTLLADKGEIRVGPRYQADIPEMLLEGESDEREQSKLEVKVWDPNSPLTDRQIDQFLVVARAVGTFARALDCSSSVRQPSLHMSAAAASRDITLFHAMDTLYRHSYDLSSAISVLVPLGGPVLCRDEMEEWSASEASLFEEALEKYGKDFNDIRQDFLPWKSLTSIIEYYYMWKTTDRYVQQKRLKAAEAESKLKQVYIPTYSKPNPNQISTSNGKPGAVNGAVGTTFQPQNPLLGRACESCYATQSHQWYSWGPPNMQCRLCAICWLYWKKYGGLKMPTQSEEEKLSPSPTTEDPRVRSHVSRQAMQGMPVRNTGSPKSAVKTRQAFFLHTTYFTKFARQVCKNTLRLRQAARRPFVAINYAAIRAECSATM

SEQ ID NO: 774639 - protein, 215 aa, Homo sapiens
RPPTTTKFAAASTKLLTDMCNMKRLKAAEAESKLKQVYIPTYSKPNPNQISTSNGKPGAVNGAVGTTFQPQNPLLGRACESCYATQSHQWYSWGPPNMQCRLCAICWLYWKKYGGLKMPTQSEEEKLSPSPTTEDPRVRSHVSRQAMQGMPVRNTGSPKSAVKTRQAFFLHTTYFTKFARQVCKNTLRLRQAARRPFVAINYAAIRAECKMLLNS

SEQ ID NO: 774640 - protein, 215 aa, Homo sapiens; identical to SEQ ID NO: 774639

SEQ ID NO: 774641 - protein, 316 aa, Homo sapiens
DSIVTPTVSHLLWIWRSTCTGSVYYVYFENSSSNPYLIRRIEELNKTASGNVEAKVVCFYRRRDISNTLIMLADKHAKEIEEESETTVEADLTDKQKHQLKHRELFLSRQYESLPATHIRGKCSVALLNETESVLSYLDKEDTFFYSLVYDPSLKTLLADKGEIRVGPRYQADIPEMLLEGESDEREQSKLEVKVWDPNSPLTDRQIDQFLVVARAVGTFARALDCSSSVRQPSLHMSAAAASRDITLFHAMDTLYRHSYDLSSAISVLVPLGGPVLCRDEMEEWSASEASLFEEALEKYGKDFNDIRQDFVSRKL

SEQ ID NO: 774642 - protein, 262 aa, Homo sapiens
LAALHNMAEMKTSLFPYALQGPAGFKAPALGGLGAQLPLGTPHGISDILGRPVGAAGGGLLGGLPRLNGLASSAGVYFGPAAAVARGYPKPLAELPGRPPIFWPGVVQGAPWRDPRLAGPAPAGGVLDKDGKKKHSRPTFSGQQIFALEKTFEQTKYLAGPERARLAYSLGMTESQVKVWFQNRRTKWRKRHAAEMASAKKKQDSDAEKLKVGGSDAEDDDEYNRPLDPNSDDEKITRLLKKHKPSNLALVSPCGGGAGDAL

SEQ ID NO: 774643 - protein, 205 aa, Homo sapiens
LAALHNMAEMKTSLFPYALQGPAGFKAPALGGLGAQLPLGTPHGISDILGRPVGAAGGGLLGGLPRLNGLASSAGVYFGPAAAVARGYPKPLAELPGRPPIFWPGVVQGAPWRDPRLAGPAPAGGVLDKDGKKKHSRPTFSGQQIFALEKTFEQTKYLAGPERARLAYSLGMTESQVKAGSITARTSGASDTRGLLHLARTNRTQ

SEQ ID NO: 774644 - protein, 165 aa, Homo sapiens
LAALHNMAEMKTSLFPYALQGPAGFKAPALGGLGAQLPLGTPHGISDILGRPVGAAGGGLLGGLPRLNGLASSAGVYFWARGRCGARLPQWRKRHAAEMASAKKKQDSDAEKLKVGGSDAEDDDEYNRPLDPNSDDEKITRLLKKHKPSNLALVSPCGGGAGDAL

SEQ ID NO: 774645 - protein, 38 aa, Homo sapiens
GTSAHPSLLWNSPPGALLALSTFSTSPQDFPFYYLQQG

SEQ ID NO: 774646 - protein, 67 aa, Homo sapiens
SGRVHWGEGTRPSPAPRQHLGNRKSWLGLVDLGGEGALVGGCSDFEFWSKTLDSFSFMGTEGKECGL

SEQ ID NO: 774647 - protein, 207 aa, Homo sapiens
MRGEKRRDKVNPKSSQRKLNWIPSFPTYDYFNQVTLQLLDGFMITLSTDGVIICVAENISSLLGHLPAEIVGKKLLSLLPDEEKDEVYQKIILKFPLLNSETHIEFCCHLKRGNVEHGDSSAYENVKFIVNVRDICNEFPVVFSGLFSSHLCADFAACVPQEDRLYLVGNVCILRTQLLQQLYTSKAVSDEAVLTQDSDEEPFVGEL

SEQ ID NO: 774648 - protein, 104 aa, Homo sapiens
MQTGFSVTLSNAVELKSPQSEGAGSGDLGSDKARVEDVTAITLFLLCTLIWKQMVSPCPCPLTKNWATGRPWIDLAKAQCWQAVSRWPSVHPPLQLAFLGTCYA

SEQ ID NO: 774649 - protein, 86 aa, Homo sapiens
NWGIREAKRLAQGHTADVRVEMECKHSDSRTCTVFRNGLKLVVCSGVKSKAKFRASSQGVSLGMRDEDPHFLSAEGKSSPQCPPAR

SEQ ID NO: 774650 - protein, 113 aa, Homo sapiens
MDAGWGRGRPQASLLTAGAEGTGRSKSHTLSVCQSDWRRPRKRGARPRTSPHRGGPERAIRNDLLGDEKHYLERIEPAEMENCGKGMGNEAAPPEIRLQDLQQGELGNMDNLS

SEQ ID NO: 774651 - protein, 140 aa, Homo sapiens
KLGTQLTFLLGRNGHLRGLGQLQADISKFLPMAVFLQVEKPVWTALAWPRYKIWSLKRFPRQRQFPTYVPTRTLCTAPWHGCLNSHGFSSRVSRKDGVLVPSTHFPHFFKIFFETRSRSVTQARVQWRNLGLLQPLPPRL

SEQ ID NO: 774652 - protein, 947 aa, Homo sapiens
MATRVRTASIWVPPLQERNSSWDRIRKLQGQESILGQGTPGLQPLPGTPRQKQKSRRIEKVLEWLFISQEQPKITKSWGPLSFMDVFVDFTWEEWQLLDPAQKCLYRSVMLENYSNLVSLGYQHTKPDIIFKLEQGEELCMVQAQVPNQTCPNTVWKIDDLMDWHQENKDKLGSTAKSFECTTFGKLCLLSTKYLSRQKPHKCGTHGKSLKYIDFTSDYARNNPNGFQVHGKSFFHSKHEQTVIGIKYCESIESGKTVNKKSQLMCQQMYMGEKPFGCSCCEKAFSSKSYLLVHQQTHAEEKPYGCNECGKDFSSKSYLIVHQRIHTGEKLHECSECRKTFSFHSQLVIHQRIHTGENPYECCECGKVFSRKDQLVSHQKTHSGQKPYVCNECGKAFGLKSQLIIHERIHTGEKPYECNECQKAFNTKSNLMVHQRTHTGEKPYVCSDCGKAFTFKSQLIVHQGIHTGVKPYGCIQCGKGFSLKSQLIVHQRSHTGMKPYVCNECGKAFRSKSYLIIHTRTHTGEKLHECNNCGKAFSFKSQLIIHQRIHTGENPYECHECGKAFSRKYQLISHQRTHAGEKPYECTDCGKAFGLKSQLIIHQRTHTGEKPFECSECQKAFNTKSNLIVHQRTHTGEKPYSCNECGKAFTFKSQLIVHKGVHTGVKPYGCSQCAKTFSLKSQLIVHQRSHTGVKPYGCSECGKAFRSKSYLIIHMRTHTGEKPHECRECGKSFSFNSQLIVHQRIHTGENPYECSECGKAFNRKDQLISHQRTHAGEKPYGCSECGKAFSSKSYLIIHMRTHSGEKPYECNECGKAFIWKSLLIVHERTHAGVNPYKCSQCEKSFSGKLRLLVHQRMHTREKPYECSECGKAFIRNSQLIVHQRTHSGEKPYGCNECGKTFSQKSILSAHQRTHTGEKPCKCTECGKAFCWKSQLIMHQRTHVDDKH

SEQ ID NO: 774653 - protein, 926 aa, Homo sapiens
MATRVRTASIWVPPLQERNSSWDRIRKLQGQESILGQGTPGLQPLPGTPRQKQKSRRIEKVLEWLFISQEQPKITKSWGPLSFMDVFVDFTWEEWQLLDPAQKCLYRSVMLENYSNLVSLGYQHTKPDIIFKLEQGEELCMVQAQVPNQTCPILKAGKSKAKVLAGLVSGEGLLCASKMTPCAASSGDTVWKIDDLMDWHQENKDKLGSTAKSFECTTFGKLCLLSTKYLSRQKPHKCGTHGKSLKYIDFTSDYARNNPNGFQVHGKSFFHSKHEQTVIGIKYCESIESGKTVNKKSQLMCQQMYMGEKPFGCSCCEKAFSSKSYLLVHQQTHAEEKPYGCNECGKDFSSKSYLIVHQRIHTGEKLHECSECRKTFSFHSQLVIHQRIHTGENPYECCECGKVFSRKDQLVSHQKTHSGQKPYVCNECGKAFGLKSQLIIHERIHTGEKPYECNECQKAFNTKSNLMVHQRTHTGEKPYVCSDCGKAFTFKSQLIVHQGIHTGVKPYGCIQCGKGFSLKSQLIVHQRSHTGMKPYVCNECGKAFRSKSYLIIHTRTHTGEKLHECNNCGKAFSFKSQLIIHQRIHTGENPYECHECGKAFSRKYQLISHQRTHAGEKPYECTDCGKAFGLKSQLIIHQRTHTGEKPFECSECQKAFNTKSNLIVHQRTHTGEKPYSCNECGKAFTFKSQLIVHKGVHTGVKPYGCSQCAKTFSLKSQLIVHQRSHTGVKPYGCSECGKAFRSKSYLIIHMRTHTGEKPHECRECGKSFSFNSQLIVHQRIHTGENPYECSECGKAFNRKDQLISHQRTHAGEKPYGCSECGKAFSSKSYLIIHMRTHSGEKPYECNECGKAFIWKSLLIVHERTHAGVNPYKCSQCEKSFSGKLRLLVHQRMHTREKPYECSECGKAFCWKSQLIMHQRTHVDDKH

SEQ ID NO: 774654 - protein, 160 aa, Homo sapiens
MATRVRTASIWVPPLQERNSSWDRIRKLQGQESILGQGTPGLQPLPGTPRQKQKSRRIEKVLEWLFISQEQPKITKSWGPLSFMDVFVDFTWEEWQLLDPAQKCLYRSVMLENYSNLVSLGYQHTKPDIIFKLEQGEELCFGWQRPQVSKIKNPCSQIFG

SEQ ID NO: 774655 - protein, 982 aa, Homo sapiens
MATRVRTASIWVPPLQERNSSWDRIRKLQGQESILGQGTPGLQPLPGTPRQKQKSRRIEKVLEWLFISQEQPKITKSWGPLSFMDVFVDFTWEEWQLLDPAQKCLYRSVMLENYSNLVSLGYQHTKPDIIFKLEQGEELCMVQAQVPNQTCPILKAGKSKAKVLAGLVSGEGLLCASKMTPCAASSGDTVWKIDDLMDWHQENKDKLGSTAKSFECTTFGKLCLLSTKYLSRQKPHKCGTHGKSLKYIDFTSDYARNNPNGFQVHGKSFFHSKHEQTVIGIKYCESIESGKTVNKKSQLMCQQMYMGEKPFGCSCCEKAFSSKSYLLVHQQTHAEEKPYGCNECGKDFSSKSYLIVHQRIHTGEKLHECSECRKTFSFHSQLVIHQRIHTGENPYECCECGKVFSRKDQLVSHQKTHSGQKPYVCNECGKAFGLKSQLIIHERIHTGEKPYECNECQKAFNTKSNLMVHQRTHTGEKPYVCSDCGKAFTFKSQLIVHQGIHTGVKPYGCIQCGKGFSLKSQLIVHQRSHTGMKPYVCNECGKAFRSKSYLIIHTRTHTGEKLHECNNCGKAFSFKSQLIIHQRIHTGENPYECHECGKAFSRKYQLISHQRTHAGEKPYECTDCGKAFGLKSQLIIHQRTHTGEKPFECSECQKAFNTKSNLIVHQRTHTGEKPYSCNECGKAFTFKSQLIVHKGVHTGVKPYGCSQCAKTFSLKSQLIVHQRSHTGVKPYGCSECGKAFRSKSYLIIHMRTHTGEKPHECRECGKSFSFNSQLIVHQRIHTGENPYECSECGKAFNRKDQLISHQRTHAGEKPYGCSECGKAFSSKSYLIIHMRTHSGEKPYECNECGKAFIWKSLLIVHERTHAGVNPYKCSQCEKSFSGKLRLLVHQRMHTREKPYECSECGKAFIRNSQLIVHQRTHSGEKPYGCNECGKTFSQKSILSAHQRTHTGEKPCKCTECGKAFCWKSQLIMHQRTHVDDKH

SEQ ID NO: 774656 - protein, 188 aa, Homo sapiens
MATRVRTASIWVPPLQERNSSWDRIRKLQGQESILGQGTPGLQPLPGTPRQKQKSRRIEKVLEWLFISQEQPKITKSWGPLSFMDVFVDFTWEEWQLLDPAQKCLYRSVMLENYSNLVSLGYQHTKPDIIFKLEQGEELCMVQAQVPNQTCPILKAGKSKAKVLAGLVSGEGLLCASKMTPCCCILWR

SEQ ID NO: 774657 - protein, 103 aa, Homo sapiens
MTPSPTRLPVGLLPLTPRALLFPQVPTALPAVYHFLAACEGICPHSCAAPSMIELWDFLIQQHQPEKAVACTTTHIPGLRYQLHENRHLVYLVHGYRTVPSAH

SEQ ID NO: 774658 - protein, 128 aa, Homo sapiens
ENATGRQLPVFSSGFWHPQRKKRGDPLWPQEAQKHCPGCARKGENLGDPPKAPLGLSTELAQLRAATRDAASFRPVGALLALSASIPSFGPRNHISNDTLADSPASLAASLQRADASPEVVRKGGKAG

SEQ ID NO: 774659 - protein, 73 aa, Homo sapiens
RDEVLGQRTSALLSYEVREAAEAKKHAEPLGMRFDFKVAAVSPRLRSLAVPSKIEEDLPCSQLDCQFLLETLS

SEQ ID NO: 774660 - protein, 143 aa, Homo sapiens
EPPGWLPSELCLLVTATAMPGGRLLGDVAPNFEANTTAGRVRFQDFLGNSLGILFSHPRDFTPVCTTELGRAAKLAPEFAKRNVKLIALSFFFLFLFLFLRRSLALSPRLECSGALLAHCNLGSLQSLHPGFKQFSCLRLLSS

SEQ ID NO: 774661 - protein, 141 aa, Homo sapiens
GEVKLWGPGSQDKVQFQSLCLGYSAFYPAYLSSSLLAPQVPSDAAGEFQRPAGLHQRQHVGWVSIAQWDPQASQPLRFHGQAKRGGLGVPADPELPLCPWDRLAGGESSPSSQVPEFPALQGKDSIPKMSFQSTEEIALDL

SEQ ID NO: 774662 - protein, 53 aa, Homo sapiens
TVQPIMEALRDATRRRTFALVSQAYTSIITDDFAAFVGLPIEEAVKGLLEQGW

SEQ ID NO: 774663 - protein, 34 aa, Homo sapiens
TQQTQHGQCCGRRGPSRGWSFSVLDENLGTAVCT

SEQ ID NO: 774664 - protein, 106 aa, Homo sapiens
MPFLDIQKRFGLNIDRWLTIQSGEQPYKMAGRCHAFEKEWIECAHGIGYTRAEKECKIEYDDFVECLLRQKTMRRAGTIRKQRDKLIKEGKYTPPPHHIGKGEPRP

SEQ ID NO: 774665 - protein, 106 aa, Homo sapiens; identical to SEQ ID NO: 774664

SEQ ID NO: 774666 - protein, 126 aa, Homo sapiens
RFCQRRTYNLSGREHGVVVAMPFLDIQKRFGLNIDRWLTIQSGEQPYKMAGRCHAFEKEWIECAHGIGYTRAEKECKIEYDDFVECLLRQKTMRRAGTIRKQRDKLIKEGKYTPPPHHIGKGEPRP

SEQ ID NO: 774667 - protein, 106 aa, Homo sapiens; identical to SEQ ID NO: 774664

SEQ ID NO: 774668 - protein, 130 aa, Homo sapiens
  misc_feature (1)..(1): Xaa can be any naturally occurring amino acid
  misc_feature (3)..(3): Xaa can be any naturally occurring amino acid
  misc_feature (9)..(9): Xaa can be any naturally occurring amino acid
  misc_feature (12)..(12): Xaa can be any naturally occurring amino acid
XFXAPFLFXLPXQKKSRARASVVAMPFLDIQKRFGLNIDRWLTIQSGEQPYKMAGRCHAFEKEWIECAHGIGYTRAEKECKIEYDDFVECLLRQKTMRRAGTIRKQRDKLIKEGKYTPPPHHIGKGEPRP

SEQ ID NO: 774669 - protein, 142 aa, Homo sapiens
MPFLDIQKRFGLNIDRWLTIQSGEQPYKMAGRCHAFEKEWIEKKKKKKKKKTVWGRALGRPGKTFLKNHIAGGARGGPKKEKGDTGAKRGYLRGETAGNDVNKRRGDFLQPIKKEAAGGTNAERRSRNTKSPQEREARGRTT

SEQ ID NO: 774670 - protein, 106 aa, Homo sapiens; identical to SEQ ID NO: 774664

SEQ ID NO: 774671 - protein, 106 aa, Homo sapiens; identical to SEQ ID NO: 774664

SEQ ID NO: 774672 - protein, 130 aa, Homo sapiens; identical to SEQ ID NO: 774668
  misc_feature (1)..(1): Xaa can be any naturally occurring amino acid
  misc_feature (3)..(3): Xaa can be any naturally occurring amino acid
  misc_feature (9)..(9): Xaa can be any naturally occurring amino acid
  misc_feature (12)..(12): Xaa can be any naturally occurring amino acid

SEQ ID NO: 774673 - protein, 106 aa, Homo sapiens; identical to SEQ ID NO: 774664

SEQ ID NO: 774674 - protein, 106 aa, Homo sapiens; identical to SEQ ID NO: 774664

SEQ ID NO: 774675 - protein, 197 aa, Homo sapiens
AFSHQEARFLIPLLVPLVLLCSPQTQPVPWKGTVVLFNALGALLFGCLHQGGLVPGLEYLEQVVHAPVLPSTPTHYTLLFTHTYMPPRHLLHLPGLGAPVEVVDMGGTEDWALCQTLKSFTRQPACQVAGGPWLCRLFVVTPGTTRRAVEKCSFPFKNETLLFPHLTLEDPPALSSLLSGAWRDHLSLHIVELGEET

SEQ ID NO: 774676 - protein, 104 aa, Homo sapiens [sequence omitted]

SEQ ID NO: 774677 - protein, 461 aa, Homo sapiens
MTPNSMTENGLTAWDKPKHCPDREHDWKLVGMSEACLHRKSHSERRSTLKNEQSSPHLIQTTWTSSIFHLDHDDVNDQSVSSAQTFQTEEKKCKGYIPSYLDKDELCVVCGDKATGYHYRCITCEGCKGFFRRTIQKNLHPSYSCKYEGKCVIDKVTRNQCQECRFKKCIYVGMATDLVLDDSKRLAKRKLIEENREKRRREELQKSIGHKPEPTDEEWELIKTVTEAHVATNAQGSHWKQKRKFLPEDIGQAPIVNAPEGGKVDLEAFSHFTKIITPAITRVVDFAKKLPMFCELPCEDQIILLKGCCMEIMSLRAAVRYDPESETLTLNGEMAVTRGQLKNGGLGVVSDAIFDLGMSLSSFNLDDTEVALLQAVLLMSSDRPGLACVERIEKYQDSFLLAFEHYINYRKHHVTHFWPKLLMKVTDLRMIGACHASRFLHMKVECPTELLPPLFLEVFED

SEQ ID NO: 774678 - protein, 461 aa, Homo sapiens; identical to SEQ ID NO: 774677

SEQ ID NO: 774679 - protein, 461 aa, Homo sapiens; identical to SEQ ID NO: 774677

SEQ ID NO: 774680 - protein, 456 aa, Homo sapiens
MTENGLTAWDKPKHCPDREHDWKLVGMSEACLHRKSHSERRSTLKNEQSSPHLIQTTWTSSIFHLDHDDVNDQSVSSAQTFQTEEKKCKGYIPSYLDKDELCVVCGDKATGYHYRCITCEGCKGFFRRTIQKNLHPSYSCKYEGKCVIDKVTRNQCQECRFKKCIYVGMATDLVLDDSKRLAKRKLIEENREKRRREELQKSIGHKPEPTDEEWELIKTVTEAHVATNAQGSHWKQKRKFLPEDIGQAPIVNAPEGGKVDLEAFSHFTKIITPAITRVVDFAKKLPMFCELPCEDQIILLKGCCMEIMSLRAAVRYDPESETLTLNGEMAVTRGQLKNGGLGVVSDAIFDLGMSLSSFNLDDTEVALLQAVLLMSSDRPGLACVERIEKYQDSFLLAFEHYINYRKHHVTHFWPKLLMKVTDLRMIGACHASRFLHMKVECPTELLPPLFLEVFED

SEQ ID NO: 774681 - protein, 110 aa, Homo sapiens
MTENGLTAWDKPKHCPDREHDWKLVGMSEACLHRKSHSERRSTLKNEQSSPHLIQTTWTSSIFHLDHDDVNDQSVSSAQTFQTEEKKCKGNQIFISPLSCVSTRKKISLL

SEQ ID NO: 774682 - protein, 110 aa, Homo sapiens; identical to SEQ ID NO: 774681

SEQ ID NO: 774683 - protein, 74 aa, Homo sapiens
MNNVSALGKETSCSAGSGQEPAGYLPRAGALNPTGSRALICDFLLVGCPAWVPSSTHDLMNKKLARDANSSIYI

SEQ ID NO: 774684 - protein, 44 aa, Homo sapiens
MRKQGVSSKRLQSSGRSQSKGRRGASLAREPEVEEEMEKSALGG

SEQ ID NO: 774685 - protein, 73 aa, Homo sapiens
LPEQRIAGPCRGLTRWLNTGKNWHLESRHLKLAIWRKQQRRANFKKLEENWYAYFQPSENVKEVKVINWVKCC

SEQ ID NO: 774686 - protein, 97 aa, Homo sapiens
SPGPGGNRRNRTVQMPAFPQISVARQLQTPLTCSRLFKIWLPAAASGAQRAAWRVRTPGTQQQVAATSNPTWNMMGSEPASNSRRAVVCKFGQSLQI

SEQ ID NO: 774687 - protein, 566 aa, Homo sapiens
MPGKPKHLGVPNGRMVLAVSDGELSSTTGPQGQGEGRGSSLSIHSLPSGPSSPFPTEEQPVASWALSFERLLQDPLGLAYFTEFLKKEFSAENVTFWKACERFQQIPASDTQQLAQEARNIYQEFLSSQALSPVNIDRQAWLGEEVLAEPRPDMFRAQQLQIFNLMKFDSYARFVKSPLYRECLLAEAEGRPLREPGSSRLGSPDATRKKPKLKPGKSLPLGVEELGQLPPVEGPGGRPLRKSFRRELGGTANAALRRESQGSLNSSASLDLGFLAFVSSKSESHRKSLGSTEGESESRPGKYCCVYLPDGTASLALARPGLTIRDMLAGICEKRGLSLPDIKVYLVGNEQALVLDQDCTVLADQEVRLENRITFELELTALERVVRISAKPTKRLQEALQPILEKHGLSPLEVVLHRPGEKQPLDLGKLVSSVAAQRLVLDTLPGVKISKARDKSPCRSQGCPPRTQDKATHPPPASPSSLVKVPSSATGKRQTCDIEGLVELLNRVQSSGAHDQRGLLRKEDLVLPEFLQLPAQGPSSEETPPQTKSAAQPIGGSLNSTTDSAL

SEQ ID NO: 774688 - protein, 95 aa, Homo sapiens
  misc_feature (5)..(5): Xaa can be any naturally occurring amino acid
  misc_feature (24)..(24): Xaa can be any naturally occurring amino acid
  misc_feature (26)..(26): Xaa can be any naturally occurring amino acid
  misc_feature (36)..(36): Xaa can be any naturally occurring amino acid
  misc_feature (38)..(38): Xaa can be any naturally occurring amino acid
PGKGXWEKGGTFKDVKNNNPPTRXAXPPFGPPSKKXFXPPNPLQPGHNGGGESSPLEQACPTWRDGVGSASLPSLCQASTGARGGAGPSSGSWYE

SEQ ID NO: 774689 - protein, 566 aa, Homo sapiens; identical to SEQ ID NO: 774687

SEQ ID NO: 774690 - protein, 150 aa, Homo sapiens
NSANVSVVDLTCRLEKPANYDDVKKVVNQASEGPLKDILGYTEHQVVSSDFNSDTHSSIFSEGAGIALNDHFVKLISLYDNEFGYTNRVVDHGPHGLQKVRPLDHQPQQEHERKREDLIAGESLPHSVPHHTKNLPSSQFPCRPPEDGGA

SEQ ID NO: 774691 - protein, 270 aa, Homo sapiens
AARMSSAQCPALVCVMSRLRFWGPWPLLMWQLLWLLVKEAQPLEWVKDPLQLTSNPLGPPDSWSSHSSHFPRESPHAPTLPADPWDFDHLGPSASSEMPAPPQESTENLVPFLDTWDSAGEQPLEPEQFLASQQDLKDKLSPQERLPVSPKKLKKDPAQRWSLAEIIGITRQLSTPQSQKQTLQNEYSSTDTPYPGSLPPELRVKSDEPPGPSEQVGPSQFHLEPETQNPETLEDIQSSSLQQEAPAQLPQLLEEEPSSMQQEAPALPPE

SEQ ID NO: 774692 - protein, 113 aa, Homo sapiens
GRYYYYYYYKFAAASIIIILFFFSFFETESHRVTQAGVEWHNLGSLQSLPPGFKRFSCLSLLSSWDYRHTPPCPANFCIFSRDGISSCWSGWSRTPDLVICPPQPPKVLGLQA

SEQ ID NO: 774693 - protein, 147 aa, Homo sapiens [sequence omitted]

SEQ ID NO: 774694 - protein, 120 aa, Homo sapiens
MSKHFLACKVRVFPRPPRAQGCPGPEPQLGRCNCTWEHGGSMVLASRQLCKVQGSCLFLAPAGSVKHAGRTAPPPLQLALSQWPLQRGHHCHQKLAVSARLECSGAIKAHHGLERLRSTD

SEQ ID NO: 774695 - protein, 114 aa, Homo sapiens
LNPQSPGLDREQLYWQLSQMTNGIKELGPYTLDRNSLYVNGFTHRSSGLTTSTPWTSTVDLGTSGTPSPVPSPTSKYQSMASLLNFTITNLQYEEDMHRPGSRKFNTTERVLQA

SEQ ID NO: 774696 - protein, 75 aa, Homo sapiens
ELGPPDSRRSRSQPLLIYDGISTLAKRSGSLPLAIERAEYSSSGVPPPASPHVNISYNKLLLVQDYRTGHSGSHL

SEQ ID NO: 774697 - protein, 109 aa, Homo sapiens
  misc_feature (12)..(12): Xaa can be any naturally occurring amino acid
KEGRHVSKERGXNSGLPTVQRSKQNGNCQVLRIIKKMLYHPCGQCQTTVKIILPALPSMPASRLYTGVDELGVWGIFQRQFSVFCEWNIHTHTYMHTHTGVHTYTQKAR

SEQ ID NO: 774698 - protein, 104 aa, Homo sapiens
MEAAERSSSFQVSRGWAGGSREGLGSAMLASQQPGLACPQQGAGQLPALKGRTRAQILPATSRVFLGHWALDGWHLVPLLSWESSCPTHSRILSSPWLLDLWSL

SEQ ID NO: 774699 - protein, 75 aa, Homo sapiens
MCSMSFECFTKPLPHSQEKGISPLCSSWWAFMSAFTLIALVALRTLEGPLSRVQALMAEQLPLQAEAPVALWALE

SEQ ID NO: 774700 - protein, 76 aa, Homo sapiens
  misc_feature (63)..(63): Xaa can be any naturally occurring amino acid
  misc_feature (76)..(76): Xaa can be any naturally occurring amino acid
VYTLINYYANGLVQLEVLMVTPHRTSCLLEIIYPRVLFPFLGQKPLRACTQINLLMRLLKLVXTSEFPSEEMEKVX

SEQ ID NO: 774701 - protein, 187 aa, Homo sapiens
MADLDKLNIDSIIQRLLEVRGSKPGKNVQLQENEIRGLCLKSREIFLSQPILLELEAPLKICGDIHGQYYDLLRLFEYGGFPPESNYLFLGDYVDRGKQSLETICLLLAYKIKYPENFFLLRGNHECASINRIYGFYDECKRRYNIKLWKTFTDCFNCLPIAAIVDEKIFCCHGVTPTYHGQSGLHM

SEQ ID NO: 774702 - protein, 323 aa, Homo sapiens
MADLDKLNIDSIIQRLLEVRGSKPGKNVQLQENEIRGLCLKSREIFLSQPILLELEAPLKICGDIHGQYYDLLRLFEYGGFPPESNYLFLGDYVDRGKQSLETICLLLAYKIKYPENFFLLRGNHECASINRIYGFYDECKRRYNIKLWKTFTDCFNCLPIAAIVDEKIFCCHGGLSPDLQSMEQIRRIMRPTDVPDQGLLCDLLWSDPDKDVLGWGENDRGVSFTFGAEVVAKFLHKHDLDLICRAHQVVEDGYEFFAKRQLVTLFSAPNYCGEFDNAGAMMSVDETLMCSFQILKPAEKKKPNATRPVTPPRGMITKQAKK

SEQ ID NO: 774703 - protein, 323 aa, Homo sapiens; identical to SEQ ID NO: 774702

SEQ ID NO: 774704 - protein, 323 aa, Homo sapiens; identical to SEQ ID NO: 774702

SEQ ID NO: 774705 - protein, 323 aa, Homo sapiens; identical to SEQ ID NO: 774702

SEQ ID NO: 774706 - protein, 323 aa, Homo sapiens; identical to SEQ ID NO: 774702

SEQ ID NO: 774707 - protein, 323 aa, Homo sapiens; identical to SEQ ID NO: 774702

SEQ ID NO: 774708 - protein, 141 aa, Homo sapiens
MEQIRRIMRPTDVPDQGLLCDLLWSDPDKDVLGWGENDRGVSFTFGAEVVAKFLHKHDLDLICRAHQVVEDGYEFFAKRQLVTLFSAPNYCGEFDNAGAMMSVDETLMCSFQILKPAEKKKPNATRPVTPPRGMITKQAKK

SEQ ID NO: 774709 - protein, 304 aa, Homo sapiens
MADLDKLNIDSIIQRLLEVRGSKPGKNVQLQENEIRGLCLKSREIFLSQPILLELEAPLKICGDIHGQYYDLLRLFEYGGFPPESNYLFLGDYVDRGKQSLETICLLLAYKIKYPENFFLLRGNHECASINRIYGFYDECKRRYNIKLWKTFTDCFNCLPIAAIVDEKIFCCHGGLSPDLQSMEQIRRIMRPTDVPDQGLLCDLLWSDPDKDVLGWGENDRGVSFTFGAEVVAKFLHKHDLDLICRAHQVVEDGYEFFAKRQLVTLFSAPNYCGEFDNAGAMMSVDETLMCSFQVEHAFNMISF

SEQ ID NO: 774710 - protein, 270 aa, Homo sapiens
MADLDKLNIDSIIQRLLEVRGSKPGKNVQLQENEIRGLCLKSREIFLSQPILLELEAPLKICGDIHGQYYDLLRLFEYGGFPPESNYLFLGDYVDRGKQSLETICLLLAYKIKYPENFFLLRGNHECASINRIYGFYDECKRRYNIKLWKTFTDCFNCLPIAAIVDEKIFCCHGGLSPDLQSMEQIRRIMRPTDVPDQGLLCDLLWSDPDKDVLGWGENDRGVSFTFGAEVVAKFLHKHDLDLICRAHQVLILNFTCTLKSMCVSTDSPC

SEQ ID NO: 774711 - protein, 323 aa, Homo sapiens; identical to SEQ ID NO: 774702

SEQ ID NO: 774712 - protein, 323 aa, Homo sapiens; identical to SEQ ID NO: 774702

SEQ ID NO: 774713 - protein, 235 aa, Homo sapiens
YSVTGGVFNVTLHVPWVCTISNKIKYPENFFLLRGNHECASINRIYGFYDECKRRYNIKLWKTFTDCFNCLPIAAIVDEKIFCCHGGLSPDLQSMEQIRRIMRPTDVPDQGLLCDLLWSDPDKDVLGWGENDRGVSFTFGAEVVAKFLHKHDLDLICRAHQVVEDGYEFFAKRQLVTLFSAPNYCGEFDNAGAMMSVDETLMCSFQILKPAEKKKPNATRPVTPPRGMITKQAKK

SEQ ID NO: 774714 - protein, 319 aa, Homo sapiens
MADLDKLNIDSIIQRLLEVRGSKPGKNVQLQENEIRGLCLKSREIFLSQPILLELEAPLKICGDIHGQYYDLLRLFEYGGFPPESNYLFLGDYVDRGKQSLETICLLLAYKIKYPENFFLLRGNHECASINRIYGFYDECKRRYNIKLWKTFTDCFNCLPIAAIVDEKIFCCHGGLSPDLQSMEQIRRIMRPTDVPDQGLLCDLLWSDPDKDVLGWGENDRGVSFTFGAEVVAKFLHKHDLDLICRAHQVVEDGYEFFAKRQLVTLFSAPNYCGEFDNAGAMMSVDETLMCSFQILKPAEKKKPNATRPVTPPRELHQA

SEQ ID NO: 774715 - protein, 319 aa, Homo sapiens; identical to SEQ ID NO: 774714

SEQ ID NO: 774716 - protein, 288 aa, Homo sapiens
MADLDKLNIDSIIQRLLEVRGSKPGKNVQLQENEIRGLCLKSREIFLSQPILLELEAPLKICGDIHGQYYDLLRLFEYGGFPPESNYLFLGDYVDRGKQSLETICLLLAYKIKYPENFFLLRGNHECASINRIYGFYDECKRRYNIKLWKTFTDCFNCLPIAAIVDEKIFCCHGGLSPDLQSMEQIRRIMRPTDVPDQGLLCDLLWSDPDKDVLGWGENDRGVSFTFGAEVVAKFLHKHDLDLICRAHQVVEDGYEFFAKRQLVTLFSAPNYCGEFDNAGGYKYPPAE

SEQ ID NO: 774717 - protein, 319 aa, Homo sapiens
SDFRDSERTDRDCQPLRVKDSPHPCPPPGAPNSLVSAAARALDAGAAAMAPRAGQPGLQGLLLVAAALSQPAAPCPFQCYCFGGPKLLLRCASGAELRQPPRDVPPDARNLTIVGANLTVLRAAAFAGGDGDGDQAAGVRLPLLSALRLTHNHIEVVEDGAFDGLPSLAALDLSHNPLRALGGGAFRGLPALRSLQLNHALVRGGPALLAALDAALAPLAELRLLGLAGNALSRLPPAALRLARLEQLDVRLNALAGLDPDELRALERDGGLPGPRLLLADNPLRCGCAARPLLAWLRNATERVPDSRRLRCAAPRALL

SEQ ID NO: 774718 - protein, 243 aa, Homo sapiens
MSNQQEKYEAQNIVNSTEESDDAFDTVTIPVPSEEPQESDQTEEHESGIEQFSESHAIHVEEQSDQSFSSLEPDNEQLMEEVISPRQVSYTPQHHEKQYAMQRPNDDSLAFLDKIKSVKESLQESVEDSLATVKVVLIPVGQEIVIPFKVDTILKYLKDHFSHLLGIPHSVLQIRYSGKILKNNETLVQHGVKPQEIVQVEIFSTNPDLYPVRRIDGLTDVSQIITVTVQTGLINNTRNCLRM

SEQ ID NO: 774719 - protein, 219 aa, Homo sapiens
MSNQQEKYEAQNIVNSTEESDDAFDTVTIPVPSEEPQESDQTEEHESGIEQFSESHAIHVEEQSDQSFSSLEPDNEQLMEEVISPRQVSYTPQHHEKQYAMQRPNDDSLAFLDKIKSVKESLQESVEDSLATVKVVLIPVGQEIVIPFKVDTILKYLKDHFSHLLGIPHSVLQIRYSGKILKNNETLVQHGVKATGNCTSGNLFYKSRSVSSQKNRWIN

SEQ ID NO: 774720 - protein, 275 aa, Homo sapiens
LRATAGLRPQPQPVTGGAFRAKLGGLFGVLHGTASDPRPGTGLAGPRGAGWRRRRKMSNQQEKYEAQNIVNSTEESDDAFDTVTIPVPSEEPQESDQTEEHESGIEQFSESHAIHVEEQSDQSFSSLEPDNEQLMEEVISPRQVSYTPQHHEKQYAMQRPNDDSLAFLDKIKSVKESLQESVEDSLATVKVVLIPVGQEIVIPFKVDTILKYLKDHFSHLLGIPHSVLQIRYSGKILKNNETLVQHGVKATGNCTSGNLFYKSRSVSSQKNRWIN

SEQ ID NO: 774721 - protein, 243 aa, Homo sapiens
AVAGRRAQSPRGLGGHIVRDQALGSGCAQPSRVRARPQPPLTILAVSSEPRAGPPASPAPPLPRPGPGRRDREPGRGCRSPRQVRGAPALRPRSVAALSIPAPHRPGGASRSRGVMAENALEADGTVRLRARRSIDGHEPVTLDGRRREPPVTDHDNLNERCARTTITERPKRLLPSLNPQSDYSTVGTIRRIVDTSPLVPDAGTRAPDSGRHNTRLITNPISQVDSQRTHPCPTEDPEMAIP

SEQ ID NO: 774722 - protein, 228 aa, Homo sapiens
GCALGRRAPQLAAAAAVSWPLGLESELNPQNWIFRFHVGGPGSRDATLGVLPLRRLGSLLLLPFPASWPRPLRPCEFPPPSLTPEPCPSRPMWPRLPGAGLAPQLRRQDQRLHFTGQMSHGLQMAGPQETVLALPLREGVQAAATAPILLYNLEDGLSDHPLDQGPRCPARRPCSPASAPAPTSPKKPKMQAPGETFPTDWSPPPVEFLNPRVLQASREAPAQRWVGV

SEQ ID NO: 774723 - protein, 87 aa, Homo sapiens
KNRARYLHALSAVTPRPYYPNSLNNPNSLLTPHPAPSFPHSNLCSHKCHIPVVSTAKITDVSALTSSPRTFVWPLLHSGCPSHPPHL

SEQ ID NO: 774724 - protein, 82 aa, Homo sapiens
TARIPFQWHAEHRLWSSVENAVEWTSLSMEPRTPSTDKLPKLWPEKAAEIHMQTLSGSSSGQTHVSHGTDTSLHTKYRRAPT

SEQ ID NO: 774725 - protein, 283 aa, Homo sapiens
DCPDRVLAEISTLAKMSSVKLQLLCSQVLKELLGQGIDYKKILKLTADAKFESGDVKATVAVLSFILSGAAKHSVDGKSLASELQQLGLPKRSHRRAGLVPVVLREADKALVRNASVRCRAVYAVNRVGQVWAGGWTTPLSSSLLQSVEEPMVHLRLEVAAAPGTPSPACCHVPLSRQVPGPPGRTEAGPDPDELPGLRRRVFQDLCGATCPYGVTPSELLFGRQPGSRMLRPWPGLWPPDPQLPHFSLENLVRAPEDLSQASTYPCPWKGHLLACFHNAGTH

SEQ ID NO: 774726 - protein, 142 aa, Homo sapiens
VRQSLSLSARLECSGTISAHCNFHLLRSSNSPASASRTAGITGVCHHAQLIFVFLVETGFHHVGQAGLKLLTSGNPPTLAFESAGITGMSHRARPTLSFKNAQELLAVITYLDSAIPVGIIFFVLSTFLVFPKTLFSEHPLN

SEQ ID NO: 774727 - protein, 87 aa, Homo sapiens
LFTSNWVSLARASRSQGAVFAPALHCPHQTGFPSPGPPGPRALSLHVHCPVRIRLGFPFPALQAPGHCLYTCTALSASLLSFCASCP

SEQ ID NO: 774728 - protein, 53 aa, Homo sapiens
MHCQMSRTPGSSKMKSYDNSQDNYAPQIPVTKEAQISNVGNQEEHDIKTSLIC

SEQ ID NO: 774729 - protein, 291 aa, Homo sapiens
MACLGFLLPVGFLLLISTVAGGKYGVAHVVSENWSKDYCILFSSDYITLPRDLHHAPLLPLYDGTKAPWCPGEDSPHQAQLRSPSQRPLRQTTAMVMRGNCSFHTKGWLAQGQGAHGLLIVSRVSDQQCSDTTLAPQDPRQPLADLTIPVAMLHYADMLDILSHTRGEAVVRVAMYAPPEPIIDYNMLVIFILAVGTVAAGGYWAGLTEANRLQRRRARRGGGSGGHHQLQEAAAAEGAQKEDNEDIPVDFTPAMTGVVVTLSCSLMLLLYFFYDHFVYVTIGIFGLGAGI

SEQ ID NO: 774730 - protein, 104 aa, Homo sapiens
ENGVWWDDAWVPSGTVGRIWRYSQLGCLTHTHLSNPFFPASDHLLLKIKGLVSVPGGIKFLSIFKHPGVVHHAGLAVPREGALLSWGDGFHLHSHGGGRCWVGG

SEQ ID NO: 774731 - protein, 86 aa, Homo sapiens
IWRYSQLGCLTHTHLSNPFFPASDHLLLKIKGLVSVPGGIKFLSIFKHPGVVHHAGLAVPREGALLSWGDGFHLHSHGGGRCWVGG

SEQ ID NO: 774732 - protein, 70 aa, Homo sapiens
TAGCGDNISLESCWWPSASTKGDQLSENEANSEQRKEQGGSLITSLGFLDPALSEDRHPKLHKPVNYLFS

SEQ ID NO: 774733 - protein, 147 aa, Homo sapiens
MCCYMPYTWEVVTVVLKPPGLAIYDWLHSAQGKKSQLQVFCGSLSSCFHFLKGEYVDWSPNLGSTGKVKPEILPLTLTRINTLRKGKVERMFPHSRNLYNQVKRGKSRRKQNPNHFSRCSESPPGHRHRCSPTLNATASAYLLTADL

SEQ ID NO: 774734 - protein, 137 aa, Homo sapiens
MAMSRCVFFPHSPFLAVSRETHHYKGFLPEIFHGRPTIRKAAHVYRKSSYPPWQTLCSVVSQLCDNKMAISDLQGAVGNQIKYVIRDIITSIVFNRALCQLLRQSFNKVYRILKLVTITSLRDAVRNLANLVGRGSI

SEQ ID NO: 774735 - protein, 76 aa, Homo sapiens
QLAVEIQTLTVVTDRLGWGNAMKGKFLREKSPRFFSAFSSFLEVVMSGPDYLERVIQKLRADHSYLITMFLQDGRP

SEQ ID NO: 774736 - protein, 105 aa, Homo sapiens
KGDAVGEETFAAQCLDLKHCVAHDPAIRLWALNPREILCTTKKTKGRRTEEQLDLSNHLDKLSPTVGYFNYFSFFTNISTVNTLIHLAPPLCQPHYSKHFMCVLT

SEQ ID NO: 774737 - protein, 67 aa, Homo sapiens
FRQQMKLPETMESGIADKRGLLSKPRNTGLAGNPRSWRRHQMHPSSQPPEGTNPANTSILDFWTPKL

SEQ ID NO: 774738 - protein, 81 aa, Homo sapiens
IWELLSLRQKAEKGDCKSRLAKSKLQFLLLLAREKAIMPLTRGTNGPRVSSLATLRDAPSLTPFPTPVLQTLLLTHILKQL

SEQ ID NO: 774739 - protein, 140 aa, Homo sapiens
CPGRGEPRRSPLPSPPGARPPLTSQQRAGQQQPVQDRAEHVRLHGWRAQGPAQTERTPRRYGAVRGPRGRRAMADPRGPARRLLLFLLLLRPPRRCRRPGPALAQATALPLGGAQRSAHWGRAGPDGGSRPPPPAGLYKL

SEQ ID NO: 774740 - protein, 104 aa, Homo sapiens
MGLCSFPLTDYASASSLSLSQDAVLQEESAFCWAAFRALCCGFLPLTLQALSMLYASYFKCSSFLNQNRKLALQENQVLLILSAFFFFDYSSPNLKHIHSRLRP

SEQ ID NO: 774741 - protein, 355 aa, Homo sapiens
MKVLRHKYLINFYRAIESTSRVYIILELAQGGDVLEWIQRYGACSEPLAGKWFSQLTLGIAYLHSKSIVHREGAATQTGAFALKGVLCTSPISCPFFLFRTPSSISSLFMHSILIIWSRILIKYSLYAKHFMKYNGELPVVLRYHPLSLSLLWALLTTPWLSFLSTLCPHNGFYLPLPLSSSLPSDPWPFSSQSKTKPSPQLMPSLSAAGRDLKLENLLLDKWENVKISDFGFAKMVPSNQPVGCSPSYRQVNCFSHLSQTYCGSFAYACPEILRGLPYNPFLSDTWSMGVILYTLVVAHLPFDDTNLKKLLRETQKEVTFPANHTISQECKVQLLIACVAQWRKTQARPLSPLL

SEQ ID NO: 774742 - protein, 392 aa, Homo sapiens
MKVLRHKYLINFYRAIESTSRVYIILELAQGGDVLEWIQRYGACSEPLAGKWFSQLTLGIAYLHSKSIVHREGAATQTGAFALKGVLCTSPISCPFFLFRTPSSISSLFMHSILIIWSRILIKYSLYAKHFMKYNGELPVVLRYHPLSLSLLWALLTTPWLSFLSTLCPHNGFYLPLPLSSSLPSDPWPFSSQSKTKPSPQLMPSLSAAGRDLKLENLLLDKWENVKISDFGFAKMVPSNQPVGCSPSYRQVNCFSHLSQTYCGSFAYACPEILRGLPYNPFLSDTWSMGVILYTLVVAHLPFDDTNLKKLLRETQKEVTFPANHTISQECKNLILQMLRQATKRATILDIIKDSWVLKFQPEQPTHEIRLLEAMCQLHNTTKQHQSLQITT

SEQ ID NO: 774743 - protein, 135 aa, Homo sapiens
MGKGDVLEAAPTTTAYHSLMDEYGYEVGKAIGHGSYGSVYEAFYTKQKVMVAVKIISKKKASDDYLNKFLPREIQNLILQMLRQATKRATILDIIKDSWVLKFQPEQPTHEIRLLEAMCQLHNTTKQHQSLQITT

SEQ ID NO: 774744 - protein, 392 aa, Homo sapiens; identical to SEQ ID NO: 774742

SEQ ID NO: 774745 - protein, 135 aa, Homo sapiens; identical to SEQ ID NO: 774743

SEQ ID NO: 774746 - protein, 355 aa, Homo sapiens; identical to SEQ ID NO: 774741

SEQ ID NO: 774747 - protein, 134 aa, Homo sapiens
LTFSPQKVKAQNIAFAHRPPVLWVEGLILLQSPKSVAEGRRRLGVQSGFSLPRFDGSFFWGQVMKVLRHKYLINFYRAIESTSRVYIILELAQGGDVLEWIQRYGACSEPLAGKWFSQLTLGIAYLHSKSIVHR

SEQ ID NO: 774748 - protein, 275 aa, Homo sapiens
TPQGLLSVRGHPVGAGGPRPGRQGSRSEGLVTARTERIASSRPRGPRGLLGTRSVGHLPRGAQALKVEGRNALAAGAWPGRTQPASPATVGDFQGEGAHLPSGARRMLQLLVLKIEDPGCFWVIIKGCSPFLDHDVDYQKLNSAMNDFYNSTCQDIEIKPLTLEEGQVCVVYCEELKCWCRAIVKSITSSADQYLAECFLVDFAKNIPVKSKNIRVVVESFMQLPYRAKKFSLYCTKPVTLHIDFWRDSTDIVPAKKWDNAAIQYFQNLLKGKPV

SEQ ID NO: 774749 - protein, 872 aa, Homo sapiens
MGLKARRAAGAAGGGGDGGGGGGGAANPAGGDAAAAGDEERKVGLAPGDVEQVTLALGAGADKDGTLLLEGGGRDEGQRRTPQGIGLLAKTPLSRPVKRNNAKYRRIQTLIYDALERPRGWALLYHALVFLIVLGCLILAVLTTFKEYETVSGDWLLLLETFAIFIFGAEFALRIWAAGCCCRYKGWRGRLKFARKPLCMLDIFVLIASVPVVAVGNQGNVLATSLRSLRFLQILRMLRMDRRGGTWKLLGSAICAHSKELITAWYIGFLTLILSSFLVYLVEKDVPEVDAQGEEMKEEFETYADALWWGLITLATIGYGDKTPKTWEGRLIAATFSLIGVSFFALPAGILGSGLALKVQEQHRQKHFEKRRKPAAELIQAAWRYYATNPNRIDLVATWRFYESVVSFPFFRKEQLEAASSQKLGLLDRVRLSNPRGSNTKGKLFTPLNVDAIEESPSKEPKPVGLNNKERFRTAFRMKAYAFWQSSEDAGTGDPMAEDRGYGNDFPIEDMIPTLKAAIRAVRILQFRLYKKKFKETLRPYDVKDVIEQYSAGHLDMLSRIKYLQTRIDMIFTPGPPSTPKHKKSQKGSAFTFPSQQSPRNEPYVARPSTSEIEDQSMMGKFVKVERQVQDMGKKLDFLVDMHMQHMERLQVQVTEYYPTKGTSSPAEAEKKEDNRYSDLKTIICNYSETGPPEPPYSFHQVTIDKVSPYGFFAHDPVNLPRGGPSSGKVQATPPSSATTYVERPTVLPILTLLDSRVSCHSQADLQGPYSDRISPRQRRSITRDSDTPLSLMSVNHEELERSPSGFSISQDRDDYVFGPNGGSSWMREKRYLAEGETDTDTDPFTPSGSMPLSSTGDGISDSVWTPSNKPI

SEQ ID NO: 774750 - protein, 100 aa, Homo sapiens
  misc_feature (13)..(14): Xaa can be any naturally occurring amino acid
  misc_feature (32)..(33): Xaa can be any naturally occurring amino acid
  misc_feature (39)..(39): Xaa can be any naturally occurring amino acid
KGDILEDSPSMSXXQFNAYYKYCLFVAKKGHXXSFFLLXTFSFFSCRIRHEVIVAMVTNQDNPDDLNKCLYAADTAILPHSLVKSHSSYGRHLVDGFIIS

SEQ ID NO: 774751 - protein, 872 aa, Homo sapiens; identical to SEQ ID NO: 774749

SEQ ID NO: 774752 - protein, 142 aa, Homo sapiens
PLPVRVQVKTEKRKMARILLLFLPGLVAVCAVHGIFMDRLASKKLCADDECVYTISLASAQEDYNAPDCRFINVKKGQQIYVYSKLVKENGAGEFWAGSVYGDGQDEMGVVGYFPRNLVKEQRVYQEATKEVPTTDIDFFCE

SEQ ID NO: 774753 - protein, 142 aa, Homo sapiens; identical to SEQ ID NO: 774752

SEQ ID NO: 774754 - protein, 142 aa, Homo sapiens; identical to SEQ ID NO: 774752

SEQ ID NO: 774755 - protein, 113 aa, Homo sapiens [sequence omitted]

SEQ ID NO: 774756 - protein, 44 aa, Homo sapiens
RRGWRWEEEEEHSPSSYQRAGGGGGGTGVTNSDLSLTKTITNPP

SEQ ID NO: 774757 - protein, 321 aa, Homo sapiens
MFKRHKSLASERKRALLSQRATRFILKDDMRNFHFLSKLVLSAGPLRPTPAVKHSKTTHFEIEIFDAQTRKQICILDKVTQSSTIHDVKQKFHKACPKWYPSRVGLQLECGGPFLKDYITIQSIAASSIVTLYATDLGQQVSWTTVFLAEYTGPLLIYLLFYLRIPCIYDGKESARRLRHPVVHLACFCHCIHYIRYLLETLFVHKVSAGHTPLKNLIMSCAFYWGFTSWIAYYINHPLYTPPSFGNRQITVSAINFLVINHLPHFVRSSHMTLSCFLSLYISLVKSLGKNVLHCVGFEKERSFFLSFQHIVWPSKNSLLV

SEQ ID NO: 774758 - protein, 118 aa, Homo sapiens
PLAFQGLVRARGPGAPLAFVGLEGGDPSGLTLPHPLNALPIGKSEDNTSMGIYLRGGNHKLGQPLPKQEAYKIHLRQRDGRLLPGVGAALFSHPPLLASAAATESSSHLVLIYKLPPC

SEQ ID NO: 774759 - protein, 613 aa, Homo sapiens
PAPVCTAPGPRDPGRSREAGPCAEEWPLGWKPGPAGSGEGALSRRRGLSEGRRRHGFTVRSKDSLPTHFTRNVQKAIDKYTCKSLSSFSSSGSHTPTGAHTSWSGSATQSSTTGSSTERGSVYSWRDDEFDEASSQSVQRLLWEVEEMLFEGKVNPQTQSLLAECGEWTRRSLHLRVLGRQLILPTDEGVQHFQGSTPASAVHRPPLSACGHSSNIRELCISGSQIVPAALSASALPGPDDTGVADLTARSSLEEEVYHVDGKIEEYFAFDRKEDDDECLEQKPAQPGRKWRELGLPPVSPRDCVKDAVAAEVFDHVWTNMVELLEELIRKHWETTLTEGKKQRETLKVAGNRFPHVLVPRAHADGASGPPSGHAEAHGISLASRLNPPQIHHFSSSFYSDMNGVMTIQAKPLQRRPAYFADRTQNEKEDKASGGGAGALSSAPHRLGRASDTHGLSPSAKKTPVPWRLPSLASDSQRLKTPNIYSDEVLRGTKLPTGVDHMASPLVQTSRSRFPPLVTETRGQNTAVPGCRLVSYRGRHLQNRVLSAMPDGTERSRLRERTATLERLSRPSTTHTFRQSDTPRKSSLTQMEFAAHTWTGQSILTGQLFSICK

SEQ ID NO: 774760 - protein, 204 aa, Homo sapiens
LSQHSQLSSSQDFLPRNEKEDKASGGGAGALSSAPHRLGRASDTHGLSPSAKKTPVPWRLPSLASDSQRLKTPNIYSDEVLRGTKLPTGVDHMASPLVQTSRSRFPPLVTETRGQNTAVPGCRLVSYRGRHLQNRVLSAMPDGTERSRLRERTATLERLSRPSTTHTFRQSDTPRKSSLTQMEFAAHTWTGQSILTGQLFSICK

SEQ ID NO: 774761 - protein, 639 aa, Homo sapiens
PAPVCTAPGPRDPGRSREAGPCAEEWPLGWKPGPAGSGEGALSRRRGLSEGRRRHGFTVRSKDSLPTHFTRNVQKAIDKYTCKSLSSFSSSGSHTPTGAHTSWSGSATQSSTTGSSTERGSVYSWRDDEFDEASSQSVQRLLWEVEEMLFEGKVNPQTQSLLAECGEWTRRSLHLRVLGRQLILPTDEGVQHFQGSTPASAVHRPPLSACGHSSNIRELCISGSQIVPAALSASALPGPDDTGVADLTARSSLEEEVYHVDGKIEEYFAFDRKEDDDECLEQKPAQPGRKWRELGLPPVSPRDCVKDAVAAEVFDHVWTNMVELLEELIRKHWETTLTEGKKQRETLKVAGNRFPHVLVPRAHADGASGPPSGHAEAHGISLASRLNPPQIHHFSSSFYSDMNGVMTIQAKPLQRRPAYFADRTQNEKEDKASGGGAGALSSAPHRLGRASDTHGLSPSAKKTPVPWRLPSLASDSQRLKTPNIYSDEVLRGTKLPTGVDHMASPLVQTSRSRFPPLVTETRGQNTAVPGCRLVSYRGRHLQNRVLSAMPDGTERSRLRERTATLERLSRPSTTHTFRQSDTPRKSSLTQMEFAAHTWTGQSILTEDNFDFQEEIPSDILKPPHQNHWSTCGLGTLLIT

SEQ ID NO: 774762 - protein, 275 aa, Homo sapiens
PAPVCTAPGPRDPGRSREAGPCAEEWPLGWKPGPAGSGEGALSRRRGLSEGRRRHGFTVRSKDSLPTHFTRNVQKAIDKYTCKSLSSFSSSGSHTPTGAHTSWSGSATQSSTTGSSTERGSVYSWRDDEFDEASSQSVQRLLWEVEEMLFEGKVNPQTQSLLAECGEWTRRSLHLRVLGRQLILPTDEGVQHFQGSTPASAVHRPPLSACGHSSNIRELCISGSQIVPAALSASALPGPDDTGVADLTARSSLEEEVYHVDGKIEEYFAFDRKEE

SEQ ID NO: 774763 - protein, 629 aa, Homo sapiens
PAPVCTAPGPRDPGRSREAGPCAEEWPLGWKPGPAGSGEGALSRRRGLSEGRRRHGFTVRSKDSLPTHFTRNVQKAIDKYTCKSLSSFSSSGSHTPTGAHTSWSGSATQSSTTGSSTERGSVYSWRDDEFDEASSQSVQRLLWEVEEMLFEGKVNPQTQSLLAECGEWTRRSLHLRVLGRQLILPTDEGVQHFQGSTPASAVHRPPLSACGHSSNIRELCISGSQIVPAALSASALPGPDDTGVADLTARSSLEEEVYHVDGKIEEYFAFDRKEDDDECLEQKPAQPGRKWRELGLPPVSPRDCVKDAVAAEVFDHVWTNMVELLEELIRKHWETTLTEGKKQRETLKVAGNRFPHVLVPRAHADGASGPPSGHAEAHGISLASRLNPPQIHHFSSSFYSDMNGVMTIQAKPLQRRPAYFADRTQNEKEDKASGGGAGALSSAPHRLGRASDTHGLSPSAKKTPVPWRLPSLASDSQRLKTPNIYSDEVLRGTKLPTGVDHMASPLVQTSRSRFPPLVTETRGQNTAVPGCRLVSYRGRHLQNRVLSAMPDGTERSRLRERTATLERLSRPSTTHTFRQSDTPRKSSLTQMEFAAHTWTGQSILTGSQYVPKSFQRTTLTFKRRFQVTS

SEQ ID NO: 774764 - protein, 568 aa, Homo sapiens
AAGAGAGAGAGAGGWGAPAPGPRGRVTGCLRGARARCLCLTVPEPSAEPGAGAASTGPGLIVIGRGLSEGRRRHGFTVRSKDSLPTHFTRNVQKAIDKYTCKSLSSFSSSGSHTPTGAHTSWSGSATQSSTTGSSTERGSVYSWRDDEFDEASSQSVQRLLWEVEEMLFEGKVNPQTQSLLAECGEWTRRSLHLRVLGRQLILPTDEGVQHFQGSTPASAVHRPPLSACGHSSNIRELCISGSQIVPAALSASALPGPDDTGVADLTARSSLEEEVYHVDGKIEEYFAFDRKEEREKTERNIESGWKQISARPRSTRSRRWSQWPPVRTAEAHGISLASRLNPPQIHHFSSSFYSDMNGVMTIQAKPLQRRPAYFADRTQNEKEDKASGGGAGALSSAPHRLGRASDTHGLSPSAKKTPVPWRLPSLASDSQRLKTPNIYSDEVLRGTKLPTGVDHMASPLVQTSRSRFPPLVTETRGQNTAVPGCRLVSYRGRHLQNRVLSAMPDGTERSRLRERTATLERLSRPSTTHTFRQSDTPRKSSLTQMEFAAHTWTGQSILTGQLFSICK

SEQ ID NO: 774765 - protein, 629 aa, Homo sapiens; identical to SEQ ID NO: 774763

SEQ ID NO: 774766 - protein, 98 aa, Homo sapiens
CCAVLVLNTNFRQILTHVIDPIRVFLDASESSEDGSVTNEYEGASVHVSALRHCQMDFAVSPRGTHLLPAMTIKFSSPDLRDVEWRERKPGVSYEESQ

SEQ ID NO: 774767 - protein, 136 aa, Homo sapiens
AERHTGRAALARHGQLSRPHAAVRNSSRGRGAATSVSAAARPTRGGARGHRRADGRARGGCAQLRAGTPSAPGGLQDCRGRQGEENAHPFRSGAPFSPHPHASRSTLAAQLLPLPQPPPPPKLAPPPLPPWLSAVT

SEQ ID NO: 774768 - protein, 279 aa, Homo sapiens
MFRAPCHRLRARGTRKARAGAWRGCTFPCLGKGMERPAAREPHGPDALRRFQGLLLDRRGRLHRQVLRLREVARRLERLRRRSLVANVAGSSLSATGALAAIVGLSLSPVTLGTSLLVSAVGLGVATAGGAVTITSDLSLIFCNSRELRRVQEIAATCQDQMREILSCLEFFCRWQGCGDRQLLQCGRNASIALYNSVYFIVFFGSRGFLIPRRAEGDTKVSQAVLKAKIQKLAESLESCTGALDELSEQLESRVQLCTKSSRGHDLKISADQRAGLFF

SEQ ID NO: 774769 - protein, 279 aa, Homo sapiens; identical to SEQ ID NO: 774768

SEQ ID NO: 774770 - protein, 68 aa, Homo sapiens
MIHWKQTRSPSVAVAAPLNSCQVPAGVRAAGRERRLARRLQADRVSMSPQGMERPAAREPHGPDALRR

SEQ ID NO: 774771 - protein, 279 aa, Homo sapiens; identical to SEQ ID NO: 774768

SEQ ID NO: 774772 - protein, 279 aa, Homo sapiens; identical to SEQ ID NO: 774768

SEQ ID NO: 774773 - protein, 61 aa, Homo sapiens
DPLPPRAARPVSQARCPTPVGDGSSSRRCWDNGRVNLRPVVQLIDIMKDLTRLSQDLQHSG

SEQ ID NO: 774774 - protein, 304 aa, Homo sapiens
AQGRSQEAGNMAGQPAATGSPSADKDGMEPNVVARISQWADDHLRLVRNISTGMAIAGIMLLLRSIRLTSKFTSSSDIPVEFIRRNVKLRGRLRRITENGLEIEHIPITLPIIASLRKEPRGALLVKLAGVELAETGKAWLQKELKPSQLLWFQLLGKENSALFCYLLVNKGGYFSVNLNEEILRRGLGKTVLVKGLKYDSKIYWTVHRNLLKAELTALKKGEGIWKEDSEKESYLEKFKDSWREIWKKDSFLKTTGSDFSLKKESYYEKLKRTYEIWKDNMNNCSLILKFRELISRINFRRKG

SEQ ID NO: 774775 - protein, 66 aa, Homo sapiens
KLTKVGFRRSVITNFSNLKQDVRTHRKEAKNLEKRLDEWLTRINSIEKTLNDLTELKTMAQELRDT

SEQ ID NO: 774776 - protein, 102 aa, Homo sapiens
MVFHEAHTGIQCPAPQAGMSNVTFLTLCFPMASGQIIPRESTSENWNGCSLEMLVALFFSGPLTYQKANSNLIHSATAYHVFRVLGVNGLPGKIQSQGTICK

SEQ ID NO: 774777 - protein, 103 aa, Homo sapiens [sequence omitted]

SEQ ID NO: 774778 - protein, 102 aa, Homo sapiens
PYLTQALTTSLKRSFCCYRKNFCKAGSLKSAMIKLPLETLSYLHVSLSLGSHLSNSFQLQSAPGSQICHGEGKKKCPPNKTLGIAGAACNPDFQRLIFFMSR

SEQ ID NO: 774779 - protein, 233 aa, Homo sapiens
YEEASRPQPPACLSKDSTPDEPDVHFSKKFLNIFMSGRSRSSSAESFGLFSCIINREEQEQTHRTIFRFVPRHEDEPELEVDDPLLVELQAEDYWYEAYNMRTGARGFFTAYYAIEVTKEPEHMAALAKNSDWVDQFRVKFLGSVQVPYHKGDVVLSAAMQKIATTRRLTVHFNPPSSCVLEISVRGVKIGVKADDSQEAKGNKCSHFFQLKNISFRGYHPKNNKYFGFITKH

SEQ ID NO: 774780 - protein, 114 aa, Homo sapiens
PPFPGSPAVSRAGRGAAASEQCKAEAGKICLHCKCPQEEHMVTVMPLEMEKTISKLMFDFQRNSTSDDDSGCALEEYAWVPPGLKPEQVPFWMGACWWFGCFTLPYWSFLIPVL

SEQ ID NO: 774781 - protein, 242 aa, Homo sapiens
MLSVLQVHQYYSCLPEEKVPYVNSPGEKLRIKQLLHQLPPHDNEVRYCNSLDEEEKRELKLFSSQRKRENLGRGNVRPFPVTMTGAICEQCGGQINGGDIAVFASRAGHGVCWHPPCFVCTVCNELLVDLIYFYQDGKIYCGRHHAECLKPRCAACDEIIFADECTEAEGRHWHMKHFCCFECETVLGGQRYIMKEGRPYCCHCFESLYAEYCDTCAQHIGIDQGQMTYDGQHWHATETCFC

SEQ ID NO: 774782 - protein, 102 aa, Homo sapiens
MLSVLQVHQYYSCLPEEKVPYVNSPGEKLRIKQLLHQLPPHDNEVRYCNSLDEEEKRELKLFSSQRKRENLGRGNVRPFPVTMTGAICEQVSMDSGDEEALF

SEQ ID NO: 774783 - protein, 284 aa, Homo sapiens
MVTVMPLEMEKTISKLMFDFQRNSTSDDDSGCALEEYAWVPPGLKPEQVHQYYSCLPEEKVPYVNSPGEKLRIKQLLHQLPPHDNEVRYCNSLDEEEKRELKLFSSQRKRENLGRGNVRPFPVTMTGAICEQCGGQINGGDIAVFASRAGHGVCWHPPCFVCTVCNELLVDLIYFYQDGKIYCGRHHAECLKPRCAACDEIIFADECTEAEGRHWHMKHFCCFECETVLGGQRYIMKEGRPYCCHCFESLYAEYCDTCAQHIGIDQGQMTYDGQHWHATETCFC

SEQ ID NO: 774784 - protein, 34 aa, Homo sapiens
LLHDLSAFLESLRASVSSPGKWVQYYRKEKNSSE

SEQ ID NO: 774785 - protein, 131 aa, Homo sapiens
ELRNLNRTHLWGNLAPRGPKNSGTKNCLTACSSHWCELQHPLCSKWTPTALAPLVAPARAPAPASAKSANAPPARRAAVPAAPWAVPSVPRAASAKGHRRSAAAVPDVGTALLPDVNRTTCTTWIFLKIQH

SEQ ID NO: 774786 - protein, 114 aa, Homo sapiens
DAWVDPRVRCLTACSSHWCELQHPLCSKWTPTALAPLVAPARAPAPASAKSANAPPARRAAVPAAPWAVPSVPRAASAKGHRRSAAAVPDVGTALLPDVNRTTCTTWIFLKIQH

SEQ ID NO: 774787 - protein, 89 aa, Homo sapiens
GRRVEGNLGETGKGGLDFGNTAYLRGHSPTRANGLQRGGPAVPTAQSSGGGAPGPSAAHSPAQERGRCGLSGPGAGAELGLCARPDLRL

SEQ ID NO: 774788 - protein, 89 aa, Homo sapiens; identical to SEQ ID NO: 774787

SEQ ID NO: 774789 - protein, 131 aa, Homo sapiens; identical to SEQ ID NO: 774785

SEQ ID NO: 774790 - protein, 227 aa, Homo sapiens
RGLEQEGCTGTPGQAQLKTAGRGGGVETPATPRLGSRKARGGGWKAKATSGKLGKAAGPRGHCVPPGAQPLPRKPEPKGRSSGALGAELRGWCARHLCWAQPSPAQDRWRCEPSRAGASAGQGLCARPPPLSRKAAAGCGAPPRRPGGPSSRSIYRLRSPALPRLEMDPNCSCATGGSCTCAGSCKCKECKCTSCKKSCCSCCPVGCAKCAQGCVCKGASEKCSCCA

SEQ ID NO: 774791 - protein, 89 aa, Homo sapiens; identical to SEQ ID NO: 774787

SEQ ID NO: 774792 - protein, 89 aa, Homo sapiens; identical to SEQ ID NO: 774787

SEQ ID NO: 774793 - protein, 127 aa, Homo sapiens
MDPNCSCATGGSCTCAGSCKCKECKCTSCKKSECGAISRNLGLWLRLGGNSRLALSASFWGTGLSLPSLPVSFPLQAFCPKFRWGRTAFFSWDTNPNCTPYGFRTELCQTKKSILWVWVLSSSQACY

SEQ ID NO: 774794 - protein, 227 aa, Homo sapiens; identical to SEQ ID NO: 774790

SEQ ID NO: 774795 - protein, 89 aa, Homo sapiens; identical to SEQ ID NO: 774787

SEQ ID NO: 774796 - protein, 69 aa, Homo sapiens
TSSQAVGKQPQTALGPTGGSCTCAGSCKCKECKCTSCKKSCCSCCPVGCAKCAQGCVCKGASEKCSCCA

SEQ ID NO: 774797 - protein, 104 aa, Homo sapiens [sequence omitted]

SEQ ID NO: 774798 - protein, 283 aa, Homo sapiens
AGGKYLPPSCSPASKMRLGLLSVALLFVGSSHLYSDHYSPSGRHRLGPSPEPAASSQQAEAVRKRLRRRREGGAHAKDCGTAPLKDVLQGSRIIGGTEAQAGAWPWVVSLQIKYGRVLVHVCGGTLVRERWVLTAAHCTKDASDPLMWTAVIGTNNIHGRYPHTKKIKIKAIIIHPNFILESYVNDIALFHLKKAVRYNDYIQPICLPFDVFQILDGNTKCFISGWGRTKEEGNATNILQDAEVHYISREMCNSERSYGGIIPNTSFCAGDEDGAFDTCRVRP

SEQ ID NO: 774799 - protein, 153 aa, Homo sapiens [sequence omitted]

SEQ ID NO: 774800 - protein, 696 aa, Homo sapiens
MKAPIPHLILLYATFTQSLKVVTKRGSADGCTDWSIDIKKYQVLVGEPVRIKCALFYGYIRTNYSLAQSAGLSLMWYKSSGPGDFEEPIAFDGSRMSKEEDSIWFRPTLLQDSGLYACVIRNSTYCMKVSISLTVGENDTGLCYNSKMKYFEKAELSKSKEISCRDIEDFLLPTREPEILWYKECRTKTWRPSIVFKRDTLLIREVREDDIGNYTCELKYGGFVVRRTTELTVTAPLTDKPPKLLYPMESKLTIQETQLGDSANLTCRAFFGYSGDVSPLIYWMKGEKFIEDLDENRVWESDIRILKEHLGEQEVSISLIVDSVEEGDLGNYSCYVENGNGRRHASVLLHKRELMYTVELAGGLGAILLLLVCLVTIYKCYKIEIMLFYRNHFGAEELDGDNKDYDAYLSYTKVDPDQWNQETGEEERFALEILPDMLEKHYGYKLFIPDRDLIPTGTYIEDVARCVDQSKRLIIVMTPNYVVRRGWSIFELETRLRNMLVTGEIKVILIECSELRGIMNYQEVEALKHTIKLLTVIKWHGPKCNKLNSKFWKRLQYEMPFKRIEPITHEQALDVSEQGPFGELQTVSAISMAAATSTALATAHPDLRSTFHNTYHSQMRQKHYYRSYEYDVPPTGTLPLTSIGNQHTYCNIPMTLINGQRPQTKSSREQNPDEAHTNSAILPLLPRETSISSVIW

SEQ ID NO: 774801 - protein, 106 aa, Homo sapiens
RIENPEINPNTYSQLIFDKANKNIKWGKNTLFNKVCWGNWLATCRKMKLDPHLSPYTKINSRWIKDLNLRPETIKILEDNIRKTLLDIGLGKDFMTKNCFWVKAIA

SEQ ID NO: 774802 - protein, 194 aa, Homo sapiens [sequence omitted]

SEQ ID NO: 774803 - protein, 127 aa, Homo sapiens
MSFSGKYQLQSQENFEAFMKAIGLPEELIQKGKDIKGVSEIVQNGKHFKFTITAGSKVIQNEFTVGEECELETMTGEKVKTVVQLEGDNKLVTTFKNIKSVTELNGDIITNTMTLGDIVFKRISKRI

SEQ ID NO: 774804 - protein, 127 aa, Homo sapiens; identical to SEQ ID NO: 774803

SEQ ID NO: 774805 - protein, 127 aa, Homo sapiens; identical to SEQ ID NO: 774803

SEQ ID NO: 774806 - protein, 127 aa, Homo sapiens; identical to SEQ ID NO: 774803

SEQ ID NO: 774807 - protein, 127 aa, Homo sapiens; identical to SEQ ID NO: 774803

SEQ ID NO: 774808 - protein, 143 aa, Homo sapiens
MSFSGKYQLQSQENFEAFMKAIGLPEELIQKGKDIKGVSEIVQNGKHFKFTITAGSKVIQNEFTVGEECELETMTGEKVKTVVQLEGDNKLVTTFKNIKSVTELNGDIITNTMTLGDIVFKRISVTQCHGIGDYVFKRISKRI

SEQ ID NO: 774809 - protein, 124 aa, Homo sapiens
  misc_feature (1)..(1): Xaa can be any naturally occurring amino acid
  misc_feature (20)..(20): Xaa can be any naturally occurring amino acid
  misc_feature (38)..(38): Xaa can be any naturally occurring amino acid
  misc_feature (51)..(51): Xaa can be any naturally occurring amino acid
  misc_feature (54)..(54): Xaa can be any naturally occurring amino acid
XTRGLRAQVDDLTEAVAAKXSQLAVLKVRLQEADQLLXTRTEALEALQSEXSRXSIQNEFTVGEECELETMTGEKVKTVVQLEGDNKLVTTFKNIKSVTELNGDIITNTMTLGDIVFKRISKRI

SEQ ID NO: 774810 - protein, 98 aa, Homo sapiens
MPPLHPPTPKLLSCGQYLPALTEDPSCPRQFTHIITNPFCSAQPTSHRGLHLPCMPRVLHKCLCPFSVYKENPIHGHIMAAYKPGTVQLCSQPWCLAA

SEQ ID NO: 774811 - protein, 127 aa, Homo sapiens; identical to SEQ ID NO: 774803

SEQ ID NO: 774812 - protein, 117 aa, Homo sapiens
MSFSGKYQLQSQENFEAFMKAIGLPEELIQKGKDIKGVSEIVQNGKHFKFTITAGSKVIQNEFTVGEECELETMTGEKVKTVVQLEGDNKLVTTFKNIKSVTELNGDIITNCKLVVL

SEQ ID NO: 774813 - protein, 131 aa, Homo sapiens
MSFSGKYQLQSQENFEAFMKAIGLPEELIQKGKDIKGVSEIVQNGKHFKFTITAGSKVIQNEFTVGEECELETMTGEKVKGRRASLLLSELSLEPGPGTSFLKAQTSQFHPQIPSLNPPPMWEKQRDKGSS

SEQ ID NO: 774814 - protein, 137 aa, Homo sapiens
MSFSGKYQLQSQENFEAFMKAIGLPEELIQKGKDIKGVSEIVQNGKHFKFTITAGSKVIQNEFTVGEECELETMTGEKVKTVVQLEGDNKLVTTFKNIKSVTELNGDIITNYHDIVVTCLQRISDEMLKGDEMLEEP

SEQ ID NO: 774815 - protein, 102 aa, Homo sapiens
MPPLHPPTPKLLSCGQYLPALTEDPSCPRQFTHIITNPFCSAQPTSHRGLHLPCMPRVLHKCLCPFSVYKENPIHGHIMAAYKPGTVHSLIQENWQGWRKHP

SEQ ID NO: 774816 - protein, 102 aa, Homo sapiens
MYQSWAESQPGDDLEEARMWPHVLVALTFKQAKPTLHCMLGVVLVGQRGLSEHSGCHMKLTLPGQTGLWGKAATVIIWPRSGLSRSRAEGGREGMSKKGPGY

SEQ ID NO: 774817 - protein, 262 aa, Homo sapiens
MLLCGYGHYKHKIYLKYLKVITLIKQQRDRKSLAEAREADVHRTNRSEVRKNKGNFWPRPACMPSWVYHPREGPMPRVDTVSPVARAWLGLPPLQGPHATHGHRRASGQSLAGFTTPMRALCHTWTLLAQRPELPKARAAAWRTVTLGVGAVPPTSCNGTVCAAGTWHCAFCVCPRRTLCGDCSTLSTFASPASRNGTACAAGPWHCQLRVCARRTLCGDCSTLSTFASLVAGELRDSVSATSAGPLKLYFIICIKLVCIFN

SEQ ID NO: 774818 - protein, 101 aa, Homo sapiens
FFSRGLIEVMSSRCWEAYHRSPTLTTVTGLSFHESCNPCYKSLKCQPCQEGLRKRQEAGCRALGSEPCCCRDWGSSPGAAVSWLCDLRQVLNLSDPSLPLL

SEQ ID NO: 774819 - protein, 75 aa, Homo sapiens
DAKETLKRVQDRERQAWPGLSRGKLAKKPSNTSRTGIAQPWRRLWRGKDSKMPTSDTFSKQAFLSAYWLPDIEGI

SEQ ID NO: 774820 - protein, 83 aa, Homo sapiens
RVLKKRPHIHKVGSHTAHRRILHAPPRGEVHPHTPTPAQVRPGHQLSGSLQEVVEPYPKFQPCSWLGLQALWGDWHSGTILQG

SEQ ID NO: 774821 - protein, 140 aa, Homo sapiens
AYLHLIPKRMVSSQRTVGPQEPPALPSWGCMQGLGRGGVLWKAPGRRCQSLTLRLPPAAVGGLAVPATCVAQRAGLQNISGMAVGEVVMQPPPTYGNHRAMCLASRGAWLGHAGHRLWFRVGSVKSGPGCGVSRTMTGLP

SEQ ID NO: 774822 - protein, 102 aa, Homo sapiens
QSMRGFLNRARTGAPALQLVSCGPKVLCHVCLALEHSDRAWVHTLAHVHACSNSGASGNKMVHREVFFTQAASNPTTEEPFTLCPSLKSAGFKNLSFQRQLC

SEQ ID NO: 774823 - protein, 225 aa, Homo sapiens
DSVATHLTKILNSDEHAVVISSAKTLCETVKDFVAKVEKTYDKTLENAVVADAVASKCSVLNEKLEQLLQALHTDSQAAPVLPGLSPLIVEEDAVESSSEESLGESKEQLGDDVTKPSSQKAVKPREIMLRANSLKKAVRQVIEEAGKVLDEPKEHRVNQQISPLIHDSTENRRNVTERTTKSMNGAHREPNNCPKTNHQATKMPRATDKSPSNQRENRHQEQRE

SEQ ID NO: 774824 - protein, 112 aa, Homo sapiens
FFFFRWSLTLSPRLECSGTISTHCNLRLPGSSDSPASASRVAGITDAGNHGRLIFVFLEEMGFHHVGQAPDLRRSTRLGLPECWDYRHEPPRPVPINPTLLTGLASIPPPSG

SEQ ID NO: 774825 - protein, 161 aa, Homo sapiens
MNINAKILNKILANRIQQHIKKLIHHDQVSFIPGMQGWFNIHKSINIIQHINRTNDKNHMIISIDAQKAFDKIQHSFMLKTLNKLGIDGMYLKIIRAIYDKPTANIILNGQKLEAFPLKTGTRQGCPLSPLLFNIVLEVLARAIRQEKEIKGIQLGKEEVK

SEQ ID NO: 774826 - protein, 103 aa, Homo sapiens
GNLFRIPPQSYSFPLLLRGKTIWILVCVVPFNLEVFLQERKFIHATLNSFAITKREREREREGWAQWLMPVTPALWEAKVEESLEPKSETSLGKMMTPLFIQK

SEQ ID NO: 774827 - protein, 194 aa, Homo sapiens
RRRTNDVIGDDRVVISSRGTLLEERRDVLRGEPQVQFKLVLVGDGGTGKTTFVKRHLTGEFEKKYVATLGVEVHPLVFHTNRGPIKFNVWDTAGQEKFGGLRDGYYIQAQCAIIMFDVTSRVTYKNVPNWHRDLVRVCENIPIVLCGNKVDINGPGTVKAKSMCLPPKEESSATTTFLPKVTTTFETKPFLWAC

SEQ ID NO: 774828 - protein, 148 aa, Homo sapiens
MAAQGEPQVQFKLVLVGDGGTGKTTFVKRHLTGEFEKKYVATLGVEVHPLVFHTNRGPIKFNVWDTAGQEKFGGLRDGYYIQAQCAIIMFDVTSRVTYKNVPNWHRDLVRVCENIPIVLCGNKVDINGPGTVKAKSMCLPPKEESSGA

SEQ ID NO: 774829 - protein, 168 aa, Homo sapiens
MAAQGEPQVQFKLVLVGDGGTGKTTFVKRHLTGEFEKKYVATLGVEVHPLVFHTNRGPIKFNVWDTAGQEKFGGLRDGYYIQAQCAIIMFDVTSRVTYKNVPNWHRDLVRVCENIPIVLCGNKVDINGPGTVKAKSMCLPPKEESSATTTFLPKVTTTFETKPFLWAC

SEQ ID NO: 774830 - protein, 168 aa, Homo sapiens; identical to SEQ ID NO: 774829

SEQ ID NO: 774831 - protein, 168 aa, Homo sapiens; identical to SEQ ID NO: 774829

SEQ ID NO: 774832 - protein, 199 aa, Homo sapiens
KRVQPTARYEAGCCFQPQSDGRGDASGRNAAMAAQGEPQVQFKLVLVGDGGTGKTTFVKRHLTGEFEKKYVATLGVEVHPLVFHTNRGPIKFNVWDTAGQEKFGGLRDGYYIQAQCAIIMFDVTSRVTYKNVPNWHRDLVRVCENIPIVLCGNKVDINGPGTVKAKSMCLPPKEESSATTTFLPKVTTTFETKPFLWAC

SEQ ID NO: 774833 - protein, 168 aa, Homo sapiens; identical to SEQ ID NO: 774829

SEQ ID NO: 774834 - protein, 168 aa, Homo sapiens; identical to SEQ ID NO: 774829

SEQ ID NO: 774835 - protein, 168 aa, Homo sapiens; identical to SEQ ID NO: 774829

SEQ ID NO: 774836 - protein, 168 aa, Homo sapiens; identical to SEQ ID NO: 774829

SEQ ID NO: 774837 - protein, 188 aa, Homo sapiens
MGCGAARALASVLCLRRNAAMAAQGEPQVQFKLVLVGDGGTGKTTFVKRHLTGEFEKKYVATLGVEVHPLVFHTNRGPIKFNVWDTAGQEKFGGLRDGYYIQAQCAIIMFDVTSRVTYKNVPNWHRDLVRVCENIPIVLCGNKVDINGPGTVKAKSMCLPPKEESSATTTFLPKVTTTFETKPFLWAC

SEQ ID NO: 774838 - protein, 168 aa, Homo sapiens; identical to SEQ ID NO: 774829

SEQ ID NO: 774839 - protein, 168 aa, Homo sapiens; identical to SEQ ID NO: 774829

SEQ ID NO: 774840 - protein, 168 aa, Homo sapiens; identical to SEQ ID NO: 774829

SEQ ID NO: 774841 - protein, 196 aa, Homo sapiens
TSCLSSWDYRRRRRLRLRRLNCASAIFPASVGRARRRFWKLVLVGDGGTGKTTFVKRHLTGEFEKKYVATLGVEVHPLVFHTNRGPIKFNVWDTAGQEKFGGLRDGYYIQAQCAIIMFDVTSRVTYKNVPNWHRDLVRVCENIPIVLCGNKVDINGPGTVKAKSMCLPPKEESSATTTFLPKVTTTFETKPFLWAC

SEQ ID NO: 774842 - protein, 172 aa, Homo sapiens
MGEAAGCEGEPQVQFKLVLVGDGGTGKTTFVKRHLTGEFEKKYVATLGVEVHPLVFHTNRGPIKFNVWDTAGQEKFGGLRDGYYIQAQCAIIMFDVTSRVTYKNVPNWHRDLVRVCENIPIVLCGNKVDINGPGTVKAKSMCLPPKEESSATTTFLPKVTTTFETKPFLWAC

SEQ ID NO: 774843 - protein, 170 aa, Homo sapiens
YAGRGWVNRPRRSGLVLVGDGGTGKTTFVKRHLTGEFEKKYVATLGVEVHPLVFHTNRGPIKFNVWDTAGQEKFGGLRDGYYIQAQCAIIMFDVTSRVTYKNVPNWHRDLVRVCENIPIVLCGNKVDINGPGTVKAKSMCLPPKEESSATTTFLPKVTTTFETKPFLWAC

SEQ ID NO: 774844 - protein, 161 aa, Homo sapiens
MCFSTLVLVGDGGTGKTTFVKRHLTGEFEKKYVATLGVEVHPLVFHTNRGPIKFNVWDTAGQEKFGGLRDGYYIQAQCAIIMFDVTSRVTYKNVPNWHRDLVRVCENIPIVLCGNKVDINGPGTVKAKSMCLPPKEESSATTTFLPKVTTTFETKPFLWAC

SEQ ID NO: 774845 - protein, 182 aa, Homo sapiens
  misc_feature (4)..(4): Xaa can be any naturally occurring amino acid
SLSXPRVCRGRVGPSDEGGRAQCQFKLVLVGDGGTGKTTFVKRHLTGEFEKKYVATLGVEVHPLVFHTNRGPIKFNVWDTAGQEKFGGLRDGYYIQAQCAIIMFDVTSRVTYKNVPNWHRDLVRVCENIPIVLCGNKVDINGPGTVKAKSMCLPPKEESSATTTFLPKVTTTFETKPFLWAC

SEQ ID NO: 774846 - protein, 147 aa, Homo sapiens
MAAQGEPQVQFKLVLVGDGGTGKTTFVKRHLTGEFEKKYVATLGVEVHPLVFHTNRGPIKFNVWDTAGQEKFGGLRDGYYIQAQCAIIMFDVTSRVTYKNVPNWHRDLVRVCAKSMCLPPKEESSATTTFLPKVTTTFETKPFLWAC

SEQ ID NO: 774847 - protein, 70 aa, Homo sapiens
DQLPEELGLQAPASAASPAFELRFRHLSSLSRTGAETLLEGTPRWLRRESPRSSSNLYWLVMVVLEKRPS

SEQ ID NO: 774848 - protein, 192 aa, Homo sapiens
MAAQGEPQVQFKLVLVGDGGTGKTTFVKRHLTGEFEKKYVATLGVEVHPLVFHTNRGPIKFNVWDTAGQEKFGGLRDGYYIQAQCAIIMFDVTSRVTYKNVPNWHRDLVRVCENIPIVLCGNKVDINGPGTVKAKSMCLPPKEESSATTTFLPKVTTTFVVAMPASRPQPEKLSIGPQACGAGHKVIEANEL

SEQ ID NO: 774849 - protein, 104 aa, Homo sapiens
MFDVTSRVTYKNVPNWHRDLVRVCENIPIVLCGNKVDINGPGTVKAKSMCLPPKEESSAHVETPNLGILLPFVAMPASRPQPEKLSIGPQACGAGHKVIEATEL

SEQ ID NO: 774850 - protein, 108 aa, Homo sapiens
MAISQSTEFLLAGCVPYIELNRSSVGVEHYGMNLNTQGGYILLLKFTSQMTFHEGRFSSTTITNQYKFELDLGALFVAMPASRPQPEKLSIGPQACGAGHQVIEANEL

SEQ ID NO: 774851 - protein, 179 aa, Homo sapiens
MAAQGEPQVQFKLVLVGDGGTGKTTFVKRHLTGEFEKKYVATLGVEVHPLVFHTNRGPIKFNVWDTAGQEKFGGLRDGYYIQAQCAIIMFDVTSRVTYKNVPNWHRDLVRVCENIPIVLCGNKVDINGPGTVKAKSMCLPPKEESSVLLKLGGYGIIRLTLILNPLTKHIAYPFLVLSL

SEQ ID NO: 774852 - protein, 199 aa, Homo sapiens; identical to SEQ ID NO: 774832

SEQ ID NO: 774853 - protein, 95 aa, Homo sapiens
EDPEYRAIPAQCAIIMFDVTSRVTYKNVPNWHRDLVRVCENIPIVLCGNKVDINGPGTVKAKSMCLPPKEESSATTTFLPKVTTTFETKPFLWAC

SEQ ID NO: 774854 - protein, 168 aa, Homo sapiens; identical to SEQ ID NO: 774829

SEQ ID NO: 774855 - protein, 168 aa, Homo sapiens; identical to SEQ ID NO: 774829

SEQ ID NO: 774856 - protein, 168 aa, Homo sapiens; identical to SEQ ID NO: 774829

SEQ ID NO: 774857 - protein, 168 aa, Homo sapiens; identical to SEQ ID NO: 774829

SEQ ID NO: 774858 - protein, 168 aa, Homo sapiens; identical to SEQ ID NO: 774829

SEQ ID NO: 774859 - protein, 196 aa, Homo sapiens
LTARYEDWRFKFGRGSDGRGDASGRNAAMAAQGEPQVQFKLVLVGDGGTGKTTFVKRHLTGEFEKKYVATLGVEVHPLVFHTNRGPIKFNVWDTAGQEKFGGLRDGYYIQAQCAIIMFDVTSRVTYKNVPNWHRDLVRVCENIPIVLCGNKVDINGPGTVKAKSMCLPPKEESSATTTFLPKVTTTFETKPFLWAC

SEQ ID NO: 774860 - protein, 191 aa, Homo sapiens
KRYVRGRVVTADGRGDASGRNAAMAAQGEPQVQFKLVLVGDGGTGKTTFVKRHLTGEFEKKYVATLGVEVHPLVFHTNRGPIKFNVWDTAGQEKFGGLRDGYYIQAQCAIIMFDVTSRVTYKNVPNWHRDLVRVCENIPIVLCGNKVDINGPGTVKAKSMCLPPKEESSATTTFLPKVTTTFETKPFLWAC

SEQ ID NO: 774861 - protein, 168 aa, Homo sapiens; identical to SEQ ID NO: 774829

SEQ ID NO: 774862 - protein, 183 aa, Homo sapiens
GCRNDIRLGRGWVVAMAAQGEPQVQFKLVLVGDGGTGKTTFVKRHLTGEFEKKYVATLGVEVHPLVFHTNRGPIKFNVWDTAGQEKFGGLRDGYYIQAQCAIIMFDVTSRVTYKNVPNWHRDLVRVCENIPIVLCGNKVDINGPGTVKAKSMCLPPKEESSATTTFLPKVTTTFETKPFLWAC

SEQ ID NO: 774863 - protein, 194 aa, Homo sapiens; identical to SEQ ID NO: 774827

SEQ ID NO: 774864 - protein, 146 aa, Homo sapiens
MLTFVKRHLTGEFEKKYVATLGVEVHPLVFHTNRGPIKFNVWDTAGQEKFGGLRDGYYIQAQCAIIMFDVTSRVTYKNVPNWHRDLVRVCENIPIVLCGNKVDINGPGTVKAKSMCLPPKEESSATTTFLPKVTTTFETKPFLWAC

SEQ ID NO: 774865 - protein, 133 aa, Homo sapiens
MSVLGATLGVEVHPLVFHTNRGPIKFNVWDTAGQEKFGGLRDGYYIQAQCAIIMFDVTSRVTYKNVPNWHRDLVRVCENIPIVLCGNKVDINGPGTVKAKSMCLPPKEESSATTTFLPKVTTTFETKPFLWAC

SEQ ID NO: 774866 - protein, 196 aa, Homo sapiens; identical to SEQ ID NO: 774859

SEQ ID NO: 774867 - protein, 95 aa, Homo sapiens; identical to SEQ ID NO: 774853

SEQ ID NO: 774868 - protein, 168 aa, Homo sapiens; identical to SEQ ID NO: 774829

SEQ ID NO: 774869 - protein, 168 aa, Homo sapiens; identical to SEQ ID NO: 774829

SEQ ID NO: 774870 - protein, 69 aa, Homo sapiens
SEQDPNGWLHIKLLPCLLLDPNQKSCPLDPRLVGQATRSLKPPNFRGVAPEQTGFSPGLKGLMTLLEEI

SEQ ID NO: 774871 - protein, 168 aa, Homo sapiens; identical to SEQ ID NO: 774829

SEQ ID NO: 774872 - protein, 106 aa, Homo sapiens
MVAEVCSMPAASAVKKPFDLRSKMGKWCHHRFPCCRGSGKSNMGTSGDHDDSFMKTLRSKMGKCCHHCFPCCRGSGTSNVGTSGDHDNSFMKTLRSKMGKWCCHCF

SEQ ID NO: 774873 - protein, 251 aa, Homo sapiens
TRQLGDADAWALRMLRKLTIEQINDWFTIGKTVTNVELLGAPPAFPAGAAREEVQRQDVAPGAGPAAQAPALAQAPARPAAAFERSLSQRSSEVEYINKYRQLEAQELDVCRSVQPTSGPGPRPSLAKLSSVTCIPGTTYKYPDLPISRYKEEVVSLIESNSVVIIHGATGSGKSTQLPQYILDHYVQRSAYCSIVVTQPRKIGASSIARWISKERAWTLGGVVGYQVGLEKIATEDTRLIYMTTGVLLQK

SEQ ID NO: 774874 - protein, 106 aa, Homo sapiens
MCETVASALAAPQQSKVVNETHNFNFWRTKPLFPALAPASCSRNCHPNSWLPQGWELENDKMLFQMPKFTKIYQLFSSSSTLLDTASVSLDPRVLKYHLKQFLPSQ

SEQ ID NO: 774875 - protein, 111 aa, Homo sapiens
KYQQTRFNSILKGLYTMTNKHMKRYSMLLIKEMQVKTPRCYLTPIRMAAIKNNSWLPQGWELENDKMLFQMPKFTKIYQLFSSSSTLLDTASVSLDPRVLKYHLKQFLPSQ

SEQ ID NO: 774876 - protein, 154 aa, Homo sapiens
APVCYPAGSGGRPGPARRGGPGSRGPGASLPAAGRPGRGWRAPAEGAAWLRRGDRAWVAAGGGLAGGADRRAEGGGGREVSPGPAGWKCLESLFSAWRSLEPSLQGYLSVLSVEEPPWASTWNGVLGASACERSRRCKFLLKAPDAPGPPFPDS

SEQ ID NO: 774877 - protein, 95 aa, Homo sapiens
NVSSCMSFGYKPVWQAKCELQLFWHAGEACAHKQPRSGCACLKVRLYHPGPGWARTQLISPSQKVLPGFNSGHQACPSLASQPALTPQRLENPVP

SEQ ID NO: 774878 - protein, 342 aa, Homo sapiens
MVKEKKKADKKGEKSARSPSSLSDNLDFSKQDGNTTRQEMSPAGVPLLGMQLNEVKPKKDRQNVQQNEDASQYEESILTKLIVESYEGEKVRGLYEGEGFAAFQGGCTYRGMFSEGLMHGQGTYIWADGLKYEGDFVKNVPMNHGVYTWPDGSMYEGEVVNGMRNGFGMFKCSTQPVSYIGHWCNGKRHGKLEIWKYIRRPVGRQHAPRGGEDEVADHQRRVHRAVGEGHPEWLWNTHMVSKENPQFPFFCLQGRLTFKNGRVYEGAFSNDHIAGFPDLEVEFISCLDLSSGVAPRLSRSAELIRKLDGSESHSVLGSSIELDLNLLLDMYPETVQPEEKKQ

SEQ ID NO: 774879 - protein, 158 aa, Homo sapiens
MASGTGSYKSGNIYEGQWEDNMRHGEGRMRWLTTNEEYTGRWERGIQNGFGTHIMVSKENPQFPFFCLQGRLTFKNGRVYEGAFSNDHIAGFPDLEVEFISCLDLSSGVAPRLSRSAELIRKLDGSESHSVLGSSIELDLNLLLDMYPETVQPEEKKQ

SEQ ID NO: 774880 - protein, 51 aa, Homo sapiens
MAVAPGWPKSPVQLRPPDSRRHHQPGAATWDQAPRSRLPVAGLLSPSTPKH

SEQ ID NO: 774881 - protein, 285 aa, Homo sapiens
RGGRAAAAAAQLRSPRVSLPRAQVGRSASAARMRPPACWWLLAPPALLALLTCSLAFGLASEDTKKEVKQSQDLEKSGISRKNDIDLKGIVFVIQSQSNSFHAKRAEQLKKSILKQAADLTQELPSVLLLHQLAKQEGAWTILPLLPHFSVTYSRNSSWIFFCEEETRIQIPKLLETLRRYDPSKHYAFSENPTVFKYPDFAAGWALSIPLVNKLTKRLKSESLKSDFTIDLKHEIALYIWDKGGGPPLTPVPEFCTNDVDFYCATTFHSFLPLCVSNRRKTSLH

SEQ ID NO: 774882 - protein, 302 aa, Homo sapiens
RGGRAAAAAAQLRSPRVSLPRAQVGRSASAARMRPPACWWLLAPPALLALLTCSLAFGLASEDTKKEVKQSQDLEKSGISRKNDIDLKGIVFVIQSQSNSFHAKRAEQLKKSILKQAADLTQELPSVLLLHQLAKQEGAWTILPLLPHFSVTYSRNSSWIFFCEEETRIQIPKLLETLRRYDPSKEWFLGKALHDEEATIIHHYAFSENPTVFKYPDFAAGWALSIPLVNKLTKRLKSESLKSDFTIDLKHEIALYIWDKGGGPPLTPVPEFCTNDVDFYCATTFHSFLPLCVSNRRKTSLH

SEQ ID NO: 774883 - protein, 86 aa, Homo sapiens
ILQTLAKVKHSTGVWALRNSLSNCLPDFITLCWEKVQGTSASHSAGTRAKMPHYGNIFPGSKPYCPDPSCSYLQVPQPVRSSGHWH

SEQ ID NO: 774884 - protein, 251 aa, Homo sapiens
REGAGLPAEGAVRVGSLRSCEFMASRCSEPYPEVSRIPTVRGCNGSLSGALSCCEDSARGSGPPKAPTVAEGPSSCLRRNVISERERRKRMSLSCERLRALLPQFDGRREDMASVLEMSVQFLRLASALGPSQEQHAILASSKEMWHSLQEDVLQLTLSSQIQAGVPDPGTGASSGTRTPDVKAFLESPWSLDPASASPEPVPHILASSRQWDPASCTSLGTDKCEALLGLCQVRGGLPPFSGESWVCMWG

SEQ ID NO: 774885 - protein, 135 aa, Homo sapiens
AAAYYYYCYCSNSSFKRCTGTCSVDSQFTHLAWINTPRRQGGLGPIRIPLLSDLTHQISKDYGVYLEDSGHTLRGLFIIDDKGILRQITLNDLPVGRSVDETLRLVQAFQYTDKHGEVCPAGWKPWYETIYSDST

SEQ ID NO: 774886 - protein, 312 aa, Homo sapiens
EELVSRGRAPVRAGVVHAVVAARRRQKRRSRQGTCFCARVVMEALPLLAATTPDHGRHRRLLLLPLLLFLLPAGAVQGWETEERPRTREEECHFYAGGQVYPGEASRVSVADHSLHLSKAKISKPAPYWEGTAVIDGEFKELKLTDYRGKYLVFFFYPLDFTFVCPTEIIAFGDRLEEFRSINTEVVACSVDSQFTHLAWINTPRRQGGLGPIRIPLLSDLTHQISKDYGVYLEDSGHTLRGLFIIDDKGILRQITLNDLPVGRSVDETLRLVQAFQYTDKHGEVCPAGWKPGSETIIPDPAGKLKYFDKLN

SEQ ID NO: 774887 - protein, 324 aa, Homo sapiens
EELVSRGRAPVRAGVVHAVVAARRRQKRRSRQGTCFCARVVMEALPLLAATTPDHGRHRRLLLLPLLLFLLPAGAVQGWETEERPRTREEECHFYAGGQVYPGEASRVSVADHSLHLSKAKISKPAPYWEGTAVIDGEFKELKLTDYRGKYLVFFFYPLDFTFVCPTEIIAFGDRLEEFRSINTEVVACSVDSQFTHLAWINTPRRQGGLGPIRIPLLSDLTHQISKDYGVYLEDSGHTLRGLFIIDDKGILRQITLNDLPVGRSVDETLRLVQAFQYTDKHGEVCPAGWKPGSETIKPEDTMKAWWPRESYNPRSSWKAEVFR

SEQ ID NO: 774888 - protein, 313 aa, Homo sapiens
EELVSRGRAPVRAGVVHAVVAARRRQKRRSRQGTCFCARVVMEALPLLAATTPDHGRHRRLLLLPLLLFLLPAGAVQGWETEERPRTREEECHFYAGGQVYPGEASRVSVADHSLHLSKAKISKPAPYWEGTAVIDGEFKELKLTDYRGKYLVFFFYPLDFTFVCPTEIIAFGDRLEEFRSINTEVVACSVDSQFTHLAWINTPRRQGGLGPIRIPLLSDLTHQISKDYGVYLEDSGHTLRGLFIIDDKGILRQITLNDLPVGRSVDETLRLVQAFQYTDKHGEVCPAGWKPGSETIKPEDTMKAWWPRESCK

SEQ ID NO: 774889 - protein, 133 aa, Homo sapiens
EELVSRGRAPVRAGVVHAVVAARRRQKRRSRQGTCFCARVVMEALPLLAATTPDHGRHRRLLLLPLLLFLLPAGAVQGWETEERPRTREEECHFYAGGQVYPGEASRVSVADHSLHLSKAKKVCKLHQTAKEI

SEQ ID NO: 774890 - protein, 246 aa, Homo sapiens
EELVSRGRAPVRAGVVHAVVAARRRQKRRSRQGTCFCARVVMEALPLLAATTPDHGRHRRLLLLPLLLFLLPAGAVQGWETEERPRTREEECHFYAGGQVYPGEASRVSVADHSLHLSKAKISKPAPYWEGTAVIDGEFKELKLTDYRGKYLVFFFYPLDFTFVCPTEIIAFGDRLEEFRSINTEVVACSVDSQFTHLAWINTPRRQGGLGPIRIPLLSDLTHQISKDYGVYLEDSGHTLRGPSLW

SEQ ID NO: 774891 - protein, 312 aa, Homo sapiens; identical to SEQ ID NO: 774886

SEQ ID NO: 774892 - protein, 315 aa, Homo sapiens
RERERERERERERERERERERETRAEFGTKRRSRQGTCFCARVVMEALPLLAATTPDHGRHRRLLLLPLLLFLLPAGAVQGWETEERPRTREEECHFYAGGQVYPGEASRVSVADHSLHLSKAKISKPAPYWEGTAVIDGEFKELKLTDYRGKYLVFFFYPLDFTFVCPTEIIAFGDRLEEFRSINTEVVACSVDSQFTHLAWINTPRRQGGLGPIRIPLLSDLTHQISKDYGVYLEDSGHTLRGLFIIDDKGILRQITLNDLPVGRSVDETLRLVQAFQYTDKHGEVCPAGWKPGSETIIPDPAGKLKYFDKLN

SEQ ID NO: 774893 - protein, 298 aa, Homo sapiens
GGAGLARPRPGSRGRRARGCSCPAAAEAALAPRDVFLRSRGHGGAAAASRDNSGPRPPPKAASAAATAVPAAGWSCAGLGDRGEAPDSRRGVPLLRGWTSVPGRGIPVSKPAPYWEGTAVIDGEFKELKLTDYRGKYLVFFFYPLDFTFVCPTEIIAFGDRLEEFRSINTEVVACSVDSQFTHLAWINTPRRQGGLGPIRIPLLSDLTHQISKDYGVYLEDSGHTLRGLFIIDDKGILRQITLNDLPVGRSVDETLRLVQAFQYTDKHGEVCPAGWKPGSETIIPDPAGKLKYFDKLN

SEQ ID NO: 774894 - protein, 257 aa, Homo sapiens
MDHRSRLRGTGLNRIPGTQSRAPRVPLPFHVQQEAREGEDWEREPPRQRPPIYEPPESEELPDNVMVSKPAPYWEGTAVIDGEFKELKLTDYRGKYLVFFFYPLDFTFVCPTEIIAFGDRLEEFRSINTEVVACSVDSQFTHLAWINTPRRQGGLGPIRIPLLSDLTHQISKDYGVYLEDSGHTLRGLFIIDDKGILRQITLNDLPVGRSVDETLRLVQAFQYTDKHGEVCPAGWKPGSETIIPDPAGKLKYFDKLN

SEQ ID NO: 774895 - protein, 227 aa, Homo sapiens
EELVSRGRAPVRAGVVHAVVAARRRQKRRSRQGTCFCARVVMEALPLLAATTPDHGRHRRLLLLPLLLFLLPAGAVQGWETEERPRTREEECHFYAGGQVYPGEASRVSVADHSLHLSKAKISKPAPYWEGTAVIDGEFKELKLTDYRGKYLVFFFYPLDFTFVCPTEIIAFGDRLEEFRSINTEVVACSVDSQFTHLAWSVSYTYIRRKKRMDLLLKHGQITLDMI

SEQ ID NO: 774896 - protein, 467 aa, Homo sapiens [sequence omitted]

SEQ ID NO: 774897 - protein, 407 aa, Homo sapiens [sequence omitted]

SEQ ID NO: 774898 - protein, 467 aa, Homo sapiens [sequence omitted]

SEQ ID NO: 774899 - protein, 118 aa, Homo sapiens
RKKKKEKKKKRIEHRKTRVDKNHFSILGYISLSLYTTEISLFQVFYLGFLHLHEIGLQSAFLTLFWSVYGVKIITPLNELESVAFFPVLHKNLRKIGMICLLKVYKAVWPWYLLVGRL

SEQ ID NO: 774900 - protein, 118 aa, Homo sapiens; identical to SEQ ID NO: 774899

SEQ ID NO: 774901 - protein, 101 aa, Homo sapiens
VLSWFETYYCMLHNKFWQENRPDYVNIQLYLSQTDGIQKIIGEKYHALNSRLFLGRPRWKLLFDEIAKYNRGKTVGVFCCGPNSLSKTLHKLRNQNNSYGT

SEQ ID NO: 774902 - protein, 92 aa, Homo sapiens
PSLLPPHTCSHPDQFRFLLVESSLRQGHCAGRAGLGAGGAPGVTPRCPAALHCPPHDAGARAHVSLCQGEIQRREQKSLKRDFFNKAAGGFG

SEQ ID NO: 774903 - protein, 68 aa, Homo sapiens
YRFSWNLRHWATLWTSVASPARPMYNQPPMGKISWKSVVTIWAWIPKCLSAAMATRFFPFMAMMAPPL

SEQ ID NO: 774904 - protein, 103 aa, Homo sapiens
MLCRQQQEFGPSAPRRSRVGKQVRDVAVTQQPPAPRPCVASGLPGAQGKANTAGLGRQGGAQGRTKPGPPKSHRVPDVPGAWRQERVSLKALQATLCLCPCGR

SEQ ID NO: 774905 - protein, 81 aa, Homo sapiens
KTNLLIFWWTSGSPPVLWELPHYLLLSDIFDTLIPVPHPLLLDMYLNDSSFPVHGAYLAYISSSLDSYVAFLLVLPQESGC

SEQ ID NO: 774906 - protein, 74 aa, Homo sapiens
PVRQNNRKQAGFSAMTLTGLSGQGLSRRYLGCGAKGKTVPPGQESCPLCRVTLDRGQRPCIWSVPVPLSPPWSC

SEQ ID NO: 774907 - protein, 68 aa, Homo sapiens
LSSIPGLHPQDTCSSVLPTVTIKYVIRHCPMSPGGNTPLLDFRVKRISAGYPRTSHYRFPGARSRNFA

SEQ ID NO: 774908 - protein, 81 aa, Homo sapiens
AEAGGSATGGSDLRPQGRAGRAGRRVRFPPSERKKSHFPWEELEEVGCLIFTLDLWSRPAGDSPHPPGSHEAGPAQPAGAI

SEQ ID NO: 774909 - protein, 869 aa, Homo sapiens
MKIIFPILSNPVFRRTVKLLLCLLWIGYSQGTTHVLRFGGIFEYVESGPMGAEELAFRFAVNTINRNRTLLPNTTLTYDTQKINLYDSFEASKKACDQLSLGVAAIFGPSHSSSANAVQSICNALGVPHIQTRWKHQVSDNKDSFYVSLYPDFSSLSRAILDLVQFFKWKTVTVVYDDSTGLIRLQELIKAPSRYNLRLKIRQLPADTKDAKPLLKEMKRGKEFHVIFDCSHEMAAGILKQALAMGMMTEYYHYIFTTLDLFALDVEPYRYSGVNMTGFRILNTENTQVSSIIEKWSMERLQAPPKPDSGLLDGFMTTDAALMYDAVHVVSVAVQQFPQMTVSSLQCNRHKPWRFGTRFMSLIKEAHWEGLTGRITFNKTNGLRTDFDLDVISLKEEGLEKIGTWDPASGLNMTESQKGKPANITDSLSNRSLIVTTILEEPYVLFKKSDKPLYGNDRFEGYCIDLLRELSTILGFTYEIRLVEDGKYGAQDDANGQWNGMVRELIDHKADLAVAPLAITYVREKVIDFSKPFMTLGISILYRKPNGTNPGVFSFLNPLSPDIWMYILLAYLGVSCVLFVIARFSPYEWYNPHPCNPDSDVVENNFTLLNSFWFGVGALMQQGSELMPKALSTRIVGGIWWFFTLIIISSYTANLAAFLTVERMESPIDSADDLAKQTKIEYGAVEDGATMTFFKKSKISTYDKMWAFMSSRRQSVLVKSNEEGIQRVLTSDYAFLMESTTIEFVTQRNCNLTQIGGLIDSKGYGVGTPMGSPYRDKITIAILQLQEEGKLHMMKEKWWRGNGCPEEESKEASALGVQNIGGIFIVLAAGLVLSVFVAVGEFLYKSKKNAQLEKESSIWLVPPYHPDTV

SEQ ID NO: 774910 - protein, 599 aa, Homo sapiens
TLDRGSGCRACGHRNTMKIIFPILSNPVFRRTVKLLLCLLWIGYSQGTTHVLRFGGIFEYVESGPMGAEELAFRFAVNTINRNRTLLPNTTLTYDTQKINLYDSFEASKKACDQLSLGVAAIFGPSHSSSANAVQSICNALGVPHIQTRWKHQVSDNKDSFYVSLYPDFSSLSRAILDLVQFFKWKTVTVVYDDSTGLIRLQELIKAPSRYNLRLKIRQLPADTKDAKPLLKEMKRGKEFHVIFDCSHEMAAGILKQALAMGMMTEYYHYIFTTLDLFALDVEPYRYSGVNMTGFRILNTENTQVSSIIEKWSMERLQAPPKPDSGLLDGFMTTDAALMYDAVHVVSVAVQQFPQMTVSSLQCNRHKPWRFGTRFMSLIKEAHWEGLTGRITFNKTNGLRTDFDLDVISLKEEGLEKIGTWDPASGLNMTESQKGKPANITDSLSNRSLIVTTILEEPYVLFKKSDKPLYGNDRFEGYCIDLLRELSTILGFTYEIRLVEDGKYGAQDDANGQWNGMVRELIDHKADLAVAPLAITYVREKVIDFSKPFMTLGISILYRKPNGTNPGVFSFLNPLSPDIWMYILLAYLGVSCVLFVIAR

SEQ ID NO: 774911 - protein, 924 aa, Homo sapiens
TLDRGSGCRACGHRNTMKIIFPILSNPVFRRTVKLLLCLLWIGYSQGTTHVLRFGGIFEYVESGPMGAEELAFRFAVNTINRNRTLLPNTTLTYDTQKINLYDSFEASKKACDQLSLGVAAIFGPSHSSSANAVQSICNALGVPHIQTRWKHQVSDNKDSFYVSLYPDFSSLSRAILDLVQFFKWKTVTVVYDDSTGLIRLQELIKAPSRYNLRLKIRQLPADTKDAKPLLKEMKRGKEFHVIFDCSHEMAAGILKQALAMGMMTEYYHYIFTTLDLFALDVEPYRYSGVNMTGFRILNTENTQVSSIIEKWSMERLQAPPKPDSGLLDGFMTTDAALMYDAVHVVSVAVQQFPQMTVSSLQCNRHKPWRFGTRFMSLIKEAHWEGLTGRITFNKTNGLRTDFDLDVISLKEEGLEKIGTWDPASGLNMTESQKGKPANITDSLSNRSLIVTTILEEPYVLFKKSDKPLYGNDRFEGYCIDLLRELSTILGFTYEIRLVEDGKYGAQDDANGQWNGMVRELIDHKADLAVAPLAITYVREKVIDFSKPFMTLGISILYRKPNGTNPGVFSFLNPLSPDIWMYILLAYLGVSCVLFVIARFSPYEWYNPHPCNPDSDVVENNFTLLNSFWFGVGALMQQGSELMPKALSTRIVGGIWWFFTLIIISSYTANLAAFLTVERMESPIDSADDLAKQTKIEYGAVEDGATMTFFKKSKISTYDKMWAFMSSRRQSVLVKSNEEGIQRVLTSDYAFLMESTTIEFVTQRNCNLTQIGGLIDSKGYGVGTPMGSPYRDKITIAILQLQEEGKLHMMKEKWWRGNGCPEEESKEASALGVQNIGGIFIVLAAGLVLSVFVAVGEFLYKSKKNAQLEKRSFCSAMVEELRMSLKCQRRLKHKPQAPVIVKTEEVINMHTFNDRRLPGKETMA

SEQ ID NO: 774912 - protein, 848 aa, Homo sapiens
TLDRGSGCRACGHRNTMKIIFPILSNPVFRRTVKLLLCLLWIGYSQGTTHVLRFGGIFEYVESGPMGAEELAFRFAVNTINRNRTLLPNTTLTYDTQKINLYDSFEASKKACDQLSLGVAAIFGPSHSSSANAVQSICNALGVPHIQTRWKHQVSDNKDSFYVSLYPDFSSLSRAILDLVQFFKWKTVTVVYDDSTGLIRLQELIKAPSRYNLRLKIRQLPADTKDAKPLLKEMKRGKEFHVIFDCSHEMAAGILKQALAMGMMTEYYHYIFTTLDLFALDVEPYRYSGVNMTGFRILNTENTQVSSIIEKWSMERLQAPPKPDSGLLDGFMTTDAALMYDAVHVVSVAVQQFPQMTVSSLQCNRHKPWRFGTRFMSLIKEAHWEGLTGRITFNKTNGLRTDFDLDVISLKEEGLEKIGTWDPASGLNMTESQKGKPANITDSLSNRSLIVTTILEEPYVLFKKSDKPLYGNDRFEGYCIDLLRELSTILGFTYEIRLVEDGKYGAQDDANGQWNGMVRELIDHKADLAVAPLAITYVREKVIDFSKPFMTLGISILYRKPNGSELMPKALSTRIVGGIWWFFTLIIISSYTANLAAFLTVERMESPIDSADDLAKQTKIEYGAVEDGATMTFFKKSKISTYDKMWAFMSSRRQSVLVKSNEEGIQRVLTSDYAFLMESTTIEFVTQRNCNLTQIGGLIDSKGYGVGTPMGSPYRDKITIAILQLQEEGKLHMMKEKWWRGNGCPEEESKEASALGVQNIGGIFIVLAAGLVLSVFVAVGEFLYKSKKNAQLEKRSFCSAMVEELRMSLKCQRRLKHKPQAPVIVKTEEVINMHTFNDRRLPGKETMA

SEQ ID NO: 774913 - protein, 71 aa, Homo sapiens
LAQGPELVEAEQELDPGLSEASCHLHPDLEQSLRRVATTRDVAALVSGSIAGGCPRQPNSHSSVRSQSEGC

SEQ ID NO: 774914 - protein, 237 aa, Homo sapiens
PQSKGTEWKGSHFPPPMRIGTPTAGPGPSAVMEGCLGVAELRKLSTFSAYLEDHSYNVEQIWRDIEDVIIKTLISAHPIIRHNYHTCFPNHTLNSACFEILGFDILLDHKLKPWLLEVNHSPSFSTDSRLDKEVKDGLLYDTLVLINLESCDKKKVLEEERQRGQFLQQCCSREMRIEEAKGFRAVQLKKTETYEKENCGGFRLIYPSLNSEKYEKFFQDNNSLFQNTVASRAREEY

SEQ ID NO: 774915 - protein, 319 aa, Homo sapiens
MASSAAGCVVIVGSGVIGRSWAMLFASGGFQVKLYDIEQQQIRNALENIRKEMKLLEQAGSLKGSLSVEEQLSLISGCPNIQEAVEGAMHIQECVPEDLELKKKIFAQLDSIIDDRVILSSSTSCLMPSKLFAGLVHVKQCIVAHPVNPPYYIPLVELVPHPETAPTTVDRTHALMKKIGQCPMRVQKEVAGFVLNRLQYAIISEAWRLVEEGIVSPSDLDLVMSEGLGMRYAFIGPLETMHLNAEGMLSYCDRYSEGIKHVLQTFGPIPEFSRATAEKVNQDMCMKVPDDPEHLAARRQWRDECLMRLAKLKSQVQPQ

SEQ ID NO: 774916 - protein, 297 aa, Homo sapiens
MLFASGGFQVKLYDIEQQQIRNALENIRKEMKLLEQAGSLKGSLSVEEQLSLISGCPNIQEAVEGAMHIQECVPEDLELKKKIFAQLDSIIDDRVILSSSTSCLMPSKLFAGLVHVKQCIVAHPVNPPYYIPLVELVPHPETAPTTVDRTHALMKKIGQCPMRVQKEVAGFVLNRLQYAIISEAWRLVEEGIVSPSDLDLVMSEGLGMRYAFIGPLETMHLNAEGMLSYCDRYSEGIKHVLQTFGPIPEFSRATAEKVNQDMCMKVPDDPEHLAARRQWRDECLMRLAKLKSQVQPQ

SEQ ID NO: 774917 - protein, 342 aa, Homo sapiens
RRARSSAGAWSQRPRRRVPGPTMASSAAGCVVIVGSGVIGRSWAMLFASGGFQVKLYDIEQQQIRNALENIRKEMKLLEQAGSLKGSLSVEEQLSLISGCPNIQEAVEGAMHIQECVPEDLELKKKIFAQLDSIIDDRVILSSSTSCLMPSKLFAGLVHVKQCIVAHPVNPPYYIPLVELVPHPETAPTTVDRTHALMKKIGQCPMRVQKEVAGFVLNRLQYAIISEAWRLVEEGIVSPSDLDLVMSEGLGMRYAFIGPLETMHLNAEGMLSYCDRYSEGIKHVLQTFGPIPEFSRATAEKVNQVCNFSATHCREACWLPGALAAPHLCSGWACLCSWNLYP

SEQ ID NO: 774918 - protein, 231 aa, Homo sapiens [sequence omitted]

SEQ ID NO: 774919 - protein, 297 aa, Homo sapiens; identical to SEQ ID NO: 774916

SEQ ID NO: 774920 - protein, 269 aa, Homo sapiens
MASSAAGCVVIVGSGVIGRSWAMLFASGGFQVKLYDIEQQQIRNALENIRKEMKLLEQAGSLKGSLSVEEQLSLISGCPNIQEAVEGAMHIQECVPEDLELKKKIFAQLDSIIDDRVILSSSTSCLMPSKLFAGLVHVKQCIVAHPVNPPYYIPLVELVPHPETAPTTVDRTHALMKKIGQCPMRVQKEVAGFVLNRLQYAIISEAWRLVEEGIVSPSDLDLVMSEGLGMRYAFIGPLETMHLNAEGMLSYCDRYSEGIKHVRHVHEGP

SEQ ID NO: 774921 - protein, 265 aa, Homo sapiens
MASSAAGCVVIVGSGVIGRSWAMLFASGGFQVKLYDIEQQQIRNALENIRKEMKLLEQAGSLKGSLSVEEQLSLISGCPNIQEAVEGAMHIQVNPPYYIPLVELVPHPETAPTTVDRTHALMKKIGQCPMRVQKEVAGFVLNRLQYAIISEAWRLVEEGIVSPSDLDLVMSEGLGMRYAFIGPLETMHLNAEGMLSYCDRYSEGIKHVLQTFGPIPEFSRATAEKVNQDMCMKVPDDPEHLAARRQWRDECLMRLAKLKSQVQPQ

SEQ ID NO: 774922 - protein, 239 aa, Homo sapiens
RRARSSAGAWSQRPRRRVPGPTMASSAAGCVVIVGSGVIGRSWAMLFASGGFQVKLYDIEQQQIRNALENIRKEMKLLEQAGSLKGSLSVEEQLSLISGCPNIQEAVEGAMHIQECVPEDLELKKKIFAQLDSIIDDRVILSSSTSCLMPSKLFAGLVHVKQCIVAHPVNPPYYIPLVELVPHPETAPTTVDRTHALMKKIGQCPMRVQKEVAGFVLNRLQYAIISEAWRLVELASVLG

SEQ ID NO: 774923 - protein, 208 aa, Homo sapiens
RRARSSAGAWSQRPRRRVPGPTMASSAAGCVVIVGSGVIGRSWAMLFASGGFQVKLYDIEQQQIRNALENIRKEMKLLEQAGSLKGSLSVEEQLSLISGCPNIQEAVEGAMHIQECVPEDLELKKKIFAQLDSIIDDRVILSSSTSCLMPSKLFAGLVHVKQCIVAHPVNPPYYIPLVELVPHPETAPTTVDRTHASRGREFSSSSRR

SEQ ID NO: 774924 - protein, 213 aa, Homo sapiens
EGRRAVCLPVSRARGAHPTQGPSGPPRPPGPRAQPMGAGPALPGAEGSQLRRRLVPAPAAPRPRPNHGVLRGRLRGDRWQVKGSEPRCCPWSPGRRRGRGALAWGPRGGRRVAVPAPASGPPKPCALRPLRRWRARGEARLEGLGRWRRPAELGLLPGSQRCRRFRGGPPRPRGLRFLDSVECRRVCPQVHIEVPGTVLNETNSGCDPATTVF

SEQ ID NO: 774925 - protein, 66 aa, Homo sapiens
NTHSDPSLCLSRKEMKLLEQAGSLKGSLSVEEQLSLISGCPNIQEAVEGAMHIQVSEGHWRRICGA

SEQ ID NO: 774926 - protein, 73 aa, Homo sapiens
MISTLKKEKPGTELERGWGCHHLWKRSRKVSLRVCGNGCDLFGEQPGGQCASAQTQVEHAAAGNVPAFNASSH

SEQ ID NO: 774927 - protein, 130 aa, Homo sapiens
MRLRRGRFLISGPWILLLMLECSGLIQGCQLHLLGSSDSPTSASEVSGMTGACPRTWLIFVFLVEAGFHCVGQVCLQLHISSDPFALASKMLLVSWGTACEGKIPNFWPWILLLMLECSGLIQGCQPHHP

SEQ ID NO: 774928 - protein, 84 aa, Homo sapiens
SVRLLELWVPSCHVGGRAHLRMTSTQREVSRAKRPGEMIPDDIIRFLGAAMVELASNVVPGMEVTRGHPHMSADTSSRVIRVPG

SEQ ID NO: 774929 - protein, 147 aa, Homo sapiens
CLKTSLKVLTITNCVLLESDLKHLSQCPSISQLKTLDLSGIRLTNYSLVPLQILLEKVAATLEYLDLDDCGIIDSQVNAILPALSRCFELHTFSFCGNPICMATLENLLSHTIILKNLCLELYPCPPRESYGADGTLCWSKFAQIRA

SEQ ID NO: 774930 - protein, 148 aa, Homo sapiens
PAPVTCPPSFRSPFPLHYPGLEPEPGGAPREWKSLGHAKVDPTQPPAVPSTPQTPPSSEATPRSCGRGPIWTPGSAGSAGRTLLSAAGRGGVRYLPGLPNPLEGASASKWFESGPLLFSRSKKIEQLTSFVCKTSFLASDLCYKVTRA

SEQ ID NO: 774931 - protein, 95 aa, Homo sapiens
  misc_feature (4)..(4): Xaa can be any naturally occurring amino acid
  misc_feature (14)..(14): Xaa can be any naturally occurring amino acid
ACTXSKLDLVERPXILYAGEDDRLIGRKDFALCCWAGRVRYLPGLPNPLEGASASKWFESGPLLFSRSKKIEQLTSFVCKTSFLASDLCYKVTRA

SEQ ID NO: 774932 - protein, 68 aa, Homo sapiens
PRAACNSARGGHLESSLLSHLVDPKDLEPRAANCTRVLVWHTRTEKPKMKQEEQLQRQGRGSDPAIEV

SEQ ID NO: 774933 - protein, 138 aa, Homo sapiens
MGDGRPPGTQGVVYFADDDNTYSRELFEEMRWTRGVSVWPVGLVGGLRFEGPQVQDGRVVGFHTAWEPSRPFPVDMAGFAVALPLLLDKPNAQFDSTAPRGHLESSLLSHLVDPKDLEPRAANCTRTESRCVTQAGVQ

SEQ ID NO: 774934 - protein, 335 aa, Homo sapiens
MKLKLKNVFLAYFLVSIAGLLYALVQLGQPCDCLPPLRAAAEQLRQKDLRISQLQAELRRPPPAPAQPPEPEALPTIYVVTPTYARLVQKAELVRLSQTLSLVPRLHWLLVEDAEGPTPLVSGLLAASGLLFTHLVVLTPKAQRLREGEPGWVHPRGVEQRNKALDWLRGRGGAVGGEKDPPPPGTQGVVYFADDDNTYSRELFEEMRWTRGVSVWPVGLVGGLRFEGPQVQDGRVVGFHTAWEPSRPFPVDMAGFAVALPLLLDKPNAQFDSTAPRGHLESSLLSHLVDPKDLEPRAANCTRVLVWHTRTEKPKMKQEEQLQRQGRGSDPAIEV

SEQ ID NO: 774935 - protein, 335 aa, Homo sapiens; identical to SEQ ID NO: 774934

SEQ ID NO: 774936 - protein, 335 aa, Homo sapiens; identical to SEQ ID NO: 774934

SEQ ID NO: 774937 - protein, 342 aa, Homo sapiens
VIQRIPVLPPQTGNVFLAYFLVSIAGLLYALVQLGQPCDCLPPLRAAAEQLRQKDLRISQLQAELRRPPPAPAQPPEPEALPTIYVVTPTYARLVQKAELVRLSQTLSLVPRLHWLLVEDAEGPTPLVSGLLAASGLLFTHLVVLTPKAQRLREGEPGWVHPRGVEQRNKALDWLRGRGGAVGGEKDPPPPGTQGVVYFADDDNTYSRELFEEMRWTRGVSVWPVGLVGGLRFEGPQVQDGRVVGFHTAWEPSRPFPVDMAGFAVALPLLLDKPNAQFDSTAPRGHLESSLLSHLVDPKDLEPRAANCTRVLVWHTRTEKPKMKQEEQLQRQGRGSDPAIEV

SEQ ID NO: 774938 - protein, 286 aa, Homo sapiens
EGPQETQAVAQEKLSALAGAGKWCLPLFPCAASLPCRLVQKAELVRLSQTLSLVPRLHWLLVEDAEGPTPLVSGLLAASGLLFTHLVVLTPKAQRLREGEPGWVHPRGVEQRNKALDWLRGRGGAVGGEKDPPPPGTQGVVYFADDDNTYSRELFEEMRWTRGVSVWPVGLVGGLRFEGPQVQDGRVVGFHTAWEPSRPFPVDMAGFAVALPLLLDKPNAQFDSTAPRGHLESSLLSHLVDPKDLEPRAANCTRVLVWHTRTEKPKMKQEEQLQRQGRGSDPAIEV

SEQ ID NO: 774939 - protein, 79 aa, Homo sapiens
DKTRASTLDKPNAQFDSTAPRGHLESSLLSHLVDPKDLEPRAANCTRVLVWHTRTEKPKMKQEEQLQRQGRGSDPAIEV

SEQ ID NO: 774940 - protein, 335 aa, Homo sapiens; identical to SEQ ID NO: 774934

SEQ ID NO: 774941 - protein, 335 aa, Homo sapiens; identical to SEQ ID NO: 774934

SEQ ID NO: 774942 - protein, 293 aa, Homo sapiens
MNLEKDLRISQLQAELRRPPPAPAQPPEPEALPTIYVVTPTYARLVQKAELVRLSQTLSLVPRLHWLLVEDAEGPTPLVSGLLAASGLLFTHLVVLTPKAQRLREGEPGWVHPRGVEQRNKALDWLRGRGGAVGGEKDPPPPGTQGVVYFADDDNTYSRELFEEMRWTRGVSVWPVGLVGGLRFEGPQVQDGRVVGFHTAWEPSRPFPVDMAGFAVALPLLLDKPNAQFDSTAPRGHLESSLLSHLVDPKDLEPRAANCTRVLVWHTRTEKPKMKQEEQLQRQGRGSDPAIEV

SEQ ID NO: 774943 - protein, 131 aa, Homo sapiens
AGFNGIGLPSRQQRLAWCSVPLAESGEMRAQPAPSRSPFRNPRKEQHDSESLGQQRLHANTTRYIILCAAAGLLAQCAMVHPCCCRTDSAARQLLGITVSQRSFPPVRDLSLTRSSTDSHSTSLSAPRRHS

SEQ ID NO: 774944 - protein, 106 aa, Homo sapiens
ENIKFENSISRLTEDKILLENYVRSIENERDTLEFEMRHLQREYLSLSDKICNQHNDPSKTTYISRREKFHFDNYTHEDTSSPQSRPLASDLKGYFKVKDRTLKHH

SEQ ID NO: 774945 - protein, 248 aa, Homo sapiens
YTTDPQAPSWRFGASSPGGSSDKQGEGAPPMCWRRGHCCWSCYVSKGASEDRRRKRKRGARLGLESCMGNSSNSEQSRPSHSRGPLSPFWAPRVGSEWGHEVLVSKRKEEELALQTVQSRFPGSTHMACRRPCPSITCSFKHSPLSPTTEWAPPVGCALWARLTCPVIGPVASSFPRPPTVPPCQVSHHLMRPLARPVSHPTPDTEPAAASQAPAICPPASALRRRTLLEFHMDPTFSLEPCHTPGHR

SEQ ID NO: 774946 - protein, 44 aa, Homo sapiens
KPHPLSRPIPGSRSGRSPKLLDRRAALCRLPSPGLQSPCSACGT

SEQ ID NO: 774947 - protein, 191 aa, Homo sapiens
RRAARRPAMRESQDAAGAHGWNRVGSTATKWFTGAPFGVQSHRFDISAVYPNWKKFSTFTEAPYSTRYSTQVSHIGPGTYSSKETCFSKKKLMKEVDTGWAKAQEATRLTQLPHFQYQAIMKEKRLKEQKLGPGSYNLKDFLEQLREKPCSTRGLLSSGEVRFRGLTGNYYPGPGNYGEKGNPYTKLEENA

SEQ ID NO: 774948 - protein, 105 aa, Homo sapiens
LFQSFITSSKHHLGPEYPKHGWVHLHIMLLPLRTSTSLAAEPSTLPSSLVNSSSCRLKSFAKSLTNFTNPESFYYHLHKPKPPLRLVSYLCIVKSTAINMRVQVS

SEQ ID NO: 774949 - protein, 61 aa, Homo sapiens
SVCNDHSALQTSAPCAVLGTVATVATIWLGAGRASHGARISYGRFVFDITDLWLFGLTMDL

SEQ ID NO: 774950 - protein, 67 aa, Homo sapiens
LGVLQVGAVSEAARETQTSEFQGRWRLELGAYRLTPNCLFEWLTGIPAYYAQNLKSPSAFCFSRATL

SEQ ID NO: 774951 - protein, 116 aa, Homo sapiens
MPGLQDPMELCQLNASLESRSSCFQMWSSAVSSASWGLTLGSSSGCEETPNASQNGLSGISPSAFLPPLAIFRVFSLPPLPVSGVFTCSSQKDHLPPALSSVQLHLSTPINRLHSI

SEQ ID NO: 774952 - protein, 504 aa, Homo sapiens
MGAGGPRRGEGPPDGGWGWVVLGACFVVTGFAYGFPKAVSVFFRALMRDFDAGYSDTAWVSSIMLAMLYGTGPVSSILVTRFGCRPVMLAGGLLASAGMILASFATRLLELYLTAGVLTGLGLALNFQPSLIMLGLYFERRRPLANGLAAAGSPVFLSALSPLGQQLLERFGWRGGFLLLGGLLLHCCACGAVMRPPPGPGPRPRRDSAGDRAGDAPGEAEADGAGLQLREASPWVRPRRRLLDLAVCTDRAFAVYAVTKFLMALGLFVPAILLVNYAKDAGVPDTDAAFLLSIVGFVDIVARPACGALAGLARLRPHVPYLFSLALLANGLTDLSSARARSYGALVAFCVAFGLSYGMVGALQFEVLMAAVGAPRFPSALGLVLLVEAAAVLIGPPSAGRLVDALKNYEIIFYLAGSEVALAGVFMAVATNCCLRCAKAAPSGPGTEGGASDTEDAEAEGDSEPLPVVAEEPGNLEALEVLSARGEPTEPEIEARPRLAAESV

SEQ ID NO: 774953 - protein, 504 aa, Homo sapiens; identical to SEQ ID NO: 774952

SEQ ID NO: 774954 - protein, 217 aa, Homo sapiens
GQSERGARRMAEAEGSSLLLLPPPPPPPRMAEVEAPTAAETDMKQYQGSGGVAMDVERSRFPYCVVWTPIPVLTWFFPIIGHMGICTSTGVIRDFAGPYFVSEDNMAFGKPAKYWKLDPAQVYASGPNAWDTAVHDASEEYKHRMHNLCCDNCHSHVALALNLMRYNNSTNWNMVTLCFFCLLYGKYVSVGAFVKTWLPFILLLGIILTVSLVFNLR

SEQ ID NO: 774955 - protein, 195 aa, Homo sapiens
LYGPEFGMAEVEAPTAAETDMKQYQGSGGVAMDVERSRFPYCVVWTPIPVLTWFFPIIGHMGICTSTGVIRDFAGPYFVSEDNMAFGKPAKYWKLDPAQVYASGPNAWDTAVHDASEEYKHRMHNLCCDNCHSHVALALNLMRYNNSTNWNMVTLCFFCLLYGKYVSVGAFVKTWLPFILLLGIILTVSLVFNLR

SEQ ID NO: 774956 - protein, 217 aa, Homo sapiens; identical to SEQ ID NO: 774954

SEQ ID NO: 774957 - protein, 217 aa, Homo sapiens; identical to SEQ ID NO: 774954

SEQ ID NO: 774958 - protein, 112 aa, Homo sapiens
MAFGKPAKYWKLDPAQVYASGPNAWDTAVHDASEEYKHRMHNLCCDNCHSHVALALNLMRYNNSTNWNMVTLCFFCLLYGKYVSVGAFVKTWLPFILLLGIILTVSLVFNLR

SEQ ID NO: 774959 - protein, 220 aa, Homo sapiens
LYGPEFGMAEVEAPTAAETDMKQYQGSGGVAMDVERSRFPYCVVWTPIPVLTWFFPIIGHMGICTSTGVIRDFAGPYFVSEDNMAFGKPAKCHLQEAFSHPILVRSGCHNKISSIGYWKLDPAQVYASGPNAWDTAVHDASEEYKHRMHNLCCDNCHSHVALALNLMRYNNSTNWNMVTLCFFCLLYGKYVSVGAFVKTWLPFILLLGIILTVSLVFNLR

SEQ ID NO: 774960 - protein, 92 aa, Homo sapiens
LYGPEFGMAEVEAPTAAETDMKQYQGSGGVAMDVERSRFPYCVVWTPIPVLTWFFPIIGHMGICTSTGVIRDFAGPYFVSDRPGGQCGQKDS

SEQ ID NO: 774961 - protein, 189 aa, Homo sapiens
GQSERGARRMAEAEGSSLLLLPPPPPPPRMAEVEAPTAAETDMKQYQGSGGVAMDVERSRFPYCVVWTPIPVLTWFFPIIGHMGICTSTGVIRDFAGPYFVSEDNMAFGKPAKYWKLDPAQVYASGPNAWDTAVHDASEEYKHRMHNLCCDNCHSHVALALNLMRYNNSTNWNMVTLCFFCLLYGKYVR

SEQ ID NO: 774962 - protein, 100 aa, Homo sapiens
LYGPEFGMAEVEAPTAAETDMKQYQGSGGVAMDVERSRFPYCVVWTPIPVLTWFFPIIGHMGICTSTGVIRDFAGPYFVSEDNMAFGKPAKLTLLPFGNK

SEQ ID NO: 774963 - protein, 217 aa, Homo sapiens; identical to SEQ ID NO: 774954

SEQ ID NO: 774964 - protein, 217 aa, Homo sapiens; identical to SEQ ID NO: 774954

SEQ ID NO: 774965 - protein, 116 aa, Homo sapiens
PSKCPEPFSPPRYWKLDPAQVYASGPNAWDTAVHDASEEYKHRMHNLCCDNCHSHVALALNLMRYNNSTNWNMVTLCFFCLLYGKYVSVGAFVKTWLPFILLLGIILTVSLVFNLR

SEQ ID NO: 774966 - protein, 196 aa, Homo sapiens
GQSERGARRMAEAEGSSLLLLPPPPPPPRMAEVEAPTAAETDMKQYQGSGGVAMDVERSRFPYCVVWTPIPVLTWFFPIIGHMGICTSTGVIRDFAGPYFVSEDNMAFGKPAKYWKLDPAQVYASGPNAWDTAVHDASEEYKHRMHNLCCDNCHSHVALALNLMRYNNSTNWNMVTLCFFCLLYGKYVRSLPRQRD

SEQ ID NO: 774967 - protein, 196 aa, Homo sapiens; identical to SEQ ID NO: 774966

SEQ ID NO: 774968 - protein, 67 aa, Homo sapiens
AVYDIANEDTLQAVANKDTVHNIANEGTIQDITNEGALYDIANDTDKARYADTVHDIANEDTVLRHR

SEQ ID NO: 774969 - protein, 839 aa, Homo sapiens
MHAQRQFVVAAVRAEVRRHEVAKQALNRLRKLAERVDDPELQDSIQASLDSIREAVINSQEWTLSRSIPELRLGVLGDARSGKSSLIHRFLTGSYQVLEKTESEQYKKEMLVDGQTHLVLIREEAGAPDAKFSGWADAVIFVFSLEDENSFQAVSRLHGQLSSLRGEGRGGLALALVGTQDRISASSPRVVGDARARALCADMKRCSYYETCATYGLNVDRVFQEVAQKVVTLRKQQQLLAACKSLPSSPSHSAASTPVAGQASNGGHTSDYSSSLPSSPNVGHRELRAEAAAVAGLSTPGSLHRAAKRRTSLFANRRGSDSEKRSLDSRGETTGSGRAIPIKQSFLLKRSGNSLNKEWKKKYVTLSSNGFLLYHPSINDYIHSTHGKEMDLLRTTVKVPGKRPPRAISAFGPSASINGLVKDMSTVQMGEGLEATTPMPSPSPSPSSLQPPPDQTSKHLLKPDRNLARALSTDCTPSGDLSPLSREPPPSPMVKKQRRKKLTTPSKTEGSAGQAEEENFEFLIVSSTGQTWHFEAASFEERDAWVQAIESQILASLQCCESSKVKLRTDSQSEAVAIQAIRNAKGNSICVDCGAPNPTWASLNLGALICIECSGIHRNLGTHLSRVRSLDLDDWPRELTLVLTAIGNDTANRVWESDTRGRAKPSRDSSREERESWIRAKYEQLLFLAPLSTSEEPLGRQLWAAVQAQDVATVLLLLAHARHGPLDTSVEDPQLRSPLHLAAELAHVVITQLLLWVREYGADVAARDAQGRTALFYARQAGSQLCADILLQHGCPGEGGSAATTPSAATTPSITATPSPRRRSSAASVGRADAPVALV

SEQ ID NO: 774970 - protein, 839 aa, Homo sapiens; identical to SEQ ID NO: 774969

SEQ ID NO: 774971 - protein, 617 aa, Homo sapiens
MHAQRQFVVAAVRAEVRRHEVAKQALNRLRKLAERVDDPELQDSIQASLDSIREAVINSQEWTLSRSIPELRLGVLGDARSGKSSLIHRFLTGSYQVLEKTESEQYKKEMLVDGQTHLVLIREEAGAPDAKFSGWADAVIFVFSLEDENSFQAVSRLHGQLSSLRGEGRGGLALALVGTQDRISASSPRVVGDARARALCADMKRCSYYETCATYGLNVDRVFQEVAQKVVTLRKQQQLLAACKSLPSSPSHSAASTPVAGQASNGGHTSDYSSSLPSSPNVGHRELRAEAAAVAGLSTPGSLHRAAKRRTSLFANRRGSDSEKRSLDSRGETTGSGRAIPIKQSFLLKRSGNSLNKEWKKKYVTLSSNGFLLYHPSINDYIHSTHGKEMDLLRTTVKVPGKRPPRAISAFGPSASINGLVKDMSTVQMGEGLEATTPMPSPSPSPSSLQPPPDQTSKHLLKPDRNLARALSTDCTPSGDLSPLSREPPPSPMVKKQRRKKLTTPSKTEGSAGQAEAKRKMWKLKSFGSLRNIYKAGNKWGAGRGAQLGCRRVGVPPPSPACARASCCPPPSAFPTPTAPLPGARDGHQGGRSWERQPLLELCPLMTPSHPPLRGKL

SEQ ID NO: 774972 - protein, 704 aa, Homo sapiens
ASTSGGVGAGAGARGKLSPRKGKSKTLDNSDLHPGPPAGSPPPLTLPPTPSPATAVTAASAQPPGPAPPITLEPPAPGLKRGREGGRASTRDRKMLKFISGIFTKSTGGPPGSGPLPGPPSLSSGSGSRELLGAELRASPKAVINSQEWTLSRSIPELRLGVLGDARSGKSSLIHRFLTGSYQVLEKTESEQYKKEMLVDGQTHLVLIREEAGAPDAKFSGWADAVIFVFSLEDENSFQAVSRLHGQLSSLRGEGRGGLALALVGTQDRISASSPRVVGDARARALCADMKRCSYYETCATYGLNVDRVFQEVAQKVVTLRKQQQLLAACKSLPSSPSHSAASTPVAGQASNGGHTSDYSSSLPSSPNVGHRELRAEAAAVAGLSTPGSLHRAAKRRTSLFANRRGSDSEKRSLDSRGETTGSGRAIPIKQSFLLKRSGNSLNKEWKKKYVTLSSNGFLLYHPSINDYIHSTHGKEMDLLRTTVKVPGKRPPRAISAFGPSASINGLVKDMSTVQMGEGLEATTPMPSPSPSPSSLQPPPDQTSKHLLKPDRNLARALSTDCTPSGDLSPLSREPPPSPMVKKQRRKKLTTPSKTEGSAGQAEAKRKMWKLKSFGSLRNIYKAGNKWGAGRGAQLGCRRVGVPPPSPACARASCCPPPSAFPTPTAPLPGARDGHQGGRSWERQPLLELCPLMTPSHPPLRGKL

SEQ ID NO: 774973 - protein, 569 aa, Homo sapiens [sequence omitted]

SEQ ID NO: 774974 - protein, 47 aa, Homo sapiens
MGPEERGSLRFHLLPTEATTPMPSPSPSPSSLQPPPDQTSKHLLKPD

SEQ ID NO: 774975 - protein, 138 aa, Homo sapiens
FSSFFFFLILFFSSVGEGWEDGTALFKSRNFGDRSDFETCPSTAQLGAVTSTEAAPLLPRGQSLLPSSEVWECERIWEGNKDPGENEIAFKEQVGSSFHFQPVKNGQGVSKPHNKSQHQVIHLPLVLMGSVFGLAGEM

SEQ ID NO: 774976 - protein, 839 aa, Homo sapiens; identical to SEQ ID NO: 774969

SEQ ID NO: 774977 - protein, 589 aa, Homo sapiens
MHAQRQFVVAAVRAEVRRHEVAKQALNRLRKLAERVDDPELQDSIQASLDSIREAVINSQEWTLSRSIPELRLGVLGDARSGKSSLIHRFLTGSYQVLEKTESEQYKKEMLVDGQTHLVLIREEAGAPDAKFSGWADAVIFVFSLEDENSFQAVSRLHGQLSSLRGEGRGGLALALVGTQDRISASSPRVVGDARARALCADMKRCSYYETCATYGLNVDRVFQEVAQKVVTLRKQQQLLAACKSLPSSPSHSAASTPVAGQASNGGHTSDYSSSLPSSPNVGHRELRAEAAAVAGLSTPGSLHRAAKRRTSLFANRRGSDSEKRSLDSRGETTGSGRAIPIKQSFLLKRSGNSLNKEWKKKYVTLSSNGFLLYHPSINDYIHSTHGKEMDLLRTTVKVPGKRPPRAISAFGPSASINGLVKDMSTVQMGEGLEATTPMPSPSPSPSSLQPPPDQTSKHLLKPDRNLARALSTDCTPSGDLSPLSREPPPSPMVKKQRRKKLTTPSKTEGSAGQAEAKRKMWKLKSFGSLRNIYKAEENFEFLIVSSTGQTWHFEAASFEERDAWVQAIESQILASLQCCESSKVKVRV

SEQ ID NO: 774978 - protein, 477 aa, Homo sapiens [sequence omitted]

SEQ ID NO: 774979 - protein, 87 aa, Homo sapiens
AAADYYYYYYYFKFAAGRQKLLTVNVVCGNLEAPLSTCFRELNSVIHFLCTVAARLTFYTLLQMNLFVNVMSSYQSIMQSRKGKAEL

SEQ ID NO: 774980 - protein, 90 aa, Homo sapiens
MCWLQAMSISRAGPLVSVVSRVSCRVYLPVGWRIVQEMGTRRSSLCVHCPFAVRGAGWGSHRLPSSPRHECAVVQQTASGRGNSAQKWDG

SEQ ID NO: 774981 - protein, 126 aa, Homo sapiens
PAPGRDPWRRRPPLPADPNFQKAHSFIPGLGVWGWSEEDPPILSCTPSPRGGAGWGTLSSGGDPEEAWAQEERKIFLSPSPPQVSPFPSLPGDNPDLHRQGLLQTHTHAHVFLEEGEKFQENLRWV

SEQ ID NO: 774982 - protein, 313 aa, Homo sapiens
MSLVSQNARHCSAEITADYGDGRGEIQATNASGSPTSMLVVDAPQCPQAPINSQCVNTSQAVQDPNDLEVLIDEQSRRLGALRVHDPLEDRSIALVNFMRMKSQTEGSIQQSEMLEFLREYSDQFPEILRRASAHLDQVFGLNLRVIDPQADTYNLVSKRGFQITDRIAESLDMPKASLLALVLGHILLNGNRAREASIWDLLLKVDMWDKPQRINNLFGNTRNLLTTDFVCMRFLEYWPVYGTNPLEFEFLWGSRAHREITKMEALKFVSDAHDEEPWSWPEEYNKALEGDKTKERSLTAGLEFWSEDTMND

SEQ ID NO: 774983 - protein, 179 aa, Homo sapiens
RPGVGYCCSRVAGVREKSGEAVGYCSSRMAEFSEEEEDTVRYCCSTIEDVPEEIKEAIAYFCSKMAEINKEPEGNIGHHCYIIPKVTEEVGEASSDMPEPSTSTSQENPSMKWRKKTTCEAKEGETDELLKAAKKIRSFVQQNSERRKAGKKSTVLIFYYHSNKKRDENQPSEDEDSHE

SEQ ID NO: 774984 - protein, 41 aa, Homo sapiens
MPGPAPKPDHHSQPQTCPVSPGQDHTWVRPWSKAREAWLRA

SEQ ID NO: 774985 - protein, 522 aa, Homo sapiens
GSAVARPSVPASGRSPGPSLRSARHAEIRPRLPVRLQPPCTGIWGDPPPAPPVCGPPPQRRCRCGFSAPFTPGASAAAAMARGDAPRDSYHLVGISFFILGLGTLLPWNFFITAIPYFQARLAGAGNSTARILSTNHTGPEDAFNFNNWVTLLSQLPLLLFTLLNSFLYQCVPETVRILGSLLAILLLFALTAALVKVDMSPGPFFSITMASVCFINSFSAVLQGSLFGQLGTMPSTYSTLFLSGQGLAGIFAALAMLLSMASGVDAETSALGYFITPCVGILMSIVCYLSLPHLKFARYYLANKSSQAQAQELETKAELLQSDENGIPSSPQKVALTLDLDLEKEPESEPDEPQKPGKPSVFTVFQKVTLSVFPAITAMVTSSTSPGKWSQFFNPICCFLLFNIMDWLGRSLTSYFLWPDEDSRLLPLLVCLRFLFVPLFMLCHVPQRSRLPILFPQDAYFITFMLLFAVSNGYLVSLTMCLAPRQVLPHEREVAGALMTFFLALGLSCGASLSFLFKALL

SEQ ID NO: 774986 - protein, 336 aa, Homo sapiens [sequence omitted]

SEQ ID NO: 774987 - protein, 302 aa, Homo sapiens
GSAVARPSVPASGRSPGPSLRSARHAEIRPRLPVRLQPPCTGIWGDPPPAPPVCGPPPQRRCRCGFSAPFTPGASAAAAMARGDAPRDSYHLVGISFFILGLGTLLPWNFFITAIPYFQARLAGAGNSTARILSTNHTGPEDAFNFNNWVTLLSQLPLLLFTLLNSFLYQCVPETVRILGSLLAILLLFALTAALVKVDMSPGPFFSITMASVCFINSFSAVLQGSLFGQLGTMPSTYSTLFLSGQGLAGIFAALAMLLSMASGVDAETSALGYFITPCVGILMSIVCYLSLPHLKLPVILA

SEQ ID NO: 774988 - protein, 492 aa, Homo sapiens
SGSGITSELTKREEPRTSAAPTELSAGGGGASAAAAMARGDAPRDSYHLVGISFFILGLGTLLPWNFFITAIPYFQARLAGAGNSTARILSTNHTGPEDAFNFNNWVTLLSQLPLLLFTLLNSFLYQCVPETVRILGSLLAILLLFALTAALVKVDMSPGPFFSITMASVCFINSFSAVLQGSLFGQLGTMPSTYSTLFLSGQGLAGIFAALAMLLSMASGVDAETSALGYFITPCVGILMSIVCYLSLPHLKFARYYLANKSSQAQAQELETKAELLQSDENGIPSSPQKVALTLDLDLEKEPESEPDEPQKPGKPSVFTVFQKIWLTALCLVLVFTVTLSVFPAITAMVTSSTSPGKWSQFFNPICCFLLFNIMDWLGRSLTSYFLWPDEDSRLLPLLVCLRFLFVPLFMLCHVPQRSRLPILFPQDAYFITFMLLFAVSNGYLVSLTMCLAPRQVLPHEREVAGALMTFFLALGLSCGASLSFLFKALL

SEQ ID NO: 774989 - protein, 284 aa, Homo sapiens
MGIHHVAQAGLELLGSSNMPASAFQNVGITGVSHHAELRITCFNCWESPFVWAWLSGNLGHKHDPSPSPLTPDENGIPSSPQKVALTLDLDLEKEPESEPDEPQKPGKPSVFTVFQKIWLTALCLVLVFTVTLSVFPAITAMVTSSTSPGKWSQFFNPICCFLLFNIMDWLGRSLTSYFLWPDEDSRLLPLLVCLRFLFVPLFMLCHVPQRSRLPILFPQDAYFITFMLLFAVSNGYLVSLTMCLAPRQVLPHEREVAGALMTFFLALGLSCGASLSFLFKALL

SEQ ID NO: 774990 - protein, 535 aa, Homo sapiens
GSAVARPSVPASGRSPGPSLRSARHAEIRPRLPVRLQPPCTGIWGDPPPAPPVCGPPPQRRCRCGFSAPFTPGASAAAAMARGDAPRDSYHLVGISFFILGLGTLLPWNFFITAIPYFQARLAGAGNSTARILSTNHTGPEDAFNFNNWVTLLSQLPLLLFTLLNSFLYQCVPETVRILGSLLAILLLFALTAALVKVDMSPGPFFSITMASVCFINSFSAVLQGSLFGQLGTMPSTYSTLFLSGQGLAGIFAALAMLLSMASGVDAETSALGYFITPCVGILMSIVCYLSLPHLKFARYYLANKSSQAQAQELETKAELLQSDENGIPSSPQKVALTLDLDLEKEPESEPDEPQKPGKPSVFTVFQKIWLTALCLVLVFTVTLSVFPAITAMVTSSTSPGKWSQFFNPICCFLLFNIMDWLGRSLTSYFLWPDEDSRLLPLLVCLRFLFVPLFMLCHVPQRSRLPILFPQDAYFITFMLLFAVSNGYLVSLTMCLAPRQVLPHEREVAGALMTFFLALGLSCGASLSFLFKALL

SEQ ID NO: 774991 - protein, 447 aa, Homo sapiens
SGSGITSELTKREEPRTSAAPTELSAGGGGASAAAAMARGDAPRDSYHLVGISFFILGLGTLLPWNFFITAIPYFQARLAGAGNSTARILSTNHTGPEDAFNFNNWVTLLSQLPLLLFTLLNSFLYQCVPETVRILGSLLAILLLFALTAALVKVDMSPGPFFSITMASVCFINSFSAVLQGSLFGQLGTMPSTYSTLFLSGQGLAGIFAALAMLLSMASGVDAETSALGYFITPCVGILMSIVCYLSLPHLKFARYYLANKSSQAQAQELETKAELLQSDLADSAVPCVVFTVTLSVFPAITAMVTSSTSPGKWSQFFNPICCFLLFNIMDWLGRSLTSYFLWPDEDSRLLPLLVCLRFLFVPLFMLCHVPQRSRLPILFPQDAYFITFMLLFAVSNGYLVSLTMCLAPRQVLPHEREVAGALMTFFLALGLSCGASLSFLFKALL

SEQ ID NO: 774992 - protein, 313 aa, Homo sapiens
GSAVARPSVPASGRSPGPSLRSARHAEIRPRLPVRLQPPCTGIWGDPPPAPPVCGPPPQRRCRCGFSAPFTPGASAAAAMARGDAPRDSYHLVGISFFILGLGTLLPWNFFITAIPYFQARLAGAGNSTARILSTNHTGPEDAFNFNNWVTLLSQLPLLLFTLLNSFLYQCVPETVRILGSLLAILLLFALTAALVKVDMSPGPFFSITMASVCFINSFSAVLQGSLFGQLGTMPSTYSTLFLSGQGLAGIFAALAMLLSMASGVDAETSALGYFITPCVGILMSIVCYLSLPHLVSLLLGSRPHLKASWIES

SEQ ID NO: 774993 - protein, 62 aa, Homo sapiens
GGEGWRSRPDQGEWGGQGDEEGGPFPCRRPHEDVQKWAGTCAEPLRSKLGILEPGSVPVATR

SEQ ID NO: 774994 - protein, 96 aa, Homo sapiens
MRFWKLRALLIVDSLVAVLSPALRKQVRVSFFTSGSENLHRVEKVHWGTRYAITIAFSCNPEHGIEDPAFPVASSWAKVTSGGAVWRQPRQSCTQP

SEQ ID NO: 774995 - protein, 139 aa, Homo sapiens [sequence omitted]

SEQ ID NO: 774996 - protein, 66 aa, Homo sapiens
TSVSHRAQPMNRLLRVISSEAPKEKRRFEILNQNVGKNVNSKAILMRSQMEMRNVWWAMEERPSFL

SEQ ID NO: 774997 - protein, 68 aa, Homo sapiens
FSGSPSGLVMQPLAKQQGALGPWRRAGQGLHCELPESKNHVQLTSVSPASSLCCSENVTWRFLHQVRD

SEQ ID NO: 774998 - protein, 395 aa, Homo sapiens
LSGDLGAGLLVNSPTDQWLHLRRGLNSGCCPRVLRVPREAHTCATLSRVPCVSCRHLLQGASESCLVEQQPPSLSSTAFSAVLQGSLFGQLGTMPSTYSTLFLSGQGLAGIFAALAMLLSMASGVDAETSALGYFITPCVGILMSIVCYLSLPHLKFARYYLANKSSQAQAQELETKAELLQSDENGIPSSPQKVALTLDLDLEKEPESEPDEPQKPGKPSVFTVFQKIWLTALCLVLVFTVTLSVFPAITAMVTSSTSPGKWSQFFNPICCFLLFNIMDWLGRSLTSYFLWPDEDSRLLPLLVCLRFLFVPLFMLCHVPQRSRLPILFPQDAYFITFMLLFAVSNGYLVSLTMCLAPRQVLPHEREVAGALMTFFLALGLSCGASLSFLFKALL

SEQ ID NO: 774999 - protein, 395 aa, Homo sapiens; identical to SEQ ID NO: 774998

SEQ ID NO: 775000 - protein, 186 aa, Homo sapiens
LSGDLGAGLLVNSPTDQWLHLRRGLNSGCCPRVLRVPREAHTCATLSRVPCVSCRHLLQGASESCLVEQQPPSLSSTAFSAVLQGSLFGQLGTMPSTYSTLFLSGQGLAGIFAALAMLLSMASGVDAETSALGYFITPCVGILMSIVCYLSLPHLKFARYYLANKSSQAQAQELETKAELLQSGKP

SEQ ID NO: 775001 - protein, 161 aa, Homo sapiens
ATCATPAALHRNLGRPAPRPTGLRPSAPAQVQVRLLCPFHPRRIRGGGHGARRRPAGQPDEDSRLLPLLVCLRFLFVPLFMLCHVPQRSRLPILFPQDAYFITFMLLFAVSNGYLVSLTMCLAPRQVLPHEREVAGALMTFFLALGLSCGASLSFLFKALL

SEQ ID NO: 775002 - protein, 334 aa, Homo sapiens
MTENSDKVPIALVGPDDVEFCSPPAYATLTVKPSSPARLLKVGAVVLISGAVLLLFGAIGAFYFWKGSDSHIYNVHYTMSINGKLQDGSMEIDAGNNLETFKMGSGAEEAIAVNDFQNGITGIRFAGGEKCYIKAQVKARIPEVGAVTKQSISSKLEGKIMPVKYEENSLIWVAVDQPVKDNSFLSSKVLELCGDLPIFWLKPTYPKEIQRERREVVRKIVPTTTKRPHSGPRSNPGAGRLNNETRPSVQEDSQAFNPDNPYHQQEGESMTFDPRLDHEGICCIECRRSYTHCQKICEPLGGYYPWPYNYQGCRSACRVIMPCSWWVARILGMV

SEQ ID NO: 775003 - protein, 370 aa, Homo sapiens
RLQRTLGRERGERGTRRSPGELFPARLPTPWGLPRGARVRWGPQVLAAQTRRSLSRPGPQAYATLTVKPSSPARLLKVGAVVLISGAVLLLFGAIGAFYFWKGSDSHIYNVHYTMSINGKLQDGSMEIDAGNNLETFKMGSGAEEAIAVNDFQNGITGIRFAGGEKCYIKAQVKARIPEVGAVTKQSISSKLEGKIMPVKYEENSLIWVAVDQPVKDNSFLSSKVLELCGDLPIFWLKPTYPKEIQRERREVVRKIVPTTTKRPHSGPRSNPGAGRLNNETRPSVQEDSQAFNPDNPYHQQEGESMTFDPRLDHEGICCIECRRSYTHCQKICEPLGGYYPWPYNYQGCRSACRVIMPCSWWVARILGMV

SEQ ID NO: 775004 - protein, 101 aa, Homo sapiens
PELLKKESITNSYAHFQIYNVHYTMSINGKLQDGSMEIDAGNNLETFKMGSGAEEAIAVNDFQNVSIFHAFREFNQASLRDFSNSRRSSVSHTHPNGNCSL

SEQ ID NO: 775005 - protein, 370 aa, Homo sapiens; identical to SEQ ID NO: 775003

SEQ ID NO: 775006 - protein, 191 aa, Homo sapiens
MGKQNSKLAPEVMEDLVKSTEFNEHELKQWYKGFLKDCPSGRLNLEEFQQLYVKFFPYGDASKFAQHAFRTFDKNGDGTIDFREFICALSITSRGSFEQKLNWAFNMYDLDGDGKITRVEMLEIIEAIYKMVGTVIMMKMNEDGLTPEQRVDKIFSKMDKNKDDQITLDEFKEAAKSDPSIVLLLQCDIQK

SEQ ID NO: 775007 - protein, 145 aa, Homo sapiens
MSMNSSSGTKDFSRTVQFAQHAFRTFDKNGDGTIDFREFICALSITSRGSFEQKLNWAFNMYDLDGDGKITRVEMLEIIEAIYKMVGTVIMMKMNEDGLTPEQRVDKIFSKMDKNKDDQITLDEFKEAAKSDPSIVLLLQCDIQK

SEQ ID NO: 775008 - protein, 78 aa, Homo sapiens
AWSRTRYAEEIIEAIYKMVGTVIMMKMNEDGLTPEQRVDKIFSKMDKNKDDQITLDEFKEAAKSDPSIVLLLQCDIQK

SEQ ID NO: 775009 - protein, 191 aa, Homo sapiens; identical to SEQ ID NO: 775006

SEQ ID NO: 775010 - protein, 191 aa, Homo sapiens; identical to SEQ ID NO: 775006

SEQ ID NO: 775011 - protein, 191 aa, Homo sapiens; identical to SEQ ID NO: 775006

SEQ ID NO: 775012 - protein, 191 aa, Homo sapiens; identical to SEQ ID NO: 775006

SEQ ID NO: 775013 - protein, 191 aa, Homo sapiens; identical to SEQ ID NO: 775006

SEQ ID NO: 775014 - protein, 45 aa, Homo sapiens
MNSKWIKDLKVRAKTIIKLLGENIREELHEIGFGNDFLDTTPSIG

SEQ ID NO: 775015 - protein, 223 aa, Homo sapiens
AGTSEGARRLRPPVPADAAGDMSSPDGPSFPSGPLSGGASPSGDEGFFPFVLERRDSFLGGGPGPEEPEDLALQLEQKEKDLLLAAELGKMLLERNEELRRQLETLSAQHLEREERLQQENHELRRGLAARGAEWEARAVELEGDVEALRAQLGEQRSEQQDSGRERARALSELSEQNLRLSQQLAQASQTEQELQRELDALRGQCQAQALAGAELRTRLESL

SEQ ID NO: 775016 - protein, 152 aa, Homo sapiens
SNRKQAAVRVTAVLQTRCGEGLVQSPGSRSRVAEPQRVAPGQRVNANPALQEAPPLRRRLLGGKKAPALCGRYAEARGGRRLALPRRWETVFAAATGRPAACTGISVSRGCREGALGGPPAASKASQPEAAGWRPGFTLRKVLTKDLRFLRF

SEQ ID NO: 775017 - protein, 223 aa, Homo sapiens
LRVFLPARPLSRVLLLPDSGSFFPCGPSPELFSLRTLGLSPHAAPLPSSPSRLRVFPRTAPPPSSSPSRLQFFLPARPLSRVLLLPDSRSFSPRGPSPEFFSFRTPGLSPLAAPLPSSSCSGLRVFLPARPLSRALLAPDSGSFSPRGPSPEFFSFRTPGLSPRAAPLPSCSPSGLRVFLPARPLSRVVLAPDSGSFSPRGPSPEFFSFRTPGLSPHGLSPEF

SEQ ID NO: 775018 - protein, 105 aa, Homo sapiens
MCACNLLFLAFNCKILRLRAESQPGRMLPCKEQGCCPPLLTLPLHLHGKCLMLRIPGVCSCRVAGMMSYFQSRQLPLLAWSGELQFECLESVNLRQPNSVTFSNF

SEQ ID NO: 775019 - protein, 96 aa, Homo sapiens
TSHLPETEGFLRLWTFNAKTRNIRGKAGCVVRLCGARQCVAQGKLRFMEASRRLPCKARQVASSAIPASAPASALRPIQCLEPTGVSRQVCVITTQ

SEQ ID NO: 775020 - protein, 96 aa, Homo sapiens; identical to SEQ ID NO: 775019

SEQ ID NO: 775021 - protein, 138 aa, Homo sapiens
MLAEARPPPDASRVSGKESALPRLPRHLQQEQLSLWLWGAPLLQTQKGCAFGSQTLSMRLPSLVLWTKQTVEWLLGVCIKGQTVAFTLCTITPLLHSPYPFFNLFVSGELLIRLLCLLMICHVILKVILFSYGQEKRK

SEQ ID NO: 775022 - protein, 755 aa, Homo sapiens
GVSRARQQGPEEGGQRPKGQRRDTEKKRDQPQRDKDPNVCPHCRRGSWSQCCLSVPMGHHRPWLHASVLWAGVASLLLPPAMTQQLRGDGLGFRNRNNSTGVAGLSEEASAELRHHLHSPRDHPDENKDVSTENGHHFWSHPDREKEDEDVSKEYGHLLPGHRSQDHKVGDEGVSGEEVFAEHGGQARGHRGHGSEDTEDSAEHRHHLPSHRSHSHQDEDEDEVVSSEHHHHILRHGHRGHDGEDDEGEEEEEEEEEEEEASTEYGHQAHRHRGHGSEEDEDVSDGHHHHGPSHRHQGHEEDDDDDDDDDDDDDDDDVSIEYRHQAHRHQGHGIEEDEDVSDGHHHRDPSHRHRSHEEDDNDDDDVSTEYGHQAHRHQDHRKEEVEAVSGEHHHHVPDHRHQGHRDEEEDEDVSTERWHQGPQHVHHGLVDEEEEEEEITVQFGHYVASHQPRGHKSDEEDFQDEYKTEVPHHHHHRVPREEDEEVSAELGHQAPSHRQSHQDEETGHGQRGSIKEMSHHPPGHTVVKDRSHLRKDDSEEEKEKEEDPGSHEEDDESSEQGEKGTHHGSRDQEDEEDEEEGHGLSLNQEEEEEEDKEEEEEEEDEERREERAEVGAPLSPDHSEEEEEEEEGLEEDEPRFTIIPNPLDRREEAGGASSEEESGEDTGPQDAQEYGNYQPGSLCGYCSFCNRCTECESCHCDEENMGEHCDQCQHCQFCYLCPLVCETVCAPGSYVDYFSSSLYQALADMLETPEP

SEQ ID NO: 775023 - protein, 724 aa, Homo sapiens
GVSRARQQGPEEGGQRPKGQRRDTEKKRDQPQRDKDPNVCPHCRRGSWSQCCLSVPMGHHRPWLHASVLWAGVASLLLPPAMTQQLRGDGLGFRNRNNSTGVAGLSEEASAELRHHLHSPRDHPDENKDVSTENGHHFWSHPDREKEDEDVSKEYGHLLPGHRSQDHKVGDEGVSGEEVFAEHGGQARGHRGHGSEDTEDSAEHRHHLPSHRSHSHQDEDEDEVVSSEHHHHILRHGHRGHDGEDDEGEEEEEEEEEEEEASTEYGHQAHRHRGHGSEEDEDVSDGHHHHGPSHRHQGHEEDDDDDDDDDDDDDDDDVSIEYRHQAHRHQGHGIEEDEDVSDGHHHRDPSHRHRSHEEDDNDDDDVSTEYGHQAHRHQDHRKEEVEAVSGEHHHHVPDHRHQGHRDEEEDEDVSTERWHQGPQHVHHGLVDEEEEEEEITVQFGHYVASHQPRGHKSDEEDFQDEYKTEVPHHHHHRVPREEDEEVSAELGHQAPSHRQSHQDEETGHGQRGSIKEMSHHPPGHTVVKDRSHLRKDDSEEEKEKEEDPGSHEEDDESSEQGEKGTHHGSRDQEDEEDEEEGHGLSLNQEEEEEEDKEEEEEEEDEERREERAEVGAPLSPDHSEEEEEEEEGLEEDEPRFTIIPNPLDRREEAGGASSEEESGEDTGPQDAQEYGNYQPGSCVATAPSAIDALNVRAVTVMRRTWVSTATSARALADMLETPEP

SEQ ID NO: 775024 - protein, 175 aa, Homo sapiens
GNPNDDIRYDLFLSCDKDPQTTVIENGRSQRGRFSFEVFRFVKHKNQKMSTVFLHCVTKLCRADDCPFLMPICSHRERRDAGRRTTWSPQSSSGSAVLSAGPIITRSDETPTNNSQLGSPSMPPFQLNAITSALISGMVILGVTSFSLLLCSLALLHRKGPTSLVLNGIRNPVFD

SEQ ID NO: 775025 - protein, 37 aa, Homo sapiens
MRAAGLLPLPLLVRPTGPVHIRGPSGLSEAMQAPSVW

SEQ ID NO: 775026 - protein, 137 aa, Homo sapiens
QVRENCARILAVLLNSYIPLDKLRALSLSFLTCIKGEIIPVKRAKMRLKCREPGVLLVPSTCQCLVAALAAVTALMMPCCLGYSWSEILKRSTERRVWNRKRNVVFFSYHTLVRLLVSGVLRKETSCFKASQSVLPP

SEQ ID NO: 775027 - protein, 103 aa, Homo sapiens
MHKTRQRKSRSLTVWCAHQPCHLWTLQMRGINFSLSHYYFEGLCDMQPNSHTFLLPVLSAPIPQPQHAAAPGPLGLGPGHTQHLCLSSQTFSGPSCPRVSRRA

SEQ ID NO: 775028 - protein, 86 aa, Homo sapiens
NCQPPELEEPIYKERCHVSSGEPGPSEGLAGPSQCDPAPMGSLFPPAQPWGAGVPLEGNSFQRLKGLQGHVNPASQVYPQNQQFYQ

SEQ ID NO: 775029 - protein, 210 aa, Homo sapiens
MGCESYLVPLILLGVDVEAAKRAEEELLLHDTRCWLNGGAMPEARHPRTGASALHVAAAKGYIEVMRLLLQAGYDPELRDGDGWTPLHAAAHWGVEDACRLLAEHGGGMDSLTHAGQRPCDLADEEVLSLLEELARKQEDLRNQKEASQSRGQEPQAPSSSKHRRSSVCRLSSREKISLQDLSKERRPGGAGGPPSRTRMRGKKVPPVRG

SEQ ID NO: 775030 - protein, 116 aa, Homo sapiens
CDYACGRARASFGGGSLSRRRPLAPGPAGSRRWARAVPGACGSLRAVDPRGLPAFLTPAAWRPRELHLPSIRIAQLLPRAPAAFAPQAPAETARKAGSSTPDHKRCLGTKGGRGPG

SEQ ID NO: 775031 - protein, 58 aa, Homo sapiens
EGPIRSIGSRDYGGGGPPAGFLRGGDPGTGVTGLGPSPKASEPGKQWCDLQSKAKGLR

SEQ ID NO: 775032 - protein, 114 aa, Homo sapiens
HLWSLSLSFPDNPALVLSESGTWPSILGWLSSTPLSVLIFYIFHPSAFLIPLLPSSLAFLGYICLLCKYNTGPGLEFQPHPIPHILSSSPSISVSLSHFEKLGISEGNRGWVVY

SEQ ID NO: 775033 - protein, 105 aa, Homo sapiens
MLGEHKVLTPKNNLANSTGTKLKKFQEESDFKPAKKTFGVNTVYGAKALNPLWRDGFLDFEKLLKNKITQYEKSLYICKFGVSLDGDVCLFLEVDDLKKITDALQ

SEQ ID NO: 775034 - protein, 127 aa, Homo sapiens
IRLEALLPSNDPTSPLVTSPTYLRLQPNKMSSSSSFKGYAISLEGRSGSAQRASLPYSLPFYPTNSSFGVQSELRYNSLLEPFLDLSSAHFHNTEIYSFVAFFIIVLKLPGYSLTLSRFKILQTKKC

SEQ ID NO: 775035 - protein, 490 aa, Homo sapiens
MSQTRKKTSSEGETKPQTSTVNKFLRGSNAESRKEDNDLKTSDSQPSDWIQKTATSETAKPLSSEMEWRSSMEKNEHFLQKLGKKAVNKCLDLNNCGLTTADMKEMGEAFEMIPELEELNLSWNSKVGGNLPLILQKFQKGSKIQMIELVDCSLTSEDGTFLGQLLPMLQSLEVLDLSINRDIVGSLNSIAQGLKSTSNLKVLKLHSCGLSQKSVKILDAAFRYLGELRKLDLSCNKDLGGGFEDSPAQLVMLKHLQVLDLHQCSLTADDVMSLTQVIPLLSNLQELDLSANKKMGSSSENLLSRLRFLPALKSLVINNCALESETFTALAEASVHLSALEVFNLSWNKCVGGNLKLLLETLKLSMSLQVLRLSSCSLVTEDVALLASVIQTGHLAKLQKLDLSYNDSICDAGWTMFCQNVRFLKELIELDISLRPSNFRDCGQWFRHLLYAVTKLPQITEIGMKRWILPASQEEELECFDQEKKKKHSL

SEQ ID NO: 775036 - protein, 302 aa, Homo sapiens
MSQTRKKTSSEGETKPQTSTVNKFLRGSNAESRKEDNDLKTSDSQPSDWIQKTATSETAKPLSSEMEWRSSMEKNEHFLQKLGKKAVNKCLDLNNCGLTTADMKEMGEAFEMIPELEELNLSWNSKVGGNLPLILQKFQKGSKIQMIELVDCSLTSEDGTFLGQLLPMLQSLEVLDLSINRDIVGSLNSIAQGLKSTSNLKVLKLHSCGLSQKSVKILDAAFRYLGELRKLDLSCNKDLGGGFEDSPAQLVMLKHLQVLDLHQCSLTADDVMSLSKYILQSKGKTFGILAYIWKLGNFNMYT

SEQ ID NO: 775037 - protein, 224 aa, Homo sapiens
MSLLIFLTAQVIPLLSNLQELDLSANKKMGSSSENLLSRLRFLPALKSLVINNCALESETFTALAEASVHLSALEVFNLSWNKCVGGNLKLLLETLKLSMSLQVLRLSSCSLVTEDVALLASVIQTGHLAKLQKLDLSYNDSICDAGWTMFCQNVRFLKELIELDISLRPSNFRDCGQWFRHLLYAVTKLPQITEIGMKRWILPASQEEELECFDQEKKKKHSL

SEQ ID NO: 775038 - protein, 788 aa, Homo sapiens
MTIHQFLLLFLFWVCLPHFCSPEIMFRRTPVPQQRILSSRVPRSDGKILHRQKRGWMWNQFFLLEEYTGSDYQYVGKLHSDQDKGDGSLKYILSGDGAGTLFIIDEKTGDIHATRRIDREEKAFYTLRAQAINRRTLRPVEPESEFVIKIHDINDNEPTFPEEIYTASVPEMSVVGTSVVQVTATDADDPSYGNSARVIYSILQGQPYFSVEPETGIIRTALPNMNRENREQYQVVIQAKDMGGQMGGLSGTTTVNITLTDVNDNPPRFPQNTIHLRVLESSPVGTAIGSVKATDADTGKNAEVEYRIIDGDGTDMFDIVTEKDTQEGIITVKKPLDYESRRLYTLKVEAENTHVDPRFYYLGPFKDTTIVKISIEDVDEPPVFSRSSYLFEVHEDIEVGTIIGTVMARDPDSISSPIRFSLDRHTDLDRIFNIHSGNGSLYTSKPLDRELSQWHNLTVIAAEINNPKETTRVAVFVRILDVNDNAPQFAVFYDTFVCENARPGQLIQTISAVDKDDPLGGQKFFFSLAAVNPNFTVQDNEDNTARILTRKNGFNRHEISTYLLPVVISDNDYPIQSSTGTLTIRVCACDSQGNMQSCSAEALLLPAGLSTGALIAILLCIIILLVIVVLFAALKRQRKKEPLILSKEDIRDNIVSYNDEGGGEEDTQAFDIGTLRNPAAIEEKKLRRDIIPETLFIPRRTPTAPDNTDVRDFINERLKEHDLDPTAPPYDSLATYAYEGNDSIAESLSSLESGTTEGDQNYDYLREWGPRFNKLAEMYGGGESDKDS

SEQ ID NO: 775039 - protein, 788 aa, Homo sapiens; identical to SEQ ID NO: 775038

SEQ ID NO: 775040 - protein, 116 aa, Homo sapiens
RCSLQGSHLLMVAIQMSIFLKSRTPSCHLPLDHPPPGALLSALFPPLLWSFPGPDLPPSCTTAFHGVNPLWLPIAIGLMFRAVPQTGHCWLLPPHLLGLLHTQGMPQATIYLSGTT

SEQ ID NO: 775041 - protein, 73 aa, Homo sapiens
RESPEQRAGQTSSGPPALRSPETPGLLKGSACPPLALSSLWRPGWQDLSAQPFRLVTSRVSLCVSGWSTVVQL

SEQ ID NO: 775042 - protein, 157 aa, Homo sapiens
MRNVNHQDNVENVCRACQRTSRQPLPSQAQGLGGKNGSMGLGQAQGPSALCSLGTWYPASQLLQLQQWLKGAKVQLGPLLQRVQALLTGGFHIVLSLWVHRSQELRYRNLYLDFRACMETAGCPGRSLLQGWSPHGEHLLGQYRREMWGRGPHTESP

SEQ ID NO: 775043 - protein, 221 aa, Homo sapiens
MALALAALAAVEPACGSRYQQLQNEEESGEPEQAAGDAPPPYSSISAESAAYFDYKDESGFPKPPSYNVATTLPSYDEAERTKAEATIPLVPGRDEDFVGRDDFDDADQLRIGNDGIFMLTFFMAFLFNWIGFFLSFCLTTSAAGRYGAISGFGLSLIKWILIVRFSTYFPGYFDGQYWLWWVFLVLGFLLFLRGFINYAKVRKMPETFSNLPRTRVLFIY

SEQ ID NO: 775044 - protein, 221 aa, Homo sapiens; identical to SEQ ID NO: 775043

SEQ ID NO: 775045 - protein, 221 aa, Homo sapiens; identical to SEQ ID NO: 775043

SEQ ID NO: 775046 - protein, 221 aa, Homo sapiens; identical to SEQ ID NO: 775043

SEQ ID NO: 775047 - protein, 221 aa, Homo sapiens; identical to SEQ ID NO: 775043

SEQ ID NO: 775048 - protein, 221 aa, Homo sapiens; identical to SEQ ID NO: 775043

SEQ ID NO: 775049 - protein, 221 aa, Homo sapiens; identical to SEQ ID NO: 775043

SEQ ID NO: 775050 - protein, 221 aa, Homo sapiens; identical to SEQ ID NO: 775043

SEQ ID NO: 775051 - protein, 211 aa, Homo sapiens
MALALAALAAVEPACGSRYQQLQNEEESGEPEQAAGDAPPPYSSISAESAAYFDYKDESGFPKPPSYNVATTLPSYDEAERTKAEATIPLVPGRDEDFVGRDDFDDADQLRIGNDGIFMLTFFMAFLFNWIGFFLSFCLTTSAAGRYGAISGFGLSLIKWILIVRFSTYFPGYFDGQYWLWWVFLVLDVFWQRPSCIYEFSLKKQENTCRK

SEQ ID NO: 775052 - protein, 190 aa, Homo sapiens
MALALAALAAVEPACGSRYQQLQNEEESGEPEQAAGDAPPPYSSISAESAAYFDYKDESGFPKPPSYNVATTLPSYDEAERTKAEATIPLVPGRDEDFVGRDDFDDADQLRIGNDGIFMLTFFMAFLFNWIGFFLSFCLTTSAAGRYGAISGFGLSLIKWILIVRFSTYFPGYFDGQYWLWWVFLVLVHL

SEQ ID NO: 775053 - protein, 221 aa, Homo sapiens; identical to SEQ ID NO: 775043

SEQ ID NO: 775054 - protein, 221 aa, Homo sapiens; identical to SEQ ID NO: 775043

SEQ ID NO: 775055 - protein, 154 aa, Homo sapiens
MKKSLENLNRLQVMLLHLTAAFLQRAQDEDFVGRDDFDDADQLRIGNDGIFMLTFFMAFLFNWIGFFLSFCLTTSAAGRYGAISGFGLSLIKWILIVRFSTYFPGYFDGQYWLWWVFLVLGFLLFLRGFINYAKVRKMPETFSNLPRTRVLFIY

SEQ ID NO: 775056 - protein, 109 aa, Homo sapiens
MALALAALAAVEPACGSRYQQLQNEEESGEPEQAAGDAPPPYSSISAESAAYFDYKDESGFPKPPSYNVATTLPSYDEAERTKAEATIPLVPGRDEDFVGRDDFDDVHL

SEQ ID NO: 775057 - protein, 221 aa, Homo sapiens; identical to SEQ ID NO: 775043

SEQ ID NO: 775058 - protein, 221 aa, Homo sapiens; identical to SEQ ID NO: 775043

SEQ ID NO: 775059 - protein, 240 aa, Homo sapiens
MALALAALAAVEPACGSRYQQLQNEEESGEPEQAAGDAPPPYSSISAESAAYFDYKDESGFPKPPSYNVATTLPSYDEAERTKAEATIPLVPGRDEDFVGRDDFDDADQLRIGNDGIFMLTFFMAFLFNWIGFFLSFCLTTSAAGRYGAISGFGLSLIKWILIVRFSTYFPGYFDGQYWLWWVFLVLEDLSIMQKFGRCQKLSQISPGPEFSLFIKDVFWQRPSCIYEFSLKKQENTCRK

SEQ ID NO: 775060 - protein, 240 aa, Homo sapiens; identical to SEQ ID NO: 775059

SEQ ID NO: 775061 - protein, 221 aa, Homo sapiens; identical to SEQ ID NO: 775043

SEQ ID NO: 775062 - protein, 150 aa, Homo sapiens
MALALAALAAVEPACGSRYQQLQNEEESGEPEQAAGDAPPPYSSISAESAAYFDYKDESGFPKPPSYNVATTLPSYDEAERTKAEATIPLVPGRFSTYFPGYFDGQYWLWWVFLVLGFLLFLRGFINYAKVRKMPETFSNLPRTRVLFIY

SEQ ID NO: 775063 - protein, 111 aa, Homo sapiens
MALALAALAAVEPACGSRYQQLQNEEESGEPEQAAGDAPPPYSSISAESAAYFDYKDESGFPKPPSYNVATTLPSYDEAERTKAEATIPLVPGRMTILGVGMNLHQLHILG

SEQ ID NO: 775064 - protein, 53 aa, Homo sapiens
SLDRPQGMGSELQPGHLKVPGHRGGLHGHPGHVRLRRGCYQEAPGLGSSQGAH

SEQ ID NO: 775065 - protein, 136 aa, Homo sapiens [sequence omitted]

SEQ ID NO: 775066 - protein, 221 aa, Homo sapiens
GGGTADGGGSVLGRCALQATPALLNQHPPFSEIYTNTYAAGGTVEGGVSGVELNTGMGTAVGLMAAGAAGASGAARKRSSTMGTLRDYADADINMAFLDSYFSEKAYAYADEDEGRPANDCLLIYDHEGVGSPVGSIGCCSWIVDDLDESCMETLDPKFRTLAEICLNTEIEPFPSHQACIPISTDLPLLGPNYFVNESSGLTPSEVEFQEEMAASEPVVH

SEQ ID NO: 775067 - protein, 478 aa, Homo sapiens
MPPMPSAPPVHPPPDGGWGWIVVGAAFISIGFSYAFPKAVTVFFKEIQQIFHTTYSEIAWISSIMLAVMYAGGPVSSVLVNKYGSRPVVIAGGLLCCLGMVLASFSSSVVQLYLTMGFITGLGLAFNLQPALTIIGKYFYRKRPMANGLAMAGSPVFLSSLAPFNQYLFNTFGWKGSFLILGSLLLNACVAGSLMRPLGPNQTTSKSKNKTGKTEDDSSPKKIKTKKSTWEKVNKYLDFSLFKHRGFLIYLSGNVIMFLGFFAPIIFLAPYAKDQGIDEYSAAFLLSVMAFVDMFARPSVGLIANSKYIRPRIQYFFSFAIMFNGVCHLLCPLAQDYTSLVLYAVFFGLGFGSVSSVLFETLMDLVGAPRFSSAVGLVTIVECGPVLLGPPLAGKLVDLTGEYKYMYMSCGAIVVAASVWLLIGNAINYRLLAKERKEENARQKTRESEPLSKSKHSEDVNVKVSNAQSVTSERETNI

SEQ ID NO: 775068 - protein, 478 aa, Homo sapiens; identical to SEQ ID NO: 775067

SEQ ID NO: 775069 - protein, 478 aa, Homo sapiens; identical to SEQ ID NO: 775067

SEQ ID NO: 775070 - protein, 478 aa, Homo sapiens; identical to SEQ ID NO: 775067

SEQ ID NO: 775071 - protein, 108 aa, Homo sapiens
MWFSQPDYIQAGMMRTARRPTGSASPVGLGPSRQSSDGFCIKFKDPAWWLLLCSPSEAWKLVFPACVTDGPSPTFVKKNLHFDESTVLLAFCNSIETHCHSLITAEDD

SEQ ID NO: 775072 - protein, 107 aa, Homo sapiens
YILEQPSALMGGSRWISGLAFLLLGGYNSGLDAAPSPRVPSSLGPQLPTTAYPLGTCSVTWLASLFLDSRPHSLLVFPRITYQINNFYRISCLKACIGETQPNAVSR

SEQ ID NO: 775073 - protein, 49 aa, Homo sapiens
MWASPRLLLGPPASVAHSEHLLPTQFPARWVRGLECLLLLLLFPGWKRR

SEQ ID NO: 775074 - protein, 75 aa, Homo sapiens
GHGDDVDTDDEGDEEVEIVAGAQRVNGAARGRVVGIVGPALGLCGEGGHERRAGGPPGAPGSCRLHSPPRWPSVG

SEQ ID NO: 775075 - protein, 96 aa, Homo sapiens
GSAIVSYYGEEEKDLVLNSVLMEVEEPEVLQDSLDGCYSTQSMYFELPDSFQHYRSVFYSFEEEHISFALYLDNRFFTLTVTSLHLVFQMLVIFPQ

SEQ ID NO: 775076 - protein, 46 aa, Homo sapiens
TTFPPLFAGVVVTKDCRTLPRGSQECGWCGVDRHCRPQIRVRGSGA

SEQ ID NO: 775077 - protein, 120 aa, Homo sapiens
QLSFIPAPSQSAEQRSEGHLCPVRNEPLWSCWSQVPSDWGCEPSLPDLGPSSGTPLPSAESIIDEVPAVRRIPAESPGHHWQPSQEAKLLGQDELVPEDRASELCQAVASSEQRPSVPSG

SEQ ID NO: 775078 - protein, 100 aa, Homo sapiens
MLHETFLNTHHPIKNRKGNPTVSPTLIPLSAPPWASLLPRVFREKGQSTALSNWASGDVAWLPGWATSSTVSKWHCPYSTSSSTARNECPDCKERSPATL

SEQ ID NO: 775079 - protein, 105 aa, Homo sapiens
TSSPYSLQCRPPRGTVACRLTHRSQALGLRRQAGPGVTPSPPPGKGAIEAHGTSIWVLIHKMGMAPSTPGMSAKMKHSIRPQGAGNKRPQPHFLFWPCGDAALPT

SEQ ID NO: 775080 - protein, 112 aa, Homo sapiens
MALLTPGFWTSSLQNTAEQIPLAAVPHYHKLGGLKQQMFSFSCGIQKPHIKMSAELVPSGDSAGVSHASLPASGAASNPWHSSASRCVISISASIFTWPPSLCGSVHPLFFS

SEQ ID NO: 775081 - protein, 187 aa, Homo sapiens [sequence omitted]

SEQ ID NO: 775082 - protein, 196 aa, Homo sapiens
MRLPLLVSAGVLLVALLPCPPCRALLSRGPVPGARQAPQHPQPLDFFQPPPQSEQPQQPQARPVLLRMGEEYFLRLGNLNKSPAAPLSPASSLLAGGSGSRPSPEQATANFFRVLLQQLLLPRRSLDSPAALAERGARNALGGHQEAPERERRSEEPPISLDLTFHLLREVLEMARAEQLAQQAHSNRKLMEIIGK

SEQ ID NO: 775083 - protein, 227 aa, Homo sapiens
MPFSWVGKTKSVSSLKQLSLVNVSVIKHLSSPWSVWLCKRMLNTYIFNKSCKGLKQQQHNTTTNKHNKHNTHNKNRTTTTNNKKDKTTTHEATTDATKRTTATQQPPPTARARQVWGQRDGGDTTTRENTAELPCGRQEGRSTTASNTRRRERRKGTDSGGGARHPTPDRTEMDKKTTPARGGQAPNGASGSQREDEDQPLTEGGQAYEHEEEQHEGERSQQHEPAA

SEQ ID NO: 775084 - protein, 196 aa, Homo sapiens; identical to SEQ ID NO: 775082

SEQ ID NO: 775085 - protein, 67 aa, Homo sapiens
ERVMRLGEEAEPADRSQEQHPGGRPLGRRQRWQRDLNPEPEPESEEPDGGFRTLYAELRRENERLRE

SEQ ID NO: 775086 - protein, 198 aa, Homo sapiens
MLMTTCKGTPVPLWEEDSHRRKLMNNVKKCHTCPVRRNDVCYRTSTEEGMPAWSEEAHGKGQKSQRPSTGNFPLSNSVKESSSCLSSSHPRSRSAAAQSSSRAASEISEIEYIDITDQNELSLDDTTDQHTLDNLEKELQVLRSLADTSEKLYSLTSEEFPDFSSQSLNISQISTDFLKTSHVRGPCGVEELSCSGRE

SEQ ID NO: 775087 - protein, 69 aa, Homo sapiens
RNPTSPHAPPQQPSASAGQSGRCLSGPQTWLSHRTCHTSSRGHNAHYHLPHGNVSSNRLINKASSAAQA

SEQ ID NO: 775088 - protein, 163 aa, Homo sapiens
DEDEDEDVQVEEAEKVLESSAPREVQKAEESKVPEDSLEECAITCSNSHGPCDSNQPHKNIKITFEEDEVNSTLVVDRESSHDECQDALNILPVPGPTSSATNVSMVVSAGPLSSEKAEMNILEINEKLRPQLAEKKQQFRNLKEKCFLTQLSGFLANQQKKY

SEQ ID NO: 775089 - protein, 36 aa, Homo sapiens
SQAGMDFCSLVSVLPQYTVSRASCRLWGALGKVCVE

SEQ ID NO: 775090 - protein, 127 aa, Homo sapiens
RGGGKEAAARLCPLTVGASATPASPHPQGTSKDDDGLWGVRAEVGGRGRSRGGPGATPGAPSPATPSPSARARPGLEPEPAARQPSAAARQPRAAEGAGGAAGRGSAAAAVNSGPALQRTPSSCTGH

SEQ ID NO: 775091 - protein, 86 aa, Homo sapiens
RGGGKEAAARLCPLTVGASATPASPHPQGTSKDDDGLWGVRAEVGGRGRSRGGPGATPGAPSPATPSPSVNSGPALQRTPSSCTGH

SEQ ID NO: 775092 - protein, 253 aa, Homo sapiens
MMMGCGESELKSADGEEAAAVPGPPPEPQVPQLRAPVPEPGLDLSLSPRPDSPQPRHGSPGRRKGRAERRGAARQRRQVRFRLTPPSPVRSEPQPAVPQELEMPVLKSSLALGLELRAAAGSHFDAAKAVEEQLRKSFQIRCGLEESVSEGLNVPRSKRLFRDLVSLQVPEEQVLNAALREKLALLPPQARAPHPKEPPGPGPDMTILCDPETLFYESPHLTLDGLPPLRLQLRPRPSEDTFLMHRTLRRWEA

SEQ ID NO: 775093 - protein, 178 aa, Homo sapiens [sequence omitted]

SEQ ID NO: 775094 - protein, 276 aa, Homo sapiens
MGCGESELKSADGEEAAAVPGPPPEPQVPQLRAPVPEPGLDLSLSPRPDSPQPRHGSPGRRKGRAERRGAARQRRQVSGGGWPPARDGLRPPGHCPALCSQVRFRLTPPSPVRSEPQPAVPQELEMPVLKSSLALGLELRAAAGSHFDAAKAVEEQLRKSFQIRCGLEESVSEGLNVPRSKRLFRDLVSLQVPEEQVLNAALREKLALLPPQARAPHPKEPPGPGPDMTILCDPETLFYESPHLTLDGLPPLRLQLRPRPSEDTFLMHRTLRRWEA

SEQ ID NO: 775095 - protein, 178 aa, Homo sapiens [sequence omitted]

SEQ ID NO: 775096 - protein, 161 aa, Homo sapiens
MGCGESELKSADGEEAAAVPGPPPEPQVPQLRAPVPEPGLDLSLSPRPDSPQPRHGSPGRRKGRAERRGAARQRRQVRFRLTPPSPVRSEPQPAVPQELEMPVLKSSLALGLELRAAAGSHFDAAKAVEEQLRKSFQIRCGLEESVSEGATWAWARHDHLV

SEQ ID NO: 775097 - protein, 178 aa, Homo sapiens [sequence omitted]

SEQ ID NO: 775098 - protein, 147 aa, Homo sapiens
MGCGESELKSADGEEAAAVPGPPPEPQVPQLRAPVPEPGLDLSLSPRPDSPQPRHGSPGRRKGRAERRGAARQRRQVSGGGWPPARDGLAPTWSLPCPLLPGPLPPDAALPGAVRAAACGAAGAGDARAEEQPGLGPGAAGRSREPL

SEQ ID NO: 775099 - protein, 220 aa, Homo sapiens
TIANMAAAAQIHSPLSRAGTSVIKERIPESPSPAPSLEENHRPGSQTSSHTSSSVSSSPSQMDHHLERMEEVPVQIPIMKSPLDKIQLTPGQALPAGFPGPFIFADSLSSVETLLTNIQGLLKVALDNARIQEKQIQQEKKELRLELYREREIRENLERQLAVELQSRTTMQKRLKKEKKTKRKLQEALEFESKRREQVEQALKQATTSDSGLRMLKGNV

SEQ ID NO: 775100 - protein, 254 aa, Homo sapiens
VTSIIRSSQTSLVTCVNGLRSPPLTGDLGGPSKRARPGPASTDSHEGSLQLEACRKASFLKQEPADEFSELFGPHQQGLPPPYPLSQLPPGPSLGGLGLGLAGRVVAGRQACRWVDCCAAYEQQEELVRHIEKSHIDQRKGEDFTCFWAGCVRRYKPFNARYKLLIHMRVHSGEKPNKCMFEGCSKAFSRLENLKIHLRSHTGEKPYLCQHPGCQKAFSNSSDRAKHQRTHLDTKPYACQIPGCSKRYTDPSSL

SEQ ID NO: 775101 - protein, 31 aa, Homo sapiens
PGYNGKGSTGPALTEEMDNNQHLCASGTNED

SEQ ID NO: 775102 - protein, 112 aa, Homo sapiens
LWVPGGPLRDSRKTTFSLAAAGEGEVEDCCSVPYPKETQGSRQNRLDIFTFSSQGHRSPNQQPLRVVSGRPFPWQRISAPRDIPHLGHPQRLCRDSSTTIAEVLGILEITCW

SEQ ID NO: 775103 - protein, 36 aa, Homo sapiens
KHHCLKALVPTTNQTGSGEASKSVHRLAEVQRKTLT

SEQ ID NO: 775104 - protein, 258 aa, Homo sapiens [sequence omitted]

SEQ ID NO: 775105 - protein, 129 aa, Homo sapiens
MMSSQFTQWTCLLQRRPRLNGRRAGGCGCCSLQSPPGLRHVGYAHVGVGVLWVGWPLLRPPGPCGDSPLQRRCPQLSSYCGPLRRRSILSGTMRRKHLLRQKQAPPPGASWRSLAQWWTSSLMRDYHQF

SEQ ID NO: 775106 - protein, 130 aa, Homo sapiens
EGFVVLQKVHPTQDGNDILEGFVVLQDLLHPTGNIVNIIAILGMDELSEEDKLTVSRARKIQRFLSQPFQVAEVFTGHMGKLVPLKETIKGFQQILAGEYDHLPEQAFYMVGPIEEAVAKADKLAEEHSS

SEQ ID NO: 775107 - protein, 113 aa, Homo sapiens
SGPELRDIEKILQDYKSLQDIIAILGMDELSEEDKLTVSRARKIQRFLSQPFQVAEVFTGHMGKLVPLKETIKGFQQILAGEYDHLPEQAFYMVGPIEEAVAKADKLAEEHSS

SEQ ID NO: 775108 - protein, 258 aa, Homo sapiens [sequence omitted]

SEQ ID NO: 775109 - protein, 180 aa, Homo sapiens
PRVAHASVQAIYVPADDLTDPAPATTFAHLDATTVLSRAIAELGIYPAVDPLDSTSRIMDPNIVGSEHYDVARGVQKILQDYKSLQDIIAILGMDELSEEDKLTVSRARKIQRFLSQPFQVAEVFTGHMGKLVPLKETIKGFQQILAGEYDHLPEQAFYMVGPIEEAVAKADKLAEEHSS

SEQ ID NO: 775110 - protein, 133 aa, Homo sapiens
MPVLIGRGIRPCWGWGFVGRVAAAPASGALRRLTPSASLPPAQLLLRAAPTAVHPVRDYAAQTSPSPKAGAATGRIVAVIGAVVDVQFDEGLPPILNALEVQGRETRLVLEVAQHLGESTVRTIAMDGTERLG

SEQ ID NO: 775111 - protein, 101 aa, Homo sapiens
TLRLGTRLVCNRTRYAHVGVGVLWVGWPLLRPPGPCGDSPLQRRCPQLSSYCGPLRRRSILSGTMRRKHLLRQKQAPPPGASWRSLAQWWTSSLMRDYHQF

SEQ ID NO: 775112 - protein, 145 aa, Homo sapiens
AWDYDSGTKSGWYGRNSRDILRPCWGWGFVGRVAAAPASGALRRLTPSASLPPAQLLLRAAPTAVHPVRDYAAQTSPSPKAGAATGRIVAVIGAVVDVQFDEGLPPILNALEVQGRETRLVLEVAQHLGESTVRTIAMDGTERLG

SEQ ID NO: 775113 - protein, 135 aa, Homo sapiens
KLGLGTRLGVVRPCWGWGFVGRVAAAPASGALRRLTPSASLPPAQLLLRAAPTAVHPVRDYAAQTSPSPKAGAATGRIVAVIGAVVDVQFDEGLPPILNALEVQGRETRLVLEVAQHLGESTVRTIAMDGTERLG

SEQ ID NO: 775114 - protein, 258 aa, Homo sapiens [sequence omitted]

SEQ ID NO: 775115 - protein, 258 aa, Homo sapiens [sequence omitted]

SEQ ID NO: 775116 - protein, 258 aa, Homo sapiens [sequence omitted]

SEQ ID NO: 775117 - protein, 258 aa, Homo sapiens [sequence omitted]

SEQ ID NO: 775118 - protein, 258 aa, Homo sapiens [sequence omitted]

SEQ ID NO: 775119 - protein, 258 aa, Homo sapiens [sequence omitted]

SEQ ID NO: 775120 - protein, 239 aa, Homo sapiens
MNEPPGARARVALTGLTVAEYFRDQEGQDVLLFIDNIFRFTQAGSEVSALLGRIPSAVGYQPTLATDMGTMQERITTTKKGSITSVQAIYVPADDLTDPAPATTFAHLDATTVLSRAIAELGIYPAVDPLDSTSRIMDPNIVGSEHYDVARGVQKILQDYKSLQDIIAILGMDELSEEDKLTVSRARKIQRFLSQPFQVAEVFTGHMGKLVPLKETIKGFQQILAVTLTSPEKPLLVDH

SEQ ID NO: 775121 - protein, 230 aa, Homo sapiens
MNEPPGARARVALTGLTVAEYFRDQEGQDVLLFIDNIFRFTQAGSEVSALLGRIPSAVGYQPTLATDMGTMQERITTTKKGSITSVQAIYVPADDLTDPAPATTFAHLDATTVLSRAIAELGIYPAVDPLDSTSRIMDPNIVGSEHYDVARGVQKILQTTIPPGYQCILGMDELSGETGDRSRAGNTAFLVSNQGEAKHWEGLRENRVQMGERHKAMAQEDNRTRAGAPN

SEQ ID NO: 775122 - protein, 258 aa, Homo sapiens [sequence omitted]

SEQ ID NO: 775123 - protein, 155 aa, Homo sapiens
ILSSAHVNMKIRVKNDFIMGKRDRMQIVQILRPCWGWGFVGRVAAAPASGALRRLTPSASLPPAQLLLRAAPTAVHPVRDYAAQTSPSPKAGAATGRIVAVIGAVVDVQFDEGLPPILNALEVQGRETRLVLEVAQHLGESTVRTIAMDGTERLG

SEQ ID NO: 775124 - protein, 259 aa, Homo sapiens
MPPLRTGARARVALTGLTVAEYFRDQEGQDVLLFIDNIFRFTQAGSEVSALLGRIPSAVGYQPTLATDMGTMQERITTTKKGSITSVQAIYVPADDLTDPAPATTFAHLDATTVLSRAIAELGIYPAVDPLDSTSRIMDPNIVGSEHYDVARGVQKILQDYKSLQDIIAILGMDELSEEDKLTVSRARKIQRFLSQPFQVAEVFTGHMGKLVPLKETIKGFQQILAGEYDHLPEQAFYMVGPIEEAVAKADKLAEEHSS

SEQ ID NO: 775125 - protein, 258 aa, Homo sapiens [sequence omitted]

SEQ ID NO: 775126 - protein, 187 aa, Homo sapiens
MNEPPGARARVALTGLTVAEYFRDQEGQDVLLFIDNIFRFTQAGSEVSALLGRIPSAVGYQPTLATDMGTMQERITTTKKGSITSVQDYKSLQDIIAILGMDELSEEDKLTVSRARKIQRFLSQPFQVAEVFTGHMGKLVPLKETIKGFQQILAGEYDHLPEQAFYMVGPIEEAVAKADKLAEEHSS

SEQ ID NO: 775127 - protein, 155 aa, Homo sapiens; identical to SEQ ID NO: 775123

SEQ ID NO: 775128 - protein, 258 aa, Homo sapiens [sequence omitted]

SEQ ID NO: 775129 - protein, 188 aa, Homo sapiens
MQERITTTKKGSITSVQAIYVPADDLTDPAPATTFAHLDATTVLSRAIAELGIYPAVDPLDSTSRIMDPNIVGSEHYDVARGVQKILQDYKSLQDIIAILGMDELSEEDKLTVSRARKIQRFLSQPFQVAEVFTGHMGKLVPLKETIKGFQQILAGEYDHLPEQAFYMVGPIEEAVAKADKLAEEHSS

SEQ ID NO: 775130 - protein, 155 aa, Homo sapiens; identical to SEQ ID NO: 775123

SEQ ID NO: 775131 - protein, 155 aa, Homo sapiens; identical to SEQ ID NO: 775123

SEQ ID NO: 775132 - protein, 155 aa, Homo sapiens; identical to SEQ ID NO: 775123

SEQ ID NO: 775133 - protein, 155 aa, Homo sapiens; identical to SEQ ID NO: 775123

SEQ ID NO: 775134 - protein, 155 aa, Homo sapiens; identical to SEQ ID NO: 775123

SEQ ID NO: 775135 - protein, 155 aa, Homo sapiens; identical to SEQ ID NO: 775123

SEQ ID NO: 775136 - protein, 155 aa, Homo sapiens; identical to SEQ ID NO: 775123

SEQ ID NO: 775137 - protein, 155 aa, Homo sapiens; identical to SEQ ID NO: 775123

SEQ ID NO: 775138 - protein, 155 aa, Homo sapiens; identical to SEQ ID NO: 775123

SEQ ID NO: 775139 - protein, 155 aa, Homo sapiens; identical to SEQ ID NO: 775123

SEQ ID NO: 775140 - protein, 82 aa, Homo sapiens
  misc_feature (42)..(43): Xaa can be any naturally occurring amino acid
  misc_feature (46)..(46): Xaa can be any naturally occurring amino acid
LPRLFGFGFAFTSLFCFVLAWLIVLCCALLFFLFSGFLIGCXXSSXILAGEYDHLPEQAFYMVGPIEEAVAKADKLAEEHSS

SEQ ID NO: 775141 - protein, 141 aa, Homo sapiens
RGGGKPKTKARYEAGWLRPCWGWGFVGRVAAAPASGALRRLTPSASLPPAQLLLRAAPTAVHPVRDYAAQTSPSPKAGAATGRIVAVIGAVVDVQFDEGLPPILNALEVQGRETRLVLEVAQHLGESTVRTIAMDGTERLG

SEQ ID NO: 775142 - protein, 258 aa, Homo sapiens [sequence omitted]

SEQ ID NO: 775143 - protein, 258 aa, Homo sapiens [sequence omitted]

SEQ ID NO: 775144 - protein, 258 aa, Homo sapiens [sequence omitted]

SEQ ID NO: 775145 - protein, 258 aa, Homo sapiens [sequence omitted]

SEQ ID NO: 775146 - protein, 258 aa, Homo sapiens [sequence omitted]

SEQ ID NO: 775147 - protein, 301 aa, Homo sapiens
  misc_feature (248)..(253): Xaa can be any naturally occurring amino acid
  misc_feature (256)..(258): Xaa can be any naturally occurring amino acid
  misc_feature (267)..(267): Xaa can be any naturally occurring amino acid
  misc_feature (274)..(275): Xaa can be any naturally occurring amino acid
  misc_feature (277)..(277): Xaa can be any naturally occurring amino acid
MNEPPGARARVALTGLTVAEYFRDQEGQDVLLFIDNIFRFTQAGSEVSALLGRIPSAVGYQPTLATDMGTMQERITTTKKGSITSVQAIYVPADDLTDPAPATTFAHLDATTVLSRAIAELGIYPAVDPLDSTSRIMDPNIVGSEHYDVARGVQKILQDYKSLQDIIAILGMDELSEEDKLTVSRARKIQRFLSQPFQVAEVFTGHMGKLVPLKETIKGFQQILAGEYDHLPEQAFYMVGPIEEAVDXXXXXXRNXXXLAVFIFVLXVSLICGXXVXQKASFFCVGCTRALIEDIFFLNSI

SEQ ID NO: 775148 - protein, 155 aa, Homo sapiens; identical to SEQ ID NO: 775123

SEQ ID NO: 775149 - protein, 258 aa, Homo sapiens [sequence omitted]

SEQ ID NO: 775150 - protein, 187 aa, Homo sapiens; identical to SEQ ID NO: 775126

SEQ ID NO: 775151 - protein, 155 aa, Homo sapiens; identical to SEQ ID NO: 775123

SEQ ID NO: 775152 - protein, 247 aa, Homo sapiens
GTDGPGGRGGSRVVGAELRRRRGRGGKGRPQLGRARLAAGNRVSPRFSSGVRARDPISGLSRASPARWSPRWDCGVLAEQPELHFFLSGRSCLKHAYLHLLLLRTELTEAVFFPPRPCRPIDPAAARATQGGPTHRRLGPLGSKPPLPSRGPAHPPHSHSQRSLPPASGEKRNFHFPPAKLHTCSLHHRAPPPTFCFSSIAESDPLLPLDWNPYPRHFIIPRFSTPRTLAATLFYFPSLKLVKEAPA

SEQ ID NO: 775153 - protein, 149 aa, Homo sapiens
QLQGFLRKAPSTFIHLRRVLQIPLENQLQVLPILMLPNETHEEVNDGVGTAVKRRQENGRQMNMRIYDFPVHVDPGKQGPLNANGQAAEEEDQHCEQMVMYSLVSGIFWDPQRILTTRTRLDTQRTTNKKISHVTVMNLMFDTKQNQHH

SEQ ID NO: 775154 - protein, 105 aa, Homo sapiens
MTPLLLFMASYPPRIQTSNSFLLPQSPSRPCLMRSPGSLRSCPIESLPVFLKWLQAPIHPIRKTKGFSLFVFFPALPQCLQQCQVHNKFANMTIKGLWIFIINII

SEQ ID NO: 775155 - protein, 370 aa, Homo sapiens
MGDRRFIDFQFQDSNSSLRPRLGNATANNTCIVDDSFKYNLNGAVYSVVFILGLITNSVSLFVFCFRMKMRSETAIFITNLAVSDLLFVCTLPFKIFYNFNRHWPFGDTLCKISGTAFLTNIYGSMLFLTCISVDRFLAIVYPFRSRTIRTRRNSAIVCAGVWILVLSGGISASLFSTTNVNNATTTCFEGFSKRVWKTYLSKITIFIEVVGFIIPLILNVSCSSVVLRTLRKPATLSQIGTNKKKVLKMITVHMAVFVVCFVPYNSVLFLYALVRSQAITNCFLERFAKIMYPITLCLATLNCCFDPFIYYFTLESFQKSFYINAHIRMESLFKTETPLTTKPSLPAIQEEVSDQTTNNGGELMLESTF

SEQ ID NO: 775156 - protein, 852 aa, Homo sapiens
MSSVSPIQIPSRLPLLLTHEGVLLPGSTMRTSVDSARNLQLVRSRLLKGTSLQSTILGVIPNTPDPASDAQDLPPLHRIGTAALAVQVVGSNWPKPHYTLLITGLCRFQIVQVLKEKPYPIAEVEQLDRLEEFPNTCKMREELGELSEQFYKYAVQLVEMLDMSVPAVAKLRRLLDSLPREALPDILTSIIRTSNKEKLQILDAVSLEERFKMTIPLLVRQIEGLKLLQKTRKPKQDDDKRVIAIRPIRRITHISGTLEDEDEDEDNDDIVMLEKKIRTSSMPEQAHKVCVKEIKRLKKMPQSMPEYALTRNYLELMVELPWNKSTTDRLDIRAARILLDNDHYAMEKLKKRVLEYLAVRQLKNNLKGPILCFVGPPGVGKTSVGRSVAKTLGREFHRIALGGVCDQSDIRGHRRTYVGSMPGRIINGLKTVGVNNPVFLLDEVDKLGKSLQGDPAAALLEVLDPEQNHNFTDHYLNVAFDLSQVLFIATANTTATIPAALLDRMEIIQVPGYTQEEKIEIAHRHLIPKQLEQHGLTPQQIQIPQVTTLDIITRYTREAGVRSLDRKLGAICRAVAVKVAEGQHKEAKLDRSDVTEREGCREHILEDEKPESISDTTDLALPPEMPILIDFHALKDILGPPMYEMEVSQRLSQPGVAIGLAWTPLGGEIMFVEASRMDGEGQLTLTGQLGDVMKESAHLAISWLRSNAKKYQLTNAFGSFDLLDNTDIHLHFPAGAVTKDGPSAGVTIVTCLASLFSGRLVRSDVAMTGEITLRGLVLPVGGIKDKVLAAHRAGLKQVIIPRRNEKDLEGIPGNVRQDLSFVTASCLDEVLNAAFDGGFTVKTRPGLLNSKL

SEQ ID NO: 775157 - protein, 852 aa, Homo sapiens; identical to SEQ ID NO: 775156

SEQ ID NO: 775158 - protein, 183 aa, Homo sapiens [sequence omitted]

SEQ ID NO: 775159 - protein, 725 aa, Homo sapiens
MSSVSPIQIPSRLPLLLTHEGVLLPGSTMRTSVDSARNLQLVRSRLLKGTSLQSTILGVIPNTPDPASDAQDLPPLHRIGTAALAVQVVGSNWPKPHYTLLITGLCRFQIVQVLKEKPYPIAEVEQLDRLEEFPNTCKMREELGELSEQFYKYAVQLVEMLDMSVPAVAKLRRLLDSLPREALPDILTSIIRTSNKEKLQILDAVSLEERFKMTIPLLVRQIEGLKLLQKTRKPKQDDDKRVIAIRPIRRITHISGTLEDEDEDEDNDDIVMLEKKIRTSSMPEQAHKVCVKEIKRLKKMPQSMPEYALTRNYLELMVELPWNKSTTDRLDIRAARILLDNDHYAMEKLKKRVLEYLAVRQLKNNLKGPILCFVGPPGVGKTSVGRSVAKTLGREFHRIALGGVCDQSDIRGHRRTYVGSMPGRIINGLKTVGVNNPVFLLDEVDKLGKSLQGDPAAALLEVLDPEQNHNFTDHYLNVAFDLSQVLFIATANTTATIPAALLDRMEIIQVPGYTQEEKIEIAHRHLIPKQLEQHGLTPQQIQIPQVTTLDIITRYTREAGVRSLDRKLGAICRAVAVKVAEGQHKEAKLDRSDVTEREGCREHILEDEKPESISDTTDLALPPEMPILIDFHALKDILGPPMYEMEVSQRLSQPGVAIGLAWTPLGGEIMFVEASRMDGEGQLTLTGQLGDVMKESAHLAISWLRSNAKKYQLTNGRSLHPARQA

SEQ ID NO: 775160 - protein, 85 aa, Homo sapiens
IINPKNFFLSLQVGGIKDKVLAAHRAGLKQVIIPRRNEKDLEGIPGNVRQDLSFVTASCLDEVLNAAFDGGFTVKTRPGLLNSKL

SEQ ID NO: 775161 - protein, 792 aa, Homo sapiens
MSSVSPIQIPSRLPLLLTHEGVLLPGSTMRTSVDSARNLQLVRSRLLKGTSLQSTILGVIPNTPDPASDAQDLPPLHRIGTAALAVQVVGSNWPKPHYTLLITGLCRFQIVQVLKEKPYPIAEVEQLDRLEEFPNTCKMREELGELSEQFYKYAVQLVEMLDMSVPAVAKLRRLLDSLPREALPDILTSIIRTSNKEKLQILDAVSLEERFKMTIPLLVRQIEGLKLLQKTRKPKQDDDKRVIAIRPIRRITHISGTLEDEDEDEDNDDIVMLEKKIRTSSMPEQAHKVCVKEIKRLKKMPQSMPEYALTRNYLELMVELPWNKSTTDRLDIRAARILLDNDHYAMEKLKKRVLEYLAVRQLKNNLKGPILCFVGPPGVGKTSVGRSVAKTLGREFHRIALGGVCDQSDIRGHRRTYVGSMPGRIINGLKTVGVNNPVFLLDEVDKLGKSLQGDPAAALLEVLDPEQNHNFTDHYLNVAFDLSQVLFIATANTTATIPAALLDRMEIIQVPGYTQEEKIEIAHRHLIPKQLEQHGLTPQQIQIPQVTTLDIITRYTREAGVRSLDRKLGAICRAVAVKVAEGQHKEAKLDRSDVTEREGCREHILEDEKPESISDTTDLALPPEMPILIDFHALKDILGPPMYEMEVSQRLSQPGVAIGLAWTPLGGEIMFVEASRMDGEGQLTLTGQLGDVMKESAHLAISWLRSNAKKYQLTNAFGSFDLLDNTDIHLHFPAGAVTKDGPSAGVTIVTCLASLFSGRLVRSDVAMTGEITLRGLVLPVSMKKQFIWLFFI

SEQ ID NO: 775162 - protein, 224 aa, Homo sapiens
RLGTRLGLNRPRPMYEMEVSQRLSQPGVAIGLAWTPLGGEIMFVEASRMDGEGQLTLTGQLGDVMKESAHLAISWLRSNAKKYQLTNAFGSFDLLDNTDIHLHFPAGAVTKDGPSAGVTIVTCLASLFSGRLVRSDVAMTGEITLRGLVLPVGGIKDKVLAAHRAGLKQVIIPRRNEKDLEGIPGNVRQDLSFVTASCLDEVLNAAFDGGFTVKTRPGLLNSKL

SEQ ID NO: 775163 - protein, 832 aa, Homo sapiens
MSSVSPIQIPSRLPLLLTHEGVLLPGSTMRTSVDSARNLQLVRSRLLKGTSLQSTILGVIPNTPDPASDAQDLPPLHRIGTAALAVQVVGSNWPKPHYTLLITGLCRFQIVQVLKEKPYPIAEVEQLDRLEEFPNTCKMREELGELSEQFYKYAVQLVEMLDMSVPAVAKLRRLLDSLPREALPDILTSIIRTSNKEKLQILDAVSLEERFKMTIPLLVRQIEGLKLLQKTRKPKQDDDKRVIAIRPIRRITHISGTLEDEDEDEDNDDIVMLEKKIRTSSMPEQAHKVCVKEIKRLKKMPQSMPEYALTRNYLELMVELPWNKSTTDRLDIRAARILLDNDHYAMEKLKKRVLEYLAVRQLKNNLKGPILCFVGPPGVGKTSVGRSVAKTLGREFHRIALGGVCDQSDIRGHRRTYVGSMPGRIINGLKTVGVNNPVFLLDEVDKLGKSLQGDPAAALLELSQVLFIATANTTATIPAALLDRMEIIQVPGYTQEEKIEIAHRHLIPKQLEQHGLTPQQIQIPQVTTLDIITRYTREAGVRSLDRKLGAICRAVAVKVAEGQHKEAKLDRSDVTEREGCREHILEDEKPESISDTTDLALPPEMPILIDFHALKDILGPPMYEMEVSQRLSQPGVAIGLAWTPLGGEIMFVEASRMDGEGQLTLTGQLGDVMKESAHLAISWLRSNAKKYQLTNAFGSFDLLDNTDIHLHFPAGAVTKDGPSAGVTIVTCLASLFSGRLVRSDVAMTGEITLRGLVLPVGGIKDKVLAAHRAGLKQVIIPRRNEKDLEGIPGNVRQDLSFVTASCLDEVLNAAFDGGFTVKTRPGLLNSKL

SEQ ID NO: 775164 - protein, 852 aa, Homo sapiens; identical to SEQ ID NO: 775156

SEQ ID NO: 775165 - protein, 852 aa, Homo sapiens; identical to SEQ ID NO: 775156

SEQ ID NO: 775166 - protein, 68 aa, Homo sapiens
VVVVAAAVVVVVVATVVVVAMVVGATVGMMGTVVASVVAAMAVASVLLTAPVAPTVVGGNVGGAEREM

SEQ ID NO: 775167 - protein, 97 aa, Homo sapiens
GIPPPYDKKKRMVVPAALKVVRLKPTRKFAYLGRLAHEVGWKYQAVTATLEEKRKEKAKIHYRKKKQLMRLRKQAEKNVEKKIDKYTEVLKTHGLLV

SEQ ID NO: 775168 - protein, 41 aa, Homo sapiens
MKHRTTDENNKLKSSKDEYMQSGSKNKEKKTKDKQVEKEET

SEQ ID NO: 775169 - protein, 97 aa, Homo sapiens; identical to SEQ ID NO: 775167

SEQ ID NO: 775170 - protein, 97 aa, Homo sapiens; identical to SEQ ID NO: 775167

SEQ ID NO: 775171 - protein, 260 aa, Homo sapiens
MCANLPPGILRVSSTSLHPGTTHAGGLGILTASAARAFRGKRTGDSGDSRHLQSHSLKTEPHALLDIKAMRSLVDRIPSKHFPKPEGLLTRLCPSPPTWLIWDHISTWPDSSTRMPSKTNTDALVTLTREAGGAPTWLLHLDVGNGGSKNVRKPRPGKCQPKSRHSLPQTQKPEEVRKCGGICLPVCLQDPGACPSWLPLEEGLRRPAFGHRTEAGPRGKGFGRHRGNSGLRAAEVTHGPCWEAADVPCLRLTKPHGLRV

SEQ ID NO: 775172 - protein, 105 aa, Homo sapiens
LEEKTLAVQNLTGWRGKGRGWPEAASVAQRSGLLARQRALRKHLPHLRHTQRRRRGPGLFLTRSPADPVAVRGRKRGRQLLGDAGVTEQGPRSLTTEEKRQPFYY

SEQ ID NO: 775173 - protein, 73 aa, Homo sapiens
FSLSQGLTLSPRLGLVSTHAMESSSWSGVDRVGVEDLLPHRCSVSYLTYGQQLSSPECVHTGVSAPWAVMDEG

SEQ ID NO: 775174 - protein, 109 aa, Homo sapiens
HIPSPISSSQSCPLCFSFVILATIYFPSKQNCHQEPLRCVASTSSPRWLFNSLPLGHRTNTPLEPPIEVTNQLTKSNNDFSVLILSNFPVTFVIPSVKGRTGTPKIYTP

SEQ ID NO: 775175 - protein, 126 aa, Homo sapiens
SDLKEYTKEQDKPSNLVLKDKVSPNEEAKYNVVLDEQAEDSKSSHSHTSKNHKKKTHHCSEVKEDEDYIPIKNINPDKYEKVWSLVTTKKKKAVGRNERVKRETELRTEVVADRKRGMAIIVIVTN

SEQ ID NO: 775176 - protein, 148 aa, Homo sapiens
MAGRAVLLAGPPGTGKTALALAIAQELGSKVPFCPMVGSEVYSTEIKKTEVLMENFRRAIGLRIKETKEVYEGEVTELTSCETENPMGGYGKTISHVIIGLKTAKGTKQLKLDPSIFESLQKERVEAGDVIYIEANSGAVKRQGRCDS

SEQ ID NO: 775177 - protein, 63 aa, Homo sapiens
SLSTDTSAHSKAGSSSPEPWARPSCTPQEGGCPRPKERESPPPSALQPVQLPRLALSPPPPAP

SEQ ID NO: 775178 - protein, 69 aa, Homo sapiens
ERAEIEKRRERSMKCREISVFNGEREKEESKKSDYRPGTVADICNPSTLGGRGGSEPRLPLLSSAWLTY

SEQ ID NO: 775179 - protein, 136 aa, Homo sapiens [sequence omitted]

SEQ ID NO: 775180 - protein, 94 aa, Homo sapiens
PALTRLWVQGPFDGPCGEKEAAGDRHVSQANVCPGYAEQPLPSKPDPGWSKEGAAVASAGPESSTPAPPGVPSAAATGTRGRRNPGCGWWQDQG

SEQ ID NO: 775181 - protein, 70 aa, Homo sapiens
DSDHPLVLLSKTAKTRHRNSQPPDPHAPPGSTRLPNLASSAPNLPIPFLGRPRREQSWHQEANNPGPLRP

SEQ ID NO: 775182 - protein, 42 aa, Homo sapiens
TGAQQIASSYPQTVFACMQPLALPLYGRKPAQGHTAGQQQRS

SEQ ID NO: 775183 - protein, 131 aa, Homo sapiens
MERGAALAAPQSALAQPCPGHPPLLELRSGAPSSWLHPRRLPCDGVPYLGCAQSFLAAQQGRGWDARSWSESSGTPWTSLVPTMTGCLDKATSHLQVLQGQPPVGWAPARVGAAVARAQVAQTLALLLLLV

SEQ ID NO: 775184 - protein, 115 aa, Homo sapiens [sequence omitted]

SEQ ID NO: 775185 - protein, 122 aa, Homo sapiens
RRRVLDRRTLSGSVYFASTSVPPRPGAAPGHILVLSRLQPLCAEVSRSHGRVILCEVYQACAQGNQDEEICLRLTVHANIEHFLLVSVINKGFDIVRRDGKKVSRSELKPLPLRTLSRSLAS

SEQ ID NO: 775186 - protein, 115 aa, Homo sapiens [sequence omitted]

SEQ ID NO: 775187 - protein, 99 aa, Homo sapiens
AFVSSPKCVILQTEVTPDAEISIPPRSPHAACHSHAHFSAWKPLYICAPFSFVILSTFYGQDLAICDLGDWLLSPSFPADPCRVLSLLIPSSICPLPFN

SEQ ID NO: 775188 - protein, 170 aa, Homo sapiens
MEQIFLFHLFLIAPVPAEDRTLSSFLPASGRWQGVLCVPTKERAVPAPESLSEPCHGRHPGECGTPHPLSQNRGASMTLRITALRGMYQLQVSAFVRVLHCHVAPPDVIAKMPVDKPGLGPSCWQSGGSRALFLQLTQSQDWLSFAQLVQNLIVLMLNIYHQCSMLQLQT

SEQ ID NO: 775189 - protein, 144 aa, Homo sapiens
MRAEEPCAPGAPSALGAQRTPGPELRLSSQLLPELCTFVVRVLFYLGPVYLAGYLGLSITWLLLGALLWMWWRRNRRGKLGRLAAASSNSLTMNASSSAASCGASTCQPGSTSRTWSGSSGPTRSSLRPALPKHDHGKAVPGET

SEQ ID NO: 775190 - protein, 256 aa, Homo sapiens
MEDFSNDLFSSFFDDPVLDEKSPLLDMELDSPTPGIQAEHSYSLSGDSAPQSPLVPIKMEDTTQDAEHGAWALGHKLCSIMVKQEQSPELPVDPLAAPSAQWHAREVAIGQYLHSDVGPHGRALVLEGWPFHTQRQCPTGEEMMSCCQVGSNTSMASGSVNQGRYTRWIEPEGTWVDMMRCPHLARHQDETQWTGWRDGEGLRSESSRYSAHPPTHVPERGLGKVRFLRMEHTRSSGKFLPLVTFLTLLGDHQGQW

SEQ ID NO: 775191 - protein, 519 aa, Homo sapiens
MDAVLEPFPADRLFPGSSFLDLGDLNESDFLNNAHFPEHLDHFTENMEDFSNDLFSSFFDDPVLDEKSPLLDMELDSPTPGIQAEHSYSLSGDSAPQSPLVPIKMEDTTQDAEHGAWALGHKLCSIMVKQEQSPELPVDPLAAPSAMAAAAAMATTPLLGLSPLSRLPIPHQAPGEMTQLPVIKAEPLEVNQFLKVTPEDLVQMPPTPPSSHGSDSDGSQSPRSLPPSSPVRPMARSSTAISTSPLLTAPHKLQGTSGPLLLTEEEKRTLIAEGYPIPTKLPLTKAEEKALKRVRRKIKNKISAQESRRKKKEYVECLEKKVETFTSENNELWKKVETLENANRTLLQQLQKLQTLVTNKISRPYKMAATQTGTCLMVAALCFVLVLGSLVPCLPEFSSGSQTVKEDPLAADGVYTASQMPSRSLLFYDDGAGLWEDGRSTLLPMEPPDGWEINPGGPAEQRPRDHLQHDHLDSTHETTKYLSEAWPKDGGNGTSPDFSHSKEWFHDRDLGPNTTIKLS

SEQ ID NO: 775192 - protein, 153 aa, Homo sapiens
MAATQTGTCLMVAALCFVLVLGSLVPCLPEFSSGSQTVKEDPLAADGVYTASQMPSRSLLFYDDGAGLWEDGRSTLLPMEPPDGWEINPGGPAEQRPRDHLQHDHLDSTHETTKYLSEAWPKDGGNGTSPDFSHSKEWFHDRDLGPNTTIKLS

SEQ ID NO: 775193 - protein, 198 aa, Homo sapiens
  misc_feature (187)..(187): Xaa can be any naturally occurring amino acid
  misc_feature (191)..(191): Xaa can be any naturally occurring amino acid
YASPSPSPTLAEILISAQESRRKKKEYVECLEKKVETFTSENNELWKKVETLENANRTLLQQLQKLQTLVTNKISRPYKMAATQTGTCLMVAALCFVLVLGSLVPCLPEFSSGSQTVKEDPLAADGVYTASQMPSRSLLFYDDGAGLWEDGRSTLLPMEPPDGWEINPGGPAEQRPRDHLAEIYDRXAKNXHTLMLTW

SEQ ID NO: 775194 - protein, 557 aa, Homo sapiens
MDAVLEPFPADRLFPGSSFLDLGDLNESDFLNNAHFPEHLDHFTENMEDFSNDLFSSFFDDPVLDEKSPLLDMELDSPTPGIQAEHSYSLSGDSAPQSPLVPIKMEDTTQDAEHGAWALGHKLCSIMVKQEQSPELPVDPLAAPSAMAAAAAMATTPLLGLSPLSRLPIPHQAPGEMTQLPVIKAEPLEVNQFLKVTPEDLVQMPPTPPSSHGSDSDGSQSPRSLPPSSPVRPMARSSTAISTSPLLTAPHKLQGTSGPLLLTEEEKRTLIAEGYPIPTKLPLTKAEEKALKRVRRKIKNKISAQESRRKKKEYVECLEKKVETFTSENNELWKKVETLENANRTLLQQLQKLQTLVTNKISRPYKMAATQTGTCLMVAALCFVLVLGSLVPCLPEFSSGSQTVKEDPLAADGVYTASQMPSRSLLFYDDGAGLWEDGRSTLLPMEPPDGWEINPGGPAEQRPRDHLQHDHLDSTHETTKYLSEAWPKDGGNGTSPDFSHSKEWFHDRPCQDPGHRTDPWYPEEEFLLTNPDPPRAPASWSFPFQEKRLHFPALPCP

SEQ ID NO: 775195 - protein, 519 aa, Homo sapiens; identical to SEQ ID NO: 775191

SEQ ID NO: 775196 - protein, 363 aa, Homo sapiens
MDAVLEPFPADRLFPGSSFLDLGDLNESDFLNNAHFPEHLDHFTENMEDFSNDLFSSFFDDPVLDEKSPLLDMELDSPTPGIQAEHSYSLSGDSAPQSPLVPIKMEDTTQDAEHGAWALGHKLCSIMVKQEQSPELPVDPLAAPSAMAAAAAMATTPLLGLSPLSRLPIPHQAPGEMTQLPVIKAEPLEVNQFLKVTPEDLVQMPPTPPSSHGSDSDGSQSPRSLPPSSPVRPMARSSTAISTSPLLTAPHKLQGTSGPLLLTEEEKRTLIAEGYPIPTKLPLTKAEEKALKRVRRKIKNKISAQESRRKKKEYVECLEKKVETFTSENNELWKKVETLENANSFSSGIQPLLCSLIGLENPT

SEQ ID NO: 775197 - protein, 70 aa, Homo sapiens
KQRGGFAVGSFLGGPLKLQHDHLDSTHETTKYLSEAWPKDGGNGTSPDFSHSKEWFHDRDLGPNTTIKLS

SEQ ID NO: 775198 - protein, 131 aa, Homo sapiens
SSDPCQYYIACRIRLVPLPPGASHSRRKGSTSQPFLAPDIWTLPLGRPLCSHSPSHQHPSVLLRQTTHWVPHLLSHMPNTTTASLPPHLHPNRHINAPHSQTPLTPPPLYRDQEQKLFVNNEPYFLLLPIP

SEQ ID NO: 775199 - protein, 302 aa, Homo sapiens
MDAVLEPFPADRLFPGSSFLDLGDLNESDFLNNAHFPEHLDHFTENMEDFSNDLFSSFFDDPVLDEKSPLLDMELDSPTPGIQAEHSYSLSGDSAPQSPLVPIKMEDTTQDAEHGAWALGHKLCSIMVKQEQSPELPVDPLAAPSAQWHAREVAIGQYLHSDVGPHGRALVLEGWPFHTQRQCPTGEEMMSCCQVGSNTSMASGEVNQGRYTRWIEPEGTWVDMMRCPHLARHQDETQWTGWRDGEGLRSESSRYSAHPPTHVPDTGAGKVRFLRMEHTRSSGKFLPLVTFLTLLGDHQGQW

SEQ ID NO: 775200 - protein, 519 aa, Homo sapiens; identical to SEQ ID NO: 775191

SEQ ID NO: 775201 - protein, 473 aa, Homo sapiens
MEDFSNDLFSSFFDDPVLDEKSPLLDMELDSPTPGIQAEHSYSLSGDSAPQSPLVPIKMEDTTQDAEHGAWALGHKLCSIMVKQEQSPELPVDPLAAPSAMAAAAAMATTPLLGLSPLSRLPIPHQAPGEMTQLPVIKAEPLEVNQFLKVTPEDLVQMPPTPPSSHGSDSDGSQSPRSLPPSSPVRPMARSSTAISTSPLLTAPHKLQGTSGPLLLTEEEKRTLIAEGYPIPTKLPLTKAEEKALKRVRRKIKNKISAQESRRKKKEYVECLEKKVETFTSENNELWKKVETLENANRTLLQQLQKLQTLVTNKISRPYKMAATQTGTCLMVAALCFVLVLGSLVPCLPEFSSGSQTVKEDPLAADGVYTASQMPSRSLLFYDDGAGLWEDGRSTLLPMEPPDGWEINPGGPAEQRPRDHLQHDHLDSTHETTKYLSEAWPKDGGNGTSPDFSHSKEWFHDRDLGPNTTIKLS

SEQ ID NO: 775202 - protein, 468 aa, Homo sapiens
DSTEEATEVGTPLVHAGGQASGTGGIPGSAGLEPTSSPPLPVLSSCPPPLGSTEEDTTQDAEHGAWALGHKLCSIMVKQEQSPELPVDPLAAPSAMAAAAAMATTPLLGLSPLSRLPIPHQAPGEMTQLPVIKAEPLEVNQFLKVTPEDLVQMPPTPPSSHGSDSDGSQSPRSLPPSSPVRPMARSSTAISTSPLLTAPHKLQGTSGPLLLTEEEKRTLIAEGYPIPTKLPLTKAEEKALKRVRRKIKNKISAQESRRKKKEYVECLEKKVETFTSENNELWKKVETLENANRTLLQQLQKLQTLVTNKISRPYKMAATQTGTCLMVAALCFVLVLGSLVPCLPEFSSGSQTVKEDPLAADGVYTASQMPSRSLLFYDDGAGLWEDGRSTLLPMEPPDGWEINPGGPAEQRPRDHLQHDHLDSTHETTKYLSEAWPKDGGNGTSPDFSHSKEWFHDRDLGPNTTIKLS

SEQ ID NO: 775203 - protein, 156 aa, Homo sapiens
PSNFPRTSRESTTRIKEILGSPSVAQARVQWHNLSSLQPSPPRLKQSSHLSLPSSWTMGMCQCVRNWWVLGLTDFKNEAADPRGCLVVISACCCKQDPNEQWACSHWSLFQNDTICLCDSSIWRDMKRKSHSCFSATAWLQEETKQVWKLPSRQKN

SEQ ID NO: 775204 - protein, 54 aa, Homo sapiens
GDSSRIHTLGSSSDRILMCGINEEESLPAVEPSHFCQSNCLLKGTSLSPSVSPF

SEQ ID NO: 775205 - protein, 110 aa, Homo sapiens
RWSFTLVAQAGVPWHNLSSPQSPSLEFKRFSCLSLLSSWDYRHAPPHPDNFVFLVEMGFLHVGQVGLELLISGDPSASASQSAGITGMSHCAWPGLFSLLQTACLSLALF

SEQ ID NO: 775206 - protein, 110 aa, Homo sapiens; identical to SEQ ID NO: 775205

SEQ ID NO: 775207 - protein, 42 aa, Homo sapiens
SPQCSRAAVEPMMKTTCFWAALLLHNAAKGRAKKKERKKKKK

SEQ ID NO: 775208 - protein, 69 aa, Homo sapiens
ARGQKCPGVQTPADTDQAQEDEVSLLGTENSQGAAGSQLKSSQRRAIPPVGRDSRLEGQQPGTWRRTWI

SEQ ID NO: 775209 - protein, 96 aa, Homo sapiens
SLASSSDGDGREENSGYRVLPVCQPLAQSGPGSEAVLAAACCQEIRDSGGRHFTELQNQAPSLGRSRRRTPGVLGGAGSCLLYPDPTGQLPGKLGN

SEQ ID NO: 775210 - protein, 108 aa, Homo sapiens [sequence omitted]

SEQ ID NO: 775211 - protein, 74 aa, Homo sapiens
FGNEEQPVLKASLPSKDTPKGAGRVAPPASSSVTAPRRSLLPAPKSTSTPAVLEAGTSKIKTLEEGNKCQSSIL

SEQ ID NO: 775212 - protein, 93 aa, Homo sapiens
LGSRGGGGDASWSLGSPRSVQLDQCLSANTTSRPHQEKRPGCHREQGWEHLRAAGRPAPRPGILGPLAFIRRGVDAWLWDAQVAVGQQQRKRG

SEQ ID NO: 775213 - protein, 128 aa, Homo sapiens [sequence omitted]

SEQ ID NO: 775214 - protein, 1227 aa, Homo sapiens
APPDRLPLVRLLQRRSRFGNFAALMDLKTVLSLPRYPGEFLHPVVYACTAVMLLCLLASFVTYIVHQSAIRISRKGRHTLLNFCFHAALTFTVFAGGINRTKYPILCQAVGIVLHYSTLSTMLWIGVTARNIYKQVTKKAPLCLDTDQPPYPRQPLLRFYLVSGGVPFIICGVTAATNIRNYGTEDEDTAYCWMAWEPSLGAFYGPAAIITLVTCVYFLGTYVQLRRHPGRRYELRTQPEEQRRLATPEGGRGIRPGTPPAHDAPGASVLQNEHSFQAQLRAAAFTLFLFTATWAFGALAVSQGHFLDMVFSCLYGAFCVTLGLFVLIHHCAKREDVWQCWWACCPPRKDAHPALDANGAALGRAACLHSPGLGQPRGFAHPPGPCKMTNLQAAQGHASCLSPATPCCAKMHCEPLTADEAHVHLQEEGAFGHDPHLHGCLQGRTKPPYFSRHPAEEPEYAYHIPSSLDGSPRSSRTDSPPSSLDGPAGTHTLACCTQGDPFPMVTQPEGSDGSPALYSCPTQPGREAALGPGHLEMLRRTQSLPFGGPSQNGLPKGKLLEGLPFGTDGTGNIRTGPWKNETTVEMGAEDTVFLEELQSRVGGPSATEVTGGTEVTPPFRSRSHPCPFLVITPLPLPCDHTPAPSLCSHPCPFLVITPLPLPCDHTPAPSLCSHPCPFLVITPLPLPCERPQRGNAPGHAHSPYPNFRVLVPHTVIRFLSCDLQSWGTLEAEQGIPSKDPLDPSMALPEMPCCPRSPGFPWCGRAGPRSQEGAALTFPSVQCVCLAFYSGGGGGRSVPSILALGRTLGTLRCRVSEPPLQLHRAPAHLCPLSVPCQPCPCRSPSPAGLRAPQMLGAALDFGDGCQPQRAKGGFHGPKAWENAQTSFSEDSTSKTSHRWDWIPLQYRHLATRRFIPKRKGADRREILMDKIPFPFSRLHEHLEYQALTQRTDVDDSKTSVKASGPSLRWEGVQRVMGVKLCTAFPPSLFLLVCDTCAHTHTHKHMCISHTCTHTNTCAYHTRAHTQTRAYHTHAHTQTRAYHTHAHKRAYHTHAHTPKHVHITHTHTHKHVHITHKHTLHTYLTHTCTCYAHVHTHVVVCFPATHTLGLHWRLFHPANVNVSRLVGALCYPVGRSHQEQSLPNVHLREEGCRGVFPAPARWKGSPETGTQYLSMRSLTSRGVGKLDRDSVTHSVLLPANPVCPYRSTRRAVGGPPGGSASASPSHLLP

SEQ ID NO: 775215 - protein, 1149 aa, Homo sapiens
RGGLILPTVRASWRDPTEDFTSSPLVDTYPGGHRAALFYTVHHAVDRSDRQEHLQAGDQEGPSVPGHRPATVPQAAPAQVLPRQRRGPPLSSVGSRLPTNIRNYGTEDEDTAYCWMAWEPSLGAFYGPAAIITLVTCVYFLGTYVQLRRHPGRRYELRTQPEEQRRLATPEGGRGIRPGTPPAHDAPGASVLQNEHSFQAQLRAAAFTLFLFTATWAFGALAVSQGHFLDMVFSCLYGAFCVTLGLFVLIHHCAKREDVWQCWWACCPPRKDAHPALDANGAALGRAACLHSPGLGQPRGFAHPPGPCKMTNLQAAQGHASCLSPATPCCAKMHCEPLTADEAHVHLQEEGAFGHDPHLHGCLQGRTKPPYFSRHPAEEPEYAYHIPSSLDGSPRSSRTDSPPSSLDGPAGTHTLACCTQGDPFPMVTQPEGSDGSPALYSCPTQPGREAALGPGHLEMLRRTQSLPFGGPSQNGLPKGKLLEGLPFGTDGTGNIRTGPWKNETTVEMGAEDTVFLEELQSRVGGPSATEVTGGTEVTPPFRSRSHPCPFLVITPLPLPCDHTPAPSLCSHPCPFLVITPLPLPCDHTPAPSLCSHPCPFLVITPLPLPCERPQRGNAPGHAHSPYPKFRVLVPHTVIRFLSCDLQSWGTLEAEQGIPSKDPLDPSMALPEMPCCPRSPGFPWCGRAGPRSQEGAALTFPSVQCVCLAFYSGGGGGRSVPSILALGRTLGTLRCRVSEPPLQLHRAPAHLCPLSVPCQPCPCRSPSPAGLRAPQMLGAALDFGDGCQPQRANGGLSGPKAWENAQTSFSEDSTSKTSHRWDWIPLQYRHLATRRFIPKRKGADRREILMDKIPFPFSRLHEHLEYQALTQRTDVDDSKTSVKASGPSLRWEGVQRVMGVKLCTAFPPSLFLLVCDTCAHTHTHKHMCIITHMHTHKHMCISHTRTHPNTCISHTCTHTNTCISHTCTQTCISHTRTHTQTRAYHTHAHTQTRAYHTQTHVHTYLTHTCTCYAHVHTHVVVCFPATHTLGLHWRLFHPANVNVSRLVGALCYPVGRSHQEQSLPNVHLREEGCRGVFPAPARWKGSPETGTQYLSMRSLTSRGVGKLDRDSVTHSVLLPANPVCPYRSTRRAVGGPPGGSASASPSHLLP

SEQ ID NO: 775216 - protein, 72 aa, Homo sapiens
AAGRITLLALCWYPFETGLRREALEVPAVVNVGSAHSGRLLSRGGAGGWGKHVASPEAQNAAELSGRVINAA

SEQ ID NO: 775217 - protein, 93 aa, Homo sapiens
MKQSKREHGEEKTEPRAGRGTLQSEFHSAPKAPLGPPGNRGCPLVVVAQENPTKAGAPPPGRASLQRIIIPGRQAGATPARPATQSQLGPFDP

SEQ ID NO: 775218 - protein, 66 aa, Homo sapiens
TAHFLPPTIPPVSYLTRLRESHQTTREGSTTREKKRLGVITMSPTEFSSILLRTAPSDYLEDFASQ

SEQ ID NO: 775219 - protein, 78 aa, Homo sapiens
METKEPIVYTGSVERAPGECSGMTLLGSCPTEANTARTVATAPKSAWREESRHAHLILMNQLAWVMPLREKTFESTEL

SEQ ID NO: 775220 - protein, 219 aa, Homo sapiens [sequence omitted]

SEQ ID NO: 775221 - protein, 87 aa, Homo sapiens
RCYHEDRLLHAHGPPAATERAKAGPPFGPASPPACPAESGHLIPGDHTSEKRAGAGRSGMRVPSDRGFQEFNSSGSPVPPKNPGHAG

SEQ ID NO: 775222 - protein, 32 aa, Homo sapiens
MSASIASCFFMAASTAGSSYLGDQTLVLIQPA

SEQ ID NO: 775223 - protein, 1890 aa, Homo sapiens
RVDPIGPGLDRERLYWELSQLTNSITELGPYTLDRDSLYVNGFNPWSSVPTTSTPGTSTVHLATSGTPSSLPGHTAPVPLLIPFTLNFTITNLHYEENMQHPGSRKFNTTERVLQGLLKPLFKSTSVGPLYSGCRLTLLRPEKHGAATGVDAICTLRLDPTGPGLDRERLYWELSQLTNSVTELGPYTLDRDSLYVNGFTHRSSVPTTSIPGTSAVHLETSGTPASLPGHTAPGPLLVPFTLNFTITNLQYEEDMRHPGSRKFNTTERVLQGLLKPLFKSTSVGPLYSGCRLTLLRPEKRGAATGVDTICTHRLDPLNPGLDREQLYWELSKLTRGIIELGPYLLDRGSLYVNGFTHRNFVPITSTPGTSTVHLGTSETPSSLPRPIVPGPLLVPFTLNFTITNLQYEEAMRHPGSRKFNTTERVLQGLLRPLFKNTSIGPLYSSCRLTLLRPEKDKAATRVDAICTHHPDPQSPGLNREQLYWELSQLTHGITELGPYTLDRDSLYVDGFTHWSPIPTTSTPGTSIVNLGTSGIPPSLPETTATGPLLVPFTLNFTITNLQYEENMGHPGSRKFNITESVLQGLLKPLFKSTSVGPLYSGCRLTLLRPEKDGVATRVDAICTHRPDPKIPGLDRQQLYWELSQLTHSITELGPYTLDRDSLYVNGFTQRSSVPTTSTPGTFTVQPETSETPSSLPGPTATGPVLLPFTLNFTIINLQYEEDMHRPGSRKFNTTERVLQGLLMPLFKNTSVSSLYSGCRLTLLRPEKDGAATRVDAVCTHRPDPKSPGLDRERLYWKLSQLTHGITELGPYTLDRHSLYVNGFTHQSSMTTTRTPDTSTMHLATSRTPASLSGPTTASPLLVLFTINFTITNLRYEENMHHPGSRKFNTTERVLQGLLRPVFKNTSVGPLYSGCRLTLLRPKKDGAATKVDAICTYRPDPKSPGLDREQLYWELSQLTHSITELGPYTLDRDSLYVNGFTQRSSVPTTSIPGTPTVDLGTSGTPVSKPGPSAASPLLVLFTLNFTITNLRYEENMQHPGSRKFNTTERVLQGLLRSLFKSTSVGPLYSGCRLTLLRPEKDGTATGVDAICTHHPDPKSPRLDREQLYWELSQLTHNITELGPYALDNDSLFVNGFTHRSSVSTTSTPGTPTVYLGASKTPASIFGPSAASHLLILFTLNFTITNLRYEENMWPGSRKFNTTERVLQGLLRPLFKNTSVGPLYSGCRLTLLRPEKDGEATGVDAICTHRPDPTGPGLDREQLYLELSQLTHSITELGPYTLDRDSLYVNGFTHRSSVPTTSTGVVSEEPFTLNFTINNLRYMADMGQPGSLKFNITDNVMKHLLSPLFQRSSLGARYTGCRVIALRSVKNGAETRVDLLCTYLQPLSGPGLPIKQVFHELSQQTHGITRLGPYSLDKDSLYLNGYNEPGLDEPPTTPKPATTFLPPLSEATTAMGYHLKTLTLNFTISNLQYSPDMGKGSATFNSTEGVLQHLLRPLFQKSSMGPFYLGCQLISLRPEKDGAATGVDTTCTYHPDPVGPGLDIQQLYWELSQLTHGVTQLGFYVLDRDSLFINGYAPQNLSIRGEYQINFHIVNWNLSNPDPTSSEYITLLRDIQDKVTTLYKGSQLHDTFRFCLVTNLTMDSVLVTVKALFSSNLDPSLVEQVFLDKTLNASFHWLGSTYQLVDIHVTEMESSVYQPTSSSSTQHFYPNFTITNLPYSQDKAQPGTTNYQRNKRNIEDALNQLFRNSSIKSYFSDCQVSTFRSVPNRHHTGVDSLCNFSPLARRVDRVAIYEEFLRMTRNGTQLQNFTLDRSSVLVDGYSPNRNEPLTGNSDLPFWAVILIGLAGLLGLITCLICGVLVTTRRRKKEGEYNVQQQCPGYYQSHLDLEDLQ

SEQ ID NO: 775224 - protein, 1832 aa, Homo sapiens
RVDPIGPGLDRERLYWELSQLTNSITELGPYTLDRDSLYVNGFNPWSSVPTTSTPGTSTVHLATSGTPSSLPGHTAPVPLLIPFTLNFTITNLHYEENMQHPGSRKFNTTERVLQGLLKPLFKSTSVGPLYSGCRLTLLRPEKHGAATGVDAICTLRLDPTGPGLDRERLYWELSQLTNSVTELGPYTLDRDSLYVNGFTHRSSVPTTSIPGTSAVHLETSGTPASLPGHTAPGPLLVPFTLNFTITNLQYEEDMRHPGSRKFNTTERVLQGLLKPLFKSTSVGPLYSGCRLTLLRPEKRGAATGVDTICTHRLDPLNPGLDREQLYWELSKLTRGIIELGPYLLDRGSLYVNGFTHRNFVPITSTPGTSTVHLGTSETPSSLPRPIVPGPLLVPFTLNFTITNLQYEEAMRHPGSRKFNTTERVLQGLLRPLFKNTSIGPLYSSCRLTLLRPEKDKAATRVDAICTHHPDPQSPGLNREQLYWELSQLTHGITELGPYTLDRDSLYVDGFTHWSPIPTTSTPGTSIVNLGTSGIPPSLPETTATGPLLVPFTLNFTITNLQYEENMGHPGSRKFNITESVLQGLLKPLFKSTSVGPLYSGCRLTLLRPEKDGVATRVDAICTHRPDPKIPGLDRQQLYWELSQLTHSITELGPYTLDRDSLYVNGFTQRSSVPTTSTPGTFTVQPETSETPSSLPGPTATGPVLLPFTLNFTIINLQYEEDMHRPGSRKFNTTERVLQGLLMPLFKNTSVSSLYSGCRLTLLRPEKDGAATRVDAVCTHRPDPKSPGLDRERLYWKLSQLTHGITELGPYTLDRHSLYVNGFTHQSSMTTTRTPDTSTMHLATSRTPASLSGPTTASPLLVLFTINFTITNLRYEENMHHPGSRKFNTTERVLQGLLRPVFKNTSVGPLYSGCRLTLLRPKKDGAATKVDAICTYRPDPKSPGLDREQLYWELSQLTHSITELGPYTLDRDSLYVNGFTQRSSVPTTSIPGTPTVDLGTSGTPVSKPGPSAASPLLVLFTLNFTITNLRYEENMQHPGSRKFNTTERVLQGLLRSLFKSTSVGPLYSGCRLTLLRPEKDGTATGVDAICTHHPDPKSPRLDREQLYWELSQLTHNITELGPYALDNDSLFVNGFTHRSSVSTTSTPGTPTVYLGASKTPASIFGPSAASHLLILFTLNFTITNLRYEENMWPGSRKFNTTERVLQGLLRPLFKNTSVGPLYSGCRLTLLRPEKDGEATGVDAICTHRPDPTGPGLDREQLYLELSQLTHSITELGPYTLDRDSLYVNGFTHRSSVPTTSTGVVSEEPFTLNFTINNLRYMADMGQPGSLKFNITDNVMKHLLSPLFQRSSLGARYTGCRVIALRSVKNGAETRVDLLCTYLQPLSGPGLPIKQVFHELSQQTHGITRLGPYSLDKDSLYLNGYNEPGLDEPPTTPKPATTFLPPLSEATTAMGYHLKTLTLNFTISNLQYSPDMGKGSATFNSTEGVLQHLLRPLFQKSSMGPFYLGCQLISLRLCTPEFINPGEYQINFHIVNWNLSNPDPTSSEYITLLRDIQDKVTTLYKGSQLHDTFRFCLVTNLTMDSVLVTVKALFSSNLDPSLVEQVFLDKTLNASFHWLGSTYQLVDIHVTEMESSVYQPTSSSSTQHFYPNFTITNLPYSQDKAQPGTTNYQRNKRNIEDALNQLFRNSSIKSYFSDCQVSTFRSVPNRHHTGVDSLCNFSPLARRVDRVAIYEEFLRMTRNGTQLQNFTLDRSSVLVDGYSPNRNEPLTGNSDLPFWAVILIGLAGLLGLITCLICGVLVTTRRRKKEGEYNVQQQCPGYYQSHLDLEDLQ

SEQ ID NO: 775225 - protein, 174 aa, Homo sapiens
MKTGTRSIKDQERKRNKRNIEDALNQLFRNSSIKSYFSDCQVSTFRSVPNRHHTGVDSLCNFSPLARRVDRVAIYEEFLRMTRNGTQLQNFTLDRSSVLVDGYSPNRNEPLTGNSDLPFWAVILIGLAGLLGLITCLICGVLVTTRRRKKEGEYNVQQQCPGYYQSHLDLEDLQ

SEQ ID NO: 775226 - protein, 999 aa, Homo sapiens
RVDPIGPGLDRERLYWELSQLTNSITELGPYTLDRDSLYVNGFNPWSSVPTTSTPGTSTVHLATSGTPSSLPGHTAPVPLLIPFTLNFTITNLHYEENMQHPGSRKFNTTERVLQGLLKPLFKSTSVGPLYSGCRLTLLRPEKHGAATGVDAICTLRLDPTGPGLDRERLYWELSQLTNSVTELGPYTLDRDSLYVNGFTHRSSVPTTSIPGTSAVHLETSGTPASLPGHTAPGPLLVPFTLNFTITNLQYEEDMRHPGSRKFNTTERVLQGLLKPLFKSTSVGPLYSGCRLTLLRPEKRGAATGVDTICTHRLDPLNPGLDREQLYWELSKLTRGIIELGPYLLDRGSLYVNGFTHRNFVPITSTPGTSTVHLGTSETPSSLPRPIVPGPLLVPFTLNFTITNLQYEEAMRHPGSRKFNTTERVLQGLLRPLFKNTSIGPLYSSCRLTLLRPEKDKAATRVDAICTHHPDPQSPGLNREQLYWELSQLTHGITELGPYTLDRDSLYVDGFTHWSPIPTTSTPGTSIVNLGTSGIPPSLPETTATGPLLVPFTLNFTITNLQYEENMGHPGSRKFNITESVLQGLLKPLFKSTSVGPLYSGCRLTLLRPEKDGVATRVDAICTHRPDPKIPGLDRQQLYWELSQLTHSITELGPYTLDRDSLYVNGFTQRSSVPTTSTPGTFTVQPETSETPSSLPGPTATGPVLLPFTLNFTIINLQYEEDMHRPGSRKFNTTERVLQGLLMPLFKNTSVSSLYSGCRLTLLRPEKDGAATRVDAVCTHRPDPKSPGLDRERLYWKLSQLTHGITELGPYTLDRHSLYVNGFTHQSSMTTTRTPDTSTMHLATSRTPASLSGPTTASPLLVLFTINFTITNLRYEENMHHPGSRKFNTTERVLQGLLRPVFKNTSVGPLYSGCRLTLLRPKKDGAATKVDAICTYRPDPKSPGLDREQLYWELSQGDACSPHIAGYVMVKLIVNSTRRGLAVMGPDREPGVLEVARCM

SEQ ID NO: 775227 - protein, 254 aa, Homo sapiens
MAAVAATAAAKGNGGGGGRAGAGDASGTRKKKGPGPLATAYLVIYNVVMTAGWLVIAVGLVRAYLAKGSYHSLYYSIEKPLKFFQTGALLEILHCAIGIVPSSVVLTSFQVMSRVFLIWAVTHSVKEVQSEDSVLLFVIAWTITEIIRYSFYTFSLLNHLPYLIKWARYTLFIVLYPMGVSGELLTIYAALPFVRQAGLYSISLPNKYNFSFDYYAFLILIMISYIPIFPQLYFHMIHQRRKILSHTEEHKKFE

SEQ ID NO: 775228 - protein, 254 aa, Homo sapiens; identical to SEQ ID NO: 775227

SEQ ID NO: 775229 - protein, 254 aa, Homo sapiens; identical to SEQ ID NO: 775227

SEQ ID NO: 775230 - protein, 254 aa, Homo sapiens; identical to SEQ ID NO: 775227

SEQ ID NO: 775231 - protein, 254 aa, Homo sapiens; identical to SEQ ID NO: 775227

SEQ ID NO: 775232 - protein, 254 aa, Homo sapiens; identical to SEQ ID NO: 775227

SEQ ID NO: 775233 - protein, 228 aa, Homo sapiens
MAAVAATAAAKGNGGGGGRAGAGDASGTRKKKGPGPLATAYLVIYNVVMTAGWLVIAVGLVRAYLAKGSYHSLYYSIEKPLKFFQTGALLEILHCAIGIVPSSVVLTSFQVMSRVFLIWAVTHSVKEVQSEDSVLLFVIAWTITEIIRYSFYTFSLLNHLPYLIKWARYTLFIVLYPMGVSGELLTIYAALPFVRQAGLYSISLPNKYNFSFDYYAFLILIMISYIPS

SEQ ID NO: 775234 - protein, 118 aa, Homo sapiens
MKPRWGSAPEVSSFLPLIAFPTSLSFPYSHQSAVWGSCPCPLLTFPFVSFPSSTRSIFLILLGEMVCWFTCISHSKTMAKILCNYLLSKDICSCSLSFYSSDVNHFYFLTLKENAFII

SEQ ID NO: 775235 - protein, 97 aa, Homo sapiens
SSTRAEPPRLGSETSWPQHSIFNQGRATTTGIGNITATAQHLQQGPSQCLEGEERNAVCVLVVVLVRGQNSRKSIYGSCRSDPSHPDSPGWTGGDPA

SEQ ID NO: 775236 - protein, 76 aa, Homo sapiens
NGFGNDGSNFGGGGSYKDFGNYNNQSSNFGPMKGGNFGGRSSGPHGGGGQYFAKPRNQGGYGGSSSSSSYGSGRRF

SEQ ID NO: 775237 - protein, 1163 aa, Homo sapiens
MNREDRNVLRMKERERRNQEIQQGEDAFPPSSPLFAEPYKVTSKEDKLSSRIQSMLGNYDEMKDFIGDRSIPKLVAIPKPTVPPSADEKSNPNFFEQRHGGSHQSSKWTPVGPAPSTSQSQKRSSGLQSGHSSQRTSAGSSSGTNSSGQRHDRESYNNSGSSSRKKGQHGSEHSKSRSSSPGKPQAVSSLNSSHSRSHGNDHHSKEHQRSKSPRDPDANWDSPSRVPFSSGQHSTQSFPPSLMSKSNSMLQKPTAYVRPMDGQESMEPKLSSEHYSSQSHGNSMTELKPSSKAHLTKLKIPSQPLDASASGDVSCVDEILKEMTHSWPPPLTAIHTPCKTEPSKFPFPTKESQQSNFGTGEQKRYNPSKTSNGHQSKSMLKDDLKLSSSEDSDGEQDCDKTMPRSTPGSNSEPSHHNSEGADNSRDDSSSHSGSESSSGSDSESESSSSDSEANEPSQSASPEPEPPPTNKWQLDNWLNKVNPHKVSPASSVDSNIPSSQGYKKEGREQGTGNSYTDTSGPKETSSATPGRDSKTIQKGSESGRGRQKSPAQSDSTTQRRTVGKKQPKKAEKAAAEEPRGGLKIESETPVDLASSMPSSRHKAATKGSRKPNIKKESKSSPRPTAEKKKYKSTSKSSQKSREIIETDTSSSDSDESESLPPSSQTPKYPESNRTPVKPSSVEEEDSFFRQRMFSPMEEKELLSPLSEPDDRYPLIVKIDLNLLTRIPGKPYKETEPPKGEKKNVPEKHTREAQKQASEKVSNKGKRKHKNEDDNRASESKKPKTEDKNSAGHKPSSNRESSKQSAAKEKDLLPSPAGPVPSKDPKTEHGSRKRTISQSSSLKSSSNSNKETSGSSKNSSSTSKQKKTEGKTSSSSKEVKEKAPSSSSNCPPSAPTLDSSKPRRTKLVFDDRNYSADHYLQEAKKLKHNADALSDRFEKAVYYLDAVVSFIECGNALEKNAQESKSPFPMYSETVDLIKYTMKLKNYLAPDATAADKRLTVLCLRCESLLYLRLFKLKKENALKYSKTLTEHLKNSYNNSQAPSPGLGSKAVGMPSPVSPKLSPGNSGNYSSGASSASASGSSVTIPQKIHQMAASYVQVTSNFLYATEIWDQAEQLSKEQKEFFAELDKVMGPLIFNASIMTDLVRYTRQGLHWLRQDAKLIS

SEQ ID NO: 775238 - protein, 103 aa, Homo sapiens
MNREDRNVLRMKERERRNQEIQQGEDAFPPSSPLFAEPYKVTSKEDKLSSRIQSMLGNYDEMKDFEEDEEGWYLSECKVILEYKEFLQVELPRSLSLTCVPEL

SEQ ID NO: 775239 - protein, 1163 aa, Homo sapiens; identical to SEQ ID NO: 775237

SEQ ID NO: 775240 - protein, 353 aa, Homo sapiens
MNREDRNVLRMKERERRNQEIQQGEDAFPPSSPLFAEPYKVTSKEDKLSSRIQSMLGNYDEMKDFIGDRSIPKLVAIPKPTVPPSADEKSNPNFFEQRHGGSHQSSKWTPVGPAPSTSQSQKRSSGLQSGHSSQRTSAGSSSGTNSSGQRHDRESYNNSGSSSRKKGQHGSEHSKSRSSSPGKPQAVSSLNSSHSRSHGNDHHSKEHQRSKSPRDPDANWDSPSRVPFSSGQHSTQSFPPSLMSKSNSMLQKPTAYVRPMDGQESMEPKLSSEHYSSQSHGNSMTELKPSSKAHLTKLKIPSQPLDASASGDVSCVDEILKEMTHSWPPPLTAIHTPCKTEPSKFPFPTKVSK

SEQ ID NO: 775241 - protein, 1109 aa, Homo sapiens
MNREDRNVLRMKERERRNQEIQQGEDAFPPSSPLFAEPYKVTSKEDKLSSRIQSMLGNYDEMKDFIGDRSIPKLVAIPKPTVPPSADEKSNPNFFEQRHGGSHQSSKWTPVGPAPSTSQSQKRSSGLQSGHSSQRTSAGSSSGTNSSGQRHDRESYNNSGSSSRKKGQHGSEHSKSRSSSPGKPQAVSSLNSSHSRSHGNDHHSKEHQRSKSPRDPDANWDSPSRVPFSSGQHSTQSFPPSLMSKSNSMLQKPTAYVRPMDGQESMEPKLSSEHYSSQSHGNSMTELKPSSKAHLTKLKIPSQPLDASASGDVSCVDEILKEMTHSWPPPLTAIHTPCKTEPSKFPFPTKESQQSNFGTGEQKRYNPSKTSNGHQSKSMLKDDLKLSSSEDSDGEQDCDKTMPRSTPGSLNPRQQTNGNLIIGCNKVNPHKVSPASSVDSNIPSSQGYKKEGREQGTGNSYTDTSGPKETSSATPGRDSKTIQKGSESGRGRQKSPAQSDSTTQRRTVGKKQPKKAEKAAAEEPRGGLKIESETPVDLASSMPSSRHKAATKGSRKPNIKKESKSSPRPTAEKKKYKSTSKSSQKSREIIETDTSSSDSDESESLPPSSQTPKYPESNRTPVKPSSVEEEDSFFRQRMFSPMEEKELLSPLSEPDDRYPLIVKIDLNLLTRIPGKPYKETEPPKGEKKNVPEKHTREAQKQASEKVSNKGKRKHKNEDDNRASESKKPKTEDKNSAGHKPSSNRESSKQSAAKEKDLLPSPAGPVPSKDPKTEHGSRKRTISQSSSLKSSSNSNKETSGSSKNSSSTSKQKKTEGKTSSSSKEVKEKAPSSSSNCPPSAPTLDSSKPRRTKLVFDDRNYSADHYLQEAKKLKHNADALSDRFEKAVYYLDAVVSFIECGNALEKNAQESKSPFPMYSETVDLIKYTMKLKNYLAPDATAADKRLTVLCLRCESLLYLRLFKLKKENALKYSKTLTEHLKNSYNNSQAPSPGLGSKAVGMPSPVSPKLSPGNSGNYSSGASSASASGSSVTIPQKIHQMAASYVQVTSNFLYATEIWDQAEQLSKEQKEFFAELDKVMGPLIFNASIMTDLVRYTRQGLHWLRQDAKLIS

SEQ ID NO: 775242 - protein, 1134 aa, Homo sapiens
MNREDRNVLRMKERERRNQEIQQGEDAFPPSSPLFAEPYKVTSKEDKLSSRIQSMLGNYDEMKDFIGDRSIPKLVAIPKPTVPPSADEKSNPNFFEQRHGGSHQSSKWTPVGPAPSTSQSQKRSSGLQSGHSSQRTSAGSSSGTNSSGQRHDRESYNNSGSSSRKKGQHGSEHSKSRSSSPGKPQAVSSLNSSHSRSHGNDHHSKEHQRSKSPRDPDANWDSPSRVPFSSGQHSTQSFPPSLMSKSNSMLQKPTAYVRPMDGQESMEPKLSSEHYSSQSHGNSMTELKPSSKAHLTKLKIPSQPLDASASGDVSCVDEILKESQQSNFGTGEQKRYNPSKTSNGHQSKSMLKDDLKLSSSEDSDGEQDCDKTMPRSTPGSNSEPSHHNSEGADNSRDDSSSHSGSESSSGSDSESESSSSDSEANEPSQSASPEPEPPPTNKWQLDNWLNKVNPHKVSPASSVDSNIPSSQGYKKEGREQGTGNSYTDTSGPKETSSATPGRDSKTIQKGSESGRGRQKSPAQSDSTTQRRTVGKKQPKKAEKAAAEEPRGGLKIESETPVDLASSMPSSRHKAATKGSRKPNIKKESKSSPRPTAEKKKYKSTSKSSQKSREIIETDTSSSDSDESESLPPSSQTPKYPESNRTPVKPSSVEEEDSFFRQRMFSPMEEKELLSPLSEPDDRYPLIVKIDLNLLTRIPGKPYKETEPPKGEKKNVPEKHTREAQKQASEKVSNKGKRKHKNEDDNRASESKKPKTEDKNSAGHKPSSNRESSKQSAAKEKDLLPSPAGPVPSKDPKTEHGSRKRTISQSSSLKSSSNSNKETSGSSKNSSSTSKQKKTEGKTSSSSKEVKEKAPSSSSNCPPSAPTLDSSKPRRTKLVFDDRNYSADHYLQEAKKLKHNADALSDRFEKAVYYLDAVVSFIECGNALEKNAQESKSPFPMYSETVDLIKYTMKLKNYLAPDATAADKRLTVLCLRCESLLYLRLFKLKKENALKYSKTLTEHLKNSYNNSQAPSPGLGSKAVGMPSPVSPKLSPGNSGNYSSGASSASASGSSVTIPQKIHQMAASYVQVTSNFLYATEIWDQAEQLSKEQKEFFAELDKVMGPLIFNASIMTDLVRYTRQGLHWLRQDAKLIS

SEQ ID NO: 775243 - protein, 841 aa, Homo sapiens
MTHSWPPPLTAIHTPCKTEPSKFPFPTKESQQSNFGTGEQKRYNPSKTSNGHQSKSMLKDDLKLSSSEDSDGEQDCDKTMPRSTPGSNSEPSHHNSEGADNSRDDSSSHSGSESSSGSDSESESSSSDSEANEPSQSASPEPEPPPTNKWQLDNWLNKVNPHKVSPASSVDSNIPSSQGYKKEGREQGTGNSYTDTSGPKETSSATPGRDSKTIQKGSESGRGRQKSPAQSDSTTQRRTVGKKQPKKAEKAAAEEPRGGLKIESETPVDLASSMPSSRHKAATKGSRKPNIKKESKSSPRPTAEKKKYKSTSKSSQKSREIIETDTSSSDSDESESLPPSSQTPKYPESNRTPVKPSSVEEEDSFFRQRMFSPMEEKELLSPLSEPDDRYPLIVKIDLNLLTRIPGKPYKETEPPKGEKKNVPEKHTREAQKQASEKVSNKGKRKHKNEDDNRASESKKPKTEDKNSAGHKPSSNRESSKQSAAKEKDLLPSPAGPVPSKDPKTEHGSRKRTISQSSSLKSSSNSNKETSGSSKNSSSTSKQKKTEGKTSSSSKEVKEKAPSSSSNCPPSAPTLDSSKPRRTKLVFDDRNYSADHYLQEAKKLKHNADALSDRFEKAVYYLDAVVSFIECGNALEKNAQESKSPFPMYSETVDLIKYTMKLKNYLAPDATAADKRLTVLCLRCESLLYLRLFKLKKENALKYSKTLTEHLKNSYNNSQAPSPGLGSKAVGMPSPVSPKLSPGNSGNYSSGASSASASGSSVTIPQKIHQMAASYVQVTSNFLYATEIWDQAEQLSKEQKEFFAELDKVMGPLIFNASIMTDLVRYTRQGLHWLRQDAKLIS

SEQ ID NO: 775244 - protein, 106 aa, Homo sapiens
MHSLKKVTFEDVAIDFTQEEWAMMDTSKRKLYRDVMLENISHLVSLGYQISKSYIILQLEQGKELWREGREFLQDQNPDRESALKKKHMISMHPITRKDASTSMTM

SEQ ID NO: 775245 - protein, 281 aa, Homo sapiens
LKSRRRQAGPQMENQPVRWRALPGLPRPPGLPAAPWLLLGVLLLPGTLRLAGGQSVTHTGLPIMASLANTAISFSCRITYPYTPQFKVFTVSYFHEDLQGQRSPKKPTNCHPGLGTENQSHTLDCQVTLVLPGASATGTYYCSVHWPHSTVRGSGTFILVRDAGYREPPQSPQKLLLFGFTGLLSVLSVVGTALLLWNKKRMRGPGKDPTRKCPDPRSASSPKQHPSESVYTALQRRETEVYACIENEDGSSPTAKQSPLSQERPHRFEDDGELNLVYENL

SEQ ID NO: 775246 - protein, 209 aa, Homo sapiens
LKSRRRQAGPQMENQPVRWRALPGLPRPPGLPAAPWLLLGVLLLPGTLRLAGGQSVTHTGLPIMASLANTAISFSCRITYPYTPQFKVFTVSYFHEDLQGQRSPKKPTNCHPGLGTENQSHTLDCQVTLVLPGASATGTYYCSVHWPHSTVRGSGTFILVREADAGSREGPHQEVPRSKICQQPQAASFRICLHSSAAPRDRGLCLHRE

SEQ ID NO: 775247 - protein, 71 aa, Homo sapiens
MEQATLQGSEHLSGVSEQKQGTCLPVMLGNRVWDWTGGWGPGYRPSEDLSSEIDEFRDTDTEGASEIMEFK

SEQ ID NO: 775248 - protein, 123 aa, Homo sapiens
MEPAEQPSELVSAEGRNRKAVLCQRCGSRVLQPGTALFSRRQLFLPSMRKKPALSDGSNPDGDLLQEHWLVEDMFIFENVGFTKDVGNIKFLVCADCEIGPIGWHCLDDKNSFYVALERVSHE

SEQ ID NO: 775249 - protein, 123 aa, Homo sapiens; identical to SEQ ID NO: 775248

SEQ ID NO: 775250 - protein, 69 aa, Homo sapiens
  misc_feature (2)..(2): Xaa can be any naturally occurring amino acid
LXSLTILAYLTILPSLANKLTELSELIISCTIIYDSTVCKTSFGLCTIHIRAIKQLAKNPVKLPPRHHL

SEQ ID NO: 775251 - protein, 68 aa, Homo sapiens
VRGRADRGGCACEDPEVDWVVSTGTHPLSERWQLKPEEHLPRAENPGRKFCLFNTFQYGRFPYRYLSI

SEQ ID NO: 775252 - protein, 68 aa, Homo sapiens; identical to SEQ ID NO: 775251

SEQ ID NO: 775253 - protein, 100 aa, Homo sapiens
RQEDWLATRFLFSRPRQLLVPGNLSHIKTSLSKNGQASAPAMQMRPNPARAAGRARPPDRERPFSAPKAPARPFIWKPGGSRQIAAGRGGGQNALPTSEG

SEQ ID NO: 775254 - protein, 185 aa, Homo sapiens
MKLVSVALMYLGSLAFLGADTARLDVASEFRKKWNKWALSRGKRELRMSSSYPTGLADVKAGPAQTLIRPQDMKGASRSPEDSSPDAARIRVKRYRQSMNNFQGLRSFGCRFGTCTVQKLAHQIYQFTDKDKDNVAPRSKISPQGYGRRRRRSLPEAGPGRTLVSSKPQAHGAPAPPSGSAPHFL

SEQ ID NO: 775255 - protein, 185 aa, Homo sapiens; identical to SEQ ID NO: 775254

SEQ ID NO: 775256 - protein, 113 aa, Homo sapiens [sequence omitted]

SEQ ID NO: 775257 - protein, 138 aa, Homo sapiens
MSSSYPTGLADVKAGPAQTLIRPQDMKGASRSPEDSSPDAARIRVKRYRQSMNNFQGLRSFGCRFGTCTVQKLAHQIYQFTDKDKDNVAPRSKISPQGYGRRRRRSLPEAGPGRTLVSSKPQAHGAPAPPSGSAPHFL

SEQ ID NO: 775258 - protein, 185 aa, Homo sapiens; identical to SEQ ID NO: 775254

SEQ ID NO: 775259 - protein, 185 aa, Homo sapiens; identical to SEQ ID NO: 775254

SEQ ID NO: 775260 - protein, 185 aa, Homo sapiens; identical to SEQ ID NO: 775254

SEQ ID NO: 775261 - protein, 138 aa, Homo sapiens; identical to SEQ ID NO: 775257

SEQ ID NO: 775262 - protein, 185 aa, Homo sapiens; identical to SEQ ID NO: 775254

SEQ ID NO: 775263 - protein, 112 aa, Homo sapiens
MKLVSVALMYLGSLAFLGADTARLDVASEFRKKWNKWALSRGKRELRMSSSYPTGLADVKAGPAQTLIRPQDMKGASRSPEDSSPDAARIRVKRYRQSMNNFQGLRSFGCRF

SEQ ID NO: 775264 - protein, 1003 aa, Homo sapiens
SSGPNCAPGSSSSSSSDEAGDPNEAPSPDTLLGALARRQLNLGQLLEDTESYLQAFLAGAAGPLNGDHPGPGQSSSPDQAPPQLSKSKGLPKSAWGGGTPEAHRPGFGATSEGQGPLPFLSMFMGAGDAPLGSRPGHPHSSSQVKSKLQIGPPSPGEAQGPLLPSPARGLKFLKLPPTSEKSPSPGGPQLSPQLPRNSRIPCRNSGSDGSPSPLLARRGLGGGELSPEGAQGLPTSPSPCYTTPDSTQLRPPQSALSTTLSPGPVVSPCYENILDLSRSTFRGPSPEPPPSPLQVPTYPQLTLEVPQAPEVLRSPGVPPSPCLPESYPYGSPQEKSLDKAGSESPHPGRRTPGNSSKKPSQGSGRRPGDPGSTPLRDRLAALGKLKTGPEGALGSEKNGVPARPGTEKTRGPGKSGESAGDMVPSIHRPLEQLEAKGGIRGAVALGTNSLKQQEPGLMGDPGARVYSSHSMGARVDLEPVSPRSCLTKVELAKSRLAGALCPQVPRTPAKVPTSAPSLGKPNKSPHSSPTKLPSKSPTKVVPRPGAPLVTKESPKPDKGKGPPWADCGSTTAQSTPLVPGPTDPSQGPEGLAPHSAIEEKVMKGIEENVLRLQGQERAPGAEVKHRNTSSIASWFGLKKSKLPALNRRTEATKNKEGAGGGSPLRREVKMEARKLEAESLNISKLMAKAEDLRRALEEEKAYLSSRARPRPGGPAPGPNTGLGQVQGQLAGMYQGADTFMQQLLNRVDGKELPSKSWREPKPEYGDFQPVSSDPKSPWPACGPRNGLVGPLQGCGKPPGKPSSEPGRREEMPSEDSLAEPVPTSHFTACGSLTRTLDSGIGTFPPPDHGSSGTPSKNLPKTKPPRLDPPPGVPPARPPPLTKVPRRAHTLEREVPGIEELLVSGRHPSMPAFPALLPAAPGHRGHETCPDDPCEDPGPTPPVQLAKNWTFPNTRAAGSSSDPLMCPPRQLEGLPRTPMVRIAAEERERTREQEGVMWGDQFLQ

SEQ ID NO: 775265 - protein, 1026 aa, Homo sapiens
SSGPNCAPGSSSSSSSDEAGDPNEAPSPDTLLGALARRQLNLGQLLEDTESYLQAFLAGAAGPLNGDHPGPGQSSSPDQAPPQLSKSKGLPKSAWGGGTPEAHRPGFGATSEGQGPLPFLSMFMGAGDAPLGSRPGHPHSSSQVKSKLQIGPPSPGEAQGPLLPSPARGLKFLKLPPTSEKSPSPGGPQLSPQLPRNSRIPCRNSGSDGSPSPLLARRGLGGGELSPEGAQGLPTSPSPCYTTPDSTQLRPPQSALSTTLSPGPVVSPCYENILDLSRSTFRGPSPEPPPSPLQVPTYPQLTLEVPQAPEVLRSPGVPPSPCLPESYPYGSPQEKSLDKAGSESPHPGRRTPGNSSKKPSQGSGRRPGDPGSTPLRDRLAALGKLKTGPEGALGSEKNGVPARPGTEKTRGPGKSGESAGDMVPSIHRPLEQLEAKGGIRGAVALGTNSLKQQEPGLMGDPGARVYSSHSMGARVDLEPVSPRSCLTKCQPQPQSLGKPNKSPHSSPTKLPSKSPTKVVPRPGAPLVTKESPKPDKGKGPPWADCGSTTAQSTPLVPGPTDPSQGPEGLAPHSAIEEKVMKGIEENVLRLQGQERAPGAEVKHRNTSSIASWFGLKKSKLPALNRRTEATKNKEGAGGGSPLRREVKMEARKLEAESLNISKLMAKAEDLRRALEEEKAYLSSRARPRPGGPAPGPNTGLGQVQGQLAGMYQGADTFMQQLLNRVDGKELPSKSWREPKPEYGDFQPVSSDPKSPWPACGPRNGLVGPLQGCGKPPGKPSSEPGRREEMPSEDSLAEPVPTSHFTACGSLTRTLDSGIGTFPPPDHGSSGTPSKNLPKTKPPRLDPPPGVPPARPPPLTKVPRRAHTLEREVPGIEELLVSGRHPSMPAFPALLPAAPGHRGHETCPDDPCEDPGPTPPVQLAKNWTFPNTRAAGSSSDPLMCPPRQLEGLPRTPMALPVDRKRSQEPSRPSPTPQGPPFGGSRTPSTSDMAEEGRVASGGPPGLETSESLSDSLYDSLSSCGSQG

SEQ ID NO: 775266 - protein, 1048 aa, Homo sapiens
SSGPNCAPGSSSSSSSDEAGDPNEAPSPDTLLGALARRQLNLGQLLEDTESYLQAFLAGAAGPLNGDHPGPGQSSSPDQAPPQLSKSKGLPKSAWGGGTPEAHRPGFGATSEGQGPLPFLSMFMGAGDAPLGSRPGHPHSSSQVKSKLQIGPPSPGEAQGPLLPSPARGLKFLKLPPTSEKSPSPGGPQLSPQLPRNSRIPCRNSGSDGSPSPLLARRGLGGGELSPEGAQGLPTSPSPCYTTPDSTQLRPPQSALSTTLSPGPVVSPCYENILDLSRSTFRGPSPEPPPSPLQVPTYPQLTLEVPQAPEVLRSPGVPPSPCLPESYPYGSPQEKSLDKAGSESPHPGRRTPGNSSKKPSQGSGRRPGDPGSTPLRDRLAALGKLKTGPEGALGSEKNGVPARPGTEKTRGPGKSGESAGDMVPSIHRPLEQLEAKGGIRGAVALGTNSLKQQEPGLMGDPGARVYSSHSMGARVDLEPVSPRSCLTKVELAKSRLAGALCPQVPRTPAKVPTSAPSLGKPNKSPHSSPTKLPSKSPTKVVPRPGAPLVTKESPKPDKGKGPPWADCGSTTAQSTPLVPGPTDPSQGPEGLAPHSAIEEKVMKGIEENVLRLQGQERAPGAEVKHRNTSSIASWFGLKKSKLPALNRRTEATKNKEGAGGGSPLRREVKMEARKLEAESLNISKLMAKAEDLRRALEEEKAYLSSRARPRPGGPAPGPNTGLGQVQGQLAGMYQGADTFMQQLLNRVDGKELPSKSWREPKPEYGDFQPVSSDPKSPWPACGPRNGLVGPLQGCGKPPGKPSSEPGRREEMPSEDSLAEPVPTSHFTACGSLTRTLDSGIGTFPPPDHGSSGTPSKNLPKTKPPRLDPPPGVPPARPPPLTKVPRRAHTLEREVPGIEELLVSGRHPSMPAFPALLPAAPGHRGHETCPDDPCEDPGPTPPVQLAKNWTFPNTRAAGSSSDPLMCPPRQLEGLPRTPMALPVDRKRSQEPSRPSPTPQGPPFGGSRTPSTSDMAEEGRVASGGPPGLETSESLSDSLYDSLSSCGSQG

SEQ ID NO: 775267 - protein, 1003 aa, Homo sapiens; identical to SEQ ID NO: 775264

SEQ ID NO: 775268 - protein, 92 aa, Homo sapiens
KEGAGGGSPLRREVKMEARKLEAESLNISKLMAKAEDLRRALEEEKAYLSSRARPRPGGPAPGPNTGLGQVQGQLAGMYQGADTFMQQLLNR

SEQ ID NO: 775269 - protein, 1048 aa, Homo sapiens; identical to SEQ ID NO: 775266

SEQ ID NO: 775270 - protein, 80 aa, Homo sapiens
PRIPRVFLPNYPILHLRSLPEILLIEEKSPEPRLFLLIRESKPRPLKKLNQLGEGKGCWQHLDYSPNQTPHNGAAAADNP

SEQ ID NO: 775271 - protein, 240 aa, Homo sapiens
GRPLQKGSHPMCKEHEDEKINIYCLTCEVPTCSMCKVFGIHKACEVAPLQSVFQGQKTELNNCISMLVAGNDRVQTIITQLEDSRRVTKENSHQVKEELSQKFDTLYAILDEKKSELLQRITQEQEKKLSFIEALIQQYQEQLDKSTKLVETAIQSLDEPGGATFLLTAKQLIKSIVEASKGCQLGKTEQGFENMDFFTLDLEHIADALRAIDFGTDEEEEEGIGRRGSGGGRVQRKEGR

SEQ ID NO: 775272 - protein, 31 aa, Homo sapiens
VGRGRQSSYQGEAEMAQQETCPQNATNAPGQ

SEQ ID NO: 775273 - protein, 240 aa, Homo sapiens
RALCTPNEHFRFPQLQRPAGNFAGAAEFRSAAKAPTPREGGKASAGRWRQAAGQAWGVTPAPHSALGSGRLSAPGRSFGGRDSGPALPLSLPLGGRWQHRTASRPKDSGAGYRGQRNVSGTRVSSPAKQAPADGRYVLNVAVRWPVRPECWFTFPEVRVRVLTKNTVPFLCSLFAWAIHVHIQLHSESCFCCCCCCCCCLRRSLALLPRLEAGRYNGSLQAPPPGFTPFSCLSLPATQEA

SEQ ID NO: 775274 - protein, 47 aa, Homo sapiens
MAALSHHAVCPGSGLGDSSEGLQFLAATSTLTLGLCHRATPGVEGEL

SEQ ID NO: 775275 - protein, 346 aa, Homo sapiens
AQPGREEGGGTGGGTGGGRAGRRQPRAAPGTSTDSLFQPRCPPLSLHSAGAPSPVRQGTGPGGTMVSAAAPSLLILLLLLLGSVPATDARSVPLKATFLEDVAGSGEAEGSSASSPSLPPPWTPALSPTSMGPQPTTLGGPSPPTNFLDGIVDFFRQYVMLIAVVGSLAFLLMFIVCAAVITRQKQKASAYYPSSFPKKKYVDQSDRAGGPRAFSEVPDRAPDSRPEEALDSSRQLQADILAATRTSSPPPGLHWAVGTEPGWWGQGAEEEEKGSQEGDQEVQGHGVPVETPEAQEEPCSGVLEGAVVAGEGQGELEGSLLLAQEAQGPVGPPESPCACSSVHPSV

SEQ ID NO: 775276 - protein, 282 aa, Homo sapiens
MVSAAAPSLLILLLLLLGSVPATDARSVPLKATFLEDVAGSGEAEGSSASSPSLPPPWTPALSPTSMGPQPTTLGGPSPPTNFLDGIVDFFRQYVMLIAVVGSLAFLLMFIVCAAVITRQKQKASAYYPSSFPKKKYVDQSDRAGGPRAFSEVPDRAPDSRPEEALDSSRQLQADILAATRTSSPPPGLHWAVGTEPGWWGQGAEEEEKGSQEGDQEVQGHGVPVETPEAQEEPCSGVLEGAVVAGEGQGELEGSLLLAQEAQGPVGPPESPCACSSVHPSV

SEQ ID NO: 775277 - protein, 346 aa, Homo sapiens; identical to SEQ ID NO: 775275

SEQ ID NO: 775278 - protein, 346 aa, Homo sapiens; identical to SEQ ID NO: 775275

SEQ ID NO: 775279 - protein, 346 aa, Homo sapiens; identical to SEQ ID NO: 775275

SEQ ID NO: 775280 - protein, 346 aa, Homo sapiens; identical to SEQ ID NO: 775275

SEQ ID NO: 775281 - protein, 35 aa, Homo sapiens
EVGPLHFWSPLDTQEEVPSHPRTCCAGVVFLPESP

SEQ ID NO: 775282 - protein, 118 aa, Homo sapiens
SSSNSPASASQVAGITDSIGRDIPKMLELFKNGHEIKVDEERENFLQTKIATLDMSSDQIAANLQAVINEVCRHRPLNLGPFVVRAFLRSSTSEGLLLKIDPLLPKEVKNEESEKEDA

SEQ ID NO: 775283 - protein, 254 aa, Homo sapiens
MAAAVRCMGRALIHHQRHSLSKMVYQTSLCSCSVNIRVPNRHFAAATKSAKKTKKGAKEKTPDEKKDEIEKIKAYPYMEGEPEDDVYLKRLYPRQIYEVEKAVHLLKKFQILDFTSPKQSVYLDLTLDMALGKKKNVEPFTSVLSLPYPFASEINKVAVFTENASEVKIAEENGAAFAGGTSLIQKIWDDEIVADFYVAVPEIMPELNRLRKKLNKKYPKLSRNSIGRDIPKMLELFKNGHEIKVDEESEKEDA

SEQ ID NO: 775284 - protein, 318 aa, Homo sapiens [sequence omitted]

SEQ ID NO: 775285 - protein, 318 aa, Homo sapiens [sequence omitted]

SEQ ID NO: 775286 - protein, 318 aa, Homo sapiens [sequence omitted]

SEQ ID NO: 775287 - protein, 318 aa, Homo sapiens [sequence omitted]

SEQ ID NO: 775288 - protein, 55 aa, Homo sapiens
MQALWLPPPWGPMSPVACVVMACAGPHVRCVSAHPVNVTGGALTQDVHMSCTARM

SEQ ID NO: 775289 - protein, 177 aa, Homo sapiens
MRSVLRQRILKPKDVAIYSGEVNQVIADLIKRIYLLRSQAEDGETVTNVNDLFFKYSMEGVATILYESRLGCLENSIPQLTVEYIEALELMFSMFKTSMYAGAIPRWLRPFIPKPWREFCRSWDGLFKFSQIHVDNKLRDIQYQMDRGRRGERGTSHNLFLSQALTLQEIYANVTEM

SEQ ID NO: 775290 - protein, 177 aa, Homo sapiens; identical to SEQ ID NO: 775289

SEQ ID NO: 775291 - protein, 115 aa, Homo sapiens
MFFDTTPKLNKWKIHVSCKVESETLSMSISFIVTLKSISPSCTLKGSFTHAWFYNMMPWPLRKCWFTELCTSFKYGYVSLHNIKISHFIKLQLILSEMSLKILSIEELSSSYLWM

SEQ ID NO: 775292 - protein, 68 aa, Homo sapiens
MALLGLLKVGVQKLRVLKLQGACYAHGHQSYIGTFTYCSMQPPILALPRCPQAHPKAPCHTASPSTCQ

SEQ ID NO: 775293 - protein, 105 aa, Homo sapiens
CQGGGGPGLPAGLPLRELGRQWQLWLALRLQPKDVEQNRTGESLGASGSVLRSSPGEVVKGGRALGRENDPARGPGGEVTPACRHRVLWLGLSHPVLRVDNVDRA

SEQ ID NO: 775294 - protein, 385 aa, Homo sapiens
KIHLFIQQTVAEGLLCAVPGLGMKAPDVRSEAAAQEDTPDGALGPGRWWRHHIRNNFVRKVNLTVRTEFSLKTSFTSLFPELNSTFCNKQNVHMLNKGTQAGNLEIVNGAKNTLEPTPSSSEAKLEEDSDVTSWSEEKHEEKMLFTSYPEDRKLKKNKKNAHEGVSWFVPLENVELDKKKENMLKTHDPGISRLEPVTKTKPWREPLWERNWQGQHLDSRGYLAGPGREDGRNPLKLFVRATLQESLQFHRPDFISHIWERIKRLKLIVQERKLQSMLKSERDALFDIDRERQGHQNRMRPLPKRVFLAVQKNKPISKKEMIQRSKRTHAGGTVAHKASRCLVGERKASRERRETPRDPGDVGKQHPDHVRTPPAGGDSRPGKVF

SEQ ID NO: 775295 - protein, 113 aa, Homo sapiens
  misc_feature (1)..(1): Xaa can be any naturally occurring amino acid
  misc_feature (9)..(9): Xaa can be any naturally occurring amino acid
  misc_feature (32)..(32): Xaa can be any naturally occurring amino acid
  misc_feature (76)..(76): Xaa can be any naturally occurring amino acid
  misc_feature (106)..(106): Xaa can be any naturally occurring amino acid
XFPTSTEFXFQDVKKNLSRPRGLNIRSQPDQXRVALGQVHCCFLAQLASTPPTSRIKCPPQPNSLPPPRCSGSDSXVAFVETWVSEGEGHEIQPDGLKILKELFSXNSGTGID

SEQ ID NO: 775296 - protein, 39 aa, Homo sapiens
FALGWSWLSTHTLSPAPGMSAACPTAGHQSWMEDSCPGM

SEQ ID NO: 775297 - protein, 142 aa, Homo sapiens
MLMRRFTATSPAEARDWVDQISFLLKDLSSLTIPYEEDEEEEEKEETYDDIDGFDSPSCGSQCRPTILPGSVGIKEPTEEKEEEDIYEVLPDEEHDLEEDESGTRRKGVDYASYYQGLWDCHGDQPDELSFQRGDLIRILSK

SEQ ID NO: 775298 - protein, 35 aa, Homo sapiens
MTPSPAGPTLCIQSTGHPHPGLKDAGMISPAGSSP

SEQ ID NO: 775299 - protein, 146 aa, Homo sapiens
MVWLCVLHSASLAFRLLDAALFPAGGRRGGQAPRSLAAPGAFQAQPGHGAETQTSRGLRAELHKPSCYTEGKNLRKPLTFLNNLDIAESCLAHGTGRDAEGKVSSDERYRPGGKSSACSTHFADPVGIICVDALCSLRSPLEMTRN

SEQ ID NO: 775300 - protein, 161 aa, Homo sapiens
MVEADRPGKHFIGGLNRENNEKMFKAVFAKHGPISEVLLIKDRTSKSRGFAFTTFENTADAKNAAKHMIGKPLDGKAIKVEQAKKPSFQSGGRQRPPASSRSRSPSGCLRSARGSSGGTRGWHPSHEGRLGNVLKCKDGTIGLKENKFEDIEISQLYLFPL

SEQ ID NO: 775301 - protein, 114 aa, Homo sapiens
LTPRDHSPPVNYSPPTSRRLPFGEPSLPLPETILLYPQPTAPRAGPPLSLPPPPSKLWAGPGTCQANAGGGEGVGGVGSAPSQVRLSCQNAEPPPPQQGHAQSWGREEGLWCRR

SEQ ID NO: 775302 - protein, 137 aa, Homo sapiens
HEDLFRTISNGTSAVVYETLKLKLRRRLAMGKNVSKAVEHINKTIEPALISKHLNVIEQKRIDKLMIETVDPDNRSKFGVNIILGISFAVCKAGAAEKGFSLLSQNCEFAGNSEGILLVPAFTVTSNGSQSGNKLAV

SEQ ID NO: 775303 - protein, 333 aa, Homo sapiens
MEENDPKPGEAAAAVEGQRQPESSPGGGSGGGGGSSPGEADTGRRRALMLPAVLQAPGNHQHPHRITNFFIDNILRPEFGRRKDAGTCCAGAGGGRGGGAGGEGGASGAEGGGGAGGSEQLLGSGSREPRQNPPCAPGAGGPLPAAGSDSPGDGEGGSKTLSLHGGAKKGGDPGGPLDGSLKARGLGGGDLSVSSDSDSSQAGANLGAQPMLWPAWVYCTRYSDRPSSGPRSRKPKKKNPNKEDKRPRTAFTAEQLQRLKAEFQTNRYLTEQRRQSLAQELSLNESQIKIWFQNKRAKIKKATGNKNTLAVHLMAQGLYNHSTTAKEGKSDSE

SEQ ID NO: 775304 - protein, 171 aa, Homo sapiens
NLGQDRHTCFPAQTSHFPRPPWLSMPPFWAYKNPRPLQADTQVAGRPNEQHIRGRRHKRWSSIGAPQQKDTLTGTRKPVGRGPAGGGGGWPGQSGESRGCRAPQLQGKTISLLAAPWAESYFHSIKLCTHSPSLWVIRFFRYNKARTQIQKALCSCHNVEGLIELVNTSRL

SEQ ID NO: 775305 - protein, 740 aa, Homo sapiens
MLFLFVRGPLLLAWDSVEEIVHDTITRNLQAFYNMLRSYDLGDTGRIGRNNFKKIMHVFCPFLTNAHFIKLCSKIQDIGSGRILYKKLLACIGIDGPPTVSPVLVPKDQLLSEHLQKDEQQQPDLSERTKLTEDKTTLTKKMTTEEVIEKFKKCIQQQDPAFKKRFLDFSKEPNGKINVHDFKKVLEDTGMPMDDDQYALLTTKIGFEKEGMSYLDFAAGFEDPPMRGPETTPPQPPTPSKSYVNSHFITAEECLKLFPRRLKESFRDPYSAFFKTDADRDGIINMHDLHRLLLHLLLNLKDDEFERFLGLLGLRLSVTLNFREFQNLCEKRPWRTDEAPQRLIENFLETDNEGNGILRRRDIKNALYGFDIPLTPREFEKLWARYDTEGKGHITYQEFLQKLGINYSPAVHRPCAEDYFNFMGHFTKPQQLQEEMKELQQSTEKAVAARDKLMDRHQDISKAFTKTDQSKTNYISICKMQEVLEECGCSLTEGELTHLLNSWGVSRHDNAINYLDFLRAVENSKSTGAQPKEKEESMPINFATLNPQEVVRKIQEVVESSQLALSTAFSALDKEDTGFVKATEFGQVLKDFCYKLTDNQYHYFLRKLRIHLTPYINWKYFLQNFSCFLEETADEWAEKMPKGPPPTSPKATADRDILARLHKAVTSHYHAITQEFENFDTMKTNTISREEFRAICNRRVQILTDEQVRNASQSSPCTPLAERQPGPWPECTEFKTVLYF

SEQ ID NO: 775306 - protein, 671 aa, Homo sapiens
RLACEQAHQYLVTKAKNRWSDLSKNFLETDNEGNGILRRRDIKNALYGFDIPLTPREFEKLWARYDTEGKGHITYQEFLQKLGINYSPAVHRPCAEDYFNFMGHFTKPQQLQEEMKELQQSTEKAVAARDKLMDRHQDISKAFTKTDQSKTNYISICKMQEVLEECGCSLTEGELTHLLNSWGVSRHDNAINYLDFLRAVENSKSTGAQPKEKEESMPINFATLNPQEVVRKIQEVVESSQLALSTAFSALDKEDTGFVKATEFGQVLKDFCYKLTDNQYHYFLRKLRIHLTPYINWKYFLQNFSCFLEETADEWAEKMPKGPPPTSPKATADRDILARLHKAVTSHYHAITQEFENFDTMKTNTISREEFRAICNRRVQILTDEQFDRLWNEMPVNAKGRLKYPDFLSRFSSETAATPMATGDSAVAQRGSSVPDVSEGTRSALSLPTQELRPGSKSQSHPCTPASTTVIPGTPPLQNCDPIESRLRKRIQGCWRQLLKECKEKDVARQGDINASDFLALVEKFNLDISKEECQQLIIKYDLKSNGKFAYCDFIQSCVLLLKAKESSLMHRMKIQNAHKMKEAGAETPSFYSALLRIQPKIVHCWRPMRRTFKSYDEAGTGLLSVADFRTVLRQYSINLSEEEFFHILEYYDKTLSSKISYNDFLRAFLQ

SEQ ID NO: 775307 - protein, 362 aa, Homo sapiens
MTADEWAEKMPKGPPPTSPKATADRDILARLHKAVTSHYHAITQEFENFDTMKTNTISREEFRAICNRRVQILTDEQFDRLWNEMPVNAKGRLKYPDFLSRFSSETAATPMATGDSAVAQRGSSVPDVSEGTRSALSLPTQELRPGSKSQSHPCTPASTTVIPGTPPLQNCDPIESRLRKRIQGCWRQLLKECKEKDVARQGDINASDFLALVEKFNLDISKEECQQLIIKYDLKSNGKFAYCDFIQSCVLLLKAKESSLMHRMKIQNAHKMKEAGAETPSFYSALLRIQPKIVHCWRPMRRTFKSYDEAGTGLLSVADFRTVLRQYSINLSEEEFFHILEYYDKTLSSKISYNDFLRAFLQ

SEQ ID NO: 775308 - protein, 101 aa, Homo sapiens
SYSALEAVPAQKEAGAETPSFYSALLRIQPKIVHCWRPMRRTFKSYDEAGTGLLSVADFRTVLRQYSINLSEEEFFHILEYYDKTLSSKISYNDFLRAFLQ

SEQ ID NO: 775309 - protein, 996 aa, Homo sapiens
MRKTSPCTDAKTPFLLAWDSVEEIVHDTITRNLQAFYNMLRSYDLGDTGRIGRNNFKKIMHVFCPFLTNAHFIKLCSKIQDIGSGRILYKKLLACIGIDGPPTVSPVLVPKDQLLSEHLQKDEQQQPDLSERTKLTEDKTTLTKKMTTEEVIEKFKKCIQQQDPAFKKRFLDFSKEPNGKINVHDFKKVLEDTGMPMDDDQYALLTTKIGFEKEGMSYLDFAAGFEDPPMRGPETTPPQPPTPSKSYVNSHFITAEECLKLFPRRLKESFRDPYSAFFKTDADRDGIINMHDLHRLLLHLLLNLKDDEFERFLGLLGLRLSVTLNFREFQNLCEKRPWRTDEAPQRLIENFLETDNEGNGILRRRDIKNALYGFDIPLTPREFEKLWARYDTEGKGHITYQEFLQKLGINYSPAVHRPCAEDYFNFMGHFTKPQQLQEEMKELQQSTEKAVAARDKLMDRHQDISKAFTKTDQSKTNYISICKMQEVLEECGCSLTEGELTHLLNSWGVSRHDNAINYLDFLRAVENSKSTGAQPKEKEESMPINFATLNPQEVVRKIQEVVESSQLALSTAFSALDKEDTGFVKATEFGQVLKDFCYKLTDNQYHYFLRKLRIHLTPYINWKYFLQNFSCFLEETADEWAEKMPKGPPPTSPKATADRDILARLHKAVTSHYHAITQEFENFDTMKTNTISREEFRAICNRRVQILTDEQFDRLWNEMPVNAKGRLKYPDFLSRFSSETAATPMATGDSAVAQRGSSVPDVSEGTRSALSLPTQELRPGSKSQSHPCTPASTTVIPGTPPLQNCDPIESRLRKRIQGCWRQLLKECKEKDVARQGDINASDFLALVEKFNLDISKEECQQLIIKYDLKSNGKFAYCDFIQSCVLLLKAKESSLMHRMKIQNAHKMKEAGAETPSFYSALLRIQPKIVHCWRPMRRTFKSYDEAGTGLLSVADFRTVLRQYSINLSEEEFFHILEYYDKTLSSKISYNDFLRAFLQ

SEQ ID NO: 775310 - protein, 448 aa, Homo sapiens
MTADEWAEKMPKGPPPTSPKATADRDILARLHKAVTSHYHAITQEFENFDTMKTNTISREEFRAICNRRVQILTDEQFDRLWNEMPVNAKGRLKYPDFLSRFSSETAATPMATGDSAVAQRGSSVPDVSEGTRSALSLPTQELRPGSKSQSHPCTPASTTVIPGTPPLQNCDPIESRLRKRIQGCWRQLLKECKEKDVARQGDINASDFLALVEKFNLDISKEECQQLIIKYDLKSNGKFAYCDFIQSCVLLLKAKESSLMHRMKIQNAHKMKEAGAETPSFYSALLRIQPKIVHCWRPMRRTFKSYDEAGTGLLSVADFRTVSTALRPVPLQGAAAKCQRPETSHGEPSTCCRRPGVTWLLQISLPWDPQVIQSWVHSPHLQTPGSPSQRLLEPCVDAPYLHRQLLRVLRQYSINLSEEEFFHILEYYDKTLSSKISYNDFLRAFLQ

SEQ ID NO: 775311 - protein, 211 aa, Homo sapiens
MRKTSPCTDAKTPFLLAWDSVEEIVHDTITRNLQAFYNMLRSYDLGDTGRIGRNNFKKIMHVFCPFLTNAHFIKLCSKIQDIGSGRILYKKLLACIGIDGPPTVSPVLVPKDQLLSEHLQKDEQQQPDLSERTKLTEDKTTLTKKMTTEEVIEKFKKCIQQQDPAFKKRFLDFSKEPNGKINVHDFKKVGEWVSLCFYPAEVQLFSYTNIL

SEQ ID NO: 775312 - protein, 448 aa, Homo sapiens; identical to SEQ ID NO: 775310

SEQ ID NO: 775313 - protein, 137 aa, Homo sapiens
HTELKEKCAASNQGLDRLRRVSHQGYSTEAEFEEPRVIDLWDLAQSANLTDKELEAFREELKHFEAKIEKHNHYQKQLEIAHEKLRHAESVGDGERVSRSREKHALLEGRTKELGYTVKKHLQDLSGRISRARHNEL

SEQ ID NO: 775314 - protein, 143 aa, Homo sapiens
MVEILQHVIDYIRDLQLDLNSESEVGTPGGRGLPVRAPGVYRVSTPYIYSRNRRRHTSIFHPHEPTTSPTKCHATSLTRRHTKILGLARVSRQEGLFLVTAAAAVATQGLVVVKNPQDQTHAVLRAWPDSRAGAGETARDDAD

SEQ ID NO: 775315 - protein, 311 aa, Homo sapiens
AAEGQVVSARAPGAATAAALPRALAIASHGGKYSREKNQPKPSPKRESGEEFRMEKLNQLWEKAQRLHLPPVRLAELHADLKIQERDELAWKKLKLDGLDEDGEKEARLIRNLNVILAKYGLDGKKDARQVTSNSLSGTQEDGLDDPRLEKLWHKAKTSGKFSGEELDKLWREFLHHKEKVHEYNVLLETLSRTEATRDYSTEAEFEEPRVIDLWDLAQSANLTDKELEAFREELKHFEAKIEKHNHYQKQLEIAHEKLRHAESVGDGERVSRSREKHALLEGRTKELGYTVKKHLQDLSGRISRARHNEL

SEQ ID NO: 775316 - protein, 292 aa, Homo sapiens
AAEGQVVSARAPGAATAAALPRALAIASHGGKYSREKNQPKPSPKRESGEEFRMEKLNQLWEKAQRLHLPPVRLAELHADLKIQEKEARLIRNLNVILAKYGLDGKKDARQVTSNSLSGTQEDGLDDPRLEKLWHKAKTSGKFSGEELDKLWREFLHHKEKVHEYNVLLETLSRTEATRDYSTEAEFEEPRVIDLWDLAQSANLTDKELEAFREELKHFEAKIEKHNHYQKQLEIAHEKLRHAESVGDGERVSRSREKHALLEGRTKELGYTVKKHLQDLSGRISRARHNEL

SEQ ID NO: 775317 - protein, 311 aa, Homo sapiens; identical to SEQ ID NO: 775315

SEQ ID NO: 775318 - protein, 100 aa, Homo sapiens
TKAAESAELRTRAWARTCDRRKHPVSDQGLGTREEASAGPVRQDLQSSAQRTLKALGSPARQGRGQREGPGLLAVAFPWTARRQGGWGWHGCRGRKDCFW

SEQ ID NO: 775319 - protein, 216 aa, Homo sapiens
AAEGQVVSARAPGAATAAALPRALAIASHGGKYSREKNQPKPSPKRESGEEFRMEKLNQLWEKAQRLHLPPVRLAELHADLKIQERDELAWKKLKLDGLDEDGEKEARLIRNLNVILAKYGLGSSRPAPWVTEGVVGPEGWIDCAGVTGACIQAGEATFQRGPWQPRCRRERRARYISGDDRTNHKELSPRTQPTLGEGGTLQHGTRSRIQDDGIK

SEQ ID NO: 775320 - protein, 137 aa, Homo sapiens; identical to SEQ ID NO: 775313

SEQ ID NO: 775321 - protein, 215 aa, Homo sapiens
AAEGQVVSARAPGAATAAALPRALAIASHGGKYSREKNQPKPSPKRESGEEFRMEKLNQLWEKAQRLHLPPVRLAELHADLKIQERDELAWKKLKLDGLDEDGEKEARLIRNLNVILAKYGLDGKKDARQVTSNSLSGTQEDGLDDPRLEKLWHKAKTSGKFSGEELDKLWREFLHHKEKVHEYNVLLETLSRTEEIHENVISPSDLSDIKGSVL

SEQ ID NO: 775322 - protein, 100 aa, Homo sapiens
AAEGQVVSARAPGAATAAALPRALAIASHGGKYSREKNQPKPSPKRDSGEELDKLWREFLHHKEKVHEYNVLLETLSRTEEIHENVISPSDLSDIKGSVL

SEQ ID NO: 775323 - protein, 176 aa, Homo sapiens
AAEGQVVSARAPGAATAAALPRALAIASHGGKYSREKNQPKPSPKRESGEEFRMEKLNQLWEKAQRLHLPPVRLAELHADLKIQERDELAWKKLKLDGLDEDGEKEARLIRNLNVILAKYGLDGKKDARQVTSNSLSGTQEDGLDDPRLEKLWHKAKTSGKFSGEELDNWRLRTRS

SEQ ID NO: 775324 - protein, 210 aa, Homo sapiens
AAEGQVVSARAPGAATAAALPRALAIASHGGKYSREKNQPKPSPKRESGEEFRMEKLNQLWEKAQRLHLPPVRLAELHADLKIQERDELAWKKLKLDGLDEDGEKEARLIRNLNVILAKYGLDGKKDARQVTSNSLSGTQEDGLDDPRLEKLWHKAKTSGKFSGEELDKLWREFLHHKEKVHEYNVLLETLSRTEATRATALRLSSRSPG

SEQ ID NO: 775325 - protein, 311 aa, Homo sapiens; identical to SEQ ID NO: 775315

SEQ ID NO: 775326 - protein, 284 aa, Homo sapiens
LGPQPQAAVAWLPTSFLPSQEHCCSTEWRAPQPAALRGSMGNGDMKEESAAQLGCCHRPMALGGTGGSLSPSLDFQLFRGDQVFSACRPLPGMVDARGPSCASWLCPLPLAPGRSALLACLQDLDLNLCTPQPAPLGTDLQGLQEDALSMKHEPPGLQASSTDDKKFTVKYPQNKDKLGKQPERAGEGAPCPAFSSHNSSSPPPLQNRKSPSPLAFCPCPPVNSISKELPFLLHAFYPGYPLLLPPAHLFTYGALASDQCPHLLMLPQDPSYPTMAMPSLLMMV

SEQ ID NO: 775327 - protein, 225 aa, Homo sapiens
MALGGTGGSLSPSLDFQLFRGDQVFSACRPLPGMVDARGPSCASWLCPLPLAPGRSALLACLQDLDLNLCTPQPAPLGTDLQGLQEDALSMKHEPPGLQASSTDDKKFTVKYPQNKDKLGKQPERAGEGAPCPAFSSHNSSSPPPLQNRKSPSPLAFCPCPPVNSISKELPFLLHAFYPGYPLLLPPAHLFTYGALASDQCPHLLMLPQDPSYPTMAMPSLLMMV

SEQ ID NO: 775328 - protein, 174 aa, Homo sapiens
MEAKGVRVTPSGWGHLIDLVHVCLHEVLGNGDMKEESAAQLGCCHRPMALGGTGGSLSPSLDFQLFRGDQSTSHQGCRPAPPMTRNSQSSTHRTRTSWENSQKELARGPPAQPSPLITALPHHRCRTERAPAPWLSAPVPLSTPSPRSSHFSSTPSTLDTHFSCLQPTCSPMGP

SEQ ID NO: 775329 - protein, 257 aa, Homo sapiens
MPGGGTAGRWKPKGNGDMKEESAAQLGCCHRPMALGGTGGSLSPSLDFQLFRGDQVFSACRPLPGMVDARGPSCASWLCPLPLAPGRSALLACLQDLDLNLCTPQPAPLGTDLQGLQEDALSMKHEPPGLQASSTDDKKFTVKYPQNKDKLGKQPERAGEGAPCPAFSSHNSSSPPPLQNRKSPSPLAFCPCPPVNSISKELPFLLHAFYPGYPLLLPPAHLFTYGALASDQCPHLLMLPQDPSYPTMAMPSLLMMV

SEQ ID NO: 775330 - protein, 257 aa, Homo sapiens
MPGEGRAGRWKPKGNGDMKEESAAQLGCCHRPMALGGTGGSLSPSLDFQLFRGDQVFSACRPLPGMVDARGPSCASWLCPLPLAPGRSALLACLQDLDLNLCTPQPAPLGTDLQGLQEDALSMKHEPPGLQASSTDDKKFTVKYPQNKDKLGKQPERAGEGAPCPAFSSHNSSSPPPLQNRKSPSPLAFCPCPPVNSISKELPFLLHAFYPGYPLLLPPAHLFTYGALASDQCPHLLMLPQDPSYPTMAMPSLLMMV

SEQ ID NO: 775331 - protein, 234 aa, Homo sapiens
LGPQPQAAVAWLPTSFLPSQEHCCSTEWRAPQPAALRGSMGNGDMKEESAAQLGCCHRPMALGGTGGSLSPSLDFQLFRGDQPAPLGTDLQGLQEDALSMKHEPPGLQASSTDDKKFTVKYPQNKDKLGKQPERAGEGAPCPAFSSHNSSSPPPLQNRKSPSPLAFCPCPPVNSISKELPFLLHAFYPGYPLLLPPAHLFTYGALASDQCPHLLMLPQDPSYPTMAMPSLLMMV

SEQ ID NO: 775332 - protein, 218 aa, Homo sapiens
MEESPLSRAPSRGGVNFLNVARTYIPNTKVECHYTLPPGTMPSASDWIGIFKVEAACVRDYHTFVWSSVPESTTDGSPIHTSVQFQASYLPKPGAQLYQFRYVNRQGQVCGQSPPFQFREPRPMDELVTLEEADGGSDILLVVPKATVLQNQLDESQQERNDLMQLKLQLEGQVTELRSRVQELERALATARQEHTELMEQYKGISRSMGRSQKRGTS

SEQ ID NO: 775333 - protein, 190 aa, Homo sapiens
MEESPLSRAPSRGGVNFLNVARTYIPNTKVECHYTLPPGTMPSASDWIGIFKVEAACVRDYHTFVWSSVPESTTDGKQENHHLNLDLKEAKSWQEEQSAQAQRLKDKVAQMKDTLGQAQQRVAELEPLKEQLRGAQELAASSQQKATLLGRSGQCSSSQDRTIAELHRSRLEVAEVNGRLAELRLHLKEE

SEQ ID NO: 775334 - protein, 30 aa, Homo sapiens
CQDCHLPPPAEPWSKLPNADSGKKRNQAYL

SEQ ID NO: 775335 - protein, 415 aa, Homo sapiens
MQMSYAIRCAFYQLLLAALMLVAMLQLLYLSLLSGLHGQEEQDQYFEFFPPSPRSVDQVKAQLRTALASGGVLDASGDYRVYRGLLKTTMDPNDVILATHASVDNLLHLSGLLERWEGPLSVSVFAATKEEAQLATVLAYALSSHCPDMRARVAMHLVCPSRYEAAVPDPREPGEFALLRSCQEVFDKLARVAQPGINYALGTNVSYPNNLLRNLAREGANYALVIDVDMVPSEGLWRGLREMLDQSNQWGGTALVVPAFEIRRARRMPMNKNELVQLYQVGEVRPFYYGLCTPCQAPTNYSRWVNLPEESLLRPAYVVPWQDPWEPFYVAGGKVPTFDERFRQYGFNRISQACELHVAGFDFEVLNEGFLVHKGFKEALKFHPQKEAENQHNKILYRQFKQELKAKYPNSPRRC

SEQ ID NO: 775336 - protein, 415 aa, Homo sapiens; identical to SEQ ID NO: 775335

SEQ ID NO: 775337 - protein, 66 aa, Homo sapiens
GNIIRADVLEGFDFEVLNEGFLVHKGFKEALKFHPQKEAENQHNKILYRQFKQELKAKYPNSPRRC

SEQ ID NO: 775338 - protein, 415 aa, Homo sapiens; identical to SEQ ID NO: 775335

SEQ ID NO: 775339 - protein, 446 aa, Homo sapiens
VLKLRHCLGYGGSTVARCGRMLMHCRSHGRAMQMSYAIRCAFYQLLLAALMLVAMLQLLYLSLLSGLHGQEEQDQYFEFFPPSPRSVDQVKAQLRTALASGGVLDASGDYRVYRGLLKTTMDPNDVILATHASVDNLLHLSGLLERWEGPLSVSVFAATKEEAQLATVLAYALSSHCPDMRARVAMHLVCPSRYEAAVPDPREPGEFALLRSCQEVFDKLARVAQPGINYALGTNVSYPNNLLRNLAREGANYALVIDVDMVPSEGLWRGLREMLDQSNQWGGTALVVPAFEIRRARRMPMNKNELVQLYQVGEVRPFYYGLCTPCQAPTNYSRWVNLPEESLLRPAYVVPWQDPWEPFYVAGGKVPTFDERFRQYGFNRISQACELHVAGFDFEVLNEGFLVHKGFKEALKFHPQKEAENQHNKILYRQFKQELKAKYPNSPRRC

SEQ ID NO: 775340 - protein, 37 aa, Homo sapiens
METRHLFTSHYLALHISSIWLFLSCIPYNKPLIVSKI

SEQ ID NO: 775341 - protein, 117 aa, Homo sapiens
KSSWGLRRSFHLDQCTEFPLHLLGYTLKKIQSLFTFTSFFNVKATGGFVQRNSDPETQHGSRQSRTLLSSGGWGKGRLHKVHTKNHGPTVTDAMLHRTAERLRSCLQNHMATSSTEL

SEQ ID NO: 775342 - protein, 144 aa, Homo sapiens
MSSSFLPEPLPAKSLQHGVPLSLDSSLSSLLEKICILPNRGLARTKVPIFLGIQGGSRCLACVETEEGPSLQLEDVNIEELYKGGEEATRFTFFQSSSGSAFRLEAAAWPGWFLCGPAEPQQPVQLTKESEPSARTKFYFEQSW

SEQ ID NO: 775343 - protein, 292 aa, Homo sapiens
GSGTGFELGLSSNCEGGYSTLHPTLRAGNCCGSAIWGNLFSSFSEPAQAHTSQAHTPGGWTCSRIASVRERQSCLEPAGLVEALVDSGRPIIDEWPGEPVQPWLSGSKPQHVCLWLHPASFSNCPSLLPISEDQTPLIAGMCSLPMARYYIIKYADQKALYTRDGQLLVGDPVADNCCAEKICILPNRGLARTKVPIFLGIQGGSRCLACVETEEGPSLQLEDVNIEELYKGGEEATRFTFFQSSSGSAFRLEAAAWPGWFLCGPAEPQQPVQLTKESEPSARTKFYFEQSW

SEQ ID NO: 775344 - protein, 439 aa, Homo sapiens
MAAARCWRPLLRGPRLSLHTAANAAATATETTSQDVAATPVARYPPIVASMTADSKAARLRRIERWQATVHAAESVDEKLRILTKMQFMKYMVYPQTFALNADRWYQYFTKTVFLSGLPPPPAEPEPEPEPEPEPALDLAALRAVACDCLLQEHFYLRRRRRVHRYEESEVISLPFLDQLVSTLVGLLSPHNPALAAAALDYRCPVHFYWVRGEEIIPRGHRRGRIDDLRYQIDDKPNNQIRISKQLAEFVPLDYSVPIEIPTIKCKPDKLPLFKRQYENHIFVGSKTADPCCYGHTQFHLLPDKLRRERLLRQNCADQIEVVFRANAIASLFAWTGAQAMYQGFWSEADVTRPFVSQAVITDGKYFSFFCYQLNTLALTTQADQNNPRKNICWGTQSKPLYETIEDNDVKGFNDDVLLQIVHFLLNRPKEEKSQLLEN

SEQ ID NO: 775345 - protein, 439 aa, Homo sapiens; identical to SEQ ID NO: 775344

SEQ ID NO: 775346 - protein, 439 aa, Homo sapiens; identical to SEQ ID NO: 775344

SEQ ID NO: 775347 - protein, 891 aa, Homo sapiens
MSDPEMGWVPEPPTMTLGASRVELRVSCHGLLDRDTLTKPHPCVLLKLYSDEQWVEVERTEVLRSCSSPVFSRVLALEYFFEEKQPLQFHVFDAEDGATSPRNDTFLGSTECTLGQIVSQTKVTKPLLLKNGKTAGKSTITIVAEEVSGTNDYVQLTFRAYKLDNKDLFSKSDPFMEIYKTNEDQSDQLVWRTEVVKNNLNPSWEPFRLSLHSLCSCDVHRPLKFLVYDYDSSGKHDFIGEFTSTFQEMQEGTANPGQEVPQIPHPQNPTQIPGRILRVMLKRPPYVIGSGEGGKHLGSAEGRNHGGLALGGSAGREKEGSPDGLVTLSLWGGVKMQWDCINPKYRDKKKNYKSSGTVVLAQCTVNFTSCFKPCPSPCPYHTLRFNPSLVSKTSFSASGNWKPPPTATQKTLAPPCSPQKPYPSSLLKGPPHPLALPLSLPPGGEGAHLPGLHHGWLPDQLHGKDSEGGHTGKREGLSPYERKEPRISTAPTWAAHEPSHCQLMHPHIIMWLPVASPPLILVLPTDPSSGLGNLVALMVAADLLPTPTQVAIDFTASNGDPRSSQSLHCLSPRQPNHYLQALRAVGGICQDYDRYGESGAGGNRQGGLAQRIPQLFLLPSDKRFPAFGFGARIPPNFEVGSDARERRRWGACQSGRKGRPSLLPPCPHRCPMTLLSTLTRKILNVKVKGEIFTCPASPQTHSTQEHRLHSPGPSFLSLPPIPGLSLSEISGVIASYRRCLPQIQLYGPTNVAPIINRVAEPAQREQSTGQATKYSVLLVLTDGVVSDMAETRTAIVRASRLPMSIIIVGVGNADFSDMRLLDGDDGPLRCPRGVPAARDIVQFVPFRDFKDVSPPGPFRLKDSSASHPPKSDLRLPPFDVLLRTREPSWPP

SEQ ID NO: 775348 - protein, 220 aa, Homo sapiens
MTLLSTLTRKILNVKVKGEIFTCPASPQTHSTQEHRLHSPGPSFLSLPPIPGLSLSEISGVIASYRRCLPQIQLYGPTNVAPIINRVAEPAQREQSTGQATKYSVLLVLTDGVVSDMAETRTAIVRASRLPMSIIIVGVGNADFSDMRLLDGDDGPLRCPRGVPAARDIVQFVPFRDFKDVSPPGPFRLKDSSASHPPKSDLRLPPFDVLLRTREPSWPP

SEQ ID NO: 775349 - protein, 644 aa, Homo sapiens
MSDPEMGWVPEPPTMTLGASRVELRVSCHGLLDRDTLTKPHPCVLLKLYSDEQWVEVERTEVLRSCSSPVFSRVLALEYFFEEKQPLQFHVFDAEDGATSPRNDTFLGSTECTLGQIVSQTKVTKPLLLKNGKTAGKSTITIVAEEVSGTNDYVQLTFRAYKLDNKDLFSKSDPFMEIYKTNEDQSDQLVWRTEVVKNNLNPSWEPFRLSLHSLCSCDVHRPLKFLVYDYDSSGKHDFIGEFTSTFQEMQEGTANPGQEMQWDCINPKYRDKKKNYKSSGTVVLAQCTVEKVHTFLDYIMGGCQISFTVKTQREGTQARGRGWVHSERKEPRISTAPTWAAHEPSHCQLMHPHIIMWLPVASPPLILVLPTDPSSGLGNLVALMVQHDLLPTPTQVAIDFTASNGDPRSSQSLHCLSPRQPNHYLQALRAVGGICQDYDSDKRFPAFGFGARIPPNFEVSHDFAINFDPENPECEEISGVIASYRRCLPQIQLYGPTNVAPIINRVAEPAQREQSTGQATKYSVLLVLTDGVVSDMAETRTAIVRASRLPMSIIIVGVGNADFSDMRLLDGDDGPLRCPRGVPAARDIVQFVPFRDFKDAAPSALAKCVLAEVPRQVVEYYASQGISPGAPRPCTLATTPSPSP

SEQ ID NO: 775350 - protein, 644 aa, Homo sapiens; identical to SEQ ID NO: 775349

SEQ ID NO: 775351 - protein, 984 aa, Homo sapiens
MSDPEMGWVPEPPTMTLGASRVELRVSCHGLLDRDTLTKPHPCVLLKLYSDEQWVEVERTEVLRSCSSPVFSRVLALEYFFEEKQPLQFHVFDAEDGATSPRNDTFLGSTECTLGQIVSQTKVTKPLLLKNGKTAGKSTITVGKITCTHPWSRYSMPLHGHLWCHHAQDHPHLRERGWGGPCGKVRGVLPLVSPLQIVAEEVSGTNDYVQLTFRAYKLDNKVGTPESRPPTPLSLLGLPLKTDPRSPGLLSSQWEPIPHPPCSSHQPQGPFLLYLQDLFSKSDPFMEIYKTNEDQSDQLVWRTEVGAWGYGDEGRESKVRRHRQELTSHLGLSKVVKNNLNPSWEPFRLSLHSLCSCDVHRPLKFLVYDYDSSGKHDFIGEFTSTFQEMQEGTANPGQEVPQIPHPQNPTQIPGRILRVMLKRPPYVIGSGEGGKHLGSAEGRNHGGLALGGSAGREKEGSPDGLVTLSLWGGVKMQWDCINPKYRDKKKNYKSSGTVVLAQCTVNFTSCFKPCPSPCPYHTLRFNPSLVSKTSFSASGNWKPPPTATQKTLAPPCSPQKPYPSSLLKGPPHPLAFPSPYLQVEKVHTFLDYIMGGCQISFTVAIDFTASNGDPRSSQSLHCLSPRQPNHYLQALRAVGGICQDYDRYGESGAGGNRQGGLAQRIPQLFLLPSDKRFPAFGFGARIPPNFEVSHDFAINFDPENPECEGKRGDFHLPRLPADTLHTGAQTPLPRAQLPVPSTHPRPVFIRLRLPGPRPSICTQLSLPRDHPTLPLLNEGTRGEGSPQTWKHFLALRSVRRGPCHFCQLHNFSSLTEISGVIASYRRCLPQIQLYGPTNVAPIINRVAEPAQREQSTGQATKYSVLLVLTDGVVSDMAETRTAIVRASRLPMSIIIVGVGNADFSDMRLLDGDDGPLRCPRGVPAARDIVQFVPFRDFKDAAPSALAKCVLAEVPRQVVEYYASQGISPGAPRPCTLATTPSPSP

SEQ ID NO: 775352 - protein, 976 aa, Homo sapiens
MSDPEMGWVPEPPTMTLGASRVELRVSCHGLLDRDTLTKPHPCVLLKLYSDEQWVEVERTEVLRSCSSPVFSRVLALEYFFEEKQPLQFHVFDAEDGATSPRNDTFLGSTECTLGQIVSQTKVTKPLLLKNGKTAGKSTITIVAEEVSGTNDYVQLTFRAYKLDNKVGTPESRPPTPLSLLGLPLKTDPRSPGLLSSQWEPIPHPPCSSHQPQGPFLLYLQDLFSKSDPFMEIYKTNEDQSDQLVWRTEVGAWGYGDEGRESKVRRHRQELTSHLVPLQVVKNNLNPSWEPFRLSLHSLCSCDVHRPLKFLVYDYDSSGKHDFIGEFTSTFQEMQEGTANPGQEVPQIPHPQNPTQIPGRILRVMLKRPPEVIGSGEGGKHLGSAEGRNHGGLALGGSAGREKEGSPDGLVTLSLWGGVKMQWDCINPKYRDKKKNYKSSGTVVLAQCTVNFTSCFKPCPSPCPYHTLRFNPSLVSKTSFSASGNWKPPPTATQKTLAPPCSPQKPYPSSLLKGPPHPLALPLSLPPGGEGAHLPGLHHGWLPDQLHGKDSEGGHTGKREGLSPYERKEPRISTAPTWAAHEPSHCQLMHPHIIMWLPVASPPLILVLPTDPSSGLGNLVALMVQHDLLPTPTQVAIDFTASNGDPRSSQSLHCLSPRQPNHYLQALRAVGGICQDYDRYGESGAGGNRQGGLAQRIPQLFLLPSDKRFPAFGFGARIPPNFEVRLDARERRRWGACQSGRKGRPSLLPPCPHRCPMTLLSTLTRKILNVKVKGEIFTCPASPQTHSTQEHRLHSPGPSFLSLPPIPGLSLSEISGVIASYRRCLPQIQLYGPTNVAPIINRVAEPAQREQSTGQATKYSVLLVLTDGVVSDMAETRTAIVRASRLPMSIIIVGVGNADFSDMRLLDGDDGPLRCPRGVPAARDIVQFVPFRDFKDVSPPGPFRLKDSSASHPPKSDLRLPPFDVLLRTREPSWPP

SEQ ID NO: 775353 - protein, 751 aa, Homo sapiens
MSDPEMGWVPEPPTMTLGASRVELRVSCHGLLDRDTLTKPHPCVLLKLYSDEQWVEVERTEVLRSCSSPVFSRVLALEYFFEEKQPLQFHVFDAEDGATSPRNDTFLGSTECTLGQIVSQTKVTKPLLLKNGKTAGKSTITIVAEEVSGTNDYVQLTFRAYKLDNKDLFSKSDPFMEIYKTNEDQSDQLVWRTEVVKNNLNPSWEPFRLSLHSLCSCDVHRPLKFLVYDYDSSGKHDFIGEFTSTFQEMQEGTANPGQEMQWDCINPKYRDKKKNYKSSGTVVLAQCTVEKVHTFLDYIMGGCQISFTVKTQREGTQARGRGWVHSERKEPRISTAPTWAAHEPSHCQLMHPHIIMWLPVASPPLILVLPTDPSSGLGNLVALMVAAMTFFPPPPRWPLTSLPPMGTRGAASPCTASVPDSPTTTCRPCVQWEASARTMTVISGSQLLALGLESPPTSRCPMTLLSTLTRKILNVKVKGEIFTCPASPQTHSTQEHRLHSPGPSFLSLPPIPGLSLSGEASRAEAQHLHPTLPAKGPSNFPLLNEGTRGEGSPQTWKHFLALRSVRRGPCHFCQLHNFSSLTEISGVIASYRRCLPQIQLYGPTNVAPIINRVAEPAQREQSTGQATKYSVLLVLTDGVVSDMAETRTAIVRASRLPMSIIIVGVGNADFSDMRLLDGDDGPLRCPRGVPAARDIVQFVPFRDFKDAAPSALAKCVLAEVPRQVVEYYASQGISPGAPRPCTLATTPSPSP

SEQ ID NO: 775354 - protein, 218 aa, Homo sapiens
MASRGGGRGRGRGQLTFNVEAVGIGKGDALPPPTLQPSPLFPPLEFRPVPLPSGEEGEYVLALKQELRGAMRQLPYFIRPAVPKRDVERYSDKYQMSGPIDNAIDWNPDWRRLPRELKIRVRKLQKERITILLPKRPPKTTEDKEETIQKLETLEKKEEEVTSEEDEEKEEEEEKEEEEEEEYDEEEHEEETDYIMSYFDNGEDFGGDSDDNMDEAIY

SEQ ID NO: 775355 - protein, 218 aa, Homo sapiens; identical to SEQ ID NO: 775354

SEQ ID NO: 775356 - protein, 218 aa, Homo sapiens; identical to SEQ ID NO: 775354

SEQ ID NO: 775357 - protein, 118 aa, Homo sapiens
MSGMGGWGLTLRGGRKPGRVCEMWSRSNVPEPLRSSSPGLRLLPLSGDTAPGRLSWDWRGEGAEPAGGRVNGEALYRRRSRDRRLDSGESGQRCPGVSSSTGSMRLSFCLSPEGGPDS

SEQ ID NO: 775358 - protein, 239 aa, Homo sapiens
SSAAADSAEAWDPVHFKLVAAWAPLWGGAAGLFTGSLNTQAPSTMASRGGGRGRGRGQLTFNVEAVGIGKGDALPPPTLQPSPLFPPLEFRPVPLPSGEEGEYVLALKQELRGAMRQLPYFIRPAVPKRDWRRLPRELKIRVRKLQKERITILLPKRPPKTTEDKEETIQKLETLEKKEEEVTSEEDEEKEEEEEKEEEEEEEYDEEEHEEETDYIMSYFDNGEDFGGDSDDNMDEAIY

SEQ ID NO: 775359 - protein, 100 aa, Homo sapiens
AGIIGMSHRAQPGSGFNGTEQPRLICCLCSVCTVYASGKNQRAKTKSSPTKLVEALLHILLIHRLRLMETLSPGTSSVTTTGGKGTWNQMSLMSNPDFAV

SEQ ID NO: 775360 - protein, 416 aa, Homo sapiens
  misc_feature (33)..(33): Xaa can be any naturally occurring amino acid
VGLPKGQIPPEPGTPLRIVSLLYLPSREGSGKXVWEPLPQREPSYRDVMLGELREMCSSLDRETRTENDQEISEDTRSHGVLLGRFQKDISQGLKFKEAYEREVSLKRPLGNSPGERLNRKMPDFGQVTVEEKLTPRGERSEKYNDFGNSFTVNSNLISHQRLPVGDRPHKCDECSKSFNRTSDLIQHQRIHTGEKPYECNECGKAFSQSSHLIQHQRIHTGEKPYECSDCGKTFSCSSALILHRRIHTGEKPYECNECGKTFSWSSTLTHHQRIHTGEKPYACNECGKAFSRSSTLIHHQRIHTGEKPYECNECGKAFSQSSHLYQHQRIHTGEKPYECMECGGKFTYSSGLIQHQRIHTGENPYECSECGKAFRYSSALVRHQRIHTGEKPLNGIGMSKSSLRVTTELNIREST

SEQ ID NO: 775361 - protein, 235 aa, Homo sapiens
DSSYRSTLRIHTGEKPYECNECGKAFSQSSHLIQHQRIHTGEKPYECSDCGKTFSCSSALILHRRIHTGEKPYECNECGKTFSWSSTLTHHQRIHTGEKPYACNECGKAFSRSSTLIHHQRIHTGEKPYECNECGKAFSQSSHLYQHQRIHTGEKPYECMECGGKFTYSSGLIQHQRIHTGENPYECSECGKAFRYSSALVRHQRIHTGEKPLNGIGMSKSSLRVTTELNIREST

SEQ ID NO: 775362 - protein, 309 aa, Homo sapiens
  misc_feature (33)..(33): Xaa can be any naturally occurring amino acid
VGLPKGQIPPEPGTPLRIVSLLYLPSREGSGKXVWEPLPQREPSYRDVMLGELREMCSSLDRETRTENDQEISEDTRSHGVLLGRFQKDISQGLKFKEAYEREVSLKRPLGNSPGERLNRKMPDFGQVTVEEKLTPRGERSEKYNDFGNSFTVNSNLISHQRLPVGDRPHKCDECSKSFNRTSDLIQHQRIHTGEKPYECNECGKAFSQSSHLIQHQRIHTGEKPYECSDCGKTFSCSSALILHRRIHTGEKPYECNECGKTFSWSSTLTHHQRIHTGEKPYACNECGKAFSRSSTLIHHQRIHTGEPL

SEQ ID NO: 775363 - protein, 416 aa, Homo sapiens; identical to SEQ ID NO: 775360
  misc_feature (33)..(33): Xaa can be any naturally occurring amino acid

SEQ ID NO: 775364 - protein, 100 aa, Homo sapiens
SCRIRHEILLRVEEIPESSSVMMVSFRALGAARPCFQEKPGDIASRPPAIPPSCPGAEWANLSKQLVTGCEGEGQKHLALASDCCPLLSSSHSNDENDFL

SEQ ID NO: 775365 - protein, 71 aa, Homo sapiens
LHQRRYCVRRNLPMHRRPHACSQLNTQSHRSTHTHSHTEPRQSLSHTGLLTVHIKMLMHWYGCVHTHTSQS

SEQ ID NO: 775366 - protein, 217 aa, Homo sapiens
MLPSPVIFSFVKGTENLEFSWEREDIKQAYEVEDNKEYYLLFKYLDFFEVFSKLVYQFHNNTEQLEDQNSLYEGRVSVDQAEISEGTLSLLLRNVDFMDEAIYKCSAITPDGRGESTIKLIVEDSEMPQVQFDRIDDEDVATCISKDKYLTPIVTWLDRTERDLSNHSIVEILEEQMNGFYRVFSILKYPVKLNEKYLCHITETDVNNQLFRIIHKY

SEQ ID NO: 775367 - protein, 70 aa, Homo sapiens
RTVSGSVYFASTSVPPRPGAAPGHILFLSRLQPLRAEVSRSHGLVFLCEVYQACAQGNRDLPEVDCTCKY

SEQ ID NO: 775368 - protein, 68 aa, Homo sapiens
LLYASTFCSGSTFCSGSTFCSGSTFCSGSTFCSGSTFCSGSTFCSGSTYLSDVDLLHWATSIFFIVRI

SEQ ID NO: 775369 - protein, 76 aa, Homo sapiens
EEDDVPPEEKRLRLLLEGGSAQPEDCEDGEDALRPGKEDTGTQTGGDGRGGASNCCPENTCKRIIQAACSLCMHTL

SEQ ID NO: 775370 - protein, 163 aa, Homo sapiens
MALLLSDWCPDGDADTHTGTDPGRTTHRLCARERGVRGTQPCPRIYLRLPAQNCEETRFCCASPGSVVLGHGAPRTASPPSALSHPSPLEGLSFSPFPPSVLSHPSPPEGLSFSLFHCLCSGKLSESPGCFWNSLGWSFSVLTEPGVWKVGEAIWVAENLAQP

SEQ ID NO: 775371 - protein, 179 aa, Homo sapiens [sequence omitted]

SEQ ID NO: 775372 - protein, 33 aa, Homo sapiens
MRSSWEVLATCAPTPVPPPAVPPGATYGGMAPG

SEQ ID NO: 775373 - protein, 130 aa, Homo sapiens; identical to SEQ ID NO: 742470

SEQ ID NO: 775374 - protein, 520 aa, Homo sapiens
MGLSNPFQGLMKLGTVERQGAMGIWKELFCELSPLEFRLYLSNEEHTCVENCSLLRCESVGPAHSDGRFELVFSGKKLALRASSQDEAEDWLDLVREALQKVRPQQEDEWVNVQYSDQPEEPPEAPQGCLSPSDLLSEPAALQGTQSDWSSAQVPELDAIKESLLYLYMDRTWMPYIFSLPLEALKCFRIRNNEKMLSDSHGVETIRDILPDTSLGGPSFFKIITAKAVLKLQAGNAEEAALWRDLVRKVLASYLETAEEAVTLGGSLDENCQEVLKFATRENGFLLQYLVAIPMEKGLDSQGCFCAGCSRQIGFSFVRPKLCAFSGLYYCDICHQDDASVIPARIIHNWDLTKRPICRQALKFLTQIRAQPLINLQMVNASLYEHVERMHLIGRSREQLKLLGDYLGLCRSGALKELSKRLNHRNYLLESPHRFRVADLRQIADEVYEGFLKALIEFASQHVYHCDLCTQRSFICQICQHHDIIFPSEFDTTVRCAKCKTVFHQSCQAVVKKGCPRCAR

SEQ ID NO: 775375 - protein, 565 aa, Homo sapiens
MGLSNPFQGLMKLGTVERQGAMGIWKELFCELSPLEFRLYLSNEEHTCVENCSLLRCESVGPAHSDGRFELVFSGKKLALRASSQDEAEDWLDLVREALQKVRPQQEDEWVNVQYSDQPEEPPEAPQGCLSPSDLLSEPAALQGTQSDWSSAQVPELDAIKESLLYLYMDRTWMPYIFSLPLEALKCFRIRNNEKMLSDSHGVETIRDILPDTSLGGPSFFKIITAKAVLKLQAGNAEEAALWRDLVRKVLASYLETAEEAVTLGGSLDENCQEVLKFATRENGFLLQYLVAIPMEKGLDSQGCFCAGCSRQIGFSFVRPKLCAFSGLYYCDICHQDDASVIPARIIHNWDLTKRPICRQALKFLTQIRAQPLINLQMVNASLYEHVERMHLIGRSREQLKLLGDYLGLCRSGALKELSKRLNHRNYLLESPHRFRVADLRQVRVSCLPRPELKKDFIPGEVSKEDGREGVCSLLKKTAAAAFLQLRIADEVYEGFLKALIEFASQHVYHCDLCTQRSFICQICQHHDIIFPSEFDTTVRCAKCKTVFHQSCQAVVKKGCPRCAR

SEQ ID NO: 775376 - protein, 202 aa, Homo sapiens
MESVNFSPANLSSTGSRYLNALVDSAVALETKDTSLASFIPAVNDLTSDLFRTKSKSEEIKIELEKLEKNLTATLVLEKCLQEDVKKAELHLSTERAKVDNRRQNMDFLKAKSEEFRFGIKAAEEQLSARGMDASLSHQSLVALSEKLARLKQQTIPLKKKLESYLDLMPNPSLAQVKIEEAKRELDSIEAELTRRVDMMEL

SEQ ID NO: 775377 - protein, 230 aa, Homo sapiens
MEPQEERETQVAAWLKKIFGDHPIPQYEVNPRTTEILHHLSERNRVRDRDVYLVIEDLKQKASEYESEAKYLQDLLMESVNFSPANLSSTGSRYLNALVDSAVALETKDTSLASFIPAVNDLTSDLFRTKSKSEEIKIELEKLEKNLTATLVLEKCLQEDVKKAELHLSTERAKVDNRRQNMDFLKAKSEEFRFGIKAAEEQLSARGMDASLSHQSLVALSEAEQDCNLI

SEQ ID NO: 775378 - protein, 220 aa, Homo sapiens
MEPQEERETQVAAWLKKIFGDHPIPQYEVNPRTTEILHHLSERNRVRDRDVYLVIEDLKQKASEYESEAKYLQDLLMESVNFSPANLSSTGSRYLNALVDSAVALETKDTSLASFIPAVNDLTSDLFRTKSKSEEIKIELEKLEKNLTATLVLEKCLQEDVKKAELHLSTERAKVDNRRQNMDFLKAKSEEFRFSTKGVKEQPSSLSHGSFLAHKFFTAP

SEQ ID NO: 775379 - protein, 202 aa, Homo sapiens; identical to SEQ ID NO: 775376

SEQ ID NO: 775380 - protein, 136 aa, Homo sapiens
MRVFWVFLVYLYSLCIRDVKKAELHLSTERAKVDNRRQNMDFLKAKSEEFRFGIKAAEEQLSARGMDASLSHQSLVALSEKLARLKQQTIPLKKKLESYLDLMPNPSLAQVKIEEAKRELDSIEAELTRRVDMMEL

SEQ ID NO: 775381 - protein, 123 aa, Homo sapiens
MEPQEERETQVAAWLKKIFGDHPIPQYEVNPRTTEILHHLSERNRVRDRDVYLVIEDLKQKASEYESEGATFSQRHGCFSVSSVLSSTIRETGKIKATDYTFEEKIGVLFRLNAESVSCSSEN

SEQ ID NO: 775382 - protein, 278 aa, Homo sapiens
MEPQEERETQVAAWLKKIFGDHPIPQYEVNPRTTEILHHLSERNRVRDRDVYLVIEDLKQKASEYESEAKYLQDLLMESVNFSPANLSSTGSRYLNALVDSAVALETKDTSLASFIPAVNDLTSDLFRTKSKSEEIKIELEKLEKNLTATLVLEKCLQEDVKKAELHLSTERAKVDNRRQNMDFLKAKSEEFRFGIKAAEEQLSARGMDASLSHQSLVALSEKLARLKQQTIPLKKKLESYLDLMPNPSLAQVKIEEAKRELDSIEAELTRRVDMMEL

SEQ ID NO: 775383 - protein, 124 aa, Homo sapiens
  misc_feature (5)..(5): Xaa can be any naturally occurring amino acid
MKSSXDVKKAELHLSTERAKVDNRRQNMDFLKAKSEEFRFGIKAAEEQLSARGMDASLSHQSLVALSEKLARLKQQTIPLKKKLESYLDLMPNPSLAQVKIEEAKRELDSIEAELTRRVDMMEL

SEQ ID NO: 775384 - protein, 278 aa, Homo sapiens; identical to SEQ ID NO: 775382

SEQ ID NO: 775385 - protein, 138 aa, Homo sapiens
MEPQEERETQVAAWLKKIFGDHPIPQYEVNPRTTEILHHLSERNRVRDRDVYLVIEDLKQKASEYESEAKYLQDLLMESVNFSPAKSKSEEIKIELEKLEDTYSVDTVRIRESLSYRHEDGENKGREDRGREKRGKGK

SEQ ID NO: 775386 - protein, 1412 aa, Homo sapiens
SRARCSREVEAPAALFSGSRGEGAMAPGCKTELRSVTNGQSNQPSNEGDAIKVFVRIRPPAERSGSADGEQNLCLSVLSSTSLRLHSNPEPKTFTFDHVADVDTTQESVFATVAKSIVESCMSGYNGTIFAYGQTGSGKTFTMMGPSESDNFSHNLRGVIPRSFEYLFSLIDREKEKAGAGKSFLCKCSFIEIYNEQIYDLLDSASAGLYLREHIKKGVFVVGAVEQVVTSAAEAYQVLSGGWRNRRVASTSMNRESSRSHAVFTITIESMEKSNEIVNIRTSLLNLVDLAGSERQKDTHAEGMRLKEAGNINRSLSCLGQVITALVDVGNGKQRHVCYRDSKLTFLLRDSLGGNAKTAIIANVHPGSRCFGETLSTLNFAQRAKLIKNKAVVNEDTQGNVSQLQAEVKRLKEQLAELASGQTPPESFLTRDKKKTNYMEYFQEAMLFFKKSEQEKKSLIEKVTQLEDLTLKKEKFIQSNKMIVKFREDQIIRLEKLHKESRGGFLPEEQDRLLSELRNEIQTLREQIEHHPRVAKYAMENHSLREENRRLRLLEPVKRAQEMDAQTIAKLEKAFSEISGMEKSDKNQQGFSPKAQKEPCLFANTEKLKAQLLQIQTELNNSKQEYEEFKELTRKRQLELESELQSLQKANLNLENLLEATKACKRQEVSQLNKIHAETLKIITTPTKAYQLHSRPVPKLSPEMGSFGSLYTQNSSILDNDILNEPVPPEMNEQAFEAISEELRTVQEQMSALQAKLDEEEHKNLKLQQHVDKLEHHSTQMQELFSSERIDWTKQQEELLSQLNVLEKQLQETQTKNDFLKSEVHDLRVVLHSADKELSSVKLEYSSFKTNQEKEFNKLSERHMHVQLQLDNLRLENEKLLESKACLQDSYDNLQEIMKFEIDQLSRNLQNFKKENETLKSDLNNLMELLEAEKERNNKLSLQFEEDKENSSKEILKVLEAVRQEKQKETAKCEQQMAKVQKLEESLLATEKVISSLEKSRDSDKKVVADLMNQIQELRTSVCEKTETIDTLKQELKDINCKYNSALVDREESRVLIKKQEVDILDLKETLRLRILSEDIERDMLCEDLAHATEQLNMLTEASKKHSGLLQSAQEELTKKEALIQELQHKLNQKKEEVEQKKNEYNFKMRQLEHVMDSAAEDPQSPKTPPHFQTHLAKLLETQEQEIEDGRASKTSLEHLVTKLNEDREVKNAEILRMKEQLREMENLRLESQQLIEKNWLLQGQLDDIKRQKENSDQNHPDNQQLKNEQEESIKERLAKSKIVEEMLKMKADLEEVQSALYNKEMECLRMTDEVERTQTLESKAFQEKEQLRSKLEEMYEERERTSQEMEMLRKQVECLAEENGKLVGHQNLHQKIQYVVRLKKENVRLAEETEKLRAENVFLKEKKRSES

SEQ ID NO: 775387 - protein, 1089 aa, Homo sapiens
MAVVNEDTQGNVSQLQAEVKRLKEQLAELASGQTPPESFLTRDKKKTNYMEYFQEAMLFFKKSEQEKKSLIEKVTQLEDLTLKKEKFIQSNKMIVKFREDQIIRLEKLHKESRGGFLPEEQDRLLSELRNEIQTLREQIEHHPRVAKYAMENHSLREENRRLRLLEPVKRAQEMDAQTIAKLEKAFSEISGMEKSDKNQQGFSPKAQKEPCLFANTEKLKAQLLQIQTELNNSKQEYEEFKELTRKRQLELESELQSLQKANLNLENLLEATKACKRQEVSQLNKIHAETLKIITTPTKAYQLHSRPVPKLSPEMGSFGSLYTQNSSILDNDILNEPVPPEMNEQAFEAISEELRTVQEQMSALQAKLDEEEHKNLKLQQHVDKLEHHSTQMQELFSSERIDWTKQQEELLSQLNVLEKQLQETQTKNDFLKSEVHDLRVVLHSADKELSSVKLEYSSFKTNQEKEFNKLSERHMHVQLQLDNLRLENEKLLESKACLQDSYDNLQEIMKFEIDQLSRNLQNFKKENETLKSDLNNLMELLEAEKERNNKLSLQFEEDKENSSKPWYTVVNVRAYIQLRDKQLTFTHLFKHLLISNKPGTDLVNSRTFRVETVNKTSLSSWILTSSTGDREILKVLEAVRQEKQKETAKCEQQMAKVQKLEESLLATEKVISSLEKSRDSDKKVVADLMNQIQELRTSVCEKTETIDTLKQELKDINCKYNSALVDREESRVLIKKQEVDILDLKETLRLRILSEDIERDMLCEDLAHATEQLNMLTEASKKHSGLLQSAQEELTKKEALIQELQHKLNQKKEEVEQKKNEYNFKMRQLEHVMDSAAEDPQSPKTPPHFQTHLAKLLETQEQEIEDGRASKTSLEHLVTKLNEDREVKNAEILRMKEQLREMENLRLESQQLIEKNWLLQGQLDDIKRQKENSDQNHPDNQQLKNEQEESIKERLAKSKIVEEMLKMKADLEEVQSALYNKEMECLRMTDEVERTQTLESKAFQEKEQLRSKLEEMYEERERTSQEMEMLRKQVECLAEENGKLVGHQNLHQKIQYVVRLKKENVRLAEETEKLRAENVFLKEKKRSES

SEQ ID NO: 775388 - protein, 1500 aa, Homo sapiens
MAPGCKTELRSVTNGQSNQPSNEGDAIKVFVRIRPPAERSGSADGEQNLCLSVLSSTSLRLHSNPEPKTFTFDHVADVDTTQESVFATVAKSIVESCMSGYNGTIFAYGQTGSGKTFTMMVCPALFKTLLVYLNTRQCPGSCGPSDSQAEENTQLKDKYTSRNYAKGPSESDNFSHNLRGVIPRSFEYLFSLIDREKEKAGAGKSFLCKCSFIEIYNEQIYDLLDSASAGLYLREHIKKGVFVVGAVEQVVTSAAEAYQVLSGGWRNRRVASTSMNRESSRSHAVFTITIESMEKSNEIVNIRTSLLNLVDLAGSERQKDTHAEGMRLKEAGNINRSLSCLGQVITALVDVGNGKQRHVCYRDSKLTFLLRDSLGGNAKTAIIANVHPGSRCFGETLSTLNFAQRAKLIKNKAVVNEDTQGNVSQLQAEVKRLKEQLAELASGQTPPESFLTRDKKKTNYMEYFQEAMLFFKKSEQEKKSLIEKVTQLEDLTLKKEKFIQSNKMIVKFREDQIIRLEKLHKESRGGFLPEEQDRLLSELRNEIQTLREQIEHHPRVAKYAMENHSLREENRRLRLLEPVKRAQEMDAQTIAKLEKAFSEISGMEKSDKNQQGFSPKAQKEPCLFANTEKLKAQLLQIQTELNNSKQEYEEFKELTRKRQLELESELQSLQKANLNLENLLEATKACKRQEVSQLNKIHAETLKIITTPTKAYQLHSRPVPKLSPEMGSFGSLYTQNSSILDNDILNEPVPPEMNEQAFEAISEELRTVQEQMSALQAKLDEEEHKNLKLQQHVDKLEHHSTQMQELFSSERIDWTKQQEELLSQLNVLEKQLQETQTKNDFLKSEVHDLRVVLHSADKELSSVKLEYSSFKTNQEKEFNKLSERHMHVQLQLDNLRLENEKLLESKACLQDSYDNLQEIMKFEIDQLSRNLQNFKKENETLKSDLNNLMELLEAEKERNNKLSLQFEEDKENSSKPWYTVVNVELYIQLRDKQLTFTHLFKHLLISNKPGTDLVNSRTFRVETVNKTSLSSWILTSAQGDREILKVLEAVRQEKQKETAKCEQQMAKVQKLEESLLATEKVISSLEKSRDSDKKVVADLMNQIQELRTSVCEKTETIDTLKQELKDINCKYNSALVDREESRVLIKKQEVDILDLKETLRLRILSEDIERDMLCEDLAHATEQLNMLTEASKKHSGLLQSAQEELTKKEALIQELQHKLNQKKEEVEQKKNEYNFKMRQLEHVMDSAAEDPQSPKTPPHFQTHLAKLLETQEQEIEDGRASKTSLEHLVTKLNEDREVKNAEILRMKEQLREMENLRLESQQLIEKNWLLQGQLDDIKRQKENSDQNHPDNQQLKNEQEESIKERLAKSKIVEEMLKMKADLEEVQSALYNKEMECLRMTDEVERTQTLESKAFQEKEQLRSKLEEMYEERERTSQEMEMLRKQVECLAEENGKLVGHQNLHQKIQYVVRLKKENVRLAEETEKLRAENVFLKEKKRSES

SEQ ID NO: 775389 - protein, 958 aa, Homo sapiens
MAVVNEDTQGNVSQLQAEVKRLKEQLAELASGQTPPESFLTRDKKKTNYMEYFQEAMLFFKKSEQEKKSLIEKVTQLEDLTLKKEKFIQSNKMIVKFREDQIIRLEKLHKESRGGFLPEEQDRLLSELRNEIQTLREQIEHHPRVAKYAMENHSLREENRRLRLLEPVKRAQEMDAQTIAKLEKAFSEISGMEKSDKNQQGFSPKAQKEPCLFANTEKLKAQLLQIQTELNNSKQEYEEFKELTRKRQLELESELQSLQKANLNLENLLEATKACKRQEVSQLNKIHAETLKIITTPTKAYQLHSRPVPKLSPEMGSFGSLYTQNSSILDNDILNEPVPPEMNEQAFEAISEELRTVQEQMSALQAKLDEEEHKNLKLQQHVDKLEHHSTQMQELFSSERIDWTKQQEELLSQLNVLEKQLQETQTKNDFLKSEVHDLRVVLHSADKELSSVKLEYSSFKTNQEKEFNKLSERHMHVQLQLDNLRLENEKLLESKACLQDSYDNLQEIMKFEIDQLSRNLQNFKKENETLKSDLNNLMELLEAEKERNNKLSLQFEEDKENSSKPWYTVVNVRAYIQLRDKQLTFTHLFKHLLISNKPGTDLVNSRTFRVETVNKTSLSSWILTSSTGDREILKVLEAVRQEKQKETAKCEQQMAKVQKLEESLLATEKVISSLEKSRDSDKKVVADLMNQIQELRTSVCEKTETIDTLKQELKDINCKYNSALVDREESRVLIKKQEVDILDLKETLRLRILSEDIERDMLCEDLAHATEQLNMLTEASKKHSGLLQSAQEELTKKEALIQELQHKLNQKKEEVEQKKNEYNFKMRQLEHVMDSAAEDPQSPKTPPHFQTHLAKLLETQEQEIEDGRASKTSLEHLVTKLNEDREVKNAEILRMKEQLREMENLRLESQQLIEKNWLLQGQLDDIKRQKENSDQNHPDNQQLKNEQEESIKERLAKR

SEQ ID NO: 775390 - protein, 452 aa, Homo sapiens
MAVVNEDTQGNVSQLQAEVKRLKEQLAELASGQTPPESFLTRDKKKTNYMEYFQEAMLFFKKSEQEKKSLIEKVTQLEDLTLKKEKFIQSNKMIVKFREDQIIRLEKLHKESRGGFLPEEQDRLLSELRNEIQTLREQIEHHPRVAKYAMENHSLREENRRLRLLEPVKRAQEMDAQTIAKLEKAFSEISGMEKSDKNQQGFSPKAQKEPCLFANTEKLKAQLLQIQTELNNSKQEYEEFKELTRKRQLELESELQSLQKANLNLENLLEATKACKRQEVSQLNKIHAETLKIITTPTKAYQLHSRPVPKLSPEMGSFGSLYTQNSSILDNDILNEPVPPEMNEQAFEAISEELRTVQEQMSALQAKLDEEEHKNLKLQQHVDKLEHHSTQMQELFSSERIDWTKQQEELLSQLNVLEKQLQETQTKNDCKLFYQELCDLKEYCNSISFYFY

SEQ ID NO: 775391 - protein, 226 aa, Homo sapiens
MAATAVAAAVAGTESAQGPPGPAASLELWLNKATDPSMSEQDWSAIQNFCEQVNTDPNGPTHAPWLLAHKIQSPQEKEALYALTRTVRLCEQLSTVIPNSHVYYRRGLALKKIIPQCIARDFTDLIVINEDRKTPNGLILSHLPNGPTAHFKMSSVRLRKEIKRRGKDPTEHIPEIILNNFTTRLGHSIGRMFASLFPHNPQFIGRQVAPFHNQPGLHIVQIFTKT

SEQ ID NO: 775392 - protein, 73 aa, Homo sapiens
ESARTLQQLKRQWRPRPRRRGWSDGGDRGGGGCGGNRVGPGSPGPGSVAGAVAEQSHRPKHVGTGLVSYPEFL

SEQ ID NO: 775393 - protein, 613 aa, Homo sapiens
MAATAVAAAVAGTESAQGPPGPAASLELWLNKATDPSMSEQDWSAIQNFCEQVNTDPNGPTHAPWLLAHKIQSPQEKEALYALTVLEMCMNHCGEKFHSEVAKFRFLNELIKVLSPKYLGSWATGKVKGRVIEILFSWTVWFPEDIKIRDAYQMLKKQGIIKQDPKLPVDKILPPPSPWPKSSIFDADEEKSKLLTRLLKSNHPEDLQAANRLIKNLVKEEQEKSEKVSKRVSAVEEVRSHVKVLQEMLSMYRRPGQAPPDQEALQVVYERCEKLRPTLFRLASDTTDDDDALAEILQANDLLTQGVLLYKQVMEGRVTFGNRVTSSLGDIPVSRVFQNPAGCMKTCPLIDLEVDNGPAQMGTVVPSLLHQDLAALGISDAPVTGMVSGQNCCEEKRNPSSSTLPGGGVQNPSADRNLLDLLSAQPAPCPLNYVSQKSVPKEVPPGTKSSPGWSWEAGPLAPSPSSQNTPLAQVFVPLESVKPSSLPPLIVYDRNGFRILLHFSQTGAPGHPEVQVLLLTMMSTAPQPVWDIMFQVAVPKSMRVKLQPASSSKLPAFSPLMPPAVISQMLLLDNPHKEPIRLRYKLTFNQGGQPFSEVGEVKDFPDLAVLGAA

SEQ ID NO: 775394 - protein, 613 aa, Homo sapiens; identical to SEQ ID NO: 775393

SEQ ID NO: 775395 - protein, 526 aa, Homo sapiens
MCMNHCGEKFHSEVAKFRFLNELIKVLSPKYLGSWATGKVKGRVIEILFSWTVWFPEDIKIRDAYQMLKKQGIIKQDPKLPVDKILPPPSPWPKSSIFDADEEKSKLLTRLLKSNHPEDLQAANRLIKNLVKEEQEKSEKVSKRVSAVEEVRSHVKVLQEMLSMYRRPGQAPPDQEALQVVYERCEKLRPTLFRLASDTTDDDDALAEILQANDLLTQGVLLYKQVMEGRVTFGNRVTSSLGDIPVSRVFQNPAGCMKTCPLIDLEVDNGPAQMGTVVPSLLHQDLAALGISDAPVTGMVSGQNCCEEKRNPSSSTLPGGGVQNPSADRNLLDLLSAQPAPCPLNYVSQKSVPKEVPPGTKSSPGWSWEAGPLAPSPSSQNTPLAQVFVPLESVKPSSLPPLIVYDRNGFRILLHFSQTGAPGHPEVQVLLLTMMSTAPQPVWDIMFQVAVPKSMRVKLQPASSSKLPAFSPLMPPAVISQMLLLDNPHKEPIRLRYKLTFNQGGQPFSEVGEVKDFPDLAVLGAA

SEQ ID NO: 775396 - protein, 526 aa, Homo sapiens; identical to SEQ ID NO: 775395

SEQ ID NO: 775397 - protein, 656 aa, Homo sapiens
MAATAVAAAVAGTESAQGPPGPAASLELWLNKATDPSMSEQDWSAIQNFCEQVNTDPNGPTHAPWLLAHKIQSPQEKEALYALTCPHRLEAGLALVPAQSPASDYQPGGEPGTTGFPPSPGGPVSVQVLEMCMNHCGEKFHSEVAKFRFLNELIKVLSPKYLGSWATGKVKGRVIEILFSWTVWFPEDIKIRDAYQMLKKQGIIKQDPKLPVDKILPPPSPWPKSSIFDADEEKSKLLTRLLKSNHPEDLQAANRLIKNLVKEEQEKSEKVSKRVSAVEEVRSHVKVLQEMLSMYRRPGQAPPDQEALQVVYERCEKLRPTLFRLASDTTDDDDALAEILQANDLLTQGVLLYKQVMEGRVTFGNRVTSSLGDIPVSRVFQNPAGCMKTCPLIDLEVDNGPAQMGTVVPSLLHQDLAALGISDAPVTGMVSGQNCCEEKRNPSSSTLPGGGVQNPSADRNLLDLLSAQPAPCPLNYVSQKSVPKEVPPGTKSSPGWSWEAGPLAPSPSSQNTPLAQVFVPLESVKPSSLPPLIVYDRNGFRILLHFSQTGAPGHPEVQVLLLTMMSTAPQPVWDIMFQVAVPKSMRVKLQPASSSKLPAFSPLMPPAVISQMLLLDNPHKEPIRLRYKLTFNQGGQPFSEVGEVKDFPDLAVLGAA

SEQ ID NO: 775398 - protein, 460 aa, Homo sapiens [sequence omitted]

SEQ ID NO: 775399 - protein, 379 aa, Homo sapiens
GWSPKVYVSWPMELTNILTAGQAGPARSGGPEVVYERCEKLRPTLFRLASDTTDDDDALAEILQANDLLTQGVLLYKQVMEGRVTFGNRVTSSLGDIPVSRVFQNPAGCMKTCPLIDLEVDNGPAQMGTVVPSLLHQDLAALGISDAPVTGMVSGQNCCEEKRNPSSSTLPGGGVQNPSADRNLLDLLSAQPAPCPLNYVSQKSVPKEVPPGTKSSPGWSWEAGPLAPSPSSQNTPLAQVFVPLESVKPSSLPPLIVYDRNGFRILLHFSQTGAPGHPEVQVLLLTMMSTAPQPVWDIMFQVAVPKSMRVKLQPASSSKLPAFSPLMPPAVISQMLLLDNPHKEPIRLRYKLTFNQGGQPFSEVGEVKDFPDLAVLGAA

SEQ ID NO: 775400 - protein, 408 aa, Homo sapiens
  misc_feature (7)..(7): Xaa can be any naturally occurring amino acid
  misc_feature (25)..(26): Xaa can be any naturally occurring amino acid
  misc_feature (29)..(29): Xaa can be any naturally occurring amino acid
  misc_feature (35)..(35): Xaa can be any naturally occurring amino acid
LLLQAWXLVKNSCEEKEESLLQHPXXRVXFKNPSXDRNLLDLLSHMYRRPGQAPPDQEALQVVYERCEKLRPTLFRLASDTTDDDDALAEILQANDLLTQGVLLYKQVMEGRVTFGNRVTSSLGDIPVSRVFQNPAGCMKTCPLIDLEVDNGPAQMGTVVPSLLHQDLAALGISDAPVTGMVSGQNCCEEKRNPSSSTLPGGGVQNPSADRNLLDLLSAQPAPCPLNYVSQKSVPKEVPPGTKSSPGWSWEAGPLAPSPSSQNTPLAQVFVPLESVKPSSLPPLIVYDRNGFRILLHFSQTGAPGHPEVQVLLLTMMSTAPQPVWDIMFQVAVPKSMRVKLQPASSSKLPAFSPLMPPAVISQMLLLDNPHKEPIRLRYKLTFNQGGQPFSEVGEVKDFPDLAVLGAA

SEQ ID NO: 775401 - protein, 585 aa, Homo sapiens
MAATAVAAAVAGTESAQGPPGPAASLELWLNKATDPSMSEQDWSAIQNFCEQVNTDPNGPTHAPWLLAHKIQSPQEKEALYALTVLEMCMNHCGEKFHSEVAKFRFLNELIKVLSPKYLGSWATGKVKGRVIEILFSWTVWFPEDIKIRDAYQMLKKQGIIKQDPKLPVDKILPPPSPWPKSSIFDADEEKSKLFLSASEPGPIHFPSTMNSPNRYSLDIKYLEGQEEEGGQDPGITVVPLLTRLLKSNHPEDLQAANRLIKNLVKEEQEKSEKVSKRVSAVEEVRSHVKVLQEMLSMYRRPGQAPPDQEALQVVYERCEKLRPTLFRLASDTTDDDDALAEILQANDLLTQGVLLYKQVMEGRVTFGNRVTSSLGDIPVSRVFQNPAGCMKTCPLIDLEVDNGPAQMGTVVPSLLHQDLAALGISDAPVTGMVSGQNCCEEKRNPSSSTLPGGGVQNPSADRNLLDLLSAQPAPCPLNYVSQKSVPKEVPPGTKSSPGWSWDIMFQVAVPKSMRVKLQPASSSKLPAFSPLMPPAVISQMLLLDNPHKEPIRLRYKLTFNQGGQPFSEVGEVKDFPDLAVLGAA

SEQ ID NO: 775402 - protein, 301 aa, Homo sapiens
YRLACMHADCRVSTRQPLTMRYLVFQNPAGCMKTCPLIDLEVDNGPAQMGTVVPSLLHQDLAALGISDAPVTGMVSGQNCCEEKRNPSSSTLPGGGVQNPSADRNLLDLLSAQPAPCPLNYVSQKSVPKEVPPGTKSSPGWSWEAGPLAPSPSSQNTPLAQVFVPLESVKPSSLPPLIVYDRNGFRILLHFSQTGAPGHPEVQVLLLTMMSTAPQPVWDIMFQVAVPKSMRVKLQPASSSKLPAFSPLMPPAVISQMLLLDNPHKEPIRLRYKLTFNQGGQPFSEVGEVKDFPDLAVLGAA

SEQ ID NO: 775403 - protein, 149 aa, Homo sapiens
RPAPGPGYGEGCPLESVTPSSLPPLIVYDRNGFRILLHFSQTGAPGHPEVQVLLLTMMSTAPQPVWDIMFQVAVPKSMRVKLQPASSSKLPAFSPLMPPAVISQMLLLDNPHKEPIRLRYKLTFNQGGQPFSEVGEVKDFPDLAVLGAA

SEQ ID NO: 775404 - protein, 495 aa, Homo sapiens
MAATAVAAAVAGTESAQGPPGPAASLELWLNKATDPSMSEQDWSAIQNFCEQVNTDPNGPTHAPWLLAHKIQSPQEKEALYALTVLEMCMNHCGEKFHSEVAKFRFLNELIKVLSPKYLGSWATGKVKGRVIEILFSWTVWFPEDIKIRDAYQMLKKQGIIKQDPKLPVDKILPPPSPWPKSSIFDADEEKSKLLTRLLKSNHPEDLQAANRLIKNLVKEEQEKSEKVSKRVSAVEEVRSHVKVLQEMLSMYRRPGQAPPDQEALQVVYERCEKLRPTLFRLASDTTDDDDALAEILQANDLLTQGVLLYKQVMEGRVTFGNRVTSSLGDIPVSRVFQNPAGCMKTCPLIDLEVDNGPAQMGTVVPSLLHQDLAALGISDAPVTGMVSGQNCCEEKRNPSSSTLPGGGVQNPSADRNLLDLLSAQPAPCPLNYVSQKSVPKEVPPGTKSSPGWSWEAGPLAPSPSSQNTPLAQVFVPLESVKPRKWLWFMASTPF

SEQ ID NO: 775405 - protein, 170 aa, Homo sapiens
  misc_feature (168)..(168): Xaa can be any naturally occurring amino acid
RPRGRGAWAGPGGDYSGVRRQQRRRTRISGSQRRSDAAGTMGCCTGRCSLICLCALQLVSALERQIFDFLGFQWAPILGNFLHIIVVILGLFGTIQYRPRYIMVYTVWTALWVTWNVFIICFYLEVGGLSKDTDLMTFNISVHRSWWREHGAWLCQEECCLPSSPMAXMD

SEQ ID NO: 775406 - protein, 143 aa, Homo sapiens
  misc_feature (141)..(141): Xaa can be any naturally occurring amino acid
RPRGRGAWAGPGGDYSGVRRQQRRRTRISGSQRRSDAAGTMGCCTGRCSLICLCALQLVSALERQIFDFLGFQWAPILGNFLHIIVVILGLFGTIQYRPRYIMVDTDLMTFNISVHRSWWREHGAWLCQEECCLPSSPMAXMD

SEQ ID NO: 775407 - protein, 163 aa, Homo sapiens
RPRGRGAWAGPGGDYSGVRRQQRRRTRISGSQRRSDAAGTMGCCTGRCSLICLCALQLVSALERQIFDFLGFQWAPILGNFLHIIVVILGLFGTIQYRPRYIMVYTVWTALWVTWNVFIICFYLEVGGLSKKQEERRKKERRPGAVANACNPSTLGGRSRQIT

SEQ ID NO: 775408 - protein, 76 aa, Homo sapiens
VVPDLLHVVPVGDDAVLDGVLQGDEAQSKRGILTFYNELRVAPEEHPVLLTEAPLNPKANREKMTQIMFETFNTPA

SEQ ID NO: 775409 - protein, 74 aa, Homo sapiens
PKSPLGKELKDKPPEESSIVLFTTWQGIGSCAHLIDRHLDQVLSRIILFDKQQPYGIHENVQGTLTEIRISFQE

SEQ ID NO: 775410 - protein, 81 aa, Homo sapiens
TLPPSCLSTAVSLVQATIICHPDYHSHLLTGPPTCRLYSAHSSLSSYTHVHSFIFCLKLFNGFPWNLESDIFTSVCMAQTI

SEQ ID NO: 775411 - protein, 201 aa, Homo sapiens
TTSGAAVAAAAAAAAAASPTRIPTVTILSPGGRRGGRGSDGSGGSWTKQVTCRYFMHGVYKEGDNCCKLHDLSDSPYNVVYKSLQPGYCIYGDCCRYEHSKPLKQKEATATELTTKSSLAASSSLSWIVGPLVEMNTGEAESRNSNFVTVGAGSEGWVNAVEFVPGQPYCGRTAPSCTEAPLQGSVTKEESEKEQTAVETK

SEQ ID NO: 775412 - protein, 51 aa, Homo sapiens
MTVKLGDGGSGEDGLKKLGKRAADEESLEGEGAGGADAAEESSGTKRDEKT

SEQ ID NO: 775413 - protein, 37 aa, Homo sapiens
QESVGCNAKRTNRNHLYREIRSMPCFFLLLFLHTYTA

SEQ ID NO: 775414 - protein, 433 aa, Homo sapiens
MPCGKQGNLQVPGSKVLPGLGEGCKEMWLRKVIYGGEVWGKSPEPEFPSLVNLCQSWKINNLMSTVHSDEAGMLSYFLFEELMRCDKDSMPDGNLSEEEKLFLSYFPLHKFELEQNIKELNTLADQVDTTHELLTKTSLVASSSGAVSGVMNILGLALAPVTAGGSLMLSATGTGLGAAAAITNIVTNVLENRSNSAARDKASRLGPLTTSHEAFGGINWSEIEAAGFCVNKCVKAIQGIKDLHAYQMAKSNSGFMAMVKNFVAKRHIPFWTARGVQRAFEGTTLAMTNGAWVMGAAGAGFLLMKDMSSFLQSWKHLEDGARTETAEELRALAKKLEQELDRLTQHHRHLPQKASQTCSSSRGRAVRGSRVVKPEGSRSPLPWPVVEHQPRLGPGVALRTPKRTVSAPRMLGHQPAPPAPARKGRQAPGRHRQ

SEQ ID NO: 775415 - protein, 32 aa, Homo sapiens
MSFRAEMTQEEMSLILVHLQAWEKVVKKCGFE

SEQ ID NO: 775416 - protein, 194 aa, Homo sapiens
MVGKSQQTDVIEKKKHMAIPKSSSPKATHRIGNTSGSKGSYSAKAYESIRVSSELQQTWTKRKHGQEMTSKSLQTDTIVEEKKEVKLVEETVVPEEKSADVREAAIELPESVQDVEIPPNIPSVQLKMDRSQQTSRTGYWTMMNIPPVEKVDKEQQTYFSESEIVVISRPDSSSTKSKEDALKHKSSGKIFASE

SEQ ID NO: 775417 - protein, 46 aa, Homo sapiens
PPGPGPWQILLINWSKLHGPRQGWPAWKEPEHVLRQPWMEQLGNQG

SEQ ID NO: 775418 - protein, 389 aa, Homo sapiens
MLEEPRPRPPPSGLAGLLFLALCSRALSNEILGLKLPGEPPLTANTVCLTLSGLSKRQLGLCLRNPDVTASALQGLHIAVHECQHQLRDQRWNCSALEGGGRLPHHSAILKRGFRESAFSFSMLAAGVMHAVATACSLGKLVSCGCGWKGSGEQDRLRAKLLQLQALSRGKSFPHSLPSPGPGSSPSPGPQDTWEWGGCNHDMDFGEKFSRDFLDSREAPRDIQARMRIHNNRVGRQVVTENLKRKCKCHGTSGSCQFKTCWRAAPEFRAVGAALRERLGRAIFIDTHNRNSGAFQPRLRPRRLSGELVYFEKSPDFCERDPTMGSPGTRGRACNKTSRLLDGCGSLCCGRGHNVLRQTRVERCHCRFHWCCYVLCDECKVTEWVNVCK

SEQ ID NO: 775419 - protein, 389 aa, Homo sapiens; identical to SEQ ID NO: 775418

SEQ ID NO: 775420 - protein, 230 aa, Homo sapiens
PRVADAWVDPRVGFPHSLPSPGPGSSPSPGPQDTWEWGGCNHDMDFGEKFSRDFLDSREAPRDIQARMRIHNNRVGRQVVTENLKRKCKCHGTSGSCQFKTCWRAAPEFRAVGAALRERLGRAIFIDTHNRNSGAFQPRLRPRRLSGELVYFEKSPDFCERDPTMGSPGTRGRACNKTSRLLDGCGSLCCGRGHNVLRQTRVERCHCRFHWCCYVLCDECKVTEWVNVCK

SEQ ID NO: 775421 - protein, 389 aa, Homo sapiens; identical to SEQ ID NO: 775418

SEQ ID NO: 775422 - protein, 389 aa, Homo sapiens; identical to SEQ ID NO: 775418

SEQ ID NO: 775423 - protein, 136 aa, Homo sapiens
AGGAPAAASALGPRGSPVPGVVQSVSSSPCLPGHRNTDPGWGELEGSGPQTPDAFLVPRALSNEILGLKLPGEPPLTANTVCLTLSGLSKRQLGLCLRNPDVTASALQGLHIAVHECQHQLRDQRWNCSALEGGGR

SEQ ID NO: 775424 - protein, 133 aa, Homo sapiens
ILFLFKAVGHLIAAVLKENGFSEKIHQSTNQTPALNLLWEKCCSDNVVVRTACCEGLVALVAQDHAEFSYVLNGILNLIPSTRNTHGLIKAIMHLLQMQALKEGQGGEKNIQSIYTIRNHPHPLITVLDTDLI

SEQ ID NO: 775425 - protein, 171 aa, Homo sapiens
GGGVSELKVSLLQSPSSGLHQQRCAENEHSLLGSHHTAFQHNRVIGHFTIVDKATQKVDALVRQVIVRGGIVLDRFAVLSKVALVNLTDLLVDLSVVMVAFLPSTCHGEGHMVRMPCPNPGHLAQASVGLVGQLLGVPTTGDPFVAFALGHPDDVDHLVQPKRLVHRYLLL

SEQ ID NO: 775426 - protein, 98 aa, Homo sapiens
MRLPYGCLGLLVPLQQCAEEGVTLLAEGTDPDYQGESGMLHREASRTMSRAQEILGRALVPPCPVVKARGSTATKNTATPKNDSTVENSDPSGTKAWV

SEQ ID NO: 775427 - protein, 467 aa, Homo sapiens
IPFPAVPTPVFGRPGCSASWSKRGSGPDMLSSMAAAGSVKAALQVAEVLEAIVSCCVGPEGRQVLCTKPTGEVLLSRNGGRLLEALHLEHPIARMIVDCVSSHLKKTGDGAKTFIIFLCHLLRGLHAITDREKDPLMCENIQTHGRHWKNCSRWKFISQALLTFQTQILDGIMDQYLSRHFLSIFSSAKERTLCRSSLELLLEAYFCGRVGRNNHKFISQLMCDYFFKCMTCKSGIGVFELVDDHFVELNVGVTGLPVSDSRIIAGLVLQKDFSVYRPADGDMRMVIVTETIQPLFSTSGSEFILNSEAQFQTSQFWIMEKTKAIMKHLHSQNVKLLISSVKQPDLVSYYAGVNGISVVECLSSEEVSLIRRIIGLSPFVPPQAFSQCEIPNTALVKFCKPLILRSKRYVHLGLISTCAFIPHSIVLCGPVHGLIEQHEDALHGALKMLRQLFKDLDLNYMTQTNDQ

SEQ ID NO: 775428 - protein, 115 aa, Homo sapiens
PCFRSARVFCKLVKKGKRPRYVKFYGRCRVCEGGVAGGRGAGSHRELLRGARGTASFVYEAHWRGASQPEWRPPPGGATLRASHSQVPASHTLTRSRAPQAASVELLSHPEAMRT

SEQ ID NO: 775429 - protein, 476 aa, Homo sapiens
  misc_feature (7)..(7): Xaa can be any naturally occurring amino acid
  misc_feature (12)..(12): Xaa can be any naturally occurring amino acid
RSLGSTXIENPXWWFITQLSANPDGCLPSLFKRNGPDMLSSMAAAGSVKAALQVAEVLEAIVSCCVGPEGRQVLCTKPTGEVLLSRNGGRLLEALHLEHPIARMIVDCVSSHLKKTGDGAKTFIIFLCHLLRGLHAITDREKDPLMCENIQTHGRHWKNCSRWKFISQALLTFQTQILDGIMDQYLSRHFLSIFSSAKERTLCRSSLELLLEAYFCGRVGRNNHKFISQLMCDYFFKCMTCKSGIGVFELVDDHFVELNVGVTGLPVSDSRIIAGLVLQKDFSVYRPADGDMRMVIVTETIQPLFSTSGSEFILNSEAQFQTSQFWIMEKTKAIMKHLHSQNVKLLISSVKQPDLVSYYAGVNGISVVECLSSEEVSLIRRIIGLSPFVPPQAFSQCEIPNTALVKFCKPLILRSKRYVHLGLISTCAFIPHSIVLCGPVHGLIEQHEDALHGALKMLRQLFKDLDLNYMTQTNDQ

SEQ ID NO: 775430 - protein, 71 aa, Homo sapiens
QCQWLCALAVAVAVVAVAVAVVTCGSGSSSGSGSGSGISSGSGSGSSSSGSGDSGSGSSGSGNGSGISSGS

SEQ ID NO: 775431 - protein, 234 aa, Homo sapiens
  misc_feature (183)..(183): Xaa can be any naturally occurring amino acid
  misc_feature (229)..(229): Xaa can be any naturally occurring amino acid
ATELLILAHHCFTLTCHMEGIIRVLQAAHMLTDNHLAPSEEYGLVVRLLTGIGRYNEMTYIFDLLHKKHYFEVLMRKKLDPSGTLKTALLDYIKRCRPGDSEKHNMIALCFSMCREIGENHEAAARIQLKLIESQPWEDSLKEGHQLKQLLLKALTLMLDAAESYAKDSCVCQAQHCQRLTKXITLQIHFLNTGQNTMLINLGPAQADGLYSGPNLGLQASIEADAYDXGPKLG

SEQ ID NO: 775432 - protein, 110 aa, Homo sapiens
MSGAALGLEIVFVFFLALFLLHRYGDFKKQHRLVIIGTLLAWYLCFLIVFILPLDVSTTIYNRCKHAAANSSPPENSNITGLYATANPVPRYFLFLKKYINIVGDTLFKN

SEQ ID NO: 775433 - protein, 123 aa, Homo sapiens
MSGAALGLEIVFVFFLALFLLHRYGDFKKQHRLVIIGTLLAWYLCFLIVFILPLDVSTTIYNRCKHAAANSSPPENSNITGLYATANPVPSQHPCFKPWSYIPDGIMPIFWRVVYWTSQFLTW

SEQ ID NO: 775434 - protein, 85 aa, Homo sapiens
WRPTGWAGRRKRAALRLTGKCQPLDCRRIFLSREPAGLLVIASAVVSERGSQNLDSCGGRRFPVPSRRCLARSDGEPKAERVRRF

SEQ ID NO: 775435 - protein, 118 aa, Homo sapiens
GSVRGAGSVISEREPRPGEVPAECSRAEEVPRPEEGKRRSLLLPGSPRDAERIAQPSAAAQREPELRPRTGVSPAELTRRAGCAFPREECAVESKLWKTSHPNSQRAARRPERRWSHR

SEQ ID NO: 775436 - protein, 71 aa, Homo sapiens
SQHKCPPHMMYACKKLLSSFDLAPHTASFGVCPLLSVTRVVATEHWLFLASLSGIKTYQSYISVFCKVTLI

SEQ ID NO: 775437 - protein, 811 aa, Homo sapiens
ARACGGPGAKAPEPAAAVGTMWFFARDPVRDFPFELIPEPPEGGLPGPWALHRGRKKATGSPVSIFVYDVKPGAEEQTQVAKAAFKRFKTLRHPNILAYIDGLETEKCLHVVTEAVTPLGIYLKARVEAGGLKELEISWGLHQIVKALSFLVNDCSLIHNNVCMAAVFVDRAGEWKLGGLDYMYSAQGNGGGPPRKGIPELEQYDPPELADSSGRVVREKWSADMWRLGCLIWEVFNGPLPRAAALRNPGKIPKTLVPHYCELVGANPKVRPNPARFLQNCRAPGGFMSNRFVETNLFLEEIQIKEPAEKQKFFQELSKSLDAFPEDFCRHKVLPQLLTAFEFGNAGAVVLTPLFKVGKFLSAEEYQQKIIPVVVKMFSSTDRAMRIRLLQQMEQFIQYLDEPTVNTQIFPHVVHGFLDTNPAIREQTVKSMLLLAPKLNEANLNVELMKHFARLQAKDEQGPIRCNTTVCLGKIGSYLSASTRHRVLTSAFSRATRDPFAPSRVAGVLGFAATHNLYSMNDCAQKILPVLCGLTVDPEKSVRDQAFKAIRSFLSKLESVSEDPTQLEEVEKDVHAASSPGMGGAAASWAGWAVTGVSSLTSKLIRSHPTTAPTETNIPQRPTPEGHWETQEEDKDTAEDSSTADRWDDEDWGSLEQEAESVLAQQDDWSTGGQVSRASQVSNSDHKSSKSPESDWSSWEAEGSWEQGWQEPSSQEPPPDGTRLASEYNWGGPESSDKGDPFATLSARPSTQPRPDSWGEDNWEGLETDSRQVKAELARKKREERRREMEAKRAERKVAKGPMKLGARKLD

SEQ ID NO: 775438 - protein, 828 aa, Homo sapiens
ARACGGPGAKAPEPAAAVGTMWFFARDPVRDFPFELIPEPPEGGLPGPWALHRGRKKATGSPVSIFVYDVKPGAEEQTQVAKAAFKRFKTLRHPNILAYIDGLETEKCLHVVTEAVTPLGIYLKARVEAGGLKELEISWGLHQIVKALSFLVNDCSLIHNNVCMAAVFVDRAGEWKLGGLDYMYSAQGNGGGPPRKGIPELEQYDPPELADSSGRVVREKWSADMWRLGCLIWEVFNGPLPRAAALRNPGKIPKTLVPHYCELVGANPKVRPNPARFLQNCRAPGGFMSNRFVETNLFLEEIQIKEPAEKQKFFQELSKSLDAFPEDFCRHKVLPQLLTAFEFGNAGAVVLTPLFKVGKFLSAEEYQQKIIPVVVKMFSSTDRAMRIRLLQQMEQFIQYLDEPTVNTQIFPHVVHGFLDTNPAIREQTVKSMLLLAPKLNEANLNVELMKHFARLQAKDEQGPIRCNTTVCLGKIGSYLSASTRHRVLTSAFSRATRDPFAPSRVAGVLGFAATHNLYSMNDCAQKILPVLCGLTVDPEKSVRDQAFKAIRSFLSKLESVSEDPTQLEEVEKDVHAASSPGMGGAAASWAGWAVTGVSSLTSKLIRSHPTTAPTETNIPQRPTPEGVPAPAPTPVPATPTTSGHWETQEEDKDTAEDSSTADRWDDEDWGSLEQEAESVLAQQDDWSTGGQVSRASQVSNSDHKSSKSPESDWSSWEAEGSWEQGWQEPSSQEPPPDGTRLASEYNWGGPESSDKGDPFATLSARPSTQPRPDSWGEDNWEGLETDSRQVKAELARKKREERRREMEAKRAERKVAKGPMKLGARKLD

SEQ ID NO: 775439 - protein, 123 aa, Homo sapiens
PHVYSEEHLGALACRVAVGRREEGSALCNARPQPCVGKTAGAENQNQEQGRRVADTPQTLTQQRSWNLDSDAVGRGDGGQTRREEGGQGPHEAGSPEAGLNRGGGPSRLRRARPTDVFIVQTM

SEQ ID NO: 775440 - protein, 828 aa, Homo sapiens; identical to SEQ ID NO: 775438

SEQ ID NO: 775441 - protein, 761 aa, Homo sapiens
ARACGGPGAKAPEPAAAVGTMWFFARDPVRDFPFELIPEPPEGGLPGPWALHRGRKKATGSPVSIFVYDVKPGAEEQTQVAKAAFKRFKTLRHPNILAYIDGLETEKCLHVVTEAVTPLGIYLKARVEAGGLKELEISWGLHQIVKALSFLVNDCSLIHNNVCMAAVFVDRAGEWKLGGLDYMYSAQGNGGGPPRKGIPELEQYDPPELADSSGRVVREKWSADMWRLGCLIWEVFNGPLPRAAALRNPGKIPKTLVPHYCELVGANPKVRPNPARFLQNCRAPGGFMSNRFVETNLFLEEIQIKEPAEKQKFFQELSKSLDAFPEDFCRHKVLPQLLTAFEFGNAGAVVLTPLFKVGKFLSAEEYQQKIIPVVVKMFSSTDRAMRIRLLQQMEQFIQYLDEPTVNTQIFPHVVHGFLDTNPAIREQTVKSMLLLAPKLNEANLNVELMKHFARLQAKDEQGPIRCNTTVCLGKIGSYLSASTRHRVLTSAFSRATRDPFAPSRVAGVLGFAATHNLYSMNDCAQKILPVLCGLTVDPEKSVRDQAFKAIRSFLSKLESVSEDPTQLEEVEKDVHAASSPGMGGAAASWAGWAVTGVSSLTSKLIRSHPTTAPTETNIPQRPTPEGHWETQEEDKDTAEDSSTADRWDDEDWGSLEQEAESVLAQQDDWSTGGQVSRASQVSNSDHKSSKSPESDWSSWEAEGSWEQGWQEPSSQEPPPDGTRLASEYNWGGPESSDKGDPFATLSARPSTQVPSTGLARG

SEQ ID NO: 775442 - protein, 788 aa, Homo sapiens
GHTTALGPSQAPLPSPEATGSPVSIFVYDVKPGAEEQTQVAKAAFKRFKTLRHPNILAYIDGLETEKCLHVVTEAVTPLGIYLKARVEAGGLKELEISWGLHQIVKALSFLVNDCSLIHNNVCMAAVFVDRAGEWKLGGLDYMYSAQGNGGGPPRKGIPELEQYDPPELADSSGRVVREKWSADMWRLGCLIWEVFNGPLPRAAALRNPGKIPKTLVPHYCELVGANPKVRPNPARFLQNCRAPGGFMSNRFVETNLFLEEIQIKEPAEKQKFFQELSKSLDAFPEDFCRHKVLPQLLTAFEFGNAGAVVLTPLFKVGKFLSAEEYQQKIIPVVVKMFSSTDRAMRIRLLQQMEQFIQYLDEPTVNTQIFPHVVHGFLDTNPAIREQTVKSMLLLAPKLNEANLNVELMKHFARLQAKDEQGPIRCNTTVCLGKIGSYLSASTRHRVLTSAFSRATRDPFAPSRVAGVLGFAATHNLYSMNDCAQKILPVLCGLTVDPEKSVRDQAFKAIRSFLSKLESVSEDPTQLEEVEKDVHAASSPGMGGAAASWAGWAVTGVSSLTSKLIRSHPTTAPTETNIPQRPTPEGVPAPAPTPVPATPTTSGHWETQEEDKDTAEDSSTADRWDDEDWGSLEQEAESVLAQQDDWSTGGQVSRASQVSNSDHKSSKSPESDWSSWEAEGSWEQGWQEPSSQEPPPDGTRLASEYNWGGPESSDKGDPFATLSARPSTQPRPDSWGEDNWEGLETDSRQVKAELARKKREERRREMEAKRAERKVAKGPMKLGARKLD

SEQ ID NO: 775443 - protein, 808 aa, Homo sapiens
ARACGGPGAKAPEPAAAVGTMWFFARDPVRDFPFELIPEPPEGGLPGPWALHRGRKKATGSPVSIFVYDVKPGAEEQTQVAKAAFKRFKTLRHPNILAYIDGLETEKCLHVVTEAVTPLGIYLKARVEAGGLKELEISWGLHQIVKALSFLVNDCSLIHNNVCMAAVFVDRAGEWKLGGLDYMYSAQGNGGGPPRKGIPELEQYDPPELADSSGRVVREKWSADMWRLGCLIWEVFNGPLPRAAALRNPGKIPKTLVPHYCELVGANPKVRPNPARFLQNCRAPGGFMSNRFVETNLFLEEIQIKEPAEKQKFFQELSKSLDAFPEDFCRHKVLPQLLTAFEFGNAGAVVLTPLFKVGKFLSAEEYQQKIIPVVVKMFSSTDRAMRIRLLQQMEQFIQYLDEPTVNTQIFPHVVHGFLDTNPAIREQTVKHFARLQAKDEQGPIRCNTTVCLGKIGSYLSASTRHRVLTSAFSRATRDPFAPSRVAGVLGFAATHNLYSMNDCAQKILPVLCGLTVDPEKSVRDQAFKAIRSFLSKLESVSEDPTQLEEVEKDVHAASSPGMGGAAASWAGWAVTGVSSLTSKLIRSHPTTAPTETNIPQRPTPEGVPAPAPTPVPATPTTSGHWETQEEDKDTAEDSSTADRWDDEDWGSLEQEAESVLAQQDDWSTGGQVSRASQVSNSDHKSSKSPESDWSSWEAEGSWEQGWQEPSSQEPPPDGTRLASEYNWGGPESSDKGDPFATLSARPSTQPRPDSWGEDNWEGLETDSRQVKAELARKKREERRREMEAKRAERKVAKGPMKLGARKLD

SEQ ID NO: 775444 - protein, 810 aa, Homo sapiens
ARACGGPGAKAPEPAAAVGTMWFFARDPVRDFPFELIPEPPEGGLPGPWALHRGRKKATGSPVSIFVYDVKPGAEEQTQVAKAAFKRFKTLRHPNILAYIDGLELKARVEAGGLKELEISWGLHQIVKALSFLVNDCSLIHNNVCMAAVFVDRAGEWKLGGLDYMYSAQGNGGGPPRKGIPELEQYDPPELADSSGRVVREKWSADMWRLGCLIWEVFNGPLPRAAALRNPGKIPKTLVPHYCELVGANPKVRPNPARFLQNCRAPGGFMSNRFVETNLFLEEIQIKEPAEKQKFFQELSKSLDAFPEDFCRHKVLPQLLTAFEFGNAGAVVLTPLFKVGKFLSAEEYQQKIIPVVVKMFSSTDRAMRIRLLQQMEQFIQYLDEPTVNTQIFPHVVHGFLDTNPAIREQTVKSMLLLAPKLNEANLNVELMKHFARLQAKDEQGPIRCNTTVCLGKIGSYLSASTRHRVLTSAFSRATRDPFAPSRVAGVLGFAATHNLYSMNDCAQKILPVLCGLTVDPEKSVRDQAFKAIRSFLSKLESVSEDPTQLEEVEKDVHAASSPGMGGAAASWAGWAVTGVSSLTSKLIRSHPTTAPTETNIPQRPTPEGVPAPAPTPVPATPTTSGHWETQEEDKDTAEDSSTADRWDDEDWGSLEQEAESVLAQQDDWSTGGQVSRASQVSNSDHKSSKSPESDWSSWEAEGSWEQGWQEPSSQEPPPDGTRLASEYNWGGPESSDKGDPFATLSARPSTQPRPDSWGEDNWEGLETDSRQVKAELARKKREERRREMEAKRAERKVAKGPMKLGARKLD

SEQ ID NO: 775445 - protein, 828 aa, Homo sapiens; identical to SEQ ID NO: 775438

SEQ ID NO: 775446 - protein, 801 aa, Homo sapiens
ARACGGPGAKAPEPAAAVGTMWFFARDPVRDFPFELIPEPPEGGLPGPWALHRGRKKATGSPVSIFVYDVKPGAEEQTQVAKAAFKRFKTLRHPNILAYIDGLETEKCLHVVTEAVTPLGIYLKARVEAGGLKELEISWGLHQIVKALSFLVNDCSLIHNNVCMAAVFVDRAGEWKLGGLDYMYSAQGNGGGPPRKGIPELEQYDPPELADSSGRVVREKWSADMWRLGCLIWEVFNGPLPRAAALRNPGKIPKTLVPHYCELVGANPKVRPNPARFLQNCRAPGGFMSNRFVETNLFLEEIQIKEPAEKQKFFQELSKSLDAFPEDFCRHKVLPQLLTAFEFGNAGAVVLTPLFKVGKFLSAEEYQQKIIPVVVKMFSSTDRAMRIRLLQQMEQFIQYLDEPTVNTQIFPHVVHGFLDTNPAIREQTVKSMLLLAPKLNEANLNVELMKHFARLQAKDEQGPIRCNTTVCLGKIGSYLSASTRHRVLTSAFSRATRDPFAPSRVAGVLGFAATHNLYSMNDCAQKILPVLCGLTVDPEKSVRDQAFKAIRSFLSKLESVSEDPTQLEEVEKDVHAASSPGMGGAAASWAGWAVTGVSSLTSKLIRSHPTTAPTETNIPQRPTPEGVPAPAPTPVPATPTTSGHWETQEEDKDTAEDSSTADRWDDEDWGSLEQEAESVLAQQDDWSTGGQVSRASQVSNSDHKSSKSPESDWSSWEAEGSWEQGWQEPSSQEPPPDGTRLASEYNWGGPESSDKGDPFATLSARPSTQDRSRLSWPGRSARSGGGRWRPNAPRGRWPRAP

SEQ ID NO: 775447 - protein, 548 aa, Homo sapiens
ARACGGPGAKAPEPAAAVGTMWFFARDPVRDFPFELIPEPPEGGLPGPWALHRGRKKATGSPVSIFVYDVKPGAEEQTQVAKAAFKRFKTLRHPNILAYIDGLETEKCLHVVTEAVTPLGIYLKARVEAGGLKELEISWGLHQIVKALSFLVNDCSLIHNNVCMAAVFVDRAGEWKLGGLDYMYSAQGNGGGPPRKGIPELEQYDPPELADSSGRVVREKWSADMWRLGCLIWEVFNGPLPRAAALRNPGKIPKTLVPHYCELVGANPKVRPNPARFLQNCRAPGGFMSNRFVETNLFLEEIQIKEPAEKQKFFQELSKSLDAFPEDFCRHKVLPQLLTAFEFGNAGAVVLTPLFKVGKFLSAEEYQQKIIPVVVKMFSSTDRAMRIRLLQQMEQFIQYLDEPTVNTQIFPHVVHGFVSNSDHKSSKSPESDWSSWEAEGSWEQGWQEPSSQEPPPDGTRLASEYNWGGPESSDKGDPFATLSARPSTQPRPDSWGEDNWEGLETDSRQVKAELARKKREERRREMEAKRAERKVAKGPMKLGARKLD

SEQ ID NO: 775448 - protein, 633 aa, Homo sapiens
ARACGGPGAKAPEPAAAVGTMWFFARDPVRDFPFELIPEPPEGGLPGPWALHRGRKKATGSPVSIFVYDVKPGAEEQTQVAKAAFKRFKTLRHPNILAYIDGLETEKCLHVVTEAVTPLGIYLKARVEAGGLKELEISWGLHQIVKALSFLVNDCSLIHNNVCMAAVFVDRAGEWKLGGLDYMYSAQGNGGGPPRKGIPELEQYDPPELADSSGRVVREKWSADMWRLGCLIWEVFNGPLPRAAALRNPGKIPKTLVPHYCELVGANPKVRPNPARFLQNCRAPGGFMSNRFVETNLFLEEIQIKEPAEKQKFFQELSKSLDAFPEDFCRHKVLPQLLTAFEFGNAGAVVLTPLFKVGKFLSAEEYQQKIIPVVVKMFSSTDRAMRIRLLQQMEQFIQYLDEPTVNTQIFPHVVHGFLDTNPAIREQTVKSMLLLAPKLNEANLNVELMKHFARLQAKDEQGPIRCNTTVCLGKIGSYLSASTRHRVLTSAFSRATRDPFAPSRVAGVLGFAATHNLYSMNDCAQKILPVLCGLTVDPEKSVRDQAFKAIRSFLSKLESVSEDPTQLEEVEKDVHAASSPGMGGAAASWAGWAVTGVSSLTSKLIRSHPTTAPTETNIPQRPTPEAKLPGATS

SEQ ID NO: 775449 - protein, 761 aa, Homo sapiens; identical to SEQ ID NO: 775441

SEQ ID NO: 775450 - protein, 761 aa, Homo sapiens; identical to SEQ ID NO: 775441

SEQ ID NO: 775451 - protein, 723 aa, Homo sapiens
ARACGGPGAKAPEPAAAVGTMWFFARDPVRDFPFELIPEPPEGGLPGPWALHRGRKKATGSPVSIFVYDVKPGAEEQTQVAKAAFKRFKTLRHPNILAYIDGLETEKCLHVVTEAVTPLGIYLKARVEAGGLKELEISWGLHQIVKALSFLVNDCSLIHNNVCMAAVFVDRAGEWKLGGLDYMYSAQGNGGGPPRKGIPELEQYDPPELADSSGRVVREKWSADMWRLGCLIWEVFNGPLPRAAALRNPGKIPKTLVPHYCELVGANPKVRPNPARFLQNCRAPGGFMSNRFVETNLFLEEIQIKEPAEKQKFFQELSKSLDAFPEDFCRHKVLPQLLTAFEFGNAGAVVLTPLFKVGKFLSAEEYQQKIIPVVVKMFSSTDRAMRIRLLQQMEQFIQYLDEPTVNTQIFPHVVHGFLDTNPAIREQTVKSMLLLAPKLNEANLNVELMKHFARLQAKDEQGPIRCNTTVCLGKIGSYLSASTRHRVLTSAFSRATRDPFAPSRVAGVLGFAATHNLYSMNDCAQKILPVLCGLTVDPEKSVRDQAFKAIRSFLSKLESVSEDPTQLEEVEKDVHAASSPGMGGAAASWAGWAVTGVSSLTSKLIRSHPTTAPTETNIPQRPTPEGVPAPAPTPVPATPTTSGHWETQEEDKDTAEDSSTADRWDDEDWGSLEQEAESVLAQQDDWSTGGQVSRASQSAIRPNPPFPSRGQGRGLEGWGHPGP

SEQ ID NO: 775452 - protein, 413 aa, Homo sapiens
HASRTPWVDPRVGRSSMLLLAPKLNEANLNVELMKHFARLQAKDEQGPIRCNTTVCLGKIGSYLSASTRHRVLTSAFSRATRDPFAPSRVAGVLGFAATHNLYSMNDCAQKILPVLCGLTVDPEKSVRDQAFKAIRSFLSKLESVSEDPTQLEEVEKDVHAASSPGMGGAAASWAGWAVTGVSSLTSKLIRSHPTTAPTETNIPQRPTPEGVPAPAPTPVPATPTTSGHWETQEEDKDTAEDSSTADRWDDEDWGSLEQEAESVLAQQDDWSTGGQVSRASQVSNSDHKSSKSPESDWSSWEAEGSWEQGWQEPSSQEPPPDGTRLASEYNWGGPESSDKGDPFATLSARPSTQPRPDSWGEDNWEGLETDSRQVKAELARKKREERRREMEAKRAERKVAKGPMKLGARKLD

SEQ ID NO: 775453 - protein, 380 aa, Homo sapiens
MLLLAPKLNEANLNVELMKHFARLQAKDEQGPIRCNTTVCLGKIGSYLSASTRHRVLTSAFSRATRDPFAPSRVAGVLGFAATHNLYSMNDCAQKILPVLCGLTVDPEKSVRDQAFKAIRSFLSKLESVSEDPTQLEEVEKDVHAASSPGMGGAAASWAGWAVTGVSSLTSKLIRSHPTTAPTETNIPQRPTPEGHWETQEEDKDTAEDSSTADRWDDEDWGSLEQEAESVLAQQDDWSTGGQVSRASQVSNSDHKSSKSPESDWSSWEAEGSWEQGWQEPSSQEPPPDGTRLASEYNWGGPESSDKGDPFATLSARPSTQPRPDSWGEDNWEGLETDSRQVKAELARKKREERRREMEAKRAERKVAKGPMKLGARKLD

SEQ ID NO: 775454 - protein, 592 aa, Homo sapiens
ARACGGPGAKAPEPAAAVGTMWFFARDPVRDFPFELIPEPPEGGLPGPWALHRGRKKATGSPVSIFVYDVKPGAEEQTQVAKAAFKRFKTLRHPNILAYIDGLETEKCLHVVTEAVTPLGIYLKARVEAGGLKELEISWGLHQIVKALSFLVNDCSLIHNNVCMAAVFVDRAGEWKLGGLDYMYSAQGNGGGPPRKGIPELEQYDPPELADSSGRVVREKWSADMWRLGCLIWEVFNGPLPRAAALRNPGKIPKTLVPHYCELVGANPKVRPNPARFLQNCRAPGGFMSNRFVETNLFLEEIQIKEPAEKQKFFQELSKSLDAFPEDFCRHKVLPQLLTAFEFGNAGAVVLTPLFKVGKFLSAEEYQQKIIPVVVKMFSSTDRAMRIRLLQQMEQFIQYLDEPTVNTQIFPHVVHGFLDTNPAIREQTVKSMLLLAPKLNEANLNVELMKHFARLQAKDEQGPIRCNTTVCLGKIGSYLSASTRHRVLTSAFSRATRDPFAPSRVAGVLGFAATHNLYSMNDCAQKILPVLCGLTVDPEKSVRDQAFKAIRSFLSKLESVSEDPTQLEEVEKMSITSACMGDPATGSFDKIL

SEQ ID NO: 775455 - protein, 310 aa, Homo sapiens
FCVVVCFFFLKRHDLIYQFLGNTLWEEGRQRPPETLQPPANRGGGPVGAPRVSRRREGLRALKVPGSEPQVGAEVRPSSRKSLSDHRGLGRGRRRRRQRRRWGTQAPCGRLRAKPALQTQRKEPLVFTQRSLLHSSPRWFSSRHSSISTQRAREASSWKPPGHSHTAPPGRGTQRPLTQRHSSESSSELSSSLGGFPQQQGACVPEGIALALRCRAMGPRAARRARSALGAPAAALAAAAVVEGEGRPGQGASAHAVLSALAPAHVAPLRGTLGPALGGAWQSEPEGPGTKGGRHSQREEPGRLTQRPGR

SEQ ID NO: 775456 - protein, 807 aa, Homo sapiens
ARACGGPGAKAPEPAAAVGTMWFFARDPVRDFPFELIPEPPEGGLPGPWALHRGRKKATGSPVSIFVYDVKPGAEEQTQVAKAAFKRFKTLRHPNILAYIDGLETEKCLHVVTEAVTPLGIYLKARVEAGGLKELEISWGLHQIVKALSFLVNDCSLIHNNVCMAAVFVDRAGEWKLGGLDYMYSAQGNGGGPPRKGIPELEQYDPPELADSSGRVVREKWSADMWRLGCLIWEVFNGPLPRAAALRNPGKIPKTLVPHYCELVGANPKVRPNPARFLQNCRAPGGFMSNRFVETNLFLEEIQIKEPAEKQKFFQELSKSLDAFPEDFCRHKVLPQLLTAFEFGNAGAVVLTPLFKVGKFLSAEEYQQKIIPVVVKMFSSTDRAMRIRLLQQMEQFIQYLDEPTVNTQIFPHVVHGFLDTNPAIREQTVKSMLLLAPKLNEANLNVELMKHFARLQAKDEQGPIRCNTTVCLGKIGSYLSASTRHRVLTSAFSRATRDPFAPSRVAGVLGFAATHNLYSMNDCAQKILPVLCGLTVDPEKSVRDQAFKAIRSFLSKLESVSEDPTQLEEVEKDVHAASSPGMGGAAASWAGWAVTGVSSLTSKLIRSHPTTAPTETNIPQRPTPEGVPAPAPTPVPATPTTSGHWETQEEDKDTAEDSSTADRWDDEDWGSLEQEAESVLAQQDDWSTGGQVSRASQSPTGAAGKLRAPGNRAGRSQAPRSHLLTVHGWPASITGVAQSPATRATPSLPCLHVPAPSRGQTLGVRTTGRASRLTVDRSRLSWPGRSARSGGGRWRPNAPRGRWPRAP

SEQ ID NO: 775457 - protein, 828 aa, Homo sapiens; identical to SEQ ID NO: 775438

SEQ ID NO: 775458 - protein, 807 aa, Homo sapiens; identical to SEQ ID NO: 775456

SEQ ID NO: 775459 - protein, 747 aa, Homo sapiens
PRVADAWVDHAVCNILAYIDVLETEKCLHVVTEAVTPLGIYLKARVEAGGLKELEISWGLHQIVKALSFLVNDCSLIHNNVCMAAVFVDRAGEWKLGGLDYMYSAQGNGGGPPRKGIPELEQYDPPELADSSGRVVREKWSADMWRLGCLIWEVFNGPLPRAAALRNPGKIPKTLVPHYCELVGANPKVRPNPARFLQNCRAPGGFMSNRFVETNLFLEEIQIKEPAEKQKFFQELSKSLDAFPEDFCRHKVLPQLLTAFEFGNAGAVVLTPLFKVGKFLSAEEYQQKIIPVVVKMFSSTDRAMRIRLLQQMEQFIQYLDEPTVNTQIFPHVVHGFLDTNPAIREQTVKSMLLLAPKLNEANLNVELMKHFARLQAKDEQGPIRCNTTVCLGKIGSYLSASTRHRVLTSAFSRATRDPFAPSRVAGVLGFAATHNLYSMNDCAQKILPVLCGLTVDPEKSVRDQAFKAIRSFLSKLESVSEDPTQLEEVEKDVHAASSPGMGGAAASWAGWAVTGVSSLTSKLIRSHPTTAPTETNIPQRPTPEGVPAPAPTPVPATPTTSGHWETQEEDKDTAEDSSTADRWDDEDWGSLEQEAESVLAQQDDWSTGGQVSRASQVSNSDHKSSKSPESDWSSWEAEGSWEQGWQEPSSQEPPPDGTRLASEYNWGGPESSDKGDPFATLSARPSTQPRPDSWGEDNWEGLETDSRQVKAELARKKREERRREMEAKRAERKVAKGPMKLGARKLD

SEQ ID NO: 775460 - protein, 828 aa, Homo sapiens; identical to SEQ ID NO: 775438

SEQ ID NO: 775461 - protein, 828 aa, Homo sapiens; identical to SEQ ID NO: 775438

SEQ ID NO: 775462 - protein, 828 aa, Homo sapiens; identical to SEQ ID NO: 775438

SEQ ID NO: 775463 - protein, 778 aa, Homo sapiens
ARACGGPGAKAPEPAAAVGTMWFFARDPVRDFPFELIPEPPEGGLPGPWALHRGRKKATGSPVSIFVYDVKPGAEEQTQVAKAAFKRFKTLRHPNILAYIDGLETEKCLHVVTEAVTPLGIYLKARVEAGGLKELEISWGLHQIVKALSFLVNDCSLIHNNVCMAAVFVDRAGEWKLGGLDYMYSAQGNGGGPPRKGIPELEQYDPPELADSSGRVVREKWSADMWRLGCLIWEVFNGPLPRAAALRNPGKIPKTLVPHYCELVGANPKVRPNPARFLQNCRAPGGFMSNRFVETNLFLEEIQIKEPAEKQKFFQELSKSLDAFPEDFCRHKVLPQLLTAFEFGNAGAVVLTPLFKVGKFLSAEEYQQKIIPVVVKMFSSTDRAMRIRLLQQMEQFIQYLDEPTVNTQIFPHVVHGFLDTNPAIREQTVKSMLLLAPKLNEANLNVELMKHFARLQAKDEQGPIRCNTTVCLGKIGSYLSASTRHRVLTSAFSRATRDPFAPSRVAGVLGFAATHNLYSMNDCAQKILPVLCGLTVDPEKSVRDQAFKAIRSFLSKLESVSEDPTQLEEVEKDVHAASSPGMGGAAASWAGWAVTGVSSLTSKLIRSHPTTAPTETNIPQRPTPEGHWETQEEDKDTAEDSSTADRWDDEDWGSLEQEAESVLAQQDDWSTGGQVSRASQVSNSDHKSSKSPESDWSSWEAEGSWEQGWQEPSSQEPPPDGTRLASEYNWGGPESSDKGDPFATLSARPSTQPRPDSWGEDNWEGLETDSRKCFPWVG

SEQ ID NO: 775464 - protein, 486 aa, Homo sapiens
GQLDSTEEVDSTGQVGKFLSAEEYQQKIIPVVVKMFSSTDRAMRIRLLQQMEQFIQYLDEPTVNTQIFPHVVHGFLDTNPAIREQTVKSMLLLAPKLNEANLNVELMKHFARLQAKDEQGPIRCNTTVCLGKIGSYLSASTRHRVLTSAFSRATRDPFAPSRVAGVLGFAATHNLYSMNDCAQKILPVLCGLTVDPEKSVRDQAFKAIRSFLSKLESVSEDPTQLEEVEKDVHAASSPGMGGAAASWAGWAVTGVSSLTSKLIRSHPTTAPTETNIPQRPTPEGVPAPAPTPVPATPTTSGHWETQEEDKDTAEDSSTADRWDDEDWGSLEQEAESVLAQQDDWSTGGQVSRASQVSNSDHKSSKSPESDWSSWEAEGSWEQGWQEPSSQEPPPDGTRLASEYNWGGPESSDKGDPFATLSARPSTQPRPDSWGEDNWEGLETDSRQVKAELARKKREERRREMEAKRAERKVAKGPMKLGARKLD

SEQ ID NO: 775465 - protein, 411 aa, Homo sapiens
MPVTSCPSGSRRSSMLLLAPKLNEANLNVELMKHFARLQAKDEQGPIRCNTTVCLGKIGSYLSASTRHRVLTSAFSRATRDPFAPSRVAGVLGFAATHNLYSMNDCAQKILPVLCGLTVDPEKSVRDQAFKAIRSFLSKLESVSEDPTQLEEVEKDVHAASSPGMGGAAASWAGWAVTGVSSLTSKLIRSHPTTAPTETNIPQRPTPEGVPAPAPTPVPATPTTSGHWETQEEDKDTAEDSSTADRWDDEDWGSLEQEAESVLAQQDDWSTGGQVSRASQVSNSDHKSSKSPESDWSSWEAEGSWEQGWQEPSSQEPPPDGTRLASEYNWGGPESSDKGDPFATLSARPSTQPRPDSWGEDNWEGLETDSRQVKAELARKKREERRREMEAKRAERKVAKGPMKLGARKLD

SEQ ID NO: 775466 - protein, 636 aa, Homo sapiens
ARACGGPGAKAPEPAAAVGTMWFFARDPVRDFPFELIPEPPEGGLPGPWALHRGRKKATGSPVSIFVYDVKPGAEEQTQVAKAAFKRFKTLRHPNILAYIDGLETEKCLHVVTEAVTPLGIYLKARVEAGGLKELEISWGLHQIVKALSFLVNDCSLIHNNVCMAAVFVDRAGEWKLGGLDYMYSAQGNGGGPPRKGIPELEQYDPPELADSSGRVVREKWSADMWRLGCLIWEVFNGPLPRAAALRNPGKIPKTLVPHYCELVGANPKVRPNPARFLQNCRAPGGFMSNRFVETNLFLEEIQIKEPAEKQKFFQELSKSLDAFPEDFCRHKVLPQLLTAFEFGNAGAVVLTPLFKVGKFLSAEEYQQKIIPVVVKMFSSTDRAMRIRLLQQMEQFIQYLDEPTVNTQIFPHVVHGFLDTNPAIREQTVKSMLLLAPKLNEANLNVELMKHFARLQAKDEQGPIRCNTTVCLGKIGSYLSASTRHRVLTSAFSRATRDPFAPSRVAGVLGFAATHNLYSMNDCAQKILPVLCGLTVDPEKSVRDQAFKAIRSFLSKLESVSEDPTQLEEVEKDVHAASSPGMGGAAASWAGWAVTGVSSLTSKLIRSHPTTAPTETNIPQRPTPEATGRRRRRRHS

SEQ ID NO: 775467 - protein, 69 aa, Homo sapiens
MAICMFTEGPACISRERKPSGHWCIKIFGNVQKIPNIACPACQASLATSLLPSRTSSCHFLENPSHAVV

SEQ ID NO: 775468 - protein, 44 aa, Homo sapiens
ASKQSPLNQSWVSGRSRSSVSTQHLYQTDCVGSAFLERGTQPDD

SEQ ID NO: 775469 - protein, 739 aa, Homo sapiens
MDALKPPCLWRNHERGKKDRDSCGRKNSEPGSPHSLEALRDAAPSQGLNFLLLFTKMLFIFNFLFSPLPTPALICILTFGAAIFLWLITRPQPVLPLLDLNNQSVGIEGGARKGVSQKNNDLTSCCFSDAKTMYEVFQRGLAVSDNGPCLGYRKPNQPYRWLSYKQVSDRAEYLGSCLLHKGYKSSPDQFVGIFAQNRPEWIISELACYTYSMVAVPLYDTLGPEAIVHIVNKADIAMVICDTPQKALVLIGNVEKGFTPSLKVIILMDPFDDDLKQRGEKSGIEILSLYDAENLGKEHFRKPVPPSPEDLSVICFTSGTTGDPKGAMITHQNIVSNAAAFLKCVEHAYEPTPDDVAISYLPLAHMFERIVQAVVYSCGARVGFFQGDIRLLADDMKTLKPTLFPAVPRLLNRIYDKVQNEAKTPLKKFLLKLAVSSKFKELQKGIIRHDSFWDKLIFAKIQDSLGGRVRVIVTGAAPMSTSVMTFFRAAMGCQVYEAYGQTECTGGCTFTLPGDWTSGHVGVPLACNYVKLEDVADMNYFTVNNEGEVCIKGTNVFKGYLKDPEKTQEALDSDGWLHTGDIGRWLPNGTLKIIDRKKNIFKLAQGEYIAPEKIENIYNRSQPVLQIFVHGESLRSSLVGVVVPDTDVLPSFAAKLGVKGSFEELCQNQVVREAILEDLQKIGKESGLKTFEQVKAIFLHPEPFSIENGLLTPTLKAKRGELSKYFRTQIDSLYEHIQD

SEQ ID NO: 775470 - protein, 683 aa, Homo sapiens
MLFIFNFLFSPLPTPALICILTFGAAIFLWLITRPQPVLPLLDLNNQSVGIEGGARKGVSQKNNDLTSCCFSDAKTMYEVFQRGLAVSDNGPCLGYRKPNQPYRWLSYKQVSDRAEYLGSCLLHKGYKSSPDQFVGIFAQNRPEWIISELACYTYSMVAVPLYDTLGPEAIVHIVNKADIAMVICDTPQKALVLIGNVEKGFTPSLKVIILMDPFDDDLKQRGEKSGIEILSLYDAENLGKEHFRKPVPPSPEDLSVICFTSGTTGDPKGAMITHQNIVSNAAAFLKCVEHAYEPTPDDVAISYLPLAHMFERIVQAVVYSCGARVGFFQGDIRLLADDMKTLKPTLFPAVPRLLNRIYDKVQNEAKTPLKKFLLKLAVSSKFKELQKGIIRHDSFWDKLIFAKIQDSLGGRVRVIVTGAAPMSTSVMTFFRAAMGCQVYEAYGQTECTGGCTFTLPGDWTSGHVGVPLACNYVKLEDVADMNYFTVNNEGEVCIKGTNVFKGYLKDPEKTQEALDSDGWLHTGDIGRWLPNGTLKIIDRKKNIFKLAQGEYIAPEKIENIYNRSQPVLQIFVHGESLRSSLVGVVVPDTDVLPSFAAKLGVKGSFEELCQNQVVREAILEDLQKIGKESGLKTFEQVKAIFLHPEPFSIENGLLTPTLKAKRGELSKYFRTQIDSLYEHIQD

SEQ ID NO: 775471 - protein, 739 aa, Homo sapiens; identical to SEQ ID NO: 775469

SEQ ID NO: 775472 - protein, 478 aa, Homo sapiens
MDALKPPCLWRNHERGKKDRDSCGRKNSEPGSPHSLEALRDAAPSQGLNFLLLFTKMLFIFNFLFSPLPTPALICILTFGAAIFLWLITRPQPVLPLLDLNNQSVGIEGGARKGVSQKNNDLTSCCFSDAKTMYEVFQRGLAVSDNGPCLGYRKPNQPYRWLSYKQVSDRAEYLGSCLLHKGYKSSPDQFVGIFAQNRPEWIISELACYTYSMVAVPLYDTLGPEAIVHIVNKADIAMVICDTPQKALVLIGNVEKGFTPSLKVIILMDPFDDDLKQRGEKSGIEILSLYDAENLGKEHFRKPVPPSPEDLSVICFTSGTTGDPKGAMITHQNIVSNAAAFLKCVEHAYEPTPDDVAISYLPLAHMFERIVQAVVYSCGARVGFFQGDIRLLADDMKTLKPTLFPAVPRLLNRIYDKVQNEAKTPLKKFLLKLAVSSKFKELQKGQPGRKGSCNCHWSCPHVHFSHDILPGSNGMSGV

SEQ ID NO: 775473 - protein, 374 aa, Homo sapiens [sequence omitted]

SEQ ID NO: 775474 - protein, 257 aa, Homo sapiens
GRVGRPTRRGCQVYEAYGQTECTGGCTFTLPGDWTSGHVGVPLACNYVKLEDVADMNYFTVNNEGEVCIKGTNVFKGYLKDPEKTQEALDSDGWLHTGDIGRWLPNGTLKIIDRKKNIFKLAQGEYIAPEKIENIYNRSQPVLQIFVHGESLRSSLVGVVVPDTDVLPSFAAKLGVKGSFEELCQNQVVREAILEDLQKIGKESGLKTFEQVKAIFLHPEPFSIENGLLTPTLKAKRGELSKYFRTQIDSLYEHIQD

SEQ ID NO: 775475 - protein, 739 aa, Homo sapiens; identical to SEQ ID NO: 775469

SEQ ID NO: 775476 - protein, 619 aa, Homo sapiens
MDALKPPCLWRNHERGKKDRDSCGRKNSEPGSPHSLEALRDAAPSQGLNFLLLFTKMLFIFNFLFSPLPTPALICILTFGAAIFLWLITRPQPVLPLLDLNNQSVGIEGGARKGVSQKNNDLTSCCFSDAKTMYEVFQRGLAVSDNGPCLGYRKPNQPYRWLSYKQVSDRAEYLGSCLLHKGYKSSPDQFVGIFAQNRPEWIISELACYTYSMVAVPLYDTLGPEAIVHIVNKADIAMVICDTPQKALVLIGNVEKGFTPSLKVIILMDPFDDDLKQRGEKSGIEILSLYDAENLGKEHFRKPVPPSPEDLSVICFTSGTTGDPKGAMITHQNIVSNAAAFLKCVEHAYEPTPDDVAISYLPLAHMFERIVQAVVYSCGARVGFFQGDIRLLADDMKTLKPTLFPAVPRLLNRIYDKVQNEAKTPLKKFLLKLAVSSKFKELQKGIIRHDSFWDKLIFAKIQDSLGGRVRVIVTGAAPMSTSVMTFFRAAMGCQVYEAYGQTECTGGCTFTLPGDWTSGHVGVPLACNYVKLEDVADMNYFTVNNEGEVCIKGTNVFKGYLKDPEKTQEALDSDGWLHTGDIGRWLPNGTLKIIDRKKNIFKLAQGEYIAPRSLRVPSS

SEQ ID NO: 775477 - protein, 581 aa, Homo sapiens
MDALKPPCLWRNHERGKKDRDSCGRKNSEPGSPHSLEALRDAAPSQGLNFLLLFTKMLFIFNFLFSPLPTPALICILTFGAAIFLWLITRPQPVLPLLDLNNQSVGIEGGARKGVSQKNNDLTSCCFSDAKTMYEVFQRGLAVSDNGPCLGYRKPNQPYRWLSYKQVSDRAEYLGSCLLHKGYKSSPDQFVGIFAQNRPEWIISELACYTYSMVAVPLYDTLGPEAIVHIVNKADIAMVICDTPQKALVLIGNVEKGFTPSLKVIILMDPFDDDLKQRGEKSGIEILSLYDAENLGKEHFRKPVPPSPEDLSVICFTSGTTGDPKGAMITHQNIVSNAAAFLKCVEHAYEPTPDDVAISYLPLAHMFERIVQAVVYSCGARVGFFQGDIRLLADDMKTLKPTLFPAVPRLLNRIYDKVQNEAKTPLKKFLLKLAVSSKFKELQKGIIRHDSFWDKLIFAKIQDSLGGRVRVIVTGAAPMSTSVMTFFRAAMGCQVYEAYGQTECTGGCTFTLPGDWTSGHVGVPLACNYVKLEDVADMNYFTVNNEGEVCIKGTNVFKGYLKDPEKTQEAKDVYKDISNEA

SEQ ID NO: 775478 - protein, 440 aa, Homo sapiens
MDALKPPCLWRNHERGKKDRDSCGRKNSEPGSPHSLEALRDAAPSQGLNFLLLFTKMLFIFNFLFSPLPTPALICILTFGAAIFLWLITRPQPVLPLLDLNNQSVGIEGGARKGVSQKNNDLTSCCFSDAKTMYEVFQRGLAVSDNGPCLGYRKPNQPYRWLSYKQVSDRAEYLGSCLLHKGYKSSPDQFVGIFAQNRPEWIISELACYTYSMVAVPLYDTLGPEAIVHIVNKADIAMVICDTPQKALVLIGNVEKGFTPSLKVIILMDPFDDDLKQRGEKSGIEILSLYDAENLGKEHFRKPVPPSPEDLSVICFTSGTTGDPKGAMITHQNIVSNAAAFLKCVEHAYEPTPDDVAISYLPLAHMFERIVQAVVYSCGARVGFFQGDIRLLADDMKTLKPTLFPAVPRLLNRIYDKVQNEAKTPFNKNFCRRGREFSSS

SEQ ID NO: 775479 - protein, 31 aa, Homo sapiens
MTHAISGIKHHGGTNQAQVHRHKSTSPGSLY

SEQ ID NO: 775480 - protein, 108 aa, Homo sapiens
MGTDEDCYQERGDWDQESGFGREEPRLLFWMCQDRSAFEKSELWYQIASWICETGVWGKERPWLKNVSFGNVNIKPQDWVTWPSRGVGTEKRPWPEPWGHLHLGEKGM

SEQ ID NO: 775481 - protein, 144 aa, Homo sapiens [sequence omitted]

SEQ ID NO: 775482 - protein, 221 aa, Homo sapiens
RTILARLRLSGVPGPAGKQSMAGAGPKRRALAAPVAEEKEEAREKMLASKRADGAAPAGEGEGVTLQRNITLLNGVAIIVGAIIGSGIFVTPTGVLKEAGSPGLALVMWAACGVFSIVGALCYAELGTTISKSGGDYAYMLDVYGSLPAFLKLWIELLVIRPSSQYIVALVFATYLLKPLFPSCPVPEEAAKLMACHCVRPGKEGLAYATLCRIVFSAYRA

SEQ ID NO: 775483 - protein, 120 aa, Homo sapiens
GPGPDHPRWAIDPASGSGDVSNLDPNFSFEGTKLDVGNIVLALYSGLFAYGGWNYLNFVTEEMINPYRNLPLAIQPEAFNGPTIMLVLMTAKIVGDVFIEGLYDMHIQLQSVPFLHWEAP

SEQ ID NO: 775484 - protein, 507 aa, Homo sapiens
MAGAGPKRRALAAPAAEEKEEAREKMLAAKSADGSAPAGEGEGVTLQRNITLLNGVAIIVGTIIGSGIFVTPTGVLKEAGSPGLALVVWAACGVFSIVGALCYAELGTTISKSGGDYAYMLEVYGSLPAFLKLWIELLIIRPSSQYIVALVFATYLLKPLFPTCPVPEEAAKLVACLCVLLLTAVNCYSVKAATRVQDAFAAAKLLALALIILLGFVQIGKGDVSNLDPNFSFEGTKLDVGNIVLALYSGLFAYGGWNYLNFVTEEMINPYRNLPLAIIISLPIVTLVYVLTNLAYFTTLSTEQMLSSEAVAVDFGNYHLGVMSWIIPVFVGLSCFGSVNGSLFTSSRLFFVGSREGHLPSILSMIHPQLLTPVPSLVFTCVMTLLYAFSKDIFSVINFFSFFNWLCVALAIIGMIWLRHRKPELERPIKVNLALPVFFILACLFLIAVSFWKTPVECGIGFTIILSGLPVYFFGVWWKNKPKWLLQGIFSTTVLCQKLMQVVPQET

SEQ ID NO: 775485 - protein, 527 aa, Homo sapiens
ARILARLRLSGVPGPAGKQSMAGAGPKRRALAAPVAEEKEEAREKMLASKRADGAAPAGEGEGVTLQRNITLLNGVAIIVGAIIGSGIFVTPTGVLKEAGSPGLALVMWAACGVFSIVGALCYAELGTTISKSGGDYAYMLDVYGSLPAFLKLWIELLVIRPSSQYIVALVFATYLLKPLFPSCPVPEEAAKLMACHCVLLLTAVNCYSVKAATRVQDAFAAAKLLALALIILLGFVQIGKGDVSNLDPNFSFEGTKLDVGNIVLALYSGLFAYGGWNYLNFVTEEMINPYRNLPLAIIISLPIVTLVYVLTNLAYFTTLSTEQMLSSEAVAVDFGNYHLGVMSWIIPVFVGLSCFGSVNGSLFTSSRLFFVGSREGHLPSILSMIHPQLLTPVPSLVFTCVMTLLYAFSKDIFSVINFFSFFNWLCVALAIIGMIWLRHRKPELERPIKVNLALPVFFILACLFLIAVSFWKTPVECGIGFTIILSGLPVYFFGVWWKNKPKWLLQGIFSTTVLCQKLMQVVPQET

SEQ ID NO: 775486 - protein, 125 aa, Homo sapiens [sequence omitted]

SEQ ID NO: 775487 - protein, 147 aa, Homo sapiens [sequence omitted]

SEQ ID NO: 775488 - protein, 147 aa, Homo sapiens [sequence omitted]

SEQ ID NO: 775489 - protein, 507 aa, Homo sapiens; identical to SEQ ID NO: 775484

SEQ ID NO: 775490 - protein, 147 aa, Homo sapiens [sequence omitted]

SEQ ID NO: 775491 - protein, 507 aa, Homo sapiens; identical to SEQ ID NO: 775484

SEQ ID NO: 775492 - protein, 147 aa, Homo sapiens [sequence omitted]

SEQ ID NO: 775493 - protein, 147 aa, Homo sapiens [sequence omitted]

SEQ ID NO: 775494 - protein, 153 aa, Homo sapiens
MLSLAALRGAGAMPAPCLCPSHAGPSTVTSADQAGHPLPSNDVCGWDLLYSVLMANLLHWAGLGRVFWLFCGVFIFKETLNHPKKKTKKVQREKAKGANGPRRLSPQQGGYHYAKPGQRPEKDPRTGKPNLAKSERHPAHSPGNETFGDRCRT

SEQ ID NO: 775495 - protein, 153 aa, Homo sapiens; identical to SEQ ID NO: 775494

SEQ ID NO: 775496 - protein, 153 aa, Homo sapiens; identical to SEQ ID NO: 775494

SEQ ID NO: 775497 - protein, 103 aa, Homo sapiens
KSSSVPLLGSLLRIQGAGGLSTARTCLLAAAAVGEHGGCQRLLWKVAASEMAGAAGVRLHTAQVSSGRLSWGGSSSAEGWWGVQSVILGAVCPTPAWGPHFRR

SEQ ID NO: 775498 - protein, 291 aa, Homo sapiens
MAGAGPKRRALAAPAAEEKEEAREKMLAAKSADGSAPAGEGEGVTLQRNITLLNGVAIIVGTIIGSGIFVTPTGVLKEAGSPGLALVVWAACGVFSIVGALCYAELGTTISKSGGDYAYMLEVYGSLPAFLKLWIELLIIRPSSQYIVALVFATYLLKPLFPTCPVPEEAAKLVACLCVLLLTAVNCYSVKAATRVQDAFAAAKLLALALIILLGFVQIGKGDVSNLDPNFSFEGTKLDVGNIVLALYSGLFAYGGWNYLNFVTEEMINPYRNLPLAIQRLRGVEWPEALL

SEQ ID NO: 775499 - protein, 241 aa, Homo sapiens
RTILARLRLSGVPGPAGKQSMAGAGPKRRALAAPVAEEKEEAREKMLASKRADGAAPAGEGEGVTLQRNITLLNGVAIIVGAIIGSGIFVTPTGVLKEAGSPGLALVMWAACGVFSIVGALCYAELGTTISKSGGDYAYMLDVYGSLPAFLKLWIELLVIRPSSQYIVALVFATYLLKPLFPSCPVPEEAAKLMACHCVREYGARAGGWEVVVPGSLHPCITTPLAPTSLHFCVPGPSRQF

SEQ ID NO: 775500 - protein, 343 aa, Homo sapiens
PFTRVFVLVRFSLVIMLLTAVNCYSVKAATRVQDAFAAAKLLALALIILLGFVQIGKGDVSNLDPNFSFEGTKLDVGNIVLALYSGLFAYGGWNYLNFVTEEMINPYRNLPLAIIISLPIVTLVYVLTNLAYFTTLSTEQMLSSEAVAVDFGNYHLGVMSWIIPVFVGLSCFGSVNGSLFTSSRLFFVGSREGHLPSILSMIHPQLLTPVPSLVFTCVMTLLYAFSKDIFSVINFFSFFNWLCVALAIIGMIWLRHRKPELERPIKVNLALPVFFILACLFLIAVSFWKTPVECGIGFTIILSGLPVYFFGVWWKNKPKWLLQGIFSTTVLCQKLMQVVPQET

SEQ ID NO: 775501 - protein, 364 aa, Homo sapiens
MVELVVSAEVALLLKPLFPTCPVPEEAAKLVACLCVLLLTAVNCYSVKAATRVQDAFAAAKLLALALIILLGFVQIGKGDVSNLDPNFSFEGTKLDVGNIVLALYSGLFAYGGWNYLNFVTEEMINPYRNLPLAIIISLPIVTLVYVLTNLAYFTTLSTEQMLSSEAVAVDFGNYHLGVMSWIIPVFVGLSCFGSVNGSLFTSSRLFFVGSREGHLPSILSMIHPQLLTPVPSLVFTCVMTLLYAFSKDIFSVINFFSFFNWLCVALAIIGMIWLRHRKPELERPIKVNLALPVFFILACLFLIAVSFWKTPVECGIGFTIILSGLPVYFFGVWWKNKPKWLLQGIFSTTVLCQKLMQVVPQET

SEQ ID NO: 775502 - protein, 507 aa, Homo sapiens; identical to SEQ ID NO: 775484

SEQ ID NO: 775503 - protein, 147 aa, Homo sapiens [sequence omitted]

SEQ ID NO: 775504 - protein, 507 aa, Homo sapiens; identical to SEQ ID NO: 775484

SEQ ID NO: 775505 - protein, 507 aa, Homo sapiens; identical to SEQ ID NO: 775484

SEQ ID NO: 775506 - protein, 147 aa, Homo sapiens [sequence omitted]

SEQ ID NO: 775507 - protein, 153 aa, Homo sapiens; identical to SEQ ID NO: 775494

SEQ ID NO: 775508 - protein, 184 aa, Homo sapiens
  misc_feature (6)..(6): Xaa can be any naturally occurring amino acid
RLYAPXLDIVDHALRWCPTCLVHCCVNPGGSGHRRQPRPRVQEKCSLEARTTASHWGRRGPRTTSASYLPASARGPRDAVLFQPPALGRGHASRIQGAGGLSTARTCLLAAAAVGEHGGCQRLLWKVAASEMAGAAGVRLHTAQVSSGRLSWGGSSSAEGWWGVQSVILGAVCPTPAWGPHFRR

SEQ ID NO: 775509 - protein, 507 aa, Homo sapiens; identical to SEQ ID NO: 775484

SEQ ID NO: 775510 - protein, 67 aa, Homo sapiens
MSSLFFPGNLPLAIIISLPIVTLVYVLTNLAYFTTLSTEQMLSSEAVAVVSRYPPASTRGLRGCGQP

SEQ ID NO: 775511 - protein, 324 aa, Homo sapiens
QTNTKDWTVTPEHVLPESQSLLTFEEVAMYFSQEEWELLDPTQKALYNDVMQENYETVISLALFVLPKPKVISCLEQGEEPWVQVSPEFKDSAGKSPTGLKLKNDTENHQPVSLSDLEIQASAGVISKKAKVKVPQKTAGKENHFDMHRVGKWHQDFPVKKRKKLSTWKQELLKLMDRHKKDCAREKPFKCQECGKTFRVSSDLIKHQRIHTEEKPYKCQQCDKRFRWSSDLNKHLTTHQGIKPYKCSWCGKSFSQNTNLHTHQRTHTGEKPFTCHECGKKFSQNSHLIKHRRTHTGEQPYTCSICRRNFSRRSSLLRHQKLHL

SEQ ID NO: 775512 - protein, 116 aa, Homo sapiens
RLSWSVGLGLSEGEVSLCSAYRKLNTTRDCLESCQPGAALARGNESLMGVLPNTHDSVSQVHTAEQTQGKASGWNLKNAVTRAGCTPAFSLSPVVVVMFDVRRVRCGRVESSQIHA

SEQ ID NO: 775513 - protein, 187 aa, Homo sapiens
LWDSPLESFNTAVEICTLEDPSTEILQPTIIMEEPTSSTNENKMKSPCESNKRKVDKKKNLHRASAPEQSLKETEKAKYPTLVFYCRKNKKRNSNQLENNQPTESSTDPIKEKGDLDISAGSPQDGEEEKDLVFLGARACLEEHIRRSVLYVGDSDTLSKMKTSESPPSGHIPQSGVFCNSPNAVSN

SEQ ID NO: 775514 - protein, 67 aa, Homo sapiens
EKHLCHVPSNEMTTVHSPSFLGAGETPSPRTPKSKYDTSSPPNSGDGDRGGKYVEPWACSLTVTFAT

SEQ ID NO: 775515 - protein, 71 aa, Homo sapiens
IGLCVNMRSLPWYVPANPDSFFPRCYSLCTESEQQEFLEDFRRTMASSILKWVVSHQSCSRSSRSKPRDQR

SEQ ID NO: 775516 - protein, 46 aa, Homo sapiens
VSCKHFVCGASLKSHINLIGRYHHAYFIDRKTKISKKGSDLTKGTD

SEQ ID NO: 775517 - protein, 50 aa, Homo sapiens
MAAGPMESAGALALTCPCILRLCCFSLRGSFLPLVGPCSPETLPLAWGLL

SEQ ID NO: 775518 - protein, 112 aa, Homo sapiens
GQDGLEASNPGGTRRSPTRPGRQLHGPWADARSGCGTRRGAAAWPHPKAAECPELVPGSRRRPSRSWAGSGVGQALPAGLTGRSDPAIRLRLRPGSADPRATLLQWPSRGRN

SEQ ID NO: 775519 - protein, 51 aa, Homo sapiens
FSCCPCPGWARLAVLLALTPSHLEFTCFPSTPRSSSEKGSAQIPWFSDLKQ

SEQ ID NO: 775520 - protein, 301 aa, Homo sapiens
SLWHSVLRPPRLGSQCVAGLSQTPQATLAANGAEDSRGGEMLPAGEIGASPAAPCCSESGDERKNLEEKSDINVTVLIGSKQVSEGTYNFIRNSYKNSSALKNAEESKQFLNQFLEQETHLFSAINSHLLTAQPWMDDLGTMISQIEEIERHLAYLNWISQIEELSDNIQQYLMTNNVPEAASTLVSMAELDIKLQESSCTHLLGFMRATVKFWHKILKDKLTSDFEEILAQLHWPFIAPPQSQTVGLSRPASAPEIYSYLETLFCQLLKLQTSSEMNYLLSQSNSQKNTLFLPPLLSSCP

SEQ ID NO: 775521 - protein, 360 aa, Homo sapiens
SLWHSVLRPPRLGSQCVAGLSQTPQATLAANGAEDSRGGEMLPAGEIGASPAAPCCSESGDERKNLEEKSDINVTVLIGSKQVSDRVTDYMGESPFILLCLAFHSKQDTSDNGPFNIFNRKAWIKTPLEADGQLSNNGRLRQTQVLTISSEIPKRIRSALKNAEESKQFLNQFLEQETHLFSAINSHLLTAQPWMDDLGTMISQIEEIERHLAYLNWISQIEELSDNIQQYLMTNNVPEAASTLVSMAELDIKLQESSCTHLLGFMRATVKFWHKILKDKLTSDFEEILAQLHWPFIAPPQSQTVGLSRPASAPEIYSYLETLFCQLLKLQTSSEMNYLLSQSNSQKNTLFLPPLLSSCP

SEQ ID NO: 775522 - protein, 219 aa, Homo sapiens
MASEVPYASGMPIKKIGHRSVDSSGGTTSSALKGAIQLGITHTVGSLSTKPESDVLMQDFHMVESIFFPSEGSNLTPAHHYNAFRFKTYAPVAFRYFWELFGIRPDDYLYSLCSEPLIELCSSGASGSLFYVSSDDEFIVKTVRHKEAEFLQKLLPGYYINLNQNPRTLLPKFYGLYCVQTGGKNIRIVVMNNLLPRSVKMHIKYDLKGSTYRRRASQK

SEQ ID NO: 775523 - protein, 120 aa, Homo sapiens
GCSRTKKQLEGARARGMPEHWVVGRMRIRNSLCPTGTLRRDGSETWVSGHSHSHSSRPWASVPPIPRCWVLPFLSLCAADSGPLAEVPPVNLGHCIPALRCQMSLFIGSSMPWVWSCCAP

SEQ ID NO: 775524 - protein, 217 aa, Homo sapiens
MAGARAAAAAASAGSSASSGNQPPQELGLGELLEEFSRTQYRAKDGSGTGGSKVERIEKRCLELFGRDYCFSVIPNTNGDICGHYPRHIVFLEYESSEKEKDTFDEYRTGEQGCKNLIHREQDGPVQRTVCLPSNPCSRAKHICRSATLAGWGELYETLRPTTINLRGLQMMPGQNVEDVHGGGTVPLRSGDTHSLERVRGYDFKLLENLSIQYILR

SEQ ID NO: 775525 - protein, 103 aa, Homo sapiens
RLITSEVRSLNPCPRALPLTVAFPGQQEAVALLACVTERTDVLEHRWVIILDVGVQFWLGRNLSHPGNGWVTCIKSWNCPHLLNPSLMKKENSGAMDGSRALQ

SEQ ID NO: 775526 - protein, 133 aa, Homo sapiens
CLPFIYPFLIFIFIFKTSCLSPCLPARSGLFRGRSAGDDHFSLEAFLSGCQILFNFLGFKFKKRREHSNCFLPRIMCLLPHSPSKYKDVQDIIASSKKLKIQIGEDVGAHTKSRLFTSRQLSAVSSWASNLTS

SEQ ID NO: 775527 - protein, 34 aa, Homo sapiens
EELWVAPSGARSPYAGLMMIREVSVTQQMECSNA

SEQ ID NO: 775528 - protein, 33 aa, Homo sapiens
VPERRSKRQGPQEEEEAYESPGRGKEASLSPGE

SEQ ID NO: 775529 - protein, 1084 aa, Homo sapiens
MSSQSHPDGLSGRDQPVELLNPARVNHMPSTVDVATALPLQVAPSAVPMDLRLDHQFSLPVAEPALREQQLQQELLALKQKQQIQRQILIAEFQRQHEQLSRQHEAQLHEHIKQQQEMLAMKHQQELLEHQRKLERHRQEQELEKQHREQKLQQLKNKEKGKESAVASTEVKMKLQEFVLNKKKALAHRNLNHCISSDPRYWYGKTQHSSLDQSSPPQSGVSTSYNHPVLGMYDAKDDFPLRKTASEPNLKLRSRLKQKVAERRSSPLLRRKDGPVVTALKKRPLDVTDSACSSAPGSGPSSPNNSSGSVSAENGIAPAVPSIPAETSLAHRLVAREGSAAPLPLYTSPSLPNITLGLPATGPSAGTAGQQDAERLTLPALQQRLSLFPGTHLTPYLSTSPLERDGGAAHSPLLQHMVLLEQPPAQAPLVTGLGALPLHAQSLVGADRVSPSIHKLRQHRPLGRTQSAPLPQNAQALQHLVIQQQHQQFLEKHKQQFQQQQLQMNKIIPKPSEPARQPESHPEETEEELREHQALLDEPYLDRLPGQKEAHAQAGVQVKQEPIESDEEEAEPPREVEPGQRQPSEQELLFRQQALLLEQQRIHQLRNYQASMEAAGIPVSFGGHRPLSRAQSSPASATFPVSVQEPPTKPRFTTGLVYDTLMLKHQCTCGSSSSHPEHAGRIQSIWSRLQETGLRGKCECIRGRKATLEELQTVHSEAHTLLYGTNPLNRQKLDSKKLLGSLASVFVRLPCGGVGVDSDTIWNEVHSAGAARLAVGCVVELVFKVATGELKNGFAVVRPPGHHAEESTPMGFCYFNSVAVAAKLLQQRLSVSKILIVDWDVHHGNGTQQAFYSDPSVLYMSLHRYDDGNFFPGSGAPDEVGTGPGVGFNVNMAFTGGLDPPMGDAEYLAAFRTVVMPIASEFAPDVVLVSSGFDAVEGHPTPLGGYNLSARCFGYLTKQLMGLAGGRIVLALEGGHDLTAICDASEACVSALLGNELDPLPEKVLQQRPNANAVRSMEKVMEIHSKYWRCLQRTTSTAGRSLIEAQTCENEEAETVTAMASLSVGVKPAEKRPDEEPMEEEPPL

SEQ ID NO: 775530 - protein, 119 aa, Homo sapiens
MSSQSHPDGLSGRDQPVELLNPARVNHMPSTVDVATALPLQVAPSAVPMDLRLDHQFSLPVAEPALREQQLQQELLALKQKQQIQRQILIAEFQRQHEQLSRQHEAQLHEHIKANTDAG

SEQ ID NO: 775531 - protein, 668 aa, Homo sapiens
MVLLEQPPAQAPLVTGLGALPLHAQSLVGADRVSPSIHKLRQHRPLGRTQSAPLPQNAQALQHLVIQQQHQQFLEKHKQQFQQQQLQMNKIIPKPSEPARQPESHPEETEEELREHQALLDEPYLDRLPGQKEAHAQAGVQVKQEPIESDEEEAEPPREVEPGQRQPSEQELLFRQQALLLEQQRIHQLRNYQASMEAAGIPVSFGGHRPLSRAQSSPASATFPVSVQEPPTKPRFTTGLVYDTLMLKHQCTCGSSSSHPEHAGRIQSIWSRLQETGLRGKCECIRGRKATLEELQTVHSEAHTLLYGTNPLNRQKLDSKKLLGSLASVFVRLPCGGVGVDSDTIWNEVHSAGAARLAVGCVVELVFKVATGELKNGFAVVRPPGHHAEESTPMGFCYFNSVAVAAKLLQQRLSVSKILIVDWDVHHGNGTQQAFYSDPSVLYMSLHRYDDGNFFPGSGAPDEVGTGPGVGFNVNMAFTGGLDPPMGDAEYLAAFRTVVMPIASEFAPDVVLVSSGFDAVEGHPTPLGGYNLSARCFGYLTKQLMGLAGGRIVLALEGGHDLTAICDASEACVSALLGNELDPLPEKVLQQRPNANAVRSMEKVMEIHSKYWRCLQRTTSTAGRSLIEAQTCENEEAETVTAMASLSVGVKPAEKRPDEEPMEEEPPL

SEQ ID NO: 775532 - protein, 1084 aa, Homo sapiens; identical to SEQ ID NO: 775529

SEQ ID NO: 775533 - protein, 1084 aa, Homo sapiens; identical to SEQ ID NO: 775529

SEQ ID NO: 775534 - protein, 1084 aa, Homo sapiens; identical to SEQ ID NO: 775529

SEQ ID NO: 775535 - protein, 208 aa, Homo sapiens
SDGGEKMAEAEFKDHSTAMDTEPNPGTSSVSTTTSSTTTTTITTSSSRMQQPQISVYSGSDRHAVQVIQQALHRPPSSAAQYLQQMYAAQQQHLMLHTAALQQQHLSSSQLQSLAAVQASLSSGRPSTSPTGSVTQQSSMSQTSINLSTSPTPAQLISRSQASSSTSGSITQQTMLLGSTSPTLTASQAQMYLRAQMVRYELPNFFSV

SEQ ID NO: 775536 - protein, 170 aa, Homo sapiens
SDGGEKMAEAEFKDHSTAMDTEPNPGTSSVSTTTSSTTTTTITTSSSRMQQPQISVYSGSDRHAVQVIQQALHRPPSSAAQYLQQMYAAQQQHLMLHTAALQQQHLSSSQLQSLAAVQASLSSGRPSTSPTGSVTQQSSMSQTSVSSLNFFFPGFKILKNCFPKVNCCYL

SEQ ID NO: 775537 - protein, 652 aa, Homo sapiens
SDGGEKMAEAEFKDHSTAMDTEPNPGTSSVSTTTSSTTTTTITTSSSRMQQPQISVYSGSDRHAVQVIQQALHRPPSSAAQYLQQMYAAQQQHLMLHTAALQQQHLSSSQLQSLAAVQASLSSGRPSTSPTGSVTQQSSMSQTSINLSTSPTPAQLISRSQASSSTSGSITQQTMLLGSTSPTLTASQAQMYLRAQMLIFTPATTVAAVQSDIPVVSSSSSSSCQSAATQVQNLTLRSQKLGVLSSSQNGPPKSTSQTQSLTICHNKTTVTSSKISQRDPSPESNKKGESPSLESRSTAVTRTSSIHQLIAPASYSPIQPHSLIKHQQIPLHSPPSKVSHHQLILQQQQQQIQPITLQNSTQDPPPSQHCIPLQNHGLPPAPSNAQSQHCSPIQSHPSPLTVSPNQSQSAQQSVVVSPPPPHSPSQSPTIIIHPQALIQPHPLVSSALQPGPNLQQSTANQVQATAQLNLPSHLPLPASPVVHIGPVQQSALVSPGQQIVSPSHQQYSSLQSSPIPIASPPPMSTSPPAQIPPLPLQSMQSLQVQPEILSQGQVLVQNALVSEEELPAAEALVQLPFQTLPPPQTVAVNLQVQPPAPVDPPVVYQVEDVCEEEMPEESDECVRMDRTPPPPTLSPAAITVGRGEDLTSDILC

SEQ ID NO: 775538 - protein, 462 aa, Homo sapiens
MYLRAQMLIFTPATTVAAVQSDIPVVSSSSSSSCQSAATQVQNLTLRSQKLGVLSSSQNGPPKSTSQTQSLTICHNKTTVTSSKISQRDPSPESNKKGESPSLESRSTAVTRTSSIHQLIAPASYSPIQPHSLIKHQQIPLHSPPSKVSHHQLILQQQQQQIQPITLQNSTQDPPPSQHCIPLQNHGLPPAPSNAQSQHCSPIQSHPSPLTVSPNQSQSAQQSVVVSPPPPHSPSQSPTIIIHPQALIQPHPLVSSALQPGPNLQQSTANQVQATAQLNLPSHLPLPASPVVHIGPVQQSALVSPGQQIVSPSHQQYSSLQSSPIPIASPPPMSTSPPAQIPPLPLQSMQSLQVQPEILSQGQVLVQNALVSEEELPAAEALVQLPFQTLPPPQTVAVNLQVQPPAPVDPPVVYQVEDVCEEEMPEESDECVRMDRTPPPPTLSPAAITVGRGEDLTSDILC

SEQ ID NO: 775539 - protein, 170 aa, Homo sapiens; identical to SEQ ID NO: 775536

SEQ ID NO: 775540 - protein, 143 aa, Homo sapiens
PPPTLSPAAITVGRGEDLTSEHPLLEQVELPAVASVRASVIKSPSDPSHVSVPPPPLLLPAATTGSNSTSMHSSIPSIENKPPQAIVKPQILTHVIEGFVIQEGLEPFPVSRSSLLIEQPVKKRPLLDNQVINSVCVQPELQN

SEQ ID NO: 775541 - protein, 423 aa, Homo sapiens
WQGGNQEDEEDEEEEEDEEDEDEEEDDDDEEVGSSAVFFFLSDKAFNPPVHNSLLLKKKIEMKGCVRFVFKLYSVFFCIVNSTASYSPIQPHSLIKHQQIPLHSPPSKVSHHQLILQQQQQQIQPITLQNSTQDPPPSQHCIPLQNHGLPPAPSNAQSQHCSPIQSHPSPLTVSPNQSQSAQQSVVVSPPPPHSPSQSPTIIIHPQALIQPHPLVSSALQPGPNLQQSTANQVQATAQLNLPSHLPLPASPVVHIGPVQQSALVSPGQQIVSPSHQQYSSLQSSPIPIASPPPMSTSPPAQIPPLPLQSMQSLQVQPEILSQGQVLVQNALVSEEELPAAEALVQLPFQTLPPPQTVAVNLQVQPPAPVDPPVVYQVEDVCEEEMPEESDECVRMDRTPPPPTLSPAAITVGRGEDLTSDILC

SEQ ID NO: 775542 - protein, 220 aa, Homo sapiens
MASAGSTARRAGSGSWHSERGEGRGARPQPTPSGSMQQANKVSLKATWTDAESKQPRWVAGEGVPAAGSENPAQRLPGGQGLERAGAEAAAREARRDRLGPGIASREVPRPWPRVASPLPRPPARRGPGIASREVPGPWPRVASPLPRPPASPCPTSQTTSVRRRLPSPGRAALPRSPRPALTPAPARSPTRRQSTRRRSGATTSCSQRLWATWNGCDSV

SEQ ID NO: 775543 - protein, 572 aa, Homo sapiens
MASAGSTARRAGSGSWHSERGEGRGARPQPTPSGSMQQANKVSLKATWTDAESKQPSQPLPDLADHLSAQATALARPRRPASLTPPRADPSPSKESDQTAIDQTAIGSYYQLFAAAVGNVEWLRFCLNQSLREIPTDDKGFTAIHFAAQWGKLACLQVLVEEYKFPVDLLTNNSQTPLHLVIHRDNTTVALPCIYYLLEKGADLNAQTCNGSTPLHLAARDGLLDCVKVLVQSGANVHAQDAMGYKPIDFCKIWNHRACARFLKDAMWKKDKKDFAREMTKMKMFKSQLTLMEHNYLIEYQGQDAVCTSHLPFPPSHQRLSYGRTFLYYQTVDSFGEEGNCLSKEHKILREAAIRKWLHGKLHPGHSLVSNTKQARATALSKTPEQRESQRSRSFHPSVDARLQCIPQPTEMPKPIYRKPTVKRPTMWNVSNNPARPPTTQISHSQGIRLGVHPDPTPEHDFSSFLEVRPDGHGGARLHTVDGHWVAPVPRLPFEGALRMLYPRVWPYRMKVPQGFYPISMREVPRKRHLGDNTFWTDTLAMNLRDTFDEAFLAAVRSHQGLPTLPSPQTNP

SEQ ID NO: 775544 - protein, 379 aa, Homo sapiens
MGFTAIHFAAQWGKLACLQVLVEEYKFPVDLLTNNSQTPLHLVIHRDNTTVALPCIYYLLEKGADLNAFLKDAMWKKDKKDFAREMTKMKMFKSQLTLMEHNYLMSIKVKDAVCTSHLPFPPSHQRLSYGRTFLYYQTVDSFGEEGNCLSKEHKILREAAIRKWLHGKLHPGHSLVSNTKQARATALSKTPEQRESQRSRSFHPSVDARLQCIPQPTEMPKPIYRKPTVKRPTMWNVSNNPARPPTTQISHSQGIRLGVHPDPTPEHDFSSFLEVRPDGHGGARLHTVDGHWVAPVPRLPFEGALRMLYPRVWPYRMKVPQGFYPISMREVPRKRHLGDNTFWTDTLAMNLRDTFDEAFLAAVRSHQGLPTLPSPQTNP

SEQ ID NO: 775545 - protein, 148 aa, Homo sapiens
MEKVVSPIGTPAPIRQVLLPSDSDFPSHQTQSFPHPSDCGFRKLQPQDLLAQKQRAAVLHDSLVPSVVAERAQNSQRSCYQKVAPRQAAPRPLSGLQYQASPGHRPLQDPRATGIAAFQELPPLCGCTPAMHSTAHGDAQAHLQEAHG

SEQ ID NO: 775546 - protein, 483 aa, Homo sapiens
MASAGSTARRAGSGSWHSERGEGRGARPQPTPSGSMQQANKVSLKATWTDAESKQPSPSKESDQTAIDQTAIGSYYQLFAAAVGNVEWLRFCLNQSLREIPTDDKGFTAIHFAAQWGKLACLQVLVEEYKFPVDLLTNNSQTPLHLVIHRDNTTVALPCIYYLLEKGADLNAFLKDAMWKKDKKDFAREMTKMKMFKSQLTLMEHNYLIEYQGQDAVCTSHLPFPPSHQRLSYGRTFLYYQTVDSFGEEGNCLSKEHKILREAAIRKWLHGKLHPGHSLVSNTKQARATALSKTPEQRESQRSRSFHPSVDARLQCIPQPTEMPKPIYRKPTVKRPTMWNVSNNPARPPTTQISHSQGIRLGVHPDPTPEHDFSSFLEVRPDGHGGARLHTVDGHWVAPVPRLPFEGALRMLYPRVWPYRMKVPQGFYPISMREVPRKRHLGDNTFWTDTLAMNLRDTFDEAFLAAVRSHQGLPTLPSPQTNP

SEQ ID NO: 775547 - protein, 329 aa, Homo sapiens
MTIYGRLRGGKDRARLSCCHRAWRASQLYPPYMTSQGPHFQEACPHQAIQSFLLSLSRVKDAVCTSHLPFPPSHQRLSYGRTFLYYQTVDSFGEEGNCLSKEHKILREAAIRKWLHGKLHPGHSLVSNTKQARATALSKTPEQRESQRSRSFHPSVDARLQCIPQPTEMPKPIYRKPTVKRPTMWNVSNNPARPPTTQISHSQGIRLGVHPDPTPEHDFSSFLEVRPDGHGGARLHTVDGHWVAPVPRLPFEGALRMLYPRVWPYRMKVPQGFYPISMREVPRKRHLGDNTFWTDTLAMNLRDTFDEAFLAAVRSHQGLPTLPSPQTNP

SEQ ID NO: 775548 - protein, 876 aa, Homo sapiens
MELITILEKTVSPDRLELEAAQKFLERAAVENLPTFLVELSRVLANPGNSQVARVAAGLQIKNSLTSKDPDIKAQYQQRWLAIDANARREVKNYVLQTLGTETYRPSSASQCVAGIACAEIPVNQWPELIPQLVANVTNPNSTEHMKESTLEAIGYICQDIDPEQLQDKSNEILTAIIQGMRKEEPSNNVKLAATNALLNSLEFTKANFDKESERHFIMQVVCEATQCPDTRVRVAALQNLVKIMSLYYQYMETYMGPALFAITIEAMKSDIDEVALQGIEFWSNVCDEEMDLAIEASEAAEQGRPPEHTSKFYAKGALQYLVPILTQTLTKQDENDDDDDWNPCKAAGVCLMLLATCCEDDIVPHVLPFIKEHIKNPDWRYRDAAVMAFGCILEGPEPSQLKPLVIQAMPTLIELMKDPSVVVRDTAAWTVGRICELLPEAAINDVYLAPLLQCLIEGLSAEPRVASNVCWAFSSLAEAAYEAADVADDQEEPATYCLSSSFELIVQKLLETTDRPDGHQNNLRSSAYESLMEIVKNSAKDCYPAVQKTTLVIMERLQQVLQMESHIQSTSDRIQFNDLQSLLCATLQNVLRKVQHQDALQISDVVMASLLRMFQSTAGSGGVQEDALMAVSTLVEVLGGEFLKYMEAFKPFLGIGLKNYAEYQVCLAAVGLVGDLCRALQSNIIPFCDEVMQLLLENLGNENVHRSVKPQILSVFGDIALAIGGEFKKYLEVVLNTLQQASQAQVDKSDYDMVDYLNELRESCLEAYTGIVQGLKGDQENVHPDVMLVQPRVEFILSFIDHIAGDEDHTDGVVACAAGLIGDLCTAFGKDVLKLVEARPMIHELLTEGRRSKTNKAKTLATWATKELRKLKNQA

SEQ ID NO: 775549 - protein, 272 aa, Homo sapiens
RRWRPGVNRTRRDAAVMAFGCILEGPEPSQLKPLVIQAMPTLIELMKDPSVVVRDTAAWTVGRICELLPEAAINDVYLAPLLQCLIEGLSAEPRVASNVCWAFSSLAEAAYEAADVADDQEEPATYCLSSSFELIVQKLLETTDRPDGHQNNLRSSAYESLMEIVKNSAKDCYPAVQKTTLVIMERLQQVLQMESHIQSTSDRIQFNDLQSLLCATLQNVLRKVQHQDALQISDVVMASLLRMFQSTAGSGGVQEDALMAVSTLVEVGGEPK

SEQ ID NO: 775550 - protein, 208 aa, Homo sapiens
SLAPSLRAASHSQPPFLLSPSASRAPARSELPPGSLPRRQQPIWREEVREEERKGSRTDYPDRAGEWVCGDPCVYVDSDISMVVCRQRTHSVILSFPNIHASVHTSITSQVLSNTMGDLPVGVLRLSSQWLQHQAWFFSYPQYFGAHVARVHGLIDLRSPPISVQQHSWTSIGHSLLLISRHDPSPHAVTLSPPIRSQTDTSYYFNTV

SEQ ID NO: 775551 - protein, 289 aa, Homo sapiens
PTRRTSYTGYAHPNRINGLADWALVLPRYNQKPSLLKPLVIQAMPTLIELMKDPSVVVRDTAAWTVGRICELLPEAAINDVYLAPLLQCLIEGLSAEPRVASNVCWAFSSLAEAAYEAADVADDQEEPATYCLSSSFELIVQKLLETTDRPDGHQNNLRSSAYESLMEIVKNSAKDCYPAVQKTTLVIMERLQQVLQMELRVTYSTRHIRIRNPSQWTFSPEHLSKSFRNVFEEVQTSRWLRKSQNGGIGYPGYEDVPKTQITAIDEDTKMQIGGTTGECEERYPKNEG

SEQ ID NO: 775552 - protein, 104 aa, Homo sapiens
MKKARKQLNQQERNHDRVNTDNEGKQQRHTEGGKKTRIDTTEDQLRDRDKRIPEGYKSEMAKENPKGQLSRQSYKEKTQTDKGGQPVGGPKEEERNKDTSEKYP

SEQ ID NO: 775553 - protein, 876 aa, Homo sapiens; identical to SEQ ID NO: 775548

SEQ ID NO: 775554 - protein, 876 aa, Homo sapiens; identical to SEQ ID NO: 775548

SEQ ID NO: 775555 - protein, 876 aa, Homo sapiens; identical to SEQ ID NO: 775548

SEQ ID NO: 775556 - protein, 876 aa, Homo sapiens; identical to SEQ ID NO: 775548

SEQ ID NO: 775557 - protein, 876 aa, Homo sapiens; identical to SEQ ID NO: 775548

SEQ ID NO: 775558 - protein, 876 aa, Homo sapiens; identical to SEQ ID NO: 775548

SEQ ID NO: 775559 - protein, 876 aa, Homo sapiens; identical to SEQ ID NO: 775548

SEQ ID NO: 775560 - protein, 829 aa, Homo sapiens
MYPRHCAFAAGLQIKNSLTSKDPDIKAQYQQRWLAIDANARREVKNYVLQTLGTETYRPSSASQCVAGIACAEIPVNQWPELIPQLVANVTNPNSTEHMKESTLEAIGYICQDIDPEQLQDKSNEILTAIIQGMRKEEPSNNVKLAATNALLNSLEFTKANFDKESERHFIMQVVCEATQCPDTRVRVAALQNLVKIMSLYYQYMETYMGPALFAITIEAMKSDIDEVALQGIEFWSNVCDEEMDLAIEASEAAEQGRPPEHTSKFYAKGALQYLVPILTQTLTKQDENDDDDDWNPCKAAGVCLMLLATCCEDDIVPHVLPFIKEHIKNPDWRYRDAAVMAFGCILEGPEPSQLKPLVIQAMPTLIELMKDPSVVVRDTAAWTVGRICELLPEAAINDVYLAPLLQCLIEGLSAEPRVASNVCWAFSSLAEAAYEAADVADDQEEPATYCLSSSFELIVQKLLETTDRPDGHQNNLRSSAYESLMEIVKNSAKDCYPAVQKTTLVIMERLQQVLQMESHIQSTSDRIQFNDLQSLLCATLQNVLRKVQHQDALQISDVVMASLLRMFQSTAGSGGVQEDALMAVSTLVEVLGGEFLKYMEAFKPFLGIGLKNYAEYQVCLAAVGLVGDLCRALQSNIIPFCDEVMQLLLENLGNENVHRSVKPQILSVFGDIALAIGGEFKKYLEVVLNTLQQASQAQVDKSDYDMVDYLNELRESCLEAYTGIVQGLKGDQENVHPDVMLVQPRVEFILSFIDHIAGDEDHTDGVVACAAGLIGDLCTAFGKDVLKLVEARPMIHELLTEGRRSKTNKAKTLATWATKELRKLKNQA

SEQ ID NO: 775561 - protein, 696 aa, Homo sapiens
MRKEEPSNNVKLAATNALLNSLEFTKANFDKESERHFIMQVVCEATQCPDTRVRVAALQNLVKIMSLYYQYMETYMGPALFAITIEAMKSDIDEVALQGIEFWSNVCDEEMDLAIEASEAAEQGRPPEHTSKFYAKGALQYLVPILTQTLTKQDENDDDDDWNPCKAAGVCLMLLATCCEDDIVPHVLPFIKEHIKNPDWRYRDAAVMAFGCILEGPEPSQLKPLVIQAMPTLIELMKDPSVVVRDTAAWTVGRICELLPEAAINDVYLAPLLQCLIEGLSAEPRVASNVCWAFSSLAEAAYEAADVADDQEEPATYCLSSSFELIVQKLLETTDRPDGHQNNLRSSAYESLMEIVKNSAKDCYPAVQKTTLVIMERLQQVLQMESHIQSTSDRIQFNDLQSLLCATLQNVLRKVQHQDALQISDVVMASLLRMFQSTAGSGGVQEDALMAVSTLVEVLGGEFLKYMEAFKPFLGIGLKNYAEYQVCLAAVGLVGDLCRALQSNIIPFCDEVMQLLLENLGNENVHRSVKPQILSVFGDIALAIGGEFKKYLEVVLNTLQQASQAQVDKSDYDMVDYLNELRESCLEAYTGIVQGLKGDQENVHPDVMLVQPRVEFILSFIDHIAGDEDHTDGVVACAAGLIGDLCTAFGKDVLKLVEARPMIHELLTEGRRSKTNKAKTLATWATKELRKLKNQA

SEQ ID NO: 775562 - protein, 731 aa, Homo sapiens
LRLVRAGVEFGRGQDIDPEQLQDKSNEILTAIIQGMRKEEPSNNVKLAATNALLNSLEFTKANFDKESERHFIMQVVCEATQCPDTRVRVAALQNLVKIMSLYYQYMETYMGPALFAITIEAMKSDIDEVALQGIEFWSNVCDEEMDLAIEASEAAEQGRPPEHTSKFYAKGALQYLVPILTQTLTKQDENDDDDDWNPCKAAGVCLMLLATCCEDDIVPHVLPFIKEHIKNPDWRYRDAAVMAFGCILEGPEPSQLKPLVIQAMPTLIELMKDPSVVVRDTAAWTVGRICELLPEAAINDVYLAPLLQCLIEGLSAEPRVASNVCWAFSSLAEAAYEAADVADDQEEPATYCLSSSFELIVQKLLETTDRPDGHQNNLRSSAYESLMEIVKNSAKDCYPAVQKTTLVIMERLQQVLQMESHIQSTSDRIQFNDLQSLLCATLQNVLRKVQHQDALQISDVVMASLLRMFQSTAGSGGVQEDALMAVSTLVEVLGGEFLKYMEAFKPFLGIGLKNYAEYQVCLAAVGLVGDLCRALQSNIIPFCDEVMQLLLENLGNENVHRSVKPQILSVFGDIALAIGGEFKKYLEVVLNTLQQASQAQVDKSDYDMVDYLNELRESCLEAYTGIVQGLKGDQENVHPDVMLVQPRVEFILSFIDHIAGDEDHTDGVVACAAGLIGDLCTAFGKDVLKLVEARPMIHELLTEGRRSKTNKAKTLATWATKELRKLKNQA

SEQ ID NO: 775563 - protein, 734 aa, Homo sapiens
RKSLAGRSRFGIQSAGRSSHSQLLDSWPVKILTAIIQGMRKEEPSNNVKLAATNALLNSLEFTKANFDKESERHFIMQVVCEATQCPDTRVRVAALQNLVKIMSLYYQYMETYMGPALFAITIEAMKSDIDEVALQGIEFWSNVCDEEMDLAIEASEAAEQGRPPEHTSKFYAKGALQYLVPILTQTLTKQDENDDDDDWNPCKAAGVCLMLLATCCEDDIVPHVLPFIKEHIKNPDWRYRDAAVMAFGCILEGPEPSQLKPLVIQAMPTLIELMKDPSVVVRDTAAWTVGRICELLPEAAINDVYLAPLLQCLIEGLSAEPRVASNVCWAFSSLAEAAYEAADVADDQEEPATYCLSSSFELIVQKLLETTDRPDGHQNNLRSSAYESLMEIVKNSAKDCYPAVQKTTLVIMERLQQVLQMESHIQSTSDRIQFNDLQSLLCATLQNVLRKVQHQDALQISDVVMASLLRMFQSTAGSGGVQEDALMAVSTLVEVLGGEFLKYMEAFKPFLGIGLKNYAEYQVCLAAVGLVGDLCRALQSNIIPFCDEVMQLLLENLGNENVHRSVKPQILSVFGDIALAIGGEFKKYLEVVLNTLQQASQAQVDKSDYDMVDYLNELRESCLEAYTGIVQGLKGDQENVHPDVMLVQPRVEFILSFIDHIAGDEDHTDGVVACAAGLIGDLCTAFGKDVLKLVEARPMIHELLTEGRRSKTNKAKTLATWATKELRKLKNQA

SEQ ID NO: 775564 - protein, 876 aa, Homo sapiens; identical to SEQ ID NO: 775548

SEQ ID NO: 775565 - protein, 927 aa, Homo sapiens
MELITILEKTVSPDRLELEAAQKFLERAAVENLPTFLVELSRVLANPGNSQVARVAAGLQIKNSLTSKDPDIKAQYQQRWLAIDANARREVKNYVLQTLGTETYRPSSASQCVAGIACAEIPVNQWPELIPQLVANVTNPNSTEHMKESTLEAIGYICQDIDPEQLQDKSNEILTAIIQGMRKEEPSNNVKLAATNALLNSLEFTKANFDKESERHFIMQVVCEATQCPDTRVRVAALQNLVKIMSLYYQYMETYMGPALFAITIEAMKSDIDEVALQGIEFWSNVCDEEMDLAIEASEAAEQGRPPEHTSKFYAKGALQYLVPILTQTLTKQDENDDDDDWNPCKAAGVCLMLLATCCEDDIVPHVLPFIKEHIKNPDWRYRDAAVMAFGCILEGPEPSQLKPLVIQAMPTLIELMKDPSVVVRDTAAWTVGRICELLPEAAINDVYLAPLLQCLIEGLSAEPRVASNVCWAFSSLAEAAYEAADVADDQEEPATYCLSSSFELIVQKLLETTDSRDRVSPCWTGWSRSPDPRDPPAFAPQSARITGMSHHARPTTIFLYRMKNLGPDGHQNNLRSSAYESLMEIVKNSAKDCYPAVQKTTLVIMERLQQVLQMESHIQSTSDRIQFNDLQSLLCATLQNVLRKVQHQDALQISDVVMASLLRMFQSTAGSGGVQEDALMAVSTLVEVLGGEFLKYMEAFKPFLGIGLKNYAEYQVCLAAVGLVGDLCRALQSNIIPFCDEVMQLLLENLGNENVHRSVKPQILSVFGDIALAIGGEFKKYLEVVLNTLQQASQAQVDKSDYDMVDYLNELRESCLEAYTGIVQGLKGDQENVHPDVMLVQPRVEFILSFIDHIAGDEDHTDGVVACAAGLIGDLCTAFGKDVLKLVEARPMIHELLTEGRRSKTNKAKTLATWATKELRKLKNQA

SEQ ID NO: 775566 - protein, 805 aa, Homo sapiens
MELITILEKTVSPDRLELEAAQKFLERAAVENLPTFLVELSRVLANPGNSQVARVAAGLQIKNSLTSKDPDIKAQYQQRWLAIDANARREVKNYVLQTLGTETYRPSSASQCVAGIACAEIPVNQWPELIPQLVANVTNPNSTEHMKESTLEAIGYICQDIDPEQLQDKSNEILTAIIQGMRKEEPSNNVKLAATNALLNSLEFTKANFDKESERHFIMQVVCEATQCPDTRVRVAALQNLVKIMSLYYQYMETYMGPALFADENDDDDDWNPCKAAGVCLMLLATCCEDDIVPHVLPFIKEHIKNPDWRYRDAAVMAFGCILEGPEPSQLKPLVIQAMPTLIELMKDPSVVVRDTAAWTVGRICELLPEAAINDVYLAPLLQCLIEGLSAEPRVASNVCWAFSSLAEAAYEAADVADDQEEPATYCLSSSFELIVQKLLETTDRPDGHQNNLRSSAYESLMEIVKNSAKDCYPAVQKTTLVIMERLQQVLQMESHIQSTSDRIQFNDLQSLLCATLQNVLRKVQHQDALQISDVVMASLLRMFQSTAGSGGVQEDALMAVSTLVEVLGGEFLKYMEAFKPFLGIGLKNYAEYQVCLAAVGLVGDLCRALQSNIIPFCDEVMQLLLENLGNENVHRSVKPQILSVFGDIALAIGGEFKKYLEVVLNTLQQASQAQVDKSDYDMVDYLNELRESCLEAYTGIVQGLKGDQENVHPDVMLVQPRVEFILSFIDHIAGDEDHTDGVVACAAGLIGDLCTAFGKDVLKLVEARPMIHELLTEGRRSKTNKAKTLATWATKELRKLKNQA

SEQ ID NO: 775567 - protein, 775 aa, Homo sapiens
MELITILEKTVSPDRLELEAAQKFLERAAVENLPTFLVELSRVLANPGNSQVARVAAGLQIKNSLTSKDPDIKAQYQQRWLAIDANARREVKNYVLQTLGTETYRPSSASQCVAGIACAEIPVNQWPELIPQLVANVTNPNSTEHMKESTLEAIGYICQDIDPEQLQDKSNEILTAIIQGMRKEEPSNNVKLAATNALLNSLEFTKANFDKESERHFIMQVVCEATQCPDTRDENDDDDDWNPCKAAGVCLMLLATCCEDDIVPHVLPFIKEHIKNPDWRYRDAAVMAFGCILEGPEPSQLKPLVIQAMPTLIELMKDPSVVVRDTAAWTVGRICELLPEAAINDVYLAPLLQCLIEGLSAEPRVASNVCWAFSSLAEAAYEAADVADDQEEPATYCLSSSFELIVQKLLETTDRPDGHQNNLRSSAYESLMEIVKNSAKDCYPAVQKTTLVIMERLQQVLQMESHIQSTSDRIQFNDLQSLLCATLQNVLRKVQHQDALQISDVVMASLLRMFQSTAGSGGVQEDALMAVSTLVEVLGGEFLKYMEAFKPFLGIGLKNYAEYQVCLAAVGLVGDLCRALQSNIIPFCDEVMQLLLENLGNENVHRSVKPQILSVFGDIALAIGGEFKKYLEVVLNTLQQASQAQVDKSDYDMVDYLNELRESCLEAYTGIVQGLKGDQENVHPDVMLVQPRVEFILSFIDHIAGDEDHTDGVVACAAGLIGDLCTAFGKDVLKLVEARPMIHELLTEGRRSKTNKAKTLATWATKELRKLKNQA

SEQ ID NO: 775568 - protein, 509 aa, Homo sapiens
LGSEAGCIKNPDWRYRDAAVMAFGCILEGPEPSQLKPLVIQAMPTLIELMKDPSVVVRDTAAWTVGRICELLPEAAINDVYLAPLLQCLIEGLSAEPRVASNVCWAFSSLAEAAYEAADVADDQEEPATYCLSSSFELIVQKLLETTDRPDGHQNNLRSSAYESLMEIVKNSAKDCYPAVQKTTLVIMERLQQVLQMESHIQSTSDRIQFNDLQSLLCATLQNVLRKVQHQDALQISDVVMASLLRMFQSTAGSGGVQEDALMAVSTLVEVLGGEFLKYMEAFKPFLGIGLKNYAEYQVCLAAVGLVGDLCRALQSNIIPFCDEVMQLLLENLGNENVHRSVKPQILSVFGDIALAIGGEFKKYLEVVLNTLQQASQAQVDKSDYDMVDYLNELRESCLEAYTGIVQGLKGDQENVHPDVMLVQPRVEFILSFIDHIAGDEDHTDGVVACAAGLIGDLCTAFGKDVLKLVEARPMIHELLTEGRRSKTNKAKTLATWATKELRKLKNQA

SEQ ID NO: 775569 - protein, 460 aa, Homo sapiens
AEIEQYRLQEGAAWTVGRICELLPEAAINDVYLAPLLQCLIEGLSAEPRVASNVCWAFSSLAEAAYEAADVADDQEEPATYCLSSSFELIVQKLLETTDRPDGHQNNLRSSAYESLMEIVKNSAKDCYPAVQKTTLVIMERLQQVLQMESHIQSTSDRIQFNDLQSLLCATLQNVLRKVQHQDALQISDVVMASLLRMFQSTAGSGGVQEDALMAVSTLVEVLGGEFLKYMEAFKPFLGIGLKNYAEYQVCLAAVGLVGDLCRALQSNIIPFCDEVMQLLLENLGNENVHRSVKPQILSVFGDIALAIGGEFKKYLEVVLNTLQQASQAQVDKSDYDMVDYLNELRESCLEAYTGIVQGLKGDQENVHPDVMLVQPRVEFILSFIDHIAGDEDHTDGVVACAAGLIGDLCTAFGKDVLKLVEARPMIHELLTEGRRSKTNKAKTLATWATKELRKLKNQA

SEQ ID NO: 775570 - protein, 892 aa, Homo sapiens
MELITILEKTVSPDRLELEAAQKFLERAAVENLPTFLVELSRVLANPGNSQVARVAAGLQIKNSLTSKDPDIKAQYQQRWLAIDANARREVKNYVLQTLGTETYRPSSASQCVAGIACAEIPVNQWPELIPQLVANVTNPNSTEHMKESTLEAIGYICQDIDPEQLQDKSNEILTAIIQGMRKEEPSNNVKLAATNALLNSLEFTKANFDKESERHFIMQVVCEATQCPDTRVRVAALQNLVKIMSLYYQYMETYMGPALFAITIEAMKSDIDEVALQGIEFWSNVCDEEMDLAIEASEAAEQGRPPEHTSKFYAKGALQYLVPILTQTLTKQDENDDDDDWNPCKAAGVCLMLLATCCEDDIVPHVLPFIKEHIKNPDWRYRDAAVMAFGCILEGPEPSQLKPLVIQAMPTLIELMKDPSVVVRDTAAWTVGRICELLPEAAINDVYLAPLLQCLIEGLSAEPRVASNVCWAFSSLAEAAYEAADVADDQEEPATYCLSSSFELIVQKLLETTDRPDGHQNNLRSSAYESLMEIVKNSAKDCYPAVQKTTLVIMERLQQVLQMESHIQSTSDRIQFNDLQSLLCATLQNVLRKVQHQDALQISDVVMASLLRMFQSTAGSGGVQEDALMAVSTLVEVLGGEFLKYMEAFKPFLGIGLKNYAEYQVCLAAVGLVGDLCRALQSNIIPFCDEVMQLLLENLGNENVHRSVKPQILSVFGDIALAIGGEFKKYLEVVLNTLQQASQAQVDKSDYDMVDYLNELRESCLEAYTGIVQGLKGDQENVHPDVMLVQPRVEFILSFIDHIAGDEDHTDGVVACAAGLIGDLCTAFGKDVLKLVEARPMIHELLTEGRRSKTNKAKTLATWATKELRNWTPAGLVLGVYWALGIPFQPG

SEQ ID NO: 775571 - protein, 380 aa, Homo sapiens
YGLGEAGVYRPREAPERLQTPDGHQNNLRSSAYESLMEIVKNSAKDCYPAVQKTTLVIMERLQQVLQMESHIQSTSDRIQFNDLQSLLCATLQNVLRKVQHQDALQISDVVMASLLRMFQSTAGSGGVQEDALMAVSTLVEVLGGEFLKYMEAFKPFLGIGLKNYAEYQVCLAAVGLVGDLCRALQSNIIPFCDEVMQLLLENLGNENVHRSVKPQILSVFGDIALAIGGEFKKYLEVVLNTLQQASQAQVDKSDYDMVDYLNELRESCLEAYTGIVQGLKGDQENVHPDVMLVQPRVEFILSFIDHIAGDEDHTDGVVACAAGLIGDLCTAFGKDVLKLVEARPMIHELLTEGRRSKTNKAKTLATWATKELRKLKNQA

SEQ ID NO: 775572 - protein, 797 aa, Homo sapiens
MELITILEKTVSPDRLELEAAQKFLERAAVENLPTFLVELSRVLANPGNSQVARVAAGLQIKNSLTSKDPDIKAQYQQRWLAIDANARREVKNYVLQTLGTETYRPSSASQCVAGIACAEIPVNQWPELIPQLVANVTNPNSTEHMKESTLEAIGYICQDIDPEQLQDKSNEILTAIIQGMRKEEPSNNVKLAATNALLNSLEFTKANFDKESERHFIMQVVCEATQCPDTRVRVAALQNLVKIMSLYYQYMETYMGPALFAITIEAMKSDIDEVALQGIEFWSNVCDEEMDLAIEASEAAEQGRPPEHTSKFYAKGALQYLVPILTQTLTKQDENDDDDDWNPCKAAGVCLMLLATCCEDDIVPHVLPFIKEHIKNPDWRYRDAAVMAFGCILEGPEPSQLKPLVIQAMPTLIELMKDPSVVVRDTAAWTVGRICELLPEAAINDVYLAPLLQCLIEGLSAEPRVASNVCWAFSSLAEAAYEAADVADDQEEPATYCLSSSFELIVQKLLETTDRPDGHQNNLRSSAYESLMEIVKNSAKDCYPAVQKTTLVIMERLQQVLQMESHIQSTSDRIQFNDLQSLLCATLQNVLRKVQHQDALQISDVVMASLLRMFQSTAGSGGVQEDALMAVSTLVEVLGGEFLKYMEAFKPFLGIGLKNYAEYQVCLAAVGLVGDLCRALQSNIIPFCDEVMQLLLENLGNENVHRSVKPQILSVFGDIALAIGGEFKKYLEVVLNTLQQASQAQVDKSDYDMVDYLNELRESCLEAYTGIVQGLKGDQENVHPRIVDCLVTNPRS

SEQ ID NO: 775573 - protein, 258 aa, Homo sapiens
KVNIGYMSWGYRTRRHWWNMLGGEFLKYMEAFKPFLGIGLKNYAEYQVCLAAVGLVGDLCRALQSNIIPFCDEVMQLLLENLGNENVHRSVKPQILSVFGDIALAIGGEFKKYLEVVLNTLQQASQAQVDKSDYDMVDYLNELRESCLEAYTGIVQGLKGDQENVHPDVMLVQPRVEFILSFIDHIAGDEDHTDGVVACAAGLIGDLCTAFGKDVLKLVEARPMIHELLTEGRRSKTNKAKTLATWATKELRKLKNQA

SEQ ID NO: 775574 - protein, 836 aa, Homo sapiens
  misc_feature (820)..(820): Xaa can be any naturally occurring amino acid
MELITILEKTVSPDRLELEAAQKFLERAAVENLPTFLVELSRVLANPGNSQVARVAAGLQIKNSLTSKDPDIKAQYQQRWLAIDANARREVKNYVLQTLGTETYRPSSASQCVAGIACAEIPVNQWPELIPQLVANVTNPNSTEHMKESTLEAIGYICQDIDPEQLQDKSNEILTAIIQGMRKEEPSNNVKLAATNALLNSLEFTKANFDKESERHFIMQVVCEATQCPDTRVRVAALQNLVKIMSLYYQYMETYMGPALFAITIEAMKSDIDEVALQGIEFWSNVCDEEMDLAIEASEAAEQGRPPEHTSKFYAKGALQYLVPILTQTLTKQDENDDDDDWNPCKAAGVCLMLLATCCEDDIVPHVLPFIKEHIKNPDWRYRDAAVMAFGCILEGPEPSQLKPLVIQAMPTLIELMKDPSVVVRDTAAWTVGRICELLPEAAINDVYLAPLLQCLIEGLSAEPRVASNVCWAFSSLAEAAYEAADVADDQEEPATYCLSSSFELIVQKLLETTDRPDGHQNNLRSSAYESLMEIVKNSAKDCYPAVQKTTLVIMERLQQVLQMESHIQSTSDRIQFNDLQSLLCATLQNVLRKVQHQDALQISDVVMASLLRMFQSTAGSGGVQEDALMAVSTLVEVLGGEFLKYMEAFKPFLGIGLKNYAEYQVCLAAVGLVGDLCRALQSNIIPFCDEVMQLLLENLGNENVHRSVKPQILSVFGDIALAIGGEFKKYLEVVLNTLQQASQAQVDKSDYDMVDYLNESGELHGLTTEEEFVEGIYKVEIDTKSYWKALGISPFHEHAEVVFTANDSGPRRYTIAALXSPYSYSTTAVVTNPKE

SEQ ID NO: 775575 - protein, 285 aa, Homo sapiens
VTVICGVCVGNGARGMISSFVCEVRKGFWNQGVIDVIWSYRNTVEGVALDTVPASGESDWVSVFSHREEEWLMQVCLAAVGLVGDLCRALQSNIIPFCDEVMQLLLENLGNENVHRSVKPQILSVFGDIALAIGGEFKKYLEVVLNTLQQASQAQVDKSDYDMVDYLNELRESCLEAYTGIVQGLKGDQENVHPDVMLVQPRVEFILSFIDHIAGDEDHTDGVVACAAGLIGDLCTAFGKDVLKLVEARPMIHELLTEGRRSKTNKAKTLATWATKELRKLKNQA

SEQ ID NO: 775576 - protein, 641 aa, Homo sapiens
MELITILEKTVSPDRLELEAAQKFLERAAVENLPTFLVELSRVLANPGNSQVARVAAGLQIKNSLTSKDPDIKAQYQQRWLAIDANARREVKNYVLQTLGTETYRPSSASQCVAGIACAEIPVNQWPELIPQLVANVTNPNSTEHMKESTLEAIGYICQDIDPEQLQDKSNEILTAIIQGMRKEEPSNNVKLAATNALLNSLEFTKANFDKESERHFIMQVVCEATQCPDTRVRVAALQNLVKIMSLYYQYMETYMGPALFAITIEAMKSDIDEVALQGIEFWSNVCDEEMDLAIEASEAAEQGRPPEHTSKFYAKGALQYLVPILTQTLTKQDENDDDDDWNPCKAAGVCLMLLATCCEDDIVPHVLPFIKEHIKNPDWRYRDAAVMAFGCILEGPEPSQLKPLVIQAMPTLIELMKDPSVVVRDTAAWTVGRICELLPEAAINDVYLAPLLQCLIEGLSAEPRVASNVCWAFSSLAEAAYEAADVADDQEEPATYCLSSSFELIVQKLLETTDRPDGHQNNLRSSAYESLMEIVKNSAKDCYPAVQKTTLVIMERLQQVLQMESHIQSTSDRIQFNDLQSLLCATLQNVLRKVQHQDALQISDVVMASLLRMFQSTAGSGGVQEDALMAVSTLVEVWGG

SEQ ID NO: 775577 - protein, 151 aa, Homo sapiens
LGQGRVLIGRGNTLQQVSQAQVDKSDYDMVDYLNELRESCLEAYTGIVQGLKGDQENVHPDVMLVQPRVEFILSFIDHIAGDEDHTDGVVACAAGLIGDLCTAFGKDVLKLVEARPMIHELLTEGRRSKTNKAKTLATWATKELRKLKNQA

SEQ ID NO: 775578 - protein, 642 aa, Homo sapiens
MELITILEKTVSPDRLELEAAQKFLERAAVENLPTFLVELSRVLANPGNSQVARVAAGLQIKNSLTSKDPDIKAQYQQRWLAIDANARREVKNYVLQTLGTETYRPSSASQCVAGIACAEIPVNQWPELIPQLVANVTNPNSTEHMKESTLEAIGYICQDIDPEQLQDKSNEILTAIIQGMRKEEPSNNVKLAATNALLNSLEFTKANFDKESERHFIMQVVCEATQCPDTRVRVAALQNLVKIMSLYYQYMETYMGPALFAITIEAMKSDIDEVALQGIEFWSNVCDEEMDLAIEASEAAEQGRPPEHTSKFYAKGALQYLVPILTQTLTKQDENDDDDDWNPCKAAGVCLMLLATCCEDDIVPHVLPFIKEHIKNPDWRYRDAAVMAFGCILEGPEPSQLKPLVIQAMPTLIELMKDPSVVVRDTAAWTVGRICELLPEAAINDVYLAPLLQCLIEGLSAEPRVASNVCWAFSSLAEAAYEAADVADDQEEPATYCLSSSFELIVQKLLETTDRPDGHQNNLRSSAYESLMEIVKNSAKDCYPAVQKTTLVIMERLQQVLQMESHIQSTSDRIQFNDLQSLLCATLQESASGGHLSCLALWGVAPLVFQPRSAVKEPVVPAGGGPPRGLPAWVTPPSGAP

SEQ ID NO: 775579 - protein, 609 aa, Homo sapiens
MELITILEKTVSPDRLELEAAQKFLERAAVENLPTFLVELSRVLANPGNSQVARVAAGLQIKNSLTSKDPDIKAQYQQRWLAIDANARREVKNYVLQTLGTETYRPSSASQCVAGIACAEIPVNQWPELIPQLVANVTNPNSTEHMKESTLEAIGYICQDIDPEQLQDKSNEILTAIIQGMRKEEPSNNVKLAATNALLNSLEFTKANFDKESERHFIMQVVCEATQCPDTRVRVAALQNLVKIMSLYYQYMETYMGPALFAITIEAMKSDIDEVALQGIEFWSNVCDEEMDLAIEASEAAEQGRPPEHTSKFYAKGALQYLVPILTQTLTKQDENDDDDDWNPCKAAGVCLMLLATCCEDDIVPHVLPFIKEHIKNPDWRYRDAAVMAFGCILEGPEPSQLKPLVIQAMPTLIELMKDPSVVVRDTAAWTVGRICELLPEAAINDVYLAPLLQCLIEGLSAEPRVASNVCWAFSSLAEAAYEAADVADDQEEPATYCLSSSFELIVQKLLETTDRPDGHQNNLRSSAYESLMEIVKNSAKDCYPAVQKTTLVIMERLQQVLQMESHIQSTSDRIQFNDLQSLLCATLQGMVVPYDLITPGWRIISISV

SEQ ID NO: 775580 - protein, 106 aa, Homo sapiens
MSHRTRPIPSLSFIADVMLVQPRVEFILSFIDHIAGDEDHTDGVVACAAGLIGDLCTAFGKDVLKLVEARPMIHELLTEGRRSKTNKAKTLATWATKELRKLKNQA

SEQ ID NO: 775581 - protein, 119 aa, Homo sapiens
DGYGVGWQAQSPGADEGNHGGDQENVHPDVMLVQPRVEFILSFIDHIAGDEDHTDGVVACAAGLIGDLCTAFGKDVLKLVEARPMIHELLTEGRRSKTNKAKTLATWATKELRKLKNQA

SEQ ID NO: 775582 - protein, 518 aa, Homo sapiens
MELITILEKTVSPDRLELEAAQKFLERAAVENLPTFLVELSRVLANPGNSQVARVAAGLQIKNSLTSKDPDIKAQYQQRWLAIDANARREVKNYVLQTLGTETYRPSSASQCVAGIACAEIPVNQWPELIPQLVANVTNPNSTEHMKESTLEAIGYICQDIDPEQLQDKSNEILTAIIQGMRKEEPSNNVKLAATNALLNSLEFTKANFDKESERHFIMQVVCEATQCPDTRVRVAALQNLVKIMSLYYQYMETYMGPALFAITIEAMKSDIDEVALQGIEFWSNVCDEEMDLAIEASEAAEQGRPPEHTSKFYAKGALQYLVPILTQTLTKQDENDDDDDWNPCKAAGVCLMLLATCCEDDIVPHVLPFIKEHIKNPDWRYRDAAVMAFGCILEGPEPSQLKPLVIQAMPTLIELMKDPSVVVRDTAAWTVGRICELLPEAAINDVYLAPLLQCLIEGLSAEPRVASNVCWAFSSLAEAAYEAADVADDQEEPATYCLSSSFELIVKKSSRLRGDPL

SEQ ID NO: 775583 - protein, 114 aa, Homo sapiens
QKGRKDNDSHVYAVIEDTMVYGHLLQDSSGSFLQPEVDTYRPFQGTMGVCPPSPPTICSRAPTAKLATEEPPPRSPPESESEPYTFSHPNNGDVSSKDTDIPLLNTQEPMEPAE

SEQ ID NO: 775584 - protein, 491 aa, Homo sapiens
MELITILEKTVSPDRLELEAAQKFLERAAVENLPTFLVELSRVLANPGNSQVARVAAGLQIKNSLTSKDPDIKAQYQQRWLAIDANARREVKNYVLQTLGTETYRPSSASQCVAGIACAEIPVNQWPELIPQLVANVTNPNSTEHMKESTLEAIGYICQDIDPEQLQDKSNEILTAIIQGMRKEEPSNNVKLAATNALLNSLEFTKANFDKESERHFIMQVVCEATQCPDTRVRVAALQNLVKIMSLYYQYMETYMGPALFAITIEAMKSDIDEVALQGIEFWSNVCDEEMDLAIEASEAAEQGRPPEHTSKFYAKGALQYLVPILTQTLTKQDENDDDDDWNPCKAAGVCLMLLATCCEDDIVPHVLPFIKEHIKNPDWRYRDAAVMAFGCILEGPEPSQLKPLVIQAMPTLIELMKDPSVVVRDTAAWTVGRICELLPEAAINDVYLAPLLQCLIEGLSAEPRVASNVCWVRDFLAGEKRSLPAPLARK

SEQ ID NO: 775585 - protein, 418 aa, Homo sapiens
MELITILEKTVSPDRLELEAAQKFLERAAVENLPTFLVELSRVLANPGNSQVARVAAGLQIKNSLTSKDPDIKAQYQQRWLAIDANARREVKNYVLQTLGTETYRPSSASQCVAGIACAEIPVNQWPELIPQLVANVTNPNSTEHMKESTLEAIGYICQDIDPEQLQDKSNEILTAIIQGMRKEEPSNNVKLAATNALLNSLEFTKANFDKESERHFIMQVVCEATQCPDTRVRVAALQNLVKIMSLYYQYMETYMGPALFAITIEAMKSDIDEVALQGIEFWSNVCDEEMDLAIEASEAAEQGRPPEHTSKFYAKGALQYLVPILTQTLTKQDENDDDDDWNPCKAAGVCLMLLATCCEDDIVPHVLPFIKEHIKNPDWRYRDAAVMAFGCILEGPEPSQLKPLVIQVKLRDFWSRK

SEQ ID NO: 775586 - protein, 285 aa, Homo sapiens; identical to SEQ ID NO: 775575

SEQ ID NO: 775587 - protein, 236 aa, Homo sapiens
NKRRRAGLNRQRETPSVVVRDTAAWTVGRICELLPEAAINDVYLAPLLQCLIEGLSAEPRVASNVCWAFSSLAEAAYEAADVADDQEEPATYCLSSSFELIVQKLLETTDRPDGHQNNLRSSAYESLMEIVKNSAKDCYPAVQKTTLVIMERLQQVLQMESHIQSTSDRIQFNDLQSLLCATLQNVLRKVQHQDALQISDVVMASLLRMFQSTAGSGGVQEDALMAVSTLVEVWGG

SEQ ID NO: 775588 - protein, 144 aa, Homo sapiens
SLAPSLRAASHSQPPFLLSPSASRAPARSELPPGSLPRRQQPIWREEVREEERKGSRTDYPDRAGEWVCGDPSHVRTRRTVIPGGGQGDPGGRMWARLSMIPTPPLIKMLTESDCRYALYDATYETQGEQEGGSGCNLLVTPEI

SEQ ID NO: 775589 - protein, 125 aa, Homo sapiens
CGAAKENLPTFLVELSRVLANPGNSQVARVAAGLQIKNSLTSKDPDIKAQYQQRWLAIDANARREVKNYVLQTLGTETYRPSSASQCVAGIACAEIHICCQEYCISELVKIEHLKNIQTLQDSRL

SEQ ID NO: 775590 - protein, 876 aa, Homo sapiens; identical to SEQ ID NO: 775548

SEQ ID NO: 775591 - protein, 876 aa, Homo sapiens; identical to SEQ ID NO: 775548

SEQ ID NO: 775592 - protein, 876 aa, Homo sapiens; identical to SEQ ID NO: 775548

SEQ ID NO: 775593 - protein, 731 aa, Homo sapiens
MKESTLEAIGYICQDIDPEQLQDKSNEILTAIIQGMRKEEPSNNVKLAATNALLNSLEFTKANFDKESERHFIMQVVCEATQCPDTRVRVAALQNLVKIMSLYYQYMETYMGPALFAITIEAMKSDIDEVALQGIEFWSNVCDEEMDLAIEASEAAEQGRPPEHTSKFYAKGALQYLVPILTQTLTKQDENDDDDDWNPCKAAGVCLMLLATCCEDDIVPHVLPFIKEHIKNPDWRYRDAAVMAFGCILEGPEPSQLKPLVIQAMPTLIELMKDPSVVVRDTAAWTVGRICELLPEAAINDVYLAPLLQCLIEGLSAEPRVASNVCWAFSSLAEAAYEAADVADDQEEPATYCLSSSFELIVQKLLETTDRPDGHQNNLRSSAYESLMEIVKNSAKDCYPAVQKTTLVIMERLQQVLQMESHIQSTSDRIQFNDLQSLLCATLQNVLRKVQHQDALQISDVVMASLLRMFQSTAGSGGVQEDALMAVSTLVEVLGGEFLKYMEAFKPFLGIGLKNYAEYQVCLAAVGLVGDLCRALQSNIIPFCDEVMQLLLENLGNENVHRSVKPQILSVFGDIALAIGGEFKKYLEVVLNTLQQASQAQVDKSDYDMVDYLNELRESCLEAYTGIVQGLKGDQENVHPDVMLVQPRVEFILSFIDHIAGDEDHTDGVVACAAGLIGDLCTAFGKDVLKLVEARPMIHELLTEGRRSKTNKAKTLATWATKELRKLKNQA

SEQ ID NO: 775594 - protein, 730 aa, Homo sapiens
TRLGTRPGVIYCQDIDPEQLQDKSNEILTAIIQGMRKEEPSNNVKLAATNALLNSLEFTKANFDKESERHFIMQVVCEATQCPDTRVRVAALQNLVKIMSLYYQYMETYMGPALFAITIEAMKSDIDEVALQGIEFWSNVCDEEMDLAIEASEAAEQGRPPEHTSKFYAKGALQYLVPILTQTLTKQDENDDDDDWNPCKAAGVCLMLLATCCEDDIVPHVLPFIKEHIKNPDWRYRDAAVMAFGCILEGPEPSQLKPLVIQAMPTLIELMKDPSVVVRDTAAWTVGRICELLPEAAINDVYLAPLLQCLIEGLSAEPRVASNVCWAFSSLAEAAYEAADVADDQEEPATYCLSSSFELIVQKLLETTDRPDGHQNNLRSSAYESLMEIVKNSAKDCYPAVQKTTLVIMERLQQVLQMESHIQSTSDRIQFNDLQSLLCATLQNVLRKVQHQDALQISDVVMASLLRMFQSTAGSGGVQEDALMAVSTLVEVLGGEFLKYMEAFKPFLGIGLKNYAEYQVCLAAVGLVGDLCRALQSNIIPFCDEVMQLLLENLGNENVHRSVKPQILSVFGDIALAIGGEFKKYLEVVLNTLQQASQAQVDKSDYDMVDYLNELRESCLEAYTGIVQGLKGDQENVHPDVMLVQPRVEFILSFIDHIAGDEDHTDGVVACAAGLIGDLCTAFGKDVLKLVEARPMIHELLTEGRRSKTNKAKTLATWATKELRKLKNQA

SEQ ID NO: 775595 - protein, 876 aa, Homo sapiens; identical to SEQ ID NO: 775548

SEQ ID NO: 775596 - protein, 852 aa, Homo sapiens
MELITILEKTVSPDRLELEAAQKFLERAAVENLPTFLVELSRVLANPGNSQVARVAAGLQIKNSLTSKDPDIKAQYQQRWLAIDANARREVKNYVLQTLGTETYRPSSASQCVAGIACAEIPVNQWPELIPQLVANVTNPNSTEHMKESTLEAIGYICQDIDPEQLQDKSNEILTAIIQGMRKEEPSNNVKLAATNALLNSLEFTKANFDKESERHFIMQVVCEATQCPDTRVRVAALQNLVKIMSLYYQYMETYMGPALFAITIEAMKSDIDEVALQGIEFWSNVCDEEMDLAIEASEAAEQGRPPEHTSKFYAKGALQYLVPILTQTLTKQDENDDDDDWNPCKAAGVCLMLLATCCEDDIVPHVLPFIKEHIKNPDWRYRDAAVMAFGCILEGPEPSQLKPLVIQAMPTLIELMKDPSVVVRDTAAWTVGRICELLPEAAINDVYLAPLLQCLIEGLSAEPRVASNVCWAFSSLAEAAYEAADVADDQEEPATYCLSSSFELIVQKLLETTDRPDGHQNNLRSSAYESLMEIVKNSAKDCYPAVQKTTLVIMERLQQVLQMENVLRKVQHQDALQISDVVMASLLRMFQSTAGSGGVQEDALMAVSTLVEVLGGEFLKYMEAFKPFLGIGLKNYAEYQVCLAAVGLVGDLCRALQSNIIPFCDEVMQLLLENLGNENVHRSVKPQILSVFGDIALAIGGEFKKYLEVVLNTLQQASQAQVDKSDYDMVDYLNELRESCLEAYTGIVQGLKGDQENVHPDVMLVQPRVEFILSFIDHIAGDEDHTDGVVACAAGLIGDLCTAFGKDVLKLVEARPMIHELLTEGRRSKTNKAKTLATWATKELRKLKNQA

SEQ ID NO: 775597 - protein, 584 aa, Homo sapiens
GREVNGRAAEQGRPPEHTSKFYAKGALQYLVPILTQTLTKQDENDDDDDWNPCKAAGVCLMLLATCCEDDIVPHVLPFIKEHIKNPDWRYRDAAVMAFGCILEGPEPSQLKPLVIQAMPTLIELMKDPSVVVRDTAAWTVGRICELLPEAAINDVYLAPLLQCLIEGLSAEPRVASNVCWAFSSLAEAAYEAADVADDQEEPATYCLSSSFELIVQKLLETTDRPDGHQNNLRSSAYESLMEIVKNSAKDCYPAVQKTTLVIMERLQQVLQMESHIQSTSDRIQFNDLQSLLCATLQNVLRKVQHQDALQISDVVMASLLRMFQSTAGSGGVQEDALMAVSTLVEVLGGEFLKYMEAFKPFLGIGLKNYAEYQVCLAAVGLVGDLCRALQSNIIPFCDEVMQLLLENLGNENVHRSVKPQILSVFGDIALAIGGEFKKYLEVVLNTLQQASQAQVDKSDYDMVDYLNELRESCLEAYTGIVQGLKGDQENVHPDVMLVQPRVEFILSFIDHIAGDEDHTDGVVACAAGLIGDLCTAFGKDVLKLVEARPMIHELLTEGRRSKTNKAKTLATWATKELRKLKNQA

SEQ ID NO: 775598 - protein, 489 aa, Homo sapiens
MAFGCILEGPEPSQLKPLVIQAMPTLIELMKDPSVVVRDTAAWTVGRICELLPEAAINDVYLAPLLQCLIEGLSAEPRVASNVCWAFSSLAEAAYEAADVADDQEEPATYCLSSSFELIVQKLLETTDRPDGHQNNLRSSAYESLMEIVKNSAKDCYPAVQKTTLVIMERLQQVLQMESHIQSTSDRIQFNDLQSLLCATLQNVLRKVQHQDALQISDVVMASLLRMFQSTAGSGGVQEDALMAVSTLVEVLGGEFLKYMEAFKPFLGIGLKNYAEYQVCLAAVGLVGDLCRALQSNIIPFCDEVMQLLLENLGNENVHRSVKPQILSVFGDIALAIGGEFKKYLEVVLNTLQQASQAQVDKSDYDMVDYLNELRESCLEAYTGIVQGLKGDQENVHPDVMLVQPRVEFILSFIDHIAGDEDHTDGVVACAAGLIGDLCTAFGKDVLKLVEARPMIHELLTEGRRSKTNKAKTLATWATKELRKLKNQA

SEQ ID NO: 775599 - protein, 505 aa, Homo sapiens
RRWRPGVNRTRRDAAVMAFGCILEGPEPSQLKPLVIQAMPTLIELMKDPSVVVRDTAAWTVGRICELLPEAAINDVYLAPLLQCLIEGLSAEPRVASNVCWAFSSLAEAAYEAADVADDQEEPATYCLSSSFELIVQKLLETTDRPDGHQNNLRSSAYESLMEIVKNSAKDCYPAVQKTTLVIMERLQQVLQMESHIQSTSDRIQFNDLQSLLCATLQNVLRKVQHQDALQISDVVMASLLRMFQSTAGSGGVQEDALMAVSTLVEVLGGEFLKYMEAFKPFLGIGLKNYAEYQVCLAAVGLVGDLCRALQSNIIPFCDEVMQLLLENLGNENVHRSVKPQILSVFGDIALAIGGEFKKYLEVVLNTLQQASQAQVDKSDYDMVDYLNELRESCLEAYTGIVQGLKGDQENVHPDVMLVQPRVEFILSFIDHIAGDEDHTDGVVACAAGLIGDLCTAFGKDVLKLVEARPMIHELLTEGRRSKTNKAKTLATWATKELRKLKNQA

SEQ ID NO: 775600 - protein, 876 aa, Homo sapiens; identical to SEQ ID NO: 775548

SEQ ID NO: 775601 - protein, 431 aa, Homo sapiens
CQIIKQDDERCQIIRQDFCDWKQKKWQAFSSLAEAAYEAADVADDQEEPATYCLSSSFELIVQKLLETTDRPDGHQNNLRSSAYESLMEIVKNSAKDCYPAVQKTTLVIMERLQQVLQMESHIQSTSDRIQFNDLQSLLCATLQNVLRKVQHQDALQISDVVMASLLRMFQSTAGSGGVQEDALMAVSTLVEVLGGEFLKYMEAFKPFLGIGLKNYAEYQVCLAAVGLVGDLCRALQSNIIPFCDEVMQLLLENLGNENVHRSVKPQILSVFGDIALAIGGEFKKYLEVVLNTLQQASQAQVDKSDYDMVDYLNELRESCLEAYTGIVQGLKGDQENVHPDVMLVQPRVEFILSFIDHIAGDEDHTDGVVACAAGLIGDLCTAFGKDVLKLVEARPMIHELLTEGRRSKTNKAKTLATWATKELRKLKNQA

SEQ ID NO: 775602 - protein, 299 aa, Homo sapiens
MTSLLLDQSITPCASGLVPTLNALQISDVVMASLLRMFQSTAGSGGVQEDALMAVSTLVEVLGGEFLKYMEAFKPFLGIGLKNYAEYQVCLAAVGLVGDLCRALQSNIIPFCDEVMQLLLENLGNENVHRSVKPQILSVFGDIALAIGGEFKKYLEVVLNTLQQASQAQVDKSDYDMVDYLNELRESCLEAYTGIVQGLKGDQENVHPDVMLVQPRVEFILSFIDHIAGDEDHTDGVVACAAGLIGDLCTAFGKDVLKLVEARPMIHELLTEGRRSKTNKAKTLATWATKELRKLKNQA

SEQ ID NO: 775603 - protein, 785 aa, Homo sapiens
MELITILEKTVSPDRLELEAAQKFLERAAVENLPTFLVELSRVLANPGNSQVARVAAGLQIKNSLTSKDPDIKAQYQQRWLAIDANARREVKNYVLQTLGTETYRPSSASQCVAGIACAEIPVNQWPELIPQLVANVTNPNSTEHMKESTLEAIGYICQDIDPEQLQDKSNEILTAIIQGMRKEEPSNNVKLAATNALLNSLEFTKANFDKESERHFIMQVVCEATQCPDTRVRVAALQNLVKIMSLYYQYMETYMGPALFAITIEAMKSDIDEVALQGIEFWSNVCDEEMDLAIEASEAAEQGRPPEHTSKFYAKGALQYLVPILTQTLTKQDENDDDDDWNPCKAAGVCLMLLATCCEDDIVPHVLPFIKEHIKNPDWRYRDAAVMAFGCILEGPEPSQLKPLVIQAMPTLIELMKDPSVVVRDTAAWTVGRICELLPEAAINDVYLAPLLQCLIEGLSAEPRVASNVCWAFSSLAEAAYEAADVADDQEEPATYCLSSSFELIVQKLLETTDRPDGHQNNLRSSAYESLMEIVKNSAKDCYPAVQKTTLVIMERLQQVLQMESHIQSTSDRIQFNDLQSLLCATLQNVLRKVQHQDALQISDVVMASLLRMFQSTAGSGGVQEDALMAVSTLVEVLGGEFLKYMEAFKPFLGIGLKNYAEYQVCLAAVGLVGDLCRALQSNIIPFCDEVMQLLLENLGNENVHRSVKPQILSVFGDIALAIGGEFKKYLEVVLNTLQQASQAQVDKSDYDMVDYLNELRESCLEAYTGIVQGLKGDQENVHR

SEQ ID NO: 775604 - protein, 259 aa, Homo sapiens
TPDKVMKELDENGDGEVDFQVLGGEFLKYMEAFKPFLGIGLKNYAEYQVCLAAVGLVGDLCRALQSNIIPFCDEVMQLLLENLGNENVHRSVKPQILSVFGDIALAIGGEFKKYLEVVLNTLQQASQAQVDKSDYDMVDYLNELRESCLEAYTGIVQGLKGDQENVHPDVMLVQPRVEFILSFIDHIAGDEDHTDGVVACAAGLIGDLCTAFGKDVLKLVEARPMIHELLTEGRRSKTNKAKTLATWATKELRKLKNQA

SEQ ID NO: 775605 - protein, 211 aa, Homo sapiens
MLDEKSRTMFCRHWVQKLTGLVLPHSVWLVLLVQRSNENVHRSVKPQILSVFGDIALAIGGEFKKYLEVVLNTLQQASQAQVDKSDYDMVDYLNELRESCLEAYTGIVQGLKGDQENVHPDVMLVQPRVEFILSFIDHIAGDEDHTDGVVACAAGLIGDLCTAFGKDVLKLVEARPMIHELLTEGRRSKTNKAKTLATWATKELRKLKNQA

SEQ ID NO: 775606 - protein, 48 aa, Homo sapiens
TQKLKALITSRPAVEKCSRKSFKNEENDARYKNINLHKEEQAEMVTAQ

SEQ ID NO: 775607 - protein, 82 aa, Homo sapiens
DSRGSRSARTNLELCASYVYLSMSYCFDRDDVALKNFAKYFLHQSHEEREHAEKLMKLQNQRGGRIFLQDIKKPDCDDWESG

SEQ ID NO: 775608 - protein, 131 aa, Homo sapiens [sequence omitted]

SEQ ID NO: 775609 - protein, 79 aa, Homo sapiens
FNSHLTYSVLFNLTGSPMLIFSSPMKTFGFIPDMVWLCPYPNLILSCSSHNSHMSWEGTRWDATESWEQVFPILILDSE

SEQ ID NO: 775610 - protein, 123 aa, Homo sapiens
RLLRAPPSSRRPPNPAPRDSVFPSAGSGQSRKGSRAGRLADRDRPGPGSRVTCRGLSRALMRMIQKGGEANGAVESRVPEQVSRDGGPCPCRKRAPHCFMMEGRTPGPGCRQVSQRMSFMTTS

SEQ ID NO: 775611 - protein, 113 aa, Homo sapiens
LCAIALSALGTLTSGLCAVALSALGTLTSGLCAVALCALGTLPQTCASHSLSSALCSNVTSFLTSSLTILAKIPPPRPSLSLDPALLFFITLSIATWNNNDRLFLFVFYLCSH

SEQ ID NO: 775612 - protein, 124 aa, Homo sapiens
MRAWLSLLGPGARPALLQPSLAPFSLPPILPHQEPSLPPQASTPHSRGAPLLTPSVAVCGVEQEERDRHVLTVACSRRCVHSGLSPALGMSLSPNHCPSCGGTCEVHCPGEQGLRAELGTPPLS

SEQ ID NO: 775613 - protein, 151 aa, Homo sapiens
MTAFNSGKVDIVAINDPFIDLNYMVYMFLYDSTHGKFHGTVKAENGTLVIMETPSPIFQDQDPSKIKWGDAGAEYVVEFTGVFTTMEKAGAHLQGGAKRVNISVLSVDAPMFVMGVNHEKYDNSLKIVSNASCITNCLAPQPRSSMTTLVS

SEQ ID NO: 775614 - protein, 110 aa, Homo sapiens
MQFQISRPNRPLRQDRLLCLGIESKLIHSYLRGLPRHSSLQVCGEARLSTDLPKTPLQWLEHRSSSENQLSPVKPDTEQTGKGKNSAYSSQIFRSGNDNLIVLIKNIICE

SEQ ID NO: 775615 - protein, 99 aa, Homo sapiens
LLGYVQRTLNGSTMKTHALKCPLQHHSQQHRHGIKLGPVSGRRIKRMWSIYTAEYYAAIKRNKIMPFAGTWMELEAIILRKLMRGQNPGHYTSPLTSGS

SEQ ID NO: 775616 - protein, 99 aa, Homo sapiens; identical to SEQ ID NO: 775615

SEQ ID NO: 775617 - protein, 92 aa, Homo sapiens
KFPVQKEKIDRCSGKKLEDGPKFLKSGDAAIVDTVPGKPLCVESFSDYPPVGRFAVHDLRQTVVVGVIKAVDKKAAEAGKVTKPAQKAQKAK

SEQ ID NO: 775618 - protein, 172 aa, Homo sapiens
GNDGDRVKFGFFLVFVFAGLHHGSPNRKPRMKQTGNARALVANAQPCKSAREAEQSQVEVVSYWAGLGISPLSSGVCSLESRVCHASEGLGSISPQDDPMFRWARRRHCPQPQLSMLTTYHKSTSLQLSGLAYEPQAHREGCGWGISHLHLVCWVKSNWCQCSPSHRETCSL

SEQ ID NO: 775619 - protein, 117 aa, Homo sapiens
MVCGGNGERQLAVTAAPCLATGRKEGESTYHRLEARACRTAAGLAGSPPWLASLWLVAATDTAAGQSVERQWGAQSWWAQRFLWIGARQCDVTSHHSRSQFLARLSQKERLDFGGWI

SEQ ID NO: 775620 - protein, 96 aa, Homo sapiens
QLLCSYRIRRNGIIVSLIYVNKLKNCLKENMNELMNSTGEDLQLDKSTLSARAVKAKGPVMIPYPFFQSHVEDFYVEGLPKGIFFFFFFGDGVFTL

SEQ ID NO: 775621 - protein, 112 aa, Homo sapiens
FLSISKFLLGTQRLIAWGGHIPVLVPYMVLVCSHHGLSILVGIQTGDKSAISAKEKTEAGGPLCVGLLSESGGGKTWGGAAWLQCQLGEKYGQRELPRPHVFLQPVGCEGRQ

SEQ ID NO: 775622 - protein, 119 aa, Homo sapiens
ADSPVWEKEMEVGEPGYPQLGKASFKAFPCWMPAQERGKQLILGFEGKGNTQVLTDTLAPHLPLQWGPPTFLFSPFLWAKKLRLREMRSQSGGEEGPVSFLLRQTGSPVGPSHHTSSLL

SEQ ID NO: 775623 - protein, 86 aa, Homo sapiens
RGLSGPPGSGVAPAPVPRALPRHGLSPRPLPSQILASGTAEPAALANKPVRPTGLGTLERSPSPGLPCALDPSTLLRRPPTTERRA

SEQ ID NO: 775624 - protein, 86 aa, Homo sapiens; identical to SEQ ID NO: 775623

SEQ ID NO: 775625 - protein, 86 aa, Homo sapiens; identical to SEQ ID NO: 775623

SEQ ID NO: 775626 - protein, 86 aa, Homo sapiens; identical to SEQ ID NO: 775623

SEQ ID NO: 775627 - protein, 86 aa, Homo sapiens; identical to SEQ ID NO: 775623

SEQ ID NO: 775628 - protein, 86 aa, Homo sapiens; identical to SEQ ID NO: 775623

SEQ ID NO: 775629 - protein, 104 aa, Homo sapiens
MPLARDLLHPSLEEEKKKHKKKRLVQSPNSYFMDVKCPGCYKITTVFSHAQTVVLCVGCSTVLCQPTGGKARLTEGISFGILQPSDEIDDYKMSLSSLKSLKKS

SEQ ID NO: 775630 - protein, 50 aa, Homo sapiens
MKVINRFRKITLLSDVLLLPRMTVIPVFACIFHVWLNVPALWFKTNSNNM

SEQ ID NO: 775631 - protein, 86 aa, Homo sapiens; identical to SEQ ID NO: 775623

SEQ ID NO: 775632 - protein, 86 aa, Homo sapiens; identical to SEQ ID NO: 775623

SEQ ID NO: 775633 - protein, 86 aa, Homo sapiens; identical to SEQ ID NO: 775623

SEQ ID NO: 775634 - protein, 86 aa, Homo sapiens; identical to SEQ ID NO: 775623

SEQ ID NO: 775635 - protein, 86 aa, Homo sapiens; identical to SEQ ID NO: 775623

SEQ ID NO: 775636 - protein, 86 aa, Homo sapiens; identical to SEQ ID NO: 775623

SEQ ID NO: 775637 - protein, 125 aa, Homo sapiens
MPLARDLLHPSLEEEKKKHKKKRLVQSPNSYFMDVKCPGCYKITTVFSHAQTVVLCVGCSTVLCQPTGGKARLTEGCKCVNLTKKEKVPAIPALWEAETGGLLELQDFETSLSNVAETASLQNIQ

SEQ ID NO: 775638 - protein, 134 aa, Homo sapiens
MGMNKSIKLLHESNIITHQEPFSPQPIEPHHPPVFPSLPSLFPSVCIAGAFLLTTPFPLCTLASPLMIPHRCQHQLGSPMGARASGGLLTQVGHSPQPLWVLGIFDFPLLALGSSLMRGWGPQGRSSDLLCVCL

SEQ ID NO: 775639 - protein, 576 aa, Homo sapiens
MEVCPYCKKPFKRLKSHLPYCKMIGPTIPTDQKVYQSKPATLPRAKKMKGPIKDLIKAKGKELETENEERNSKLVVDKPEQTVKTFPLPAVGLERAATTKADKDIKNPIQPSFKMLKNTKPMTTFQEETKAQFYASEKTSPKRELAKDLPKSGESRCNPSEAGASLLVGSIEPSLSNQDRKYSSTLPNDVQTTSGDLKLDKIDPQRQELLVKLLDVPTGDCHISPKNVSDGVKRVRTLLSNERDSKGRDHLSGVPTDVTVTETPEKNTESLILSLKMSSLGKIQVMEKQEKGLTLGVETCGSKGNAEKSMSATEKQERTVMSHGCENFNTRDSVTGKESQGERPHLSLFIPRETTYQFHSVSQSSSQSLASLATTFLQEKKAEAQNHNCVPDVKALMESPEGQLSLEPKSDSQFQASHTGCQSPLCSAQRHTPQSPFTNHAAAAGRKTLRSCMGLEWFPELYPGYLGLGVLPGKPQCWNAMTQKPQLISPQGERLSQVSLLERSSTHIRSLEPPAGLTTSNFSLMRLLGAVQKGWIRCNTTIRKSGFGGITMLFTGYFVLCCSWSFRRLKLQRWRK

SEQ ID NO: 775640 - protein, 602 aa, Homo sapiens
MEVCPYCKKPFKRLKSHLPYCKMIGPTIPTDQKVYQSKPATLPRAKKMKGPIKDLIKAKGKELETENEERNSKLVVDKPEQTVKTFPLPAVGLERAATTKADKDIKNPIQPSFKMLKNTKPMTTFQEETKAQFYASEKTSPKRELAKDLPKSGESRCNPSEAGASLLVGSIEPSLSNQDRKYSSTLPNDVQTTSGDLKLDKIDPQRQELLVKLLDVPTGDCHISPKNVSDGVKRVRTLLSNERDSKGRDHLSGVPTDVTVTETPEKNTESLILSLKMSSLGKIQVMEKQEKGLTLGVETCGSKGNAEKSMSATEKQERTVMSHGCENFNTRDSVTGKESQGERPHLSLFIPRETTYQFHSVSQSSSQSLASLATTFLQEKKAEAQNHNCVPDVKALMESPEGQLSLEPKSDSQFQASHTGCQSPLCSAQRHTPQSPFTNHAAAAGRKTLRSCMGLEWFPELYPGYLGLGVLPGKPQCWNAMTQKPQLISPQGERLSQVSLLERSSTHIRSLEPPAGLTTSNFSLMRLLGAVQKGWIRCNTTIRKSGFGGITMLFTGYFVLCCSWSFRRLKKLCRPLPWKSTVPPCIGVAKTTGDCRSKTCLD

SEQ ID NO: 775641 - protein, 566 aa, Homo sapiens
MEVCPYCKKPFKRLKSHLPYCKMIGPTIPTDQKVYQSKPATLPRAKKMKGPIKDLIKAKGKELETENEERNSKLVVDKPEQTVKTFPLPAVGLERAATTKADKDIKNPIQPSFKMLKNTKPMTTFQEETKAQFYASEKTSPKRELAKDLPKSGESRCNPSEAGASLLVGSIEPSLSNQDRKYSSTLPNDVQTTSGDLKLDKIDPQRQELLVKLLDVPTGDCHISPKNVSDGVKRVRTLLSNERDSKGRDHLSGVPTDVTVTETPEKNTESLILSLKMSSLGKIQVMEKQEKGLTLGVETCGSKGNAEKSMSATEKQERTVMSHGCENFNTRDSVTGKESQGERPHLSLFIPRETTYQFHSVSQSSSQSLASLATTFLQEKKAEAQNHNCVPDVKALMESPEGQLSLEPKSDSQFQASHTGCQSPLCSAQRHTPQSPFTNHAAAAGRKTLRSCMGLEWFPELYPGYLGLGVLPGKPQCWNAMTQKPQLISPQGERLSQGWIRCNTTIRKSGFGGITMLFTGYFVLCCSWSFRRLKKLCRPLPWKSTVPPCIGVAKTTGDCRSKTCLD

SEQ ID NO: 775642 - protein, 602 aa, Homo sapiens; identical to SEQ ID NO: 775640

SEQ ID NO: 775643 - protein, 602 aa, Homo sapiens; identical to SEQ ID NO: 775640

SEQ ID NO: 775644 - protein, 602 aa, Homo sapiens; identical to SEQ ID NO: 775640

SEQ ID NO: 775645 - protein, 566 aa, Homo sapiens; identical to SEQ ID NO: 775641

SEQ ID NO: 775646 - protein, 584 aa, Homo sapiens
MEVCPYCKKPFKRLKSHLPYCKMIGPTIPTDQKVYQSKPATLPRAKKMKGPIKDLIKAKGKELETENEERNSKLVVDKPEQTVKTFPLPAVGLERAATTKADKDIKNPIQPSFKMLKNTKPMTTFQEETKAQFYASEKTSPKRELAKDLPKSGESRCNPSEAGASLLVGSIEPSLSNQDRKYSSTLPNDVQTTSGDLKLDKIDPQRQELLVKLLDVPTGDCHISPKNVSDGVKRVRTLLSNERDSKGRDHLSGVPTDVTVTETPEKNTESLILSLKMSSLGKIQVMEKQEKGLTLGVETCGSKGNAEKSMSATEKQERTVMSHGCENFNTRDSVTGKESQGERPHLSLFIPRETTYQFHSVSQSSSQSLASLATTFLQVESPEGQLSLEPKSDSQFQASHTGCQSPLCSAQRHTPQSPFTNHAAAAGRKTLRSCMGLEWFPELYPGYLGLGVLPGKPQCWNAMTQKPQLISPQGERLSQVSLLERSSTHIRSLEPPAGLTTSNFSLMRLLGAVQKGWIRCNTTIRKSGFGGITMLFTGYFVLCCSWSFRRLKKLCRPLPWKSTVPPCIGVAKTTGDCRSKTCLD

SEQ ID NO: 775647 - protein, 602 aa, Homo sapiens; identical to SEQ ID NO: 775640

SEQ ID NO: 775648 - protein, 602 aa, Homo sapiens; identical to SEQ ID NO: 775640

SEQ ID NO: 775649 - protein, 300 aa, Homo sapiens
VTRGSTHASAGGWWMGGERSGVRGNKMAAAEPSPRRVGFVGAGRMAGAIAQGLIRAGKVEAQHILASAPTDRNLCHFQALGCRTTHSNQEVLQSCLLVIFATKPHVLPAVLAEVAPVVTTEHILVSVAAGVSLSTLEELLPPNTRVLRVLPNLPCVVQEGAIVMARGRHVGSSETKLLQHLLEACGRCEEVPEAYVDIHTGLSGSGVAFVCAFSEALAEGAVKMGMPSSLAHRIAAQTLLGTAKMLLHEGQHPAQLRSDVCTPGGTTIYGLHALEQGGLRAATMSAVEAATCRAKELSRK

SEQ ID NO: 775650 - protein, 300 aa, Homo sapiens; identical to SEQ ID NO: 775649

SEQ ID NO: 775651 - protein, 258 aa, Homo sapiens
LEAEAPGICVLTNGGKVEAQHILASAPTDRNLCHFQALGCRTTHSNQEVLQSCLLVIFATKPHVLPAVLAEVAPVVTTEHILVSVAAGVSLSTLEELLPPNTRVLRVLPNLPCVVQEGAIVMARGRHVGSSETKLLQHLLEACGRCEEVPEAYVDIHTGLSGSGVAFVCAFSEALAEGAVKMGMPSSLAHRIAAQTLLGTAKMLLHEGQHPAQLRSDVCTPGGTTIYGLHALEQGGLRAATMSAVEAATCRAKELSRK

SEQ ID NO: 775652 - protein, 121 aa, Homo sapiens
PPKGPRTLAFNPLGGEGPGRTASAPSPAPQDSPGPPVPRWPQLLQLSASAQQPLEVRREHALSEAGRRVLLCHLPVRLSRSIHQCKTGLTAPAGQQHAPSLMLSCLCGHGLLPFICSLLLS

SEQ ID NO: 775653 - protein, 300 aa, Homo sapiens; identical to SEQ ID NO: 775649

SEQ ID NO: 775654 - protein, 88 aa, Homo sapiens
VTRGSTHASAGGWWMGGERSGVRGNKMAAAEPSPRRVGFVGAGRMAGAIAQGLIRAGKVEAQHILASAPTDRNLCHFQSLTLLSLARP

SEQ ID NO: 775655 - protein, 105 aa, Homo sapiens
FLRCSLALSPRLKCRGAIEITGTHHHTQLIFVCFVETGFHYVGQAGLELLTSSNPPTSASQSVEITGRSHCTQPHSYYMCMKHSTECTIFWGFRQASALKSQNMF

SEQ ID NO: 775656 - protein, 112 aa, Homo sapiens
  misc_feature (5)..(5): Xaa can be any naturally occurring amino acid
  misc_feature (7)..(7): Xaa can be any naturally occurring amino acid
LLVTXRXPSRANSLTLMFSRTSYSRAWCYPSAPVCVSSNSRCSRIQLRSSICRAQGASTSLRLVSKLVFRFLIESRLISKDWTISLSSVSIISTAPTSADCVVTTVVLSSIC

SEQ ID NO: 775657 - protein, 56 aa, Homo sapiens
MGLRGQPGLLGFTFCFPTPALPVWLCWPSTEEAHGFGGQMTAHWRAVPLSEGRHLD

SEQ ID NO: 775658 - protein, 513 aa, Homo sapiens
MKISILLMFLWGLSCALPVTRYQNNESEDSEEWKGHLAQAPTPPLESSESSEGSKVSSEEQANEDPSDSTQSEEGLGSDDHQYIYRLAGGFSRSTGKGGDDKDDDEDDSGDDTFGDDDSGPGPKDRQEGGNSRLGSDEDSDDTIQASEESAPQGQDSAQDTTSESRELDNEDRVDSKPEGGDSTQESESEEHWVGGGSDGESSHGDGSELDDEGMQSDDPESIRSERGNSRMNSAGMKSKESGENSEQANTQDSGGSQLLEHPSRKIFRKSRISEEDDRSELDDNNTMEEVKSDSTENSNSRDTGLSQPRRDSKGDSQEDSKENLSQEESQNVDGPSSESSQEANLSSQENSSESQEEVVSESRGDNPDPTTSYVEDQEDSDSSEEDSSHTLSHSKSESREEQADSESSESLNFSEESPESPEDENSSSQEGLQSHSSSAESQSEESHSEEDDSDSQDSSRSKEDSNSTESKSSSEEDGQLKNIEIESRKLTVDAYHNKPIGDQDDNDCQDGY

SEQ ID NO: 775659 - protein, 497 aa, Homo sapiens
MKISILLMFLWGLSCALPVTRYQNNESEDSEEWKGHLAQAPTPPLANEDPSDSTQSEEGLGSDDHQYIYRLAGGFSRSTGKGGDDKDDDEDDSGDDTFGDDDSGPGPKDRQEGGNSRLGSDEDSDDTIQASEESAPQGQDSAQDTTSESRELDNEDRVDSKPEGGDSTQESESEEHWVGGGSDGESSHGDGSELDDEGMQSDDPESIRSERGNSRMNSAGMKSKESGENSEQANTQDSGGSQLLEHPSRKIFRKSRISEEDDRSELDDNNTMEEVKSDSTENSNSRDTGLSQPRRDSKGDSQEDSKENLSQEESQNVDGPSSESSQEANLSSQENSSESQEEVVSESRGDNPDPTTSYVEDQEDSDSSEEDSSHTLSHSKSESREEQADSESSESLNFSEESPESPEDENSSSQEGLQSHSSSAESQSEESHSEEDDSDSQDSSRSKEDSNSTESKSSSEEDGQLKNIEIESRKLTVDAYHNKPIGDQDDNDCQDGY

SEQ ID NO: 775660 - protein, 103 aa, Homo sapiens
RPLHRVVSSWRLGAFVASSFLADPSELWEVAAPWRLPRARGANRGSSAWVAGPGLGQGLAFPMVGGSDRPSAGPSRWDKADRLGGWSRYPGARRWTSPIFKRR

SEQ ID NO: 775661 - protein, 85 aa, Homo sapiens
EFRQSDEENEDPLVPTSVAALKSQLTPLSSSQESYLPPPAYSPRFQPRGLEGPGGLEGRLQATGQARPPAPRPFHHGQYYGYLSS

SEQ ID NO: 775662 - protein, 32 aa, Homo sapiens
MASLLPEFSSFILPSCAVQDVPFLGSTATRLS

SEQ ID NO: 775663 - protein, 76 aa, Homo sapiens
ESVQWCSVKGKEHFGAKADKTAQSSQAWVMIPLPRHLRSCHIDVLSLFRLSWNDRNNSGTMTSLTRPRYGSGRGEL

SEQ ID NO: 775664 - protein, 116 aa, Homo sapiens
SDLEDAFCVPFHCCLLPSQGTPGLTKETWSLVVRWSSPGNIQLMAFCPAGMRQRGPGTLGALFTRSRESAWKFQEGHRKASDLEPQCFIFFPFSLLFHPFPHGRWGCHRSLGKESK

SEQ ID NO: 775665 - protein, 36 aa, Homo sapiens
MPYLLWTIKRDIIDYHSLTYDQMLNHYAKTASFTTK

SEQ ID NO: 775666 - protein, 70 aa, Homo sapiens
ASHKGLKWQVDGKLHSLTSARGLLLSHELLLFPLLVSSLLSLLLEWPDPGKRAGERREAIEPHGPLQPGI

SEQ ID NO: 775667 - protein, 142 aa, Homo sapiens
MKPLIWTWSDVEGQRPALLICTAAAGPTQGVKGYGKPFEPRSVKNIHSTPAYPDATMHRQLLAPVEGRMAETLNQKLHVANVLEDDPGYLPHVYSEEGECGGAPSLSSLASLEQELQPDLLDSLGSKATPFEEIYSESGVPS

SEQ ID NO: 775668 - protein, 443 aa, Homo sapiens
RPGTLLGTFNAMDPDSQIRYELVHDPANWVSVDKNSGVVITVEPIDRESPHVNNSFYVIIIHAVDDGFPPQTATGTLMLFLSDINDNVPTLRPRSRYMEVCESAVHEPLHIEAEDPDLEPFSDPFTFELDNTWGNAEDTWKLGRNWGQSVELLTLRSLPRGNYLVPLFIGDKQGLSQKQTVHVRICPCASGLTCVELADAEVGLHVGALFPVCAAFVALAVALLFLLRCYFVLEPKRHGCSVSNDEGHQTLVMYNAESKGTSAQTWSDVEGQRPALLICTAAAGPTQGVKAYPDATMHRQLLAPVEGRMAETLNQSKERNRFSLSRGCIIPQGRATAGRGLPQDIYKEMMPRRLTQTGKRKHGALARTPSFKKVVYDHKEDEENKAGRKQRSHLFKVMQLRNEQGGVRVQSAHSPSPLNKKACFPGDYRGESAGGHNCRAVSG

SEQ ID NO: 775669 - protein, 124 aa, Homo sapiens
MKPLIWTWSDVEGQRPALLICTAAAGPTQGVKAYPDATMHRQLLAPVEGRMAETLNQKLHVANVLEDDPGYLPHVYSEEGECGGAPSLSSLASLEQELQPDLLDSLGSKATPFEEIYSESGVPS

SEQ ID NO: 775670 - protein, 356 aa, Homo sapiens
RPGTLLGTFNAMDPDSQIRYELVHDPANWVSVDKNSGVVITVEPIDRESPHVNNSFYVIIIHAVDDGFPPQTATGTLMLFLSDINDNVPTLRPRSRYMEVCESAVHEPLHIEAEDPDLEPFSDPFTFELDNTWGNAEDTWKLGRNWGQSVELLTLRSLPRGNYLVPLFIGDKQGLSQKQTVHVRICPCASGLTCVELQMQKWGFMWGPCSLSVQHLWLWQTWSDVEGQRPALLICTAAAGPTQGVKGYGKPFEPRSVKNIHSTPAYPDATMHRQLLAPVEGRMAETLNQKLHVANVLEDDPGYLPHVYSEEGECGGAPSLSSLASLEQELQPDLLDSLGSKATPFEEIYSESGVPS

SEQ ID NO: 775671 - protein, 174 aa, Homo sapiens
RGAGAGRGGEGTRHWGNPEFQPGSQGFLPGFLPENFSPPPGSLDGAVRSRGEVGVWEGAAGRERESGWVGDLLSRSWVSPQRGATDPQAFPALQMERHRDAPQVAALGCQPVSGRGGCRQEAPVSETPLSPKLRQQKTLRRPEGLVNHRGAQLRLVSSSRWRWRVLNAAGFELD

SEQ ID NO: 775672 - protein, 382 aa, Homo sapiens
MSVLRRMMRVSNRSLLAFIFFFSLSSSCLYFIYVAPGIANTYLFMVQARGIMLRENVKTIGHMIRLYTNKNSTLNGTDYPEGNNSSDYLVQTTTYLPENFTYSPYLPCPEKLPYMRGFLNVNVSEVSFDEIHQLFSKDLDIEPGGHWRPKDCKPRWKVAVLIPFRNRHEHLPIFFLHLIPMLQKQRLEFAFYVIEQTGTQPFNRAMLFNVGFKEAMKDSVWDCVIFHDVDHLPENDRNYYGCGEMPRHFAAKLDKYMYILPYKEFFGGVSGLTVEQFRKINGFPNAFWGWGGEDDDLWNRVHYAGYNVTRPEGDLGKYKSIPHHHRGEVQFLGRYKLLRYSKERQYIDGLNNLIYRPKILVDRLYTNISVNLMPELAPIEDY

SEQ ID NO: 775673 - protein, 204 aa, Homo sapiens
MPFSFQVQHPSLCTPRVQCIRGSQRVPQPPAARSPRGPRAGGGGGDAGGGGAPVRRARGGGCWARAYQDARCFGRGEGGDLQVSSGPGAAPPAEFRASARSAQGSRDVPAGPGFPPRLPRPFTSASFSNQTRLRRRSASALPAPRLCPQRASPGCSSPGVRGPGGGASPRARGGNAAAALAARQAAGGGRSRSAFVAGRDAALA

SEQ ID NO: 775674 - protein, 375 aa, Homo sapiens [sequence omitted]

SEQ ID NO: 775675 - protein, 375 aa, Homo sapiens [sequence omitted]

SEQ ID NO: 775676 - protein, 338 aa, Homo sapiens
MVQARGIMLRENVKTIGHMIRLYTNKNSTLNGTDYPEGNNSSDYLVQTTTYLPENFTYSPYLPCPEKLPYMRGFLNVNVSEVSFDEIHQLFSKDLDIEPGGHWRPKDCKPRWKVAVLIPFRNRHEHLPIFFLHLIPMLQKQRLEFAFYVIEQTGTQPFNRAMLFNVGFKEAMKDSVWDCVIFHDVDHLPENDRNYYGCGEMPRHFAAKLDKYMYILPYKEFFGGVSGLTVEQFRKINGFPNAFWGWGGEDDDLWNRVHYAGYNVTRPEGDLGKYKSIPHHHRGEVQFLGRYKLLRYSKERQYIDGLNNLIYRPKILVDRLYTNISVNLMPELAPIEDY

SEQ ID NO: 775677 - protein, 158 aa, Homo sapiens
MAARSVSGITRRVFMWTVSGTPCREFWSRFRKEKEPVVVETVEEKKEPILVCPPLRSRAYTPPEDLQSRLESYVKEVFGSSLPSNWQDISLEDSRLKFNLLAHLADDLGHVVPNSRLHQMCRVRDVLDFYNVPIQDRSKFDELSASNLPPNLKITWSY

SEQ ID NO: 775678 - protein, 158 aa, Homo sapiens; identical to SEQ ID NO: 775677

SEQ ID NO: 775679 - protein, 171 aa, Homo sapiens
SRVSPSYLLNPSKMAARSVSGITRRVFMWTVSGTPCREFWSRFRKEKEPVVVETVEEKKEPILVCPPLRSRAYTPPEDLQSRLESYVKEVFGSSLPSNWQDISLEDSRLKFNLLAHLADDLGHVVPNSRLHQMCRVRDVLDFYNVPIQDRSKFDELSASNLPPNLKITWSY

SEQ ID NO: 775680 - protein, 153 aa, Homo sapiens
SRVSPSYLLNPSKMAARSVSGITRRVFMWTVSGTPCREFWSRFRKEKEPVVVETVEETEDLQSRLESYVKEVFGSSLPSNWQDISLEDSRLKFNLLAHLADDLGHVVPNSRLHQMCRVRDVLDFYNVPIQDRSKFDELSASNLPPNLKITWSY

SEQ ID NO: 775681 - protein, 158 aa, Homo sapiens; identical to SEQ ID NO: 775677

SEQ ID NO: 775682 - protein, 158 aa, Homo sapiens; identical to SEQ ID NO: 775677

SEQ ID NO: 775683 - protein, 158 aa, Homo sapiens; identical to SEQ ID NO: 775677

SEQ ID NO: 775684 - protein, 158 aa, Homo sapiens; identical to SEQ ID NO: 775677

SEQ ID NO: 775685 - protein, 159 aa, Homo sapiens
MAARSVSGITRRVFMWTVSGTPCREFWSRFRKEKEPVVVETVEEKKEPILVCPPLRSRAYTPPEDLQSRLESYVKEVFGSSLPSNWQDISLEDSRLKFNLLAHLADDLGHVVPNSRLHQMCRVRDVLDFYNVPIQDRSKFDELSASNLPPNYIEITVFP

SEQ ID NO: 775686 - protein, 872 aa, Homo sapiens
MGSLLALLALLPLWGAVAEGPAKKVLTLEGDLVLGGLFPVHQKGGPAEDCGPVNEHRGIQRLEAMLFALDRINRDPHLLPGVRLGAHILDSCSKDTHALEQALDFVRASLSRGADGSRHICPDGSYATHGDAPTAITGVIGGSYSDVSIQVANLLRLFQIPQISYASTSAKLSDKSRYDYFARTVPPDFFQAKAMAEILRFFNWTYVSTEASEGDYGETGIEAFELEARARNICVATSEKVGRAMSRAAFEGVVRALLQKPSARVAVLFTRSEDARELLAASQRLNASFTWVASDGWGALESVVAGSEGAAEGAITIELASYPISDFASYFQSLDPWNNSRNPWFREFWEQRFRCSFRQRDCAAHSLRAVPFEQESKIMFVVNAVYAMAHALHNMHRALCPNTTRLCDAMRPVNGRRLYKDFVLNLKYAAPFRPADTHNEVRFDRFGDGIGRYNIFTYLRAGSGRYRYQKVGYWAEGLTLDTSLIPWASPSAGPLPASRCSEPCLQNEVKSVQPGEVCCWLCIPCQPYEYRLDEFTCADCGLGYWPNASLTGCFELPQEYIRWGDAWAVGPVTIACLGALATLFVLGVFVRHNATPVVKASGRELCYILLGGVFLCYCMTFIFIAKPSTAVCTLRRLGLGTAFSVCYSALLTKTNRIARIFGGAREGAQRPRFISPASQVAICLALISGQLLIVVAWLVVEAPGTGKETAPERREVVTLRCNHRDASMLGSLAYNVLLIALCTLYAFKTRKCPENFNEAKFIGFTMYTTCIIWLAFLPIFYVTSSDYRVQTTTMCVSVSLSGSVVLGCLFAPKLHIILFQPQKNVVSHRAPTSRFGSAAARASSSLGQGSGSQFVPTVCNGREVVDSTTSSL

SEQ ID NO: 775687 - protein, 445 aa, Homo sapiens
MLAPFRPADTHNEVRFDRFGDGIGRYNIFTYLRAGSGRYRYQKVGYWAEGLTLDTSLIPWASPSAGPLPASRCSEPCLQNEVKSVQPGEVCCWLCIPCQPYEYRLDEFTCADCGLGYWPNASLTGCFELPQEYIRWGDAWAVGPVTIACLGALATLFVLGVFVRHNATPVVKASGRELCYILLGGVFLCYCMTFIFIAKPSTAVCTLRRLGLGTAFSVCYSALLTKTNRIARIFGGAREGAQRPRFISPASQVAICLALISGQLLIVVAWLVVEAPGTGKETAPERREVVTLRCNHRDASMLGSLAYNVLLIALCTLYAFKTRKCPENFNEAKFIGFTMYTTCIIWLAFLPIFYVTSSDYRVQTTTMCVSVSLSGSVVLGCLFAPKLHIILFQPQKNVVSHRAPTSRFGSAAARASSSLGQGSGSQFVPTVCNGREVVDSTTSSL

SEQ ID NO: 775688 - protein, 241 aa, Homo sapiens
MLAPFRPADTHNEVRFDRFGDGIGRYNIFTYLRAGSGRYRYQKVGYWAEGLTLDTSLIPWASPSAGPLPASRCSEPCLQNEVKSVQPGEVCCWLCIPCQPYEYRLDEFTCADCGLGYWPNASLTGCFELPQEYIRWGDAWAVGPVTIACLGALATLFVLGVFVRHNATPVVKASGRELCYILLGGVFLCYCMTFIFIAKPSTAVCTLRRLGLGTAFSVCYSALLTKTNRIARIFGGAREGA

SEQ ID NO: 775689 - protein, 34 aa, Homo sapiens
GPSDLGAFLPTGAGTRSSFVLLVPMKDWEPPSGS

SEQ ID NO: 775690 - protein, 31 aa, Homo sapiens
NIYFSGLWQPVICVLPLWFCLFEDVIQMESD

SEQ ID NO: 775691 - protein, 234 aa, Homo sapiens
MKKQGVNPKPLQSSRPSPSKRPYGASPARELEVEKSALGGGKLPGGARRSSPGRIPNLKKRKGLELKVVAKTLLDPFQFVRNSLAQLREEVHELQARWFPSRTTLSIAIFVAILHWLHLVTLFENDRHFSHLSSLEWEMTFRTKMGLYYSYFKTIIEAPSFLEGLWMIMNDRLTEYPLVINTVKRFHLYPEVIIAAWYRTFIGIMNLFGLETKTCWNVTRIEPLNEFKAVKACF

SEQ ID NO: 775692 - protein, 122 aa, Homo sapiens
MSSYFWAQNESNRPDLLCGQPADYLVEEKHFTTLVCFIVVLGGLLKMCLKNCEVIVLTILSLSGFVIGHMAYNSVEVHQIVYPLLRTSSFSLYSYFSPLIIFMVALDVEFYTLKKMFWQVRT

SEQ ID NO: 775693 - protein, 78 aa, Homo sapiens
KTIGLGKRGWVSISNRLILHLETAFILKEKLQVPSPATQPQDGDAAAAAFRTGWPLRCGRGTSISSWEVPQSSGAGEF

SEQ ID NO: 775694 - protein, 109 aa, Homo sapiens
MFKQLSCISLPSSCDYSSRSLLQPPSPKMVMLLLLLSALAGLFGAAEGQAFHLGKCPNPPVQENFDVNKYLGRWYEIEKIPTTFENGRCIQGQLLTNGKRKDQSVKPGS

SEQ ID NO: 775695 - protein, 91 aa, Homo sapiens
LKRDLTLLFTTATVMPSAPYWILATDYENYALVYSCTCIIQLFHVDFAWILARNPNLPPETVDSLKNILTSNNIDVKKMTVTDQVNCPKLS

SEQ ID NO: 775696 - protein, 91 aa, Homo sapiens
  misc_feature (1)..(1): Xaa can be any naturally occurring amino acid
XLLATTLLIFTATLMPSAPYWILATDYENYALVYSCTCIIQLFHVDFAWILARNPNLPPETVDSLKNILTSNNIDVKKMTVTDQVNCPKLS

SEQ ID NO: 775697 - protein, 103 aa, Homo sapiens
MISAKLCSPGARYMICCQLEVKFSWFMPSAPYWILATDYENYALVYSCTCIIQLFHVDFAWILARNPNLPPETVDSLKNILTSNNIDVKKMTVTDQVNCPKLS

SEQ ID NO: 775698 - protein, 103 aa, Homo sapiens
MPSAPYWILATDYENYALVYSCTCIIQLFHVDFAWILARNPNLPPETVDSLKNILTSNNIDVKKMTVTDQVKRLHPLHVTSASLSPTPPPRHKDKPINHDKGS

SEQ ID NO: 775699 - protein, 76 aa, Homo sapiens
SMGLGSEAWVISNRLILHLETAFILKEKLQVPSPATQPQDGDAAAAAFRTGWPLRCGRGTSISSWEVPQSSGAGEF

SEQ ID NO: 775700 - protein, 69 aa, Homo sapiens
SRDPGVPWERTALSWECPISGAGEFDVNKYLGRWYEIEKIPTTFENGRCIQGQLLTNGKRKDQSVKPGS

SEQ ID NO: 775701 - protein, 125 aa, Homo sapiens
MSNEKIQKLKGADQAISYERRSSVTEWSCNVIIKWSTSTPSCQWSSPVMPSAPYWILATDYENYALVYSCTCIIQLFHVDFAWILARNPNLPPETVDSLKNILTSNNIDVKKMTVTDQVNCPKLS

SEQ ID NO: 775702 - protein, 79 aa, Homo sapiens
MPSAPYWILATDYENYALVYSCTCIIQLFHVDFAWILARNPNLPPETVDSLKNILTSNNIDVKKRRHEMVHELDSLPSS

SEQ ID NO: 775703 - protein, 189 aa, Homo sapiens
MVMLLLLLSALAGLFGAAEGQAFHLGKCPNPPVQENFDVNKYLGRWYEIEKIPTTFENGRCIQANYSLMENGKIKVLNQELRADGTVNQIEGEATPVNLTEPAKLEVKFSWFMPSAPYWILATDYENYALVYSCTCIIQLFHVDFAWILARNPNLPPETVDSLKNILTSNNIDVKKMTVTDQVNCPKLS

SEQ ID NO: 775704 - protein, 205 aa, Homo sapiens
ALSCGQNPLPIYLTINVKDDVSNQDFREWFEFSPYEVGLQKYGAFIPSELFGSEFFMGRLVKRIPESRICYMLGLWSSIFSLNLLDAWNLSHTSEEFFHRWTREKVQDIEDEPILPEIPKCDANILETTVVIPGSWLSNSFREILTHRSFVSEFHNFLSGLQLHTNYLQNGQFSRWKGNPTWLLLEACLHMEEEDVDVKAAMDKE

SEQ ID NO: 775705 - protein, 168 aa, Homo sapiens
MVSHSELRKLFYSADAVCFDVDSTVIREEGIDELAKICGVEDAVSEMTRRAMGGAVPFKAALTERLALIQPSREQVQRLIAEQPPHLTPGIRELVSRLQERNVQVFLISGGFRSIVEHVASKLNIPATNVFANRLKFYFNGYAGLVRAPSDWGRQVTRNFNTVGGQKA

SEQ ID NO: 775706 - protein, 85 aa, Homo sapiens
PGIPCSLVPALELFGAQLCGPGSSGRRRGLCSAGAGRRVGLLPPLISRFVPFHWSFPDRVLDGALGAVGPHASLISTLPRNHAVL

SEQ ID NO: 775707 - protein, 57 aa, Homo sapiens
MVSHSELRKLFYSADAVCFDVDSTVIREEGIDWEADIAVSRDHTTALQPGQQSETLS

SEQ ID NO: 775708 - protein, 225 aa, Homo sapiens
MVSHSELRKLFYSADAVCFDVDSTVIREEGIDELAKICGVEDAVSEMTRRAMGGAVPFKAALTERLALIQPSREQVQRLIAEQPPHLTPGIRELVSRLQERNVQVFLISGGFRSIVEHVASKLNIPATNVFANRLKFYFNGEYAGFDETQPTAESGGKGKVIKLLKEKFHFKKIIMIGDGATDMEACPPADAFIGFGGNVIRQQVKDNAKWYITDFVELLGELEE

SEQ ID NO: 775709 - protein, 225 aa, Homo sapiens; identical to SEQ ID NO: 775708

SEQ ID NO: 775710 - protein, 225 aa, Homo sapiens; identical to SEQ ID NO: 775708

SEQ ID NO: 775711 - protein, 225 aa, Homo sapiens; identical to SEQ ID NO: 775708

SEQ ID NO: 775712 - protein, 225 aa, Homo sapiens; identical to SEQ ID NO: 775708

SEQ ID NO: 775713 - protein, 203 aa, Homo sapiens
RTRGSTHASGELAKICGVEDAVSEMTRRAMGGAVPFKAALTERLALIQPSREQVQRLIAEQPPHLTPGIRELVSRLQERNVQVFLISGGFRSIVEHVASKLNIPATNVFANRLKFYFNGEYAGFDETQPTAESGGKGKVIKLLKEKFHFKKIIMIGDGATDMEACPPADAFIGFGGNVIRQQVKDNAKWYITDFVELLGELEE

SEQ ID NO: 775714 - protein, 180 aa, Homo sapiens
MVSHSELRKLFYSADAVCFDVDSTVIREEGIDELAKICGVEDAVSEMELVSRLQERNVQVFLISGGFRSIVEHVASKLNIPATNVFANRLKFYFNGEYAGFDETQPTAESGGKGKVIKLLKEKFHFKKIIMIGDGATDMEACPPADAFIGFGGNVIRQQVKDNAKWYITDFVELLGELEE

SEQ ID NO: 775715 - protein, 161 aa, Homo sapiens
RLCRADRSGVSSLQKHLQNSSEATPLISRSQESVRWRPWVCTAHLPGNCSPERRSRRWPPAAGRLQPQEPRRPRTQGEYAGFDETQPTAESGGKGKVIKLLKEKFHFKKIIMIGDGATDMEACPPADAFIGFGGNVIRQQVKDNAKWYITDFVELLGELEE

SEQ ID NO: 775716 - protein, 85 aa, Homo sapiens; identical to SEQ ID NO: 775706

SEQ ID NO: 775717 - protein, 225 aa, Homo sapiens; identical to SEQ ID NO: 775708

SEQ ID NO: 775718 - protein, 87 aa, Homo sapiens
HAWGAQAPWLASAKVAVGCPQASAWPPPPISYQEELYDFPSCGKWRARSQGSAEASQWPAPAAAPAAHSPHLSLGGKFFQRWSPTQS

SEQ ID NO: 775719 - protein, 225 aa, Homo sapiens; identical to SEQ ID NO: 775708

SEQ ID NO: 775720 - protein, 225 aa, Homo sapiens; identical to SEQ ID NO: 775708

SEQ ID NO: 775721 - protein, 225 aa, Homo sapiens; identical to SEQ ID NO: 775708

SEQ ID NO: 775722 - protein, 225 aa, Homo sapiens; identical to SEQ ID NO: 775708

SEQ ID NO: 775723 - protein, 225 aa, Homo sapiens; identical to SEQ ID NO: 775708

SEQ ID NO: 775724 - protein, 180 aa, Homo sapiens; identical to SEQ ID NO: 775714

SEQ ID NO: 775725 - protein, 87 aa, Homo sapiens; identical to SEQ ID NO: 775718

SEQ ID NO: 775726 - protein, 85 aa, Homo sapiens; identical to SEQ ID NO: 775706

SEQ ID NO: 775727 - protein, 37 aa, Homo sapiens
EDAAVLGNGFRSALWRVDMVQTLGEPGSALGPSLGHC

SEQ ID NO: 775728 - protein, 223 aa, Homo sapiens [sequence omitted]

SEQ ID NO: 775729 - protein, 113 aa, Homo sapiens
ACLLRGCTQNVCCSSLSSLSTLLLSVDPEVWNVSRLTIAKHHIPVKITLQNPSISLHQSQYPLNPASLRGLKPTICKLLQAQVLKPVNSPHNTPILAVKKTRWVLLLGPRSLS

SEQ ID NO: 775730 - protein, 101 aa, Homo sapiens
KRFHHVAQAGLELGSGDPPPSASHSAGITGVNHHARSIFFKETTPSSERVSMRQGHSEQPGLRTANPRSTCSPRVNPCFQEQGLEDTFSGNPVPRAGTVLT

SEQ ID NO: 775731 - protein, 61 aa, Homo sapiens
MPPAAVACFSRPLLALCTQVSLSPRTPPCQHRILTKGEPRQPTAILGRRGLCGASRGPGCL

SEQ ID NO: 775732 - protein, 147 aa, Homo sapiens
KWGYEYPHVTDENVRPKAQNQGCPSMPVVHLWLFPWPLCSTGTREAHRVSLHTTSHPLSLRKGWQSLQVRVGVGRGGQSSALHFCHVVAVTGEKMPKSFLEEAASRRLHHILVLPSGHEWIRRFPLGEKAQKPPQRMAEVGEASHRG

SEQ ID NO: 775733 - protein, 105 aa, Homo sapiens
APVTSALLFFLHRLPGSTHLQRSSPSQEAPDIPVTWSTLAARPPSLGAEVGGLEGSVKGPPCPHVTCFCHRCRQCGQASRSTSSVHSAPVCSDAPCCGLFLRMFC

SEQ ID NO: 775734 - protein, 268 aa, Homo sapiens
RLVRRQRKMAPRRVRSFLRGLPALLLLLLFLGPWPAASHGGKYSREKNQPKPSPKRESGEEFRMEKLNQLWEKAQRLHLPPVRLAELHADLKIQERDELAWKKLKLDGLDEDGEKEARLIRNLNVILAKYGLDGKKDARQVTSNSLSGTQEDGLDDPRLEKLWHKAKTSGKFSGEELDKLWREFLHHKEKVHEYNVLLETLSRTEEIHENVISPSDLSDIKGSVLHSRHTELKEKLRSINQGLDRLRRVSHQGYSTEAGECPPGTVGS

SEQ ID NO: 775735 - protein, 172 aa, Homo sapiens
RLVRRQRKMAPRRVRSFLRGLPALLLLLLFLGPWPAASHGGKYSREKNQPKPSPKRESGEEFRMEKLNQLWEKAQRLHLPPVRLAELHADLKIQERDELAWKKLKLDGLDEDGEKEARLIRNLNGSWPWHFRGQPAVRVAGAGTGVEAGRIVSGDCSRCRRDTGLGGGSIWV

SEQ ID NO: 775736 - protein, 363 aa, Homo sapiens
IGGRGWFNRPRVRSFLRGLPALLLLLLFLGPWPAASHGGKYSREKNQPKPSPKRESGEEFRMEKLNQLWEKAQRLHLPPVRLAELHADLKIQERDELAWKKLKLDGLDEDGEKEARLIRNLNVILAKYGLDGKKDARQVTSNSLSGTQEDGLDDPRLEKLWHKAKTSGKFSGEELDKLWREFLHHKEKVHEYNVLLETLSRTEEIHENVISPSDLSDIKGSVLHSRHTELKEKLRSINQGLDRLRRVSHQGYSTEAEFEEPRVIDLWDLAQSANLTDKELEAFREELKHFEAKIEKHNHYQKQLEIAHEKLRHAESVGDGERVSRSREKHALLEGRTKELGYTVKKHLQDLSGRISRARHNEL

SEQ ID NO: 775737 - protein, 307 aa, Homo sapiens
PGKKEVVFVFFIKKVGQTRVRSFLRGLPALLLLLLFLGPWPAASHGGKYSREKNQPKPSPKRESGEEFRMEKLNQLWEKAQRLHLPPVRLAELHADLKIQERDELAWKKLKLDGLDEDGEKEARLIRNLNVILAKYGLDGKKDARQVTSNSLSGTQEDGLDDPRLEKLWHKAKTSGKFSGEELDKLWREFLHHKEKVHEYNVLLETLSRTEEIHENVISPSDLSDIKGSVLHSRHTELKEKLRSINQGLDRLRRVSHQGYSTEAEFEEPRVIDLWDLAQSANLTDKELEAFREELKHFEATSTRTSY

SEQ ID NO: 775738 - protein, 214 aa, Homo sapiens
YSGLSSNLGSLQPLFLQVFSLSLNPTSGTGREFLHHKEKVHEYNVLLETLSRTEEIHENVISPSDLSDIKGSVLHSRHTELKEKLRSINQGLDRLRRVSHQGYSTEAEFEEPRVIDLWDLAQSANLTDKELEAFREELKHFEAKIEKHNHYQKQLEIAHEKLRHAESVGDGERVSRSREKHALLEGRTKELGYTVKKHLQDLSGRISRARHNEL

SEQ ID NO: 775739 - protein, 192 aa, Homo sapiens
RLVRRQRKMAPRRVRSFLRGLPALLLLLLFLGPWPAASHGGKYSREKNQPKPSPKRESGEEFRMEKLNQLWEKAQRLHLPPVRLAELHADLKIQERDELAWKKLKLDGLDEDGEKEARLIRNLNVILAKYGLDGKKDARQVTSNSLSGTQEDGLDDPRLEKLWHKAKTSGKFSGEELDKLWKSTRTSLAPRT

SEQ ID NO: 775740 - protein, 365 aa, Homo sapiens
RLVRRQRKMAPRRVRSFLRGLPALLLLLLFLGPWPAASHGGKYSREKNQPKPSPKRESGEEFRMEKLNQLWEKAQRLHLPPVRLAELHADLKIQERDELAWKKLKLDGLDEDGEKEARLIRNLNVILAKYGLDGKKDARQVTSNSLSGTQEDGLDDPRLEKLWHKAKTSGKFSGEELDKLWREFLHHKEKVHEYNVLLETLSRTEEIHENVISPSDLSDIKGSVLHSRHTELKEKLRSINQGLDRLRRVSHQGYSTEAEFEEPRVIDLWDLAQSANLTDKELEAFREELKHFEAKIEKHNHYQKQLEIAHEKLRHAESVGDGERVSRSREKHALLEGRTKELGYTVKKHLQDLSGRISRARHNEL

SEQ ID NO: 775741 - protein, 238 aa, Homo sapiens
  misc_feature (221)..(221): Xaa can be any naturally occurring amino acid
  misc_feature (229)..(229): Xaa can be any naturally occurring amino acid
RLVRRQRKMAPRRVRSFLRGLPALLLLLLFLGPWPAASHGGKYSREKNQPKPSPKRESGEEFRMEKLNQLWEKAQRLHLPPVRLAELHADLKIQERDELAWKKLKLDGLDEDGEKEARLIRNLNVILAKYGLDGKKDARQVTSNSLSGTQEDGLDDPRLEKLWHKAKTSGKFSGEELDKLWREFLHHKEKVHEYNVLLETLSRTEAATAEESWHINRPDRXQAAQAQTXLSQDPGMTV

SEQ ID NO: 775742 - protein, 371 aa, Homo sapiens
PGKKEVVFVFFIKKVGQTRVRSFLRGLPALLLLLLFLGPWPAASHGGKYSREKNQPKPSPKRESGEEFRMEKLNQLWEKAQRLHLPPVRLAELHADLKIQERDELAWKKLKLDGLDEDGEKEARLIRNLNVILAKYGLDGKKDARQVTSNSLSGTQEDGLDDPRLEKLWHKAKTSGKFSGEELDKLWREFLHHKEKVHEYNVLLETLSRTEEIHENVISPSDLSDIKGSVLHSRHTELKEKLRSINQGLDRLRRVSHQGYSTEAEFEEPRVIDLWDLAQSANLTDKELEAFREELKHFEAKIEKHNHYQKQLEIAHEKLRHAESVGDGERVSRSREKHALLEGRTKELGYTVKKHLQDLSGRISRARHNEL

SEQ ID NO: 775743 - protein, 371 aa, Homo sapiens; identical to SEQ ID NO: 775742

SEQ ID NO: 775744 - protein, 182 aa, Homo sapiens
PGKKEVVFVFFIKKVGQTRVRSFLRGLPALLLLLLFLGPWPAASHGGKYSREKNQPKPSPKRESGEEFRMEKLNQLWEKAQRLHLPPVRLAELHADLKIQERDELAWKKLKLDGLDEDGEKEARLIRNLNVILAKYGLDGKKDARQVTSNSLSGTQEDGLDDPGSSCITKRKFTSTTSCWRP

SEQ ID NO: 775745 - protein, 304 aa, Homo sapiens
RLVRRQRKMAPRRVRSFLRGLPALLLLLLFLGPWPAASHGGKYSREKNQPKPSPKRESGEEFRMEKLNQLWEKAQRLHLPPVRLAELHADLKIQERDELAWKKLKLDGLDEDGEKEARLIRNLNVILAKYGLDGKKDARQVTSNSLSGTQEDGLDDPRLEKLWHKAKTSGKFSGEELDKLWLDRLRRVSHQGYSTEAEFEEPRVIDLWDLAQSANLTDKELEAFREELKHFEAKIEKHNHYQKQLEIAHEKLRHAESVGDGERVSRSREKHALLEGRTKELGYTVKKHLQDLSGRISRARHNEL

SEQ ID NO: 775746 - protein, 76 aa, Homo sapiens
MSVVKDGACWGLIDTSGLHSSEAVLHDVSTAHTVFVRDFVQVHEELQGGRVGGAIVDVGHLHGDPFFNSISRMSGV

SEQ ID NO: 775747 - protein, 126 aa, Homo sapiens
DSGTRWSAVALGHSQRTIKSGVSWTRGPGLLSGPQSCLPNPGRRTFLDTISSYSTPAGAAAGGLGVVLPGSDTITTRLQTSPGHLCGRPQGHIPAGSQQTGASQDPVSGSEASTWFESLRGNVDPR

SEQ ID NO: 775748 - protein, 49 aa, Homo sapiens
AAVDWELTACKVPYAAFPSALSHLHEQMARPDCGGAEKMQRRGGQQSAR

SEQ ID NO: 775749 - protein, 69 aa, Homo sapiens
SSGNPLRSSFAVWKLCSFALCRNSCCCSLFGSTLPLGAVTLTAKVRSFTPEPARPRAHREERTTPDAPP

SEQ ID NO: 775750 - protein, 68 aa, Homo sapiens
NLLTGKTFLQPPSAGIGGADTQREPLERRFYQGEPGLRHSAHSTDTRSVGGQTNKRRDGPEVLPPVRP

SEQ ID NO: 775751 - protein, 34 aa, Homo sapiens
SVTIHLLFCQRFAEDQEWQELEEALRDTHSLLES

SEQ ID NO: 775752 - protein, 217 aa, Homo sapiens
MARGRGSLGVWEPAAGEGLRVRGPAPAVQSTCGEETMDSLDHMLTDPLELGPCGDGHGTRIMEDCLLGGTRVSLPEDLLEDPEIFFDVVSLSTWQEVLSDSQREHLQQFLPQFPEDSAEQQNELILALFSGENFRFGNPLHIAQKLFRDGHFNPEVVKYRQLCFKSQYKRYLNSQQQYFHRLLKQILASRSDLLEMARRSGPALPFRQKRPSPSRTP

SEQ ID NO: 775753 - protein, 1322 aa, Homo sapiens
MDSRGLPAWTSQSTEISTCGEETMDSLDHMLTDPLELGPCGDGHGTRIMEDCLLGGTRVSLPEDLLEDPEIFFDVVSLSTWQEVLSDSQREHLQQFLPQFPEDSAEQQNELILALFSGENFRFGNPLHIAQKLFRDGHFNPEVVKYRQLCFKSQYKRYLNSQQQYFHRLLKQILASRSDLLEMARRSGPALPFRQKRPSPSRTPEEREWRTQQRYLKVLREVKEECGDTALSSDEEDLSSWLPSSPARSPSPAVPLRVVPTLSTTDMKTADKVELGDSDLKIMLKKHHEKRKHQPDHPDLLTGDLTLNDIMTRVNAGRKGSLAALYDLAVLKKKVKEKEEKKKKKIKTIKSEAEDLAEPLSSTEGVAPLSQAPSPLAIPAIKEEPLEDLKPCLGINEISSSFFSLLLEILLLESQASLPMLEERVLDWQSSPASSLNSWFSAAPNWAELVLPALQYLAGESRAVPSSFSPFVEFKEKTQQWKLLGQSQDNEKELAALFQLWLETKDQAFCKQENEDSSDATTPVPRVRTDYVVRPSTGEEKRVFQEQERYRYSQPHKAFTFRMHGFESVVGPVKGVFDKETSLNKAREHSLLRSDRPAYVTILSLVRDAAARLPNGEGTRAEICELLKDSQFLAPDVTSTQVNTVVSGALDRLHYEKDPCVKYDIGRKLWIYLHRDRSEEEFERIHQAQAAAAKARKALQQKPKPPSKVKSSSKESSIKVLSSGPSEQSQMSLSDSSMPPTPVTPVTPTTPALPAIPISPPPVSAVNKSGPSTVSEPAKSSSGVLLVSSPTMPHLGTMLSPASSQTAPSSQAAARVVSHSGSAGLSQVRVVAQPSLPAVPQQSGGPAQTLPQMPAGPQIRVPATATQTKVVPQTVMATVPVKAQTTAATVQRPGPGQTGLTVTSLPATASPVSKPATSSPGTSAPSASTAAVIQNVTGQNIIKQVAITGQLGVKPQTGNSIPLTATNFRIQGKDVLRLPPSSITTDAKGQTVLRITPDMMATLAKSQVTTVKLTQDLFGTGGNTTGKGISATLHVTSNPVHAADSPAKASSASAPSSTPTGTTVVKVTPDLKPTEASSSAFRLMPALGVSVADQKGKSTVASSEAKPAATIRIVQGLGVMPPKAGQTITVATHAKQGASVASGSGTVHTSAVSLPSMNAAVSKTVAVASGAASTPISISTGAPTVRQVPVSTTVVSTSQAGKLPTRITVPLSVISQPMKGKSVVTAPIIKGNLGANLSGLGRNIILTTMPAGTKLIAGNKPVSFLTAQQLQQLQQQGQATQVRIQTVPASHLQQGTASGSSKAVSTVVVTTAPSPKQAPEQQ

SEQ ID NO: 775754 - protein, 1324 aa, Homo sapiens
MHVFVQSTCGEETMDSLDHMLTDPLELGPCGDGHGTRIMEDCLLGGTRVSLPEDLLEDPEIFFDVVSLSTWQEVLSDSQREHLQQFLPQFPEDSAEQQNELILALFSGENFRFGNPLHIAQKLFRDGHFNPEVVKYRQLCFKSQYKRYLNSQQQYFHRLLKQILASRSDLLEMARRSGPALPFRQKRPSPSRTPEEREWRTQQRYLKVLREVKEECGDTALSSDEEATLDLQEQFSFEDLSSWLPSSPARSPSPAVPLRVVPTLSTTDMKTADKVELGDSDLKIMLKKHHEKRKHQPDHPDLLTGDLTLNDIMTRVNAGRKGSLAALYDLAVLKKKVKEKEEKKKKKIKTIKSEAEDLAEPLSSTEGVAPLSQAPSPLAIPAIKEEPLEDLKPCLGINEISSSFFSLLLEILLLESQASLPMLEERVLDWQSSPASSLNSWFSAAPNWAELVLPALQYLAGESRAVPSSFSPFVEFKEKTQQWKLLGQSQDNEKELAALFQLWLETKDQAFCKQENEDSSDATTPVPRVRTDYVVRPSTGEEKRVFQEQERYRYSQPHKAFTFRMHGFESVVGPVKGVFDKETSLNKAREHSLLRSDRPAYVTILSLVRDAAARLPNGEGTRAEICELLKDSQFLAPDVTSTQVNTVVSGALDRLHYEKDPCVKYDIGRKLWIYLHRDRSEEEFERIHQAQAAAAKARKALQQKPKPPSKVKSSSKESSIKVLSSGPSEQSQMSLSDSSMPPTPVTPVTPTTPALPAIPISPPPVSAVNKSGPSTVSEPAKSSSGVLLVSSPTMPHLGTMLSPASSQTAPSSQAAARVVSHSGSAGLSQVRVVAQPSLPAVPQQSGGPAQTLPQMPAGPQIRVPATATQTKVVPQTVMATVPVKAQTTAATVQRPGPGQTGLTVTSLPATASPVSKPATSSPGTSAPSASTAAVIQNVTGQNIIKQVAITGQLGVKPQTGNSIPLTATNFRIQGKDVLRLPPSSITTDAKGQTVLRITPDMMATLAKSQVTTVKLTQDLFGTGGNTTGKGISATLHVTSNPVHAADSPAKASSASAPSSTPTGTTVVKVTPDLKPTEASSSAFRLMPALGVSVADQKGKSTVASSEAKPAATIRIVQGLGVMPPKAGQTITVATHAKQGASVASGSGTVHTSAVSLPSMNAAVSKTVAVASGAASTPISISTGAPTVRQVPVSTTVVSTSQAGKLPTRITVPLSVISQPMKGKSVVTAPIIKGNLGANLSGLGRNIILTTMPAGTKLIAGNKPVSFLTAQQLQQLQQQGQATQVRIQTVPASHLQQGTASGSSKAVSTVVVTTAPSPKQAPEQQ

SEQ ID NO: 775755 - protein, 1169 aa, Homo sapiens
NLETVVRRDSAASGQRNSQSQAVLQSVCEFGKEFLLEQEAKMVKNFKCVLGPAESQKSYITNVWKSGSVDPVTLKIFGTCSSQVSEGKLRNILLLTSDQKDVNWRIMIVNMVWFVFSDKVELGDSDLKIMLKKHHEKRKHQPDHPDLLTGDLTLNDIMTRVNAGRKGSLAALYDLAVLKKKVKEKEEKKKKKIKTIKSEAEDLAEPLSSTEGVAPLSQAPSPLAIPAIKEEPLEDLKPCLGINEISSSFFSLLLEILLLESQASLPMLEERVLDWQSSPASSLNSWFSAAPNWAELVLPALQYLAGESRAVPSSFSPFVEFKEKTQQWKLLGQSQDNEKELAALFQLWLETKDQAFCKQENEDSSDATTPVPRVRTDYVVRPSTGEEKRVFQEQERYRYSQPHKAFTFRMHGFESVVGPVKGVFDKETSLNKAREHSLLRSDRPAYVTILSLVRDAAARLPNGEGTRAEICELLKDSQFLAPDVTSTQVNTVVSGALDRLHYEKDPCVKYDIGRKLWIYLHRDRSEEEFERIHQAQAAAAKARKALQQKPKPPSKVKSSSKESSIKVLSSGPSEQSQMSLSDSSMPPTPVTPVTPTTPALPAIPISPPPVSAVNKSGPSTVSEPAKSSSGVLLVSSPTMPHLGTMLSPASSQTAPSSQAAARVVSHSGSAGLSQVRVVAQPSLPAVPQQSGGPAQTLPQMPAGPQIRVPATATQTKVVPQTVMATVPVKAQTTAATVQRPGPGQTGLTVTSLPATASPVSKPATSSPGTSAPSASTAAVIQNVTGQNIIKQVAITGQLGVKPQTGNSIPLTATNFRIQGKDVLRLPPSSITTDAKGQTVLRITPDMMATLAKSQVTTVKLTQDLFGTGGNTTGKGISATLHVTSNPVHAADSPAKASSASAPSSTPTGTTVVKVTPDLKPTEASSSAFRLMPALGVSVADQKGKSTVASSEAKPAATIRIVQGLGVMPPKAGQTITVATHAKQGASVASGSGTVHTSAVSLPSMNAAVSKTVAVASGAASTPISISTGAPTVRQVPVSTTVVSTSQAGKLPTRITVPLSVISQPMKGKSVVTAPIIKGNLGANLSGLGRNIILTTMPAGTKLIAGNKPVSFLTAQQLQQLQQQGQATQVRIQTVPASHLQQGTASGSSKAVSTVVVTTAPSPKQAPEQQ

SEQ ID NO: 775756 - protein, 137 aa, Homo sapiens
MDSRGLPAWTSQSTEISTCGEETMDSLDHMLTDPLELGPCGDGHGTRIMEDCLLGGTRVSLPEDLLEDPEIFFDVVSLSTWQEVLSDSQREHLQQFLPQFPEDSAEQQNELILALFSGENFRFGNPLHIAQKLFRGL

SEQ ID NO: 775757 - protein, 335 aa, Homo sapiens
MDSRGLPAWTSQSTEISTCGEETMDSLDHMLTDPLELGPCGDGHGTRIMEDCLLGGTRVSLPEDLLEDPEIFFDVVSLSTWQEVLSDSQREHLQQFLPQFPEDSAEQQNELILALFSGENFRFGNPLHIAQKLFRDGHFNPEVVKYRQLCFKSQYKRYLNSQQQYFHRLLKQILASRSDLLEMARRSGPALPFRQKRPSPSRTPEEREWRTQQRYLKVLREVKEECGDTALSSDEEDLSSWLPSSPARSPSPAVPLRVVPTLSTTDMKTADKVELGDSDLKIMLKKHHEKRKHQPDHPDLLTGDLTLNDIMTRVNAGRKGSLAALYDKTVLKKKG

SEQ ID NO: 775758 - protein, 866 aa, Homo sapiens
MGAARSPPSAVPGPLLGLLLLLLGVLAPGGASLRLLDHRALVCSQPGLNCTVKNSTCLDDSWIHPRNLTPSSPKDLQIQLHFAHTQQGDLFPVAHIEWTLQTDASILYLEGAELSVLQLNTNERLCVRFEFLSKLRHHHRRWRFTFSHFVVDPDQEYEVTVHHLPKPIPDGDPNHQSKNFLVPDCEHARMKVTTPCMSSGSLWDPNITVETLEAHQLRVSFTLWNESTHYQILLTSFPHMENHSCFEHMHHIPAPRPEEFHQRSNVTLTLRNLKGCCRHQVQIQPFFSSCLNDCLRHSATVSCPEMPDTPEPIPDYMPLWVYWFITGISILLVGSVILLIVCMTWRLAGPGSEKYSDDTKYTDGLPAADLIPPPLKPRKVWIIYSADHPLYVDVVLKFAQFLLTACGTEVALDLLEEQAISEAGVMTWVGRQKQEMVESNSKIIVLCSRGTRAKWQALLGRGAPVRLRCDHGKPVGDLFTAAMNMILPDFKRPACFGTYVVCYFSEVSCDGDVPDLFGAAPRYPLMDRFEEVYFRIQDLEMFQPGRMHRVGELSGDNYLRSPGGRQLRAALDRFRDWQVRCPDWFECENLYSADDQDAPSLDEEVFEEPLLPPGTGIVKRAPLVREPGSQACLAIDPLVGEEGGAAVAKLEPHLQPRGQPAPQPLHTLVLAAEEGALVAAVEPGPLADGAAVRLALAGEGEACPLLGSPGAGRNSVLFLPVDPEDSPLGSSTPMASPDLLPEDVREHLEGLMLSLFEQSLSCQAQGGCSRPAMVLTDPHTPYEEEQRQSVQSDQGYISRSSPQPPEGLTEMEEEEEEEQDPGKPALPLSPEDLESLRSLQRQLLFRQLQKNSGWDTMGSESEGPSA

SEQ ID NO: 775759 - protein, 527 aa, Homo sapiens
TPVYFFSFPGPGSEKYSDDTKYTDGLPAADLIPPPLKPRKVWIIYSADHPLYVDVVLKFAQFLLTACGTEVALDLLEEQAISEAGVMTWVGRQKQEMVESNSKIIVLCSRGTRAKWQALLGRGAPVRLRCDHGKPVGDLFTAAMNMILPDFKRPACFGTYVVCYFSEVSCDGDVPDLFGAAPRYPLMDRFEEVYFRIQDLEMFQPGRMHRVGELSGDNYLRSPGGRQLRAALDRFRDWQVRCPDWFECENLYSADDQDAPSLDEEVFEEPLLPPGTGIVKRAPLVREPGSQACLAIDPLVGEEGGAAVAKLEPHLQPRGQPAPQPLHTLVLAAEEGALVAAVEPGPLADGAAVRLALAGEGEACPLLGSPGAGRNSVLFLPVDPEDSPLGSSTPMASPDLLPEDVREHLEGLMLSLFEQSLSCQAQGGCSRPAMVLTDPHTPYEEEQRQSVQSDQGYISRSSPQPPEGLTEMEEEEEEEQDPGKPALPLSPEDLESLRSLQRQLLFRQLQKNSGWDTMGSESEGPSA

SEQ ID NO: 775760 - protein, 808 aa, Homo sapiens
WKIDEYAMSDIRVMIRKYADRAYVIIMPHRDEYKEGVGYVFSQGVENECEASYTIAAYIYKSTAASTIDPATSKPPETSAGPSPEPSDVPGDVAVDVAVDVGVHHLPKPIPDGDPNHQSKNFLVPDCEHARMKVTTPCMSSGSLWDPNITVETLEAHQLRVSFTLWNESTHYQILLTSFPHMENHSCFEHMHHIPAPRPEEFHQRSNVTLTLRNLKGCCRHQVQIQPFFSSCLNDCLRHSATVSCPEMPDTPEPIPDYMPLWVYWFITGISILLVGSVILLIVCMTWRLAGPGSEKYSDDTKYTDGLPAADLIPPPLKPRKVWIIYSADHPLYVDVVLKFAQFLLTACGTEVALDLLEEQAISEAGVMTWVGRQKQEMVESNSKIIVLCSRGTRAKWQALLGRGAPVRLRCDHGKPVGDLFTAAMNMILPDFKRPACFGTYVVCYFSEVSCDGDVPDLFGAAPRYPLMDRFEEVYFRIQDLEMFQPGRMHRVGELSGDNYLRSPGGRQLRAALDRFRDWQVRCPDWFECENLYSADDQDAPSLDEEVFEEPLLPPGTGIVKRAPLVREPGSQACLAIDPLVGEEGGAAVAKLEPHLQPRGQPAPQPLHTLVLAAEEGALVAAVEPGPLADGAAVRLALAGEGEACPLLGSPGAGRNSVLFLPVDPEDSPLGSSTPMASPDLLPEDVREHLEGLMLSLFEQSLSCQAQGGCSRPAMVLTDPHTPYEEEQRQSVQSDQGYISRSSPQPPEGLTEMEEEEEEEQDPGKPALPLSPEDLESLRSLQRQLLFRQLQKNSGWDTMGSESEGPSA

SEQ ID NO: 775761 - protein, 111 aa, Homo sapiens
AGSRKRAKWSRLELHRGKESLRTFARCVPSRGRALRDATRAMGAARSPPSAVPGPLLGLLLLLLGVLAPGGASLRLLDHRALVCSQPGLNCTVKNSKSSFSVLLLVAFLIK

SEQ ID NO: 775762 - protein, 138 aa, Homo sapiens
IQQRRNWRGPRLLAHPQQAQEECTCIRRVPREMRIRQAGWHPCQGGSSPGAHSEGATCGQAPSGEKIVVLGVRSLEEQISEGRGLMSFLFSGSTDCEHARMKVTTPCMSSGNSWPGRALFGCIHMHMCVPLLTPSLRV

SEQ ID NO: 775763 - protein, 356 aa, Homo sapiens
MTKSYSESGLMGEPQPQGPPSWTDECLSSQDEEHEADKKEDDLEAMNAEEDSLRNGGEEEDEDEDLEEEEEEEEEDDDQKPKRRGPKKKKMTKARLERFKLRRMKANARERNRMHGLNAALDNLRKVVPCYSKTQKLSKIETLRLAKNYIWALSEILRSGKSPDLVSFVQTLCKGLSQPTTNLVAGCLQLNPRTFLPEQNQDMPPHLPTASASFPVHPYSYQSPGLPSPPYGTMDSSHVFHVKPPPHAYSAALEPFFESPLTDCTSPSFDGPLSPPLSINGNFSFKHEPSAEFEKNYAFTMHYPAATLAGAQSHGSIFSGTAAPRCEIPIDNIMSFDSHSHHERVMSAQLNAIFHD

SEQ ID NO: 775764 - protein, 80 aa, Homo sapiens
MGSCCVAQAGSYCFNALQQTLQGLRVDNPHKAGLKSKPKLLVPEEEISRSFTDYRGKQMSYRTYSFSNINYKTVTEVLLK

SEQ ID NO: 775765 - protein, 290 aa, Homo sapiens
SGGREAAAEARARPSLVPPGARLAATPTPAPVPSCPGAPRPRPGPRSAPPEGAALPAESAGPAMTDFKLGIVRLGRVAGKTKYTLIDEQDIPLVESYSFEARMEVDADGNGAKIFAYAFDKNRGRGSGRLLHELLWERHRGGVAPGFQVVHLNAVTVDNRLDNLQLVPWGWRPKAEETSSKQREQSLYWLAIQQLPTDPIEEQFPVLNVTRYYNANGDVVEEEENSCTYYECHYPPCTVIEKQLREFNICGRCQVARYCGSQCQQKDWPAHKKHCRERKRPFQHELEPER

SEQ ID NO: 775766 - protein, 80 aa, Homo sapiens
PCFELRPLSSARTQVSPTVPVPKELRACWGNSPRNTSLAPSVDPEEGAPRRSGPGPNSEGSSLQNQPLELRDSPTALRTP

SEQ ID NO: 775767 - protein, 38 aa, Homo sapiens
QAGCPQSGALGRARLDLRGYKKAAGPPHRRPGPDRTAT

SEQ ID NO: 775768 - protein, 115 aa, Homo sapiens
MTPLSPGRPSRGQHLDDETQFRRRSTERSPSFPGSPGSLLPLLLYSWQMTTGKAKRGPRTEEAVPRVCRGHKPQKFASLLPETGRTRNSLLKHVLNRVCNNMRLKSYCQTTKYNY

SEQ ID NO: 775769 - protein, 100 aa, Homo sapiens
STIVVSYMCILCAILQIQSREVQRKAFCTCFSHLCVIGLFYGTAIIMYVGPRYGNPKEQKKYLLLFHSLFNPMLNPLICSLRNSEVKNTLKRVLGVERAL

SEQ ID NO: 775770 - protein, 48 aa, Homo sapiens
MYKLTGLKAIMPARRFGGHFSGWTGASHLSKRIEPFQEEENPQRGVQI

SEQ ID NO: 775771 - protein, 155 aa, Homo sapiens
MAQKMDCGAGLLGFQAEASVEDSALLMQTLMEAIQISEAPPTNQATAAASPQSSQPPTANEMADIQVSAAAARPKSAFKVQNATTKGPNGVYDFSQAHNAKDVPNTQPKAAFKSQNATPKGPNAAYDFSQAATTGELAANKSEMAFKAQNATTKV

SEQ ID NO: 775772 - protein, 116 aa, Homo sapiens
HDLGSLQPLPPTFKQFSASASQVARITGACHHARLIFVFLVEMGFHHVGQACLKLLTSGDPPASASQSAGITDVSHCAQWHWCFSCLQFQPLTPNPKVMCNPGMNKCKWCLLALGV

SEQ ID NO: 775773 - protein, 231 aa, Homo sapiens
LNFAAPSVSGQLLSVAAVFPMVCPGCLPCAILASPRQRLHPRSGLAPTPTALPPPTSASHLGVEGPASKTKESLTRTGQSGRDGGEGGAALAEPSLHSLPLERPSRLGPGRSGPAPPPAPVAGHQVRPYRGLRQGEGERGSLQTRPGRGGPGCPLLGSFHVLVPPELPFKPCPGPEVGNGFVFAPPGVPAARPLQLQQRQGHVPSAPARKTVALTLLCAPQLPPAAPPSGF

SEQ ID NO: 775774 - protein, 275 aa, Homo sapiens
PITSSTGFATCIAWQVHLARFPGIIDNHYPHVKLFQFLKLTSWILRNITRNTPLPEAVTVFTDASSNGRAAYTGPRERVLNTGAISAQRAELPAVMAVLEDFPEPVNIFSDSAYVVHVARNIETALIKFLPDDNLFLLFQKFQSVLRARSSPFYSTHIRAHTPLPGPLSAANARADTLVTPVFTDAENFHALTHVNAAGLRNKFPLTWKQAKTTVRHCPTCQVLILPPLSSGVNPRGLSQNALWQMDVTHYPPFGKLSFIHVTIDTFSHFIWATC

SEQ ID NO: 775775 - protein, 74 aa, Homo sapiens
VLPTPTPPAKAKAISSGPTKSPNLEPHLLPPVQEEPSSQSQDFPGGLSVWGLSKLRAFPAQIRSSGSLTNPPQP

SEQ ID NO: 775776 - protein, 48 aa, Homo sapiens
KRKMKLRAAGLAQGLQAANGRGQNGNQGPRNPRAPALSVPTDGIYSSA

SEQ ID NO: 775777 - protein, 61 aa, Homo sapiens
CPRSGAWRQRWGDLCCVFLVYTGWAVCYVYGLSSWGLQSQPQAWSSSKALAVQPPHFQAGQ

SEQ ID NO: 775778 - protein, 233 aa, Homo sapiens
MSSTVNNGAASMQSTPDAANGFPQPSSSSGTWPRAEEELRAAEPGLVKRAHREILDHERKRRVELKCMELQEMMEEQGYSEEEIRQKVGTFRQMLMEKEGVLTREDRPGGHIVAETPRLTEGAEPGLEYAPFDDDDGPVDCDCPASCYRGHRGYRTKHWSSSSASPPPKKKKKKKGGHRRSRKKRRLESECSCGSSSPLRKKKKSVKKHRRDRSDSGSRRKRRHRSRSYQVQK

SEQ ID NO: 775779 - protein, 177 aa, Homo sapiens
LLNKNGVNYIHSFAVPLSHRVAARRLAGLGQAPCAEKRGEEKSSRDLVVSVPVAGSVAETPRLTEGAEPGLEYAPFDDDDGPVDCDCPASCYRGHRGYRTKHWSSSSASPPPKKKKKKKGGHRRSRKKRRLESECSCGSSSPLRKKKKSVKKHRRDRSDSGSRRKRRHRSRSYQVQK

SEQ ID NO: 775780 - protein, 346 aa, Homo sapiens
MYNGSCCRIEGDTISQVMPPLLIVAFVLGALGNGVALCGFCFHMKTWKPSTVYLFNLAVADFLLMICLPFRTDYYLRRRHWAFGDIPCRVGLFTLAMNRAGSIVFLTVVAADRYFKVVHPHHAVNTISTRVAAGIVCTLWALVILGTVYLLLENHLCVQETAVSCESFIMESANGWHDIMFQLEFFMPLGIILFCSFKIVWSLRRRQQLARQARMKKATRFIMVVAIVFITCYLPSVSARLYFLWTVPSSACDPSVHGALHITLSFTYMNSMLDPLVYYFSSPSFPKFYNKLKICSLKPKQPGHSKTQRPEEMPISNLGRRSCISVANSFQSQSDGQWDPHIVEWH

SEQ ID NO: 775781 - protein, 326 aa, Homo sapiens
GASPLTDSRWRRQRRRPWTAGNGNPRSLTEHLPRLPAPDMAQEKMELDLELPPGTGGSPAEGGGSGGGGGLRRSNSAPLIHGLSDTSPVFQAEAPSARRNSTTFPSRHGLLLPASPVRMHSSRLHQIKQEEGMDLINRETVHEREVQTAMQISHSWEESFSLSDNDVEKSASPKRIDFIPVSPAPSPTRGIGKQCFSPSLQSFVSSNGLPPSPIPSPTTRFTTRRSQSPINCIRPSVLGPLKRKCEMETEYQPKRFFQGITNMLSSDVAQLSDPGVCVSSDTLDGNSSSAGSSCNSPAKVSTTTDSPVSPAQAASPFIPLDELSSK

SEQ ID NO: 775782 - protein, 326 aa, Homo sapiens; identical to SEQ ID NO: 775781

SEQ ID NO: 775783 - protein, 67 aa, Homo sapiens
ALKHVLTTPFPRFVRIEARIDHACFHGSSALKHVLTTPVPRFVRIEARIDHACFHGSSALKHVLTTP

SEQ ID NO: 775784 - protein, 220 aa, Homo sapiens
HELMLKENLTLIQQEVDALEELSRQLFLETADLYATKERIEYSKTFKGKYFNFLGYFFSIYCVWKIFMATINIVFDRVGKTDPVTRGIEITVNYLGIQFDVKFWSQHISFILVGIIIVTSIRGLLITLTKFFYAISSSKSSNVIVLLLAQIMGMYFVSSVLLIRMSMPLEYRTIITEVLGELQFNFYHRWFDVIFLVSALSSILFLYLAHKQAPEKQMAP

SEQ ID NO: 775785 - protein, 107 aa, Homo sapiens
PGVCSLNKYWLSTSYIPCRPVCAAERLTQWRDTLSAIKCWTNRSNRPHPVYFCTYILNSLNFDTRCDVSCLTEAAAKVQPLQVCWEGPWSTAPTGHHMQGLPEEKCR

SEQ ID NO: 775786 - protein, 38 aa, Homo sapiens
VQNEHRLSAALAPGGHVSEGEEEKPMVHGYRCGRTAGS

SEQ ID NO: 775787 - protein, 123 aa, Homo sapiens
QISLPPWHPLPRCWALQGRASLGHVPSLALEYAHSVLTETLLRAWSRFLPSPARHRHQWEVPGLHRPVGARGSPVASTKCTTAHGWLGAWEEPEPDPRPPGFLAAHCRVGAEPRAYTGCGLQP

SEQ ID NO: 775788 - protein, 74 aa, Homo sapiens
HLLSWGFARSGFFLLVPATQASPMSTLKPCNHVGLHAWPCGHWPVRVTARCAGLSLPLPLERHPHRCFLYPQVP

SEQ ID NO: 775789 - protein, 114 aa, Homo sapiens
SCQFFLFFSFKLNVSKIKLVYSPDLLISFMFITFFFVLVNDCHPSQNLGSSLIFLAPYMQPPNFSLHLLLTPIATASVWTIANLQLGSRAFSRSSELLALFPHPEPATGDPSKM

SEQ ID NO: 775790 - protein, 150 aa, Homo sapiens
YSTQFIWLPVATQSGCGLLALPLTTCSLAAADRERGESWWRPACPSQRWNGRYHLLPCSTDEASRQAGVPLDTGNTACLIPATQLGYRQYTKCVALWWGVPESTLGAPVAVHDLPSVRPPGEPATGVLPPWYETEWGSPDKMMDPGLHSW

SEQ ID NO: 775791 - protein, 105 aa, Homo sapiens
AEGHCSPVVGLRVPFSALMKTGSLPRCERWRGQAGVQLWPQGGVESAASQQYNLGWAQLFLETSRGGGLPNPAGGCWPRPAHQGSVSLQMAAFRPSPKTLGALFT

SEQ ID NO: 775792 - protein, 98 aa, Homo sapiens
LRAANSGASCPRRFKYRTEIAPGKGDMPTLTDKGRGRFALIIYENILKYVNLDAWNRELLDKYCVAYGVGIIGFFKPIENSPADCTAPRSYTSSLLSH

SEQ ID NO: 775793 - protein, 882 aa, Homo sapiens
MPALACLRRLCRHVSPQAVLFLLFIFCLFSVFISAYYLYGWKRGLEPSADAPEPDCGDPPPVAPSRLLPLKPVQAATPSRTDPLVLVFVESLYSQLGQEVVAILESSRFKYRTEIAPGKGDMPTLTDKGRGRFALIIYENILKYVNLDAWNRELLDKYCVAYGVGIIGFFKANENSLLSAQLKGFPLFLHSNLGLKDCSINPKSPLLYVTRPSEVEKGVLPGEDWTVFQSNHSTYEPVLLAKTRSSESIPHLGADAGLHAALHATVVQDLGLHDGIQRVLFGNNLNFWLHKLVFVDAVAFLTGKRLSLPLDRYILVDIDDIFVGKEGTRMKVEDVKALFDTQNELRAHIPNFTFNLGYSGKFFHTGTNAEDAGDDLLLSYVKEFWWFPHMWSHMQPHLFHNQSVLAEQMALNKKFAVEHGIPTDMGYAVAPHHSGVYPVHVQLYEAWKQVWSIRVTSTEEYPHLKPARYRRGFIHNGIMVLPRQTCGLFTHTIFYNEYPGGSSELDKIINGGELFLTVLLNPISIFMTHLSNYGNDRLGLYTFKHLVRFLHSWTNLRLQTLPPVQLAQKYFQIFSEEKDPLWQDPCEDKRHKDIWSKEKTCDRFPKLLIIGPQKTGTTALYLFLGMHPDLSSNYPSSETFEEIQFFNGHNYHKGIDWYMEFFPIPSNTTSDFYFEKSANYFDSEVAPRRAAALLPKAKVLTILINPADRAYSWYQHQRAHDDPVALKYTFHEVITAGSDASSKLRALQNRCLVPGWYATHIERWLSAYHANQILVLDGKLLRTEPAKVMDMVQKFLGVTNTIDYHKTLAFDPKKGFWCQLLEGGKTKCLGKSKGRKYPEMDLDSRAFLKDYYRDHNIELSKLLYKMGQTLPTWLREDLQNTR

SEQ ID NO: 775794 - protein, 882 aa, Homo sapiens; identical to SEQ ID NO: 775793

SEQ ID NO: 775795 - protein, 882 aa, Homo sapiens; identical to SEQ ID NO: 775793

SEQ ID NO: 775796 - protein, 882 aa, Homo sapiens; identical to SEQ ID NO: 775793

SEQ ID NO: 775797 - protein, 882 aa, Homo sapiens; identical to SEQ ID NO: 775793

SEQ ID NO: 775798 - protein, 882 aa, Homo sapiens; identical to SEQ ID NO: 775793

SEQ ID NO: 775799 - protein, 882 aa, Homo sapiens; identical to SEQ ID NO: 775793

SEQ ID NO: 775800 - protein, 882 aa, Homo sapiens; identical to SEQ ID NO: 775793

SEQ ID NO: 775801 - protein, 882 aa, Homo sapiens; identical to SEQ ID NO: 775793

SEQ ID NO: 775802 - protein, 882 aa, Homo sapiens; identical to SEQ ID NO: 775793

SEQ ID NO: 775803 - protein, 825 aa, Homo sapiens
MPALACLRRLCRHVSPQAVLFLLFIFCLFSVFISAYYLYGWKRGLEPSADAPEPDCGDPPPVAPSRLLPLKPVQAATPSRTDPLVLVFVESLYSQLGQEVVAILESSRFKYRTEIAPGKGDMPTLTDKGRGRFALIIYENILKYVNLDAWNRELLDKYCVAYGVGIIGFFKANENSLLSAQLKGFPLFLHSNLGLKDCSINPKSPLLYVTRPSEVEKGVLPGEDWTVFQSNHSTYEPVLLAKTRSSESIPHLGADAGLHAALHATVVQDLGLHDGIQRVLFGNNLNFWLHKLVFVDAVAFLTGKRLSLPLDRYILVDIDDIFVGKEGTRMKVEDVKALFDTQNELRAHIPNFTFNLGYSGKFFHTGTNAEDAGDDLLLSYVKEFWWFPHMWSHMQPHLFHNQSVLAEQMALNKKFAVEHGIPTDMGYAVAPHHSGVYPVHVQLYEAWKQVWSIRVTSTEEYPHLKPARYRRGFIHNGIMVLPRQTCGLFTHTIFYNEYPGGSSELDKIINGGELFLTVLLNPISIFMTHLSNYGNDRLGLYTFKHLVRFLHSWTNLRLQTLPPVQLAQKYFQIFSEEKDPLWQDPCEDKRHKDIWSKEKTCDRFPKLLIIGPQKTGTTALYLFLGMHPDLSSNYPSSETFEEIQFFNGHNYHKGIDWYMEFFPIPSNTTSDFYFEKSANYFDSEVAPRRAAALLPKAKVLTILINPADRAYSWYQILVLDGKLLRTEPAKVMDMVQKFLGVTNTIDYHKTLAFDPKKGFWCQLLEGGKTKCLGKSKGRKYPEMDLDSRAFLKDYYRDHNIELSKLLYKMGQTLPTWLREDLQNTR

SEQ ID NO: 775804 - protein, 674 aa, Homo sapiens
NSFSCVNVKGVLPGEDWTVFQSNHSTYEPVLLAKTRSSESIPHLGADAGLHAALHATVVQDLGLHDGIQRVLFGNNLNFWLHKLVFVDAVAFLTGKRLSLPLDRYILVDIDDIFVGKEGTRMKVEDVKALFDTQNELRAHIPNFTFNLGYSGKFFHTGTNAEDAGDDLLLSYVKEFWWFPHMWSHMQPHLFHNQSVLAEQMALNKKFAVEHGIPTDMGYAVAPHHSGVYPVHVQLYEAWKQVWSIRVTSTEEYPHLKPARYRRGFIHNGIMVLPRQTCGLFTHTIFYNEYPGGSSELDKIINGGELFLTVLLNPISIFMTHLSNYGNDRLGLYTFKHLVRFLHSWTNLRLQTLPPVQLAQKYFQIFSEEKDPLWQDPCEDKRHKDIWSKEKTCDRFPKLLIIGPQKTGTTALYLFLGMHPDLSSNYPSSETFEEIQFFNGHNYHKGIDWYMEFFPIPSNTTSDFYFEKSANYFDSEVAPRRAAALLPKAKVLTILINPADRAYSWYQHQRAHDDPVALKYTFHEVITAGSDASSKLRALQNRCLVPGWYATHIERWLSAYHANQILVLDGKLLRTEPAKVMDMVQKFLGVTNTIDYHKTLAFDPKKGFWCQLLEGGKTKCLGKSKGRKYPEMDLDSRAFLKDYYRDHNIELSKLLYKMGQTLPTWLREDLQNTR

SEQ ID NO: 775805 - protein, 854 aa, Homo sapiens
MPALACLRRLCRHVSPQAVLFLLFIFCLFSVFISAYYLYGWKRGLEPSADAPEPDCGDPPPVAPSRLLPLKPVQAATPSRTDPLVLVFVESLYSQLGQEVVAILESSRFKYRTEIAPGKGDMPTLTDKGRGRFALIIYENILKYVNLDAWNRELLDKYCVAYGVGIIGFFKANENSLLSAQLKGFPLFLHSNLGLKDCSINPKSPLLYVTRPSEVEKGVLPGEDWTVFQSNHSTYEPVLLAKTRSSESIPHLGADAGLHAALHATVVQDLGLHDGIQRVLFGNNLNFWLHKLVFVDAVAFLTGKRLSLPLDRYILVDIDDIFVGKEGTRMKVEDVKALFDTQNELRAHIPNFTFNLGYSGKFFHTGTNAEDAGDDLLLSYVKEFWWFPHMWSHMQPHLFHNQSVLAEQMALNKKFAVEHGIPTDMGYAVAPHHSGVYPVHVQLYEAWKQVWSIRVTSTEEYPHLKPARYRRGFIHNGIMVLPRQTCGLFTHTIFYNEYPGGSSELDKIINGGELFLTVLLNPISIFMTHLSNYGNDRLGLYTFKHLVRFLHSWTNLRLQTLPPVQLAQKYFQIFSEEKDPLWQDPCEDKRHKDIWSKEKTCDRFPKLLIIGPQKTGTTALYLFLGMHPDLSSNYPSSETFEEIQFFNGHNYHKGIDWYMEFFPIPSNTTSDFYFEKSANYFDSEVAPRRAAALLPKAKVLTILINPADRAYSWYQLVRLPATALLSHLWPRALRDPLNLPNTKKLKYFNILFFFFLVPEFIPWVLGSHCVIYIYIYIYNVYIYIFYFFWLGSFLIQSYKMVVSPSLRGHPVLELEMRWQGGRLCPQWPGAEQTLGRGPPQCRGCSGATPGEQRW

SEQ ID NO: 775806 - protein, 556 aa, Homo sapiens
MPALACLRRLCRHVSPQAVLFLLFIFCLFSVFISAYYLYGWKRGLEPSADAPEPDCGDPPPVAPSRLLPLKPVQAATPSRTDPLVLVFVESLYSQLGQEVVAILESSRFKYRTEIAPGKGDMPTLTDKGRGRFALIIYENILKYVNLDAWNRELLDKYCVAYGVGIIGFFKANENSLLSAQLKGFPLFLHSNLGLKDCSINPKSPLLYVTRPSEVEKGVLPGEDWTVFQSNHSTYEPVLLAKTRSSESIPHLGADAGLHAALHATVVQDLGLHDGIQRVLFGNNLNFWLHKLVFVDAVAFLTGKRLSLPLDRYILVDIDDIFVGKEGTRMKVEDVKALFDTQNELRAHIPNFTFNLGYSGKFFHTGTNAEDAGDDLLLSYVKEFWWFPHMWSHMQPHLFHNQSVLAEQMALNKKFAVEHGIPTDMGYAVAPHHSGVYPVHVQLYEAWKQVWSIRVTSTEEYPHLKPARYRRGFIHNGIMVLPRQTCGLFTHTIFYNEYPGGSSELDKIINGGELFLTVLLNPVSAPQPMAAGEKGLLHSLSAADTGFLEPGKGGEA

SEQ ID NO: 775807 - protein, 900 aa, Homo sapiens
MPALACLRRLCRHVSPQAVLFLLFIFCLFSVFISAYYLYGWKRGLEPSADAPEPDCGDPPPVAPSRLLPLKPVQAATPSRTDPLVLVFVESLYSQLGQEVVAILESSRFKYRTEIAPGKGDMPTLTDKGRGRFALIIYENILKYVNLDAWNRELLDKYCVAYGVGIIGFFKANENSLLSAQLKGFPLFLHSNLGLKDCSINPKSPLLYVTRPSEVEKGVLPGEDWTVFQSNHSTYEPVLLAKTRSSESIPHLGADAGLHAALHATVVQDLGLHDGIQRVLFGNNLNFWLHKLVFVDAVAFLTGKRLSLPLDRYILVDIDDIFVGKEGTRMKVEDVKALFDTQNELRAHIPNFTFNLGYSGKFFHTGTNAEDAGDDLLLSYVKEFWWFPHMWSHMQPHLFHNQSVLAEQMALNKKFAVEHGIPTDMGYAVAPHHSGVYPVHVQLYEAWKQVWSIRVTSTEEYPHLKPARYRRGFIHNGIMVLPRQTCGLFTHTIFYNEYPGGSSELDKIINGGELFLTVLLNPISIFMTHLSNYGNDRLGLYTFKHLVRFLHSWTNLRLQTLPPVQLAQKYFQIFSEEKDPLWQDPCEDKRHKDIWSKEKTCDRFPKLLIIGPQKTGTTALYLFLGMHPDLSSNYPSSETFEEIQFFNGHNYHKGIDWYMEFFPIPSNTTSDFYFEKSANYFDSEVAPRRAAALLPKAKVLTILINPADRAYSWYQHQRAHDDPVALKYTFHEVITAGSDASSKLRALQNRCLVPGWYATHIERWLSAYHANQILVLDGKLLRTEPAKVMDMVQKFLGVTNTIDYHKTLAFDPKKGFWCQLLEGGKTKCLGKSKGRKYPEMDLDVSGGHTTCSTCIRVRGPCMELRGILFPLPCTQHVHGLSISWTVFVRGGKWGLGHGGS

SEQ ID NO: 775808 - protein, 713 aa, Homo sapiens
MPALACLRRLCRHVSPQAVLFLLFIFCLFSVFISAYYLYGWKRGLEPSADAPEPDCGDPPPVAPSRLLPLKPVQAATPSRTDPLVLVFVESLYSQLGQEVVAILESSRFKYRTEIAPGKGDMPTLTDKGRGRFALIIYENILKYVNLDAWNRELLDKYCVAYGVGIIGFFKANENSLLSAQLKGFPLFLHSNLGLKDCSINPKSPLLYVTRPSEVEKGVLPGEDWTVFQSNHSTYEPVLLAKTRSSESIPHLGADAGLHAALHATVVQDLGLHDGIQRVLFGNNLNFWLHKLVFVDAVAFLTGKRLSLPLDRYILVDIDDIFVGKEGTRMKVEDVKALFDTQNELRAHIPNFTFNLGYSGKFFHTGTNAEDAGDDLLLSYVKEFWWFPHMWSHMQPHLFHNQSVLAEQMALNKKFAVEHGIPTDMGYAVAPHHSGVYPVHVQLYEAWKQVWSIRVTSTEEYPHLKPARYRRGFIHNGIMVLPRQTCGLFTHTIFYNEYPGGSSELDKIINGGELFLTVLLNPISIFMTHLSNYGNDRLGLYTFKHLVRFLHSWTNLRLQTLPPVQLAQKYFQIFSEEKDPLWQDPCEDKRHKDIWSKEKTCDRFPKLLIIGPQKTGTTALYLFLGMHPDLSSNYPSSETFEEIQFFNGHNYHKGIDWYMEFFPIPSNTTSDFYFEKSANYFDSEVAPRRAAALLPKAKVLTIRSSAEDPARSR

SEQ ID NO: 775809 - protein, 194 aa, Homo sapiens
MPALACLRRLCRHVSPQAVLFLLFIFCLFSVFISAYYLYGWKRGLEPSADAPEPDCGDPPPVAPSRLLPLKPVQAATPSRTDPLVLVFVESLYSQLGQEVVAILESSRFKYRTEIAPGKGDMPTLTDKGRGRFALIIYENILKYVNLDAWNRELLDKYCVAYGVGIIGFFKVHKKQGPRAVQSPLCSSVPEFSF

SEQ ID NO: 775810 - protein, 118 aa, Homo sapiens
PAPIQRLSHLHRFDPKKGFWCQLLEGGKTKCLGKSKGRKYPEMDLDVSGGHTTCSTCIRVRGPCMELRGILFPLPCTQHVHGLSISWTVFVRGGKWGLGHGGSDLISSNKCWLPSTKG

SEQ ID NO: 775811 - protein, 74 aa, Homo sapiens
EGAGSHIYKQAHSCCRGCCPCLPPKSKQVPIPFLPFQILVLDGKLLRTEPAKVMDMVQKFLGVTNTIDYHKTLA

SEQ ID NO: 775812 - protein, 103 aa, Homo sapiens
LAASRNYLHSCYLNRNHVLCLKTFSGPLVSEATSRLSNTAIHVIFHYLMILQILLDLKNPFGWVQWLIPVIQPTRETEAEALPESRRSRLAVSCVCATTLQPR

SEQ ID NO: 775813 - protein, 82 aa, Homo sapiens
QESSFPGAFLRGSALRGQAPPFPPLHHQGSGSACGSQVPPLLRKSQREAGEGEGSLGLPSSDLPSTHTAHSGLKGPTPQPAA

SEQ ID NO: 775814 - protein, 242 aa, Homo sapiens
MASLDDPGEVREGFLCPLCLKDLQSFYQLHSHYEEEHSGEDRDVKGQIKSLVQKAKKAKDRLLKREGDDRAESGNQGIMSLSAMEGLILTCGNPQELGAVRRHLSDFKKHRAARMTNYSGKSLQLTNQVEKLTASTDTNTESERFEHRNVGCWSTTTMSFANGDKSDPDRAHCALQAKSARSMGYKTYRSSHMLLSLYQPAQSPIGKRQQQTIRRKNRHDRHTNHDQAKGGQQTLTVTADTQ

SEQ ID NO: 775815 - protein, 817 aa, Homo sapiens
MGERKCWLSTSRRTRWVPEELQDKEFAAVLQDEPLQPLALEPLTEEEQAAAVVTAAFTKEASKKAMGPLDEAPGKSSAARAGMTARCGFEEGGAGPRKEHARSDSENWRSLREEQEEEEEGSWRLGAGPRRDGDRWRSASPDGGPRSAGWREHGERRRKFEFDLRGDRGGCGEEEGRGGGGSSHLRRCRAPEGFEEDKDGLPEWCLDDEDEEMGTFDASGAFLPLKLFSAPHPGPMQKGPKEPIPEEQELDFQGLEEEEEPSEGLEEEGPEADDIRGIQLSPGVGSSAGPPGDLEDDEGLKHLQQGIQEAEKLVASLQDSSLEEEQFTAAMQTQGLRHSAAATALPLSHGAARKWFYKDPQGEIQGPFTTQEMAEWFQAGYFSMSLLVKRGCDEGFQPLGEVIKMWGRVPFAPGPSPPPLLGNMDQERLKKQQELAAAALYQQLQHQQFLQLVSSRQLPQCALREKAALGDLTPPPPPPPQQQQQQLTAFLQQLQALKPPSSRSAEKWSSGRSGRKRNASVERRSAASSSRRSRSGGRRRKSCFGASTWGLSMKTLLELQLEGERQLHKQPPPREPARAQAPNHRVQLGGLGTAPLNQWVSEAGPLWGGPDKSGGGSSGLGLWEDTPKSGGSLVRGLGLKNSRSSPSLSDSYSHLSGRPIRKKTEEEEKLLKLLQGIPRPQDGFTQWCEQMLHTLSATGSLDVPMAVAILKEVESPYDVHDYIRSCLGDTLEAKEFAKQFLERRAKQKASQQRQQQQEAWLSSASLQTAFQANHSTKLGPGEGSKAKRRALMLHSDPSILGYSLHGSSGEIESVDDY

SEQ ID NO: 775816 - protein, 817 aa, Homo sapiens; identical to SEQ ID NO: 775815

SEQ ID NO: 775817 - protein, 577 aa, Homo sapiens
MGERKCWLSTSRRTRWVPEELQDKEFAAVLQDEPLQPLALEPLTEEEQAAAVVTAAFTKEASKKAMGPLDEAPGKSSAARAGMTARCGFEEGGAGPRKEHARSDSENWRSLREEQEEEEEGSWRLGAGPRRDGDRWRSASPDGGPRSAGWREHGERRRKFEFDLRGDRGGCGEEEGRGGGGSSHLRRCRAPEGFEEDKDGLPEWCLDDEDEEMGTFDASGAFLPLKLFSAPHPGPMQKGPKEPIPEEQELDFQGLEEEEEPSEGLEEEGPEADDIRGIQLSPGVGSSAGPPGDLEDDEGLKHLQQGIQEAEKLVASLQDSSLEEEQFTAAMQTQGLRHSAAATALPLSHGAARKWFYKDPQGEIQGPFTTQEMAEWFQAGYFSMSLLVKRGCDEGFQPLGEVIKMWGRVPFAPGPSPPPLLGNMDQERLKKQQELAAAALYQQLQHQQFLQLVSSRQLPQCALREKAALGDLTPPPPPPPQQQQQQLTAFLQQLQALKPPRGGDQNLLPTMSRSLSVPDSGRLWDVHTSASSQSGGEASLWDIPINSSTQGPILEQLQLQHKFQERREVELRLLRRG

SEQ ID NO: 775818 - protein, 160 aa, Homo sapiens
ARLTLQGQLCHLQEHWPQCIGACRWLLCHGVGGSPSTAGPGRQLLFQGQVGGWLAACPTLGSLHPESRGRQSPSEECAPPYPETSEASFLRCQLFSQCPWPCPHPSLTGSPTPACRPRSPESQQASSVPPTPLTSRSPTSGSIFCPVVPASLPSPRGSDH

SEQ ID NO: 775819 - protein, 68 aa, Homo sapiens
MQQASWVSGQGTGSSLQHGGHDNHCRAGRAHQRPPGSRATKLDLKGNSTALLRPTPFDISRCLVALKM

SEQ ID NO: 775820 - protein, 290 aa, Homo sapiens
MGDGGAERDRGPARRAESGGGGGRCGDRSGAGDLRADGGGHSPTEVAGTSASSPAGSRESGADSDGQPGPGEADHCRRILVRDAKGTIREIVLPKGLDLDRPKRTRTSFTAEQLYRLEMEFQRCQYVVGRERTELARQLNLSETQVKVWFQNRRTKQKKDQSRDLEKRASSSASEAFATSNILRLLEQGRLLSVPRAPSLLALTPSLPGLPASHRGTSLGDPRNSSPRLNPLSSASASPPLPPPLPAVCFSSAPLLDLPAGYELGSSAFEPYSWLERKVGSASSCKKANT

SEQ ID NO: 775821 - protein, 321 aa, Homo sapiens
AVEGLAVAVSMGDGGAERDRGPARRAESGGGGGRCGDRSGAGDLRADGGGHSPTEVAGTSASSPAGSRESGADSDGQPGPGEADHCRRILVRDAKGTIREIVLPKGLDLDRPKRTRTSFTAEQLYRLEMEFQRCQYVVGRERTELARQLNLSETQNQPQSCNYLEIHPESPHYHTTVKVWFQNRRTKQKKDQSRDLEKRASSSASEAFATSNILRLLEQGRLLSVPRAPSLLALTPSLPGLPASHRGTSLGDPRNSSPRLNPLSSASASPPLPPPLPAVCFSSAPLLDLPAGYELGSSAFEPYSWLERKVGSASSCKKANT

SEQ ID NO: 775822 - protein, 81 aa, Homo sapiens
NEMVFVQPRKRCPGPCLPASSLQHQLQRHRLGSGLCAPWLTPLPAVGEQWSNFGIGNFQMEGAVHAFIPCFSPLSGCPPWL

SEQ ID NO: 775823 - protein, 67 aa, Homo sapiens
TCWYSPGISRGVYGHCFKTGKEEDEARSRRVTKEISSSASPAEHFPALFFSSFEEKYSDPYVKLSCT

SEQ ID NO: 775824 - protein, 55 aa, Homo sapiens
MDNFIKGLKVEGATILPFLHGRTQQQGATMEAESSPHQTQMVLTSPWNSQTPELY

SEQ ID NO: 775825 - protein, 157 aa, Homo sapiens
MRHRSKLTERGRTTIRTEQHEQVETQSDDEEKKDRVPNQKGIRGTENSREKRRRERENEREKKKRRSKKKRRERQHTHRARISQTPTKRERSKTRRQRERQQKEGRSKETNKAYEAPQRKRKNEEQKQEEQGKEGRKRTKKKTQQTSTGKQKKERGK

SEQ ID NO: 775826 - protein, 582 aa, Homo sapiens
GARVEQRLAAVSKAWQNLCVTEQHFNLLNEMPPTFWILFLHLSGDRSRLYGAAYEKPKFITAAKGKVQAVGGSCKVMRLAISPTAFSHLLACAQQFRKQTQAQVYSEDMALNIGSEPEGLQVEEKERPVQRLSSVLGPLEELLQPLFPLLSLSKARVQTPAVVADSGKSKGKDKERKTSTGQHSTVQPEVADKIVLVTDRHLLELPLEGLSVFDEGTISSVSREFSLQMLWNRLHKEETEGGVKKEGRSRDPKKRSLAKKGRKGSIPRTIPPDCIIVDSDNFKFVVDPYEEAQGPEMLTPVSITQDILERFQDTFTSRWAGHLGSKHFPSQAQWEQALGSCSGFFFYGMESFLSHILVERLVAMNLQECQVAVLLDLARSYQSLKRHMESVEHRRSVGRWEANWRNGASPSEDEWRRGGEPRRGFSDLEGQAAAAPKLRAPSHHAQLGPVWAAAPSHRVVQAWTCLPSAAGAPALASALGSAPLPTHPHLPAPIPSSQLALPFLGLSPALGAASARDPPPATSRKAAAWTSSSACLCAPWGLRRGWSCVSSRGQDKGGLPLAALVLSCLDQKTIQTVSLFLI

SEQ ID NO: 775827 - protein, 165 aa, Homo sapiens
MGPSLPSQVPLSTMLFAEGAGARPFCRGLALAGSGPCALFATGASFLDCGRNQKACRWKRRSALCRGSVASWGPWRSFCSRYSPCSASPRPGTGDDVEAGTPPRSRMDTCVQCCGQPRVLAVPSRPPLFRTRRRLPAPRKQFFWFCLHSCLEEYCPLPTAHGPSS

SEQ ID NO: 775828 - protein, 233 aa, Homo sapiens
PRRHPSTKLSMVGPGSGAETPPSKKAGSQKPTPEGRESSRKVPPQKPRRSPNTQLSVSFDESCPPGPSPRGGNLPLQRLTRGSRVAGDPDVGAQEEPVYIEMVGDVFRGGGRSGGGLAGPPLGGGGPTPPAGADSDSEESEAIYEEMKYPLPEEAGEGRANGPPPLTATSPPQQPHALPPHAHRRPASALPSRRDGTPTKTTPCEIPPPFPNLLQHRPPLLAFPQAKSASRTP

SEQ ID NO: 775829 - protein, 380 aa, Homo sapiens
RERVPPQLRASEEMAVRQAATAGTPGPRREEEAALLFERAHYRHDPRWLLPVTPRLCLACALELLPDPGVSLVRKKHMLSCFQDALVRHTSLVTQLVSQDQRVCIHFISVLFGLLCSMEDGSVTDLCIEVLIQITTQLKLEQTIRCLLDECHKELCNMPSMRGSLATLTLLGKLVDAIPALADELVMEHGNLMEHLLRGLVYPSEGIQASVCYLYGKLYSSPVAAEMLSGHFREKLFPLFLSILDGAQTKELQINCLGLLRQLLKYDLFVSMIMNQDGLGESAKNIEGSSGNTSLPLVLKKLLLSRDETLQVASAHCITAVLVHSPAKHASAFIHADIPEFLFEHLSSSSEVLVWSSCNCLTLLVEEPLFFSKCHTVYGW

SEQ ID NO: 775830 - protein, 223 aa, Homo sapiens
MPSMRGSLATLTLLGKLVDAIPALADELVMEHGNLMEHLLRGLVYPSEGIQASVCYLYGKLYSSPVAAEMLSGHFREKLFPLFLSILDGAQTKELQINCLGLLRQLLKYDLFVSMIMNQDGLGESAKNIEGSSGNTSLPLVLKKLLLSRDETLQVASAHCITAVLVHSPAKHASAFIHADIPEFLFEHLSSSSEVLVWSSCNCLTLLVEEPLFFSKCHTVYGW

SEQ ID NO: 775831 - protein, 149 aa, Homo sapiens
PTPLLWPLLLLLLLETGAQDVRVQVLPEVRGQLGGTVELPCHLLPPVPGLYISLVTWQRPDAPANHQNVAAFHPKMGPSFPSPKPGSERLSFVSAKQSTGQDTEAELQDATLRLHGLTVEDEGNYTCEFATFPKGSVRGMTWLRVIGEQ

SEQ ID NO: 775832 - protein, 111 aa, Homo sapiens
EDPEIHMDCDFLMGTGSLPRWRTWWRWGIPAGGEELAQMGAHLREEPSPQPGVQPFLDSGWGWHLRAASSALRGQVPLPMYIQSFTHSSPSLFTCWTLGFICSSNKHLLGT

SEQ ID NO: 775833 - protein, 216 aa, Homo sapiens
MGILIWKRTPLNPGGELRPVTEASPAPQGLRVLGIHVSFHPFIHPFMHPCIHPAMHPPFIHPSINPSSHSFTHPSVRPSIHPSTHPPIHLPIHPFIHASIHPCVHPSIHLSIHPSIHPSSHSFIHPLMHLSIHPSILHSSFHPCIIHASILLVHPATHQLIHPSVHHPLIYPSIHPSFHQFTHLPSIHLSVHPFIYPSVHPSTYLFIHPSIHLSIH

SEQ ID NO: 775834 - protein, 51 aa, Homo sapiens
MGWVLRGRGLLRPRAWDRYLPQFLPSASPFPFWGRGQHLLSTYDLPGTGSS

SEQ ID NO: 775835 - protein, 613 aa, Homo sapiens
MGEAFYTVKLERLESCDTAGLSFQEVQKNTYDFECQWKDDEGNYKTVLMLQKENLPGRRAQRDRRAAGNRHIENQLGVSFQSHLPELQQFQREGKIYEYNQVEKSPNNRGKHYKCDECGKVFSQNSRLTSHKRIHTGEKPYQCNKCGKAFTVRSNLTIHQVIHTGEKPYKCNECGKVFSQPSNLAGHQRIHTGEKPYKCNECGKAFRAHSKLTTHQVIHTGEKPYKCKECGKCFTQNSHLASHRRIHTGEKPYKCNECGKAFSVRSSLTTHQTIHTGEKPYKCNECGKVFRHNSYLAKHRRIHTGEKPYKCNECGKAFSMHSNLTKHQIIHTGEKPFKCNECVKVFTQYSHLANHRRIHTGEKPYRCDECGKAFSVRSSLTTHQAIHTGEKPYKCNDCGKVFTQNSHLASHRGIHSGEKPYKCDECGKAFSQTSQLARHWRVHTGEKPYKCNECGKAFSVHSSLTIHQTIHTGQKPYKCNDCGKVFRHNSYLAIHQRIHTGEKPYKCNECGKAFSVHSNLATHQVIHTGEKPYKCNECGKVFTQNSHLANHRRIHTGEKPYRCNECGKAFSVRSTLTTHMAIHTGDKPYKCNQCGKVFTQNSNLAKHRRIHSG

SEQ ID NO: 775836 - protein, 613 aa, Homo sapiens; identical to SEQ ID NO: 775835

SEQ ID NO: 775837 - protein, 101 aa, Homo sapiens
GDRVSLCHSGIECSGMISAHCNLHLSDSSDFHASASQVARTTGMYHHSRLIFVVLVEMGFCHVSQAGLELLASSDLPSSASQSAGITGAKPHAQPCEVLLT

SEQ ID NO: 775838 - protein, 267 aa, Homo sapiens
PVGCPGDAGTQRSGSRRRPSRRHDRPLGGLAGRAASPQSSRRADGGGGAMSQRQVLQVFEQYQKARTQFVQMVAELATRPQNIETLQNAGVMSLLRTLLLDVVPTIQQTAALALGRLANYNDDLAEAVVKCDILPQLVYSLAEQNRFYKKAAAFVLRAVGKHSPQLAQAIVDCGALDTLVICLEDFDPGVKEAAAWALRYIARHNAELSQRCWWMQGAVPLFRYSVSRSQEIGFDKGWLASGPQWILAKNSPELAQNSKWMQELWFI

SEQ ID NO: 775839 - protein, 145 aa, Homo sapiens
MLHDARDRQKFFSDVQYLRDMQHKVDSEYQACLRRQEYRRDPNEKKRDQFWGQETSFERSRFSSRSSSKQSSSEEDALTEPRSSIKISAFKCDSKLPAIDQTSVKQKHKSTMTVRKAEKVDPSEPSPADQAPMVLLRKRKPNLRR

SEQ ID NO: 775840 - protein, 30 aa, Homo sapiens
MVSSVLCCVAVTAEVCEDGNHGLKAIETPD

SEQ ID NO: 775841 - protein, 85 aa, Homo sapiens
SALQQWFSMYKPITYNTNLLTEETDSFVNKLDPSKVFKSKNKIVIPKKKGPVQPAGGQKGPSGPSGPSTSSTSKSSSGSGNPTRK

SEQ ID NO: 775842 - protein, 455 aa, Homo sapiens
MSFLIDSSIMITSQILFFGFGWLFFMRQLFKDYEIRQYVVQVIFSVTFAFSCTMFELIIFEILGVLNSSSRYFHWKMNLCVILLILVFMVPFYIGYFIVSNIRLLHKQRLLFSCLLWLTFMYFFWKLGDPFPILSPKHGILSIEQLISRVGVIGVTLMALLSGFGAVNCPYTYMSYFLRNVTDTDILALERRLLQTMDMIISKKKRMAMARRTMFQKGEVHNKPSGFWGMIKSVTTSASGSENLTLIQQEVDALEELSRQLFLETADLYATKERIEYSKTFKGKYFNFLGYFFSIYCVWKIFMATINIVFDRVGKTDPVTRGIEITVNYLGIQFDVKFWSQHISFILVGIIIVTSIRGLLITLTKFFYAISSSKSSNVIVLLLAQIMGMYFVSSVLLIRMSMPLEYRTIITEVLGELQFNFYHRWFDVIFLVSALSSILFLYLAHKQAPEKQMAP

SEQ ID NO: 775843 - protein, 247 aa, Homo sapiens
MSFLIDSSIMITSQILFFGFGWLFFMRQLFKDYEIRQYVVQVIFSVTFAFSCTMFELIIFEILGVLNSSSRYFHWKMNLCVILLILVFMVPFYIGYFIVSNIRLLHKQRLLFSCLLWLTFMYFFWKLGDPFPILSPKHGILSIEQLISRVGVIGVTLMALLSGFGAVNCPYTYMSYFLRNVTDTDILALERRLLQTMDMIISKKKRMAMARRTMFQKGEVHNKPSGFWGMIKSVTTSASGSENNTMA

SEQ ID NO: 775844 - protein, 187 aa, Homo sapiens
LGRQYATREFQRCAFSATINIVFDRVGKTDPVTRGIEITVNYLGIQFDVKFWSQHISFILVGIIIVTSIRGLLITLTKFFYAISSSKSSNVIVLLLAQIMGMYFVSSVLLIRMSMPLEYRTIITEVLGELQFNFYHRWFDVIFLVSALSSILFIINGEQTGHNKNRWESVKESTLLTFTMTSVFKLG

SEQ ID NO: 775845 - protein, 193 aa, Homo sapiens
MRQLFKDYEIRQYVVQVIFSVTFAFSCTMFELIIFEILGVLNSSSRYFHWKMNLCVILLILVFMVPFYIGYFIVSNIRLLHKQRLLFSCLLWLTFMYFFWKLGDPFPILSPKHGILSIEQLISRVGVIGVTLMALLSGFGAVNCPYTYMSYFLRNLLTGPPDISSPVNGELLETMAYSSIKQKRTTGLAMGPE

SEQ ID NO: 775846 - protein, 249 aa, Homo sapiens
MSFLIDSSIMITSQILFFGFGWLFFMRQLFKDYEIRQYVVQVIFSVTFAFSCTMFELIIFEILGVLNSSSRYFHWKMNLCVILLILVFMVPFYIGYFIVSNIRLLHKQRLLFSCLLWLTFMYFFWKLGDPFPILSPKHGILSIEQLISRVGVIGVTLMALLSGFGAVNCPYTYMSYFLRNVTDTDILALERRLLQTMDMIISKKKRMAMARRTMFQKGEVHNKPSGFWGMIKSVTTSASGSESILCPSA

SEQ ID NO: 775847 - protein, 124 aa, Homo sapiens
MSFLIDSSIMITSQILFFGFGWLFFMRQLFKDYEIRQYVVQVIFSVTFAFSCTMFELIIFEILGVLNSSSRYFHWKMNLCVILLILVFMVPFYIGYFIVSNIRLLLSPLSQCINNDCFFPVSYG

SEQ ID NO: 775848 - protein, 124 aa, Homo sapiens; identical to SEQ ID NO: 775847

SEQ ID NO: 775849 - protein, 229 aa, Homo sapiens
MSFLIDSSIMITSQIRQYVVQVIFSVTFAFSCTMFELIIFEILGVLNSSSRYFHWKMNLCVILLILVFMVPFYIGYFIVSNIRLLHKQRLLFSCLLWLTFMYFFWKLGDPFPILSPKHGILSIEQLISRVGVIGVTLMALLSGFGAVNCPYTYMSYFLRNVTDTDILALERRLLQTMDMIISKKKRMAMARRTMFQKGEVHNKPSGFWGMIKSVTTSASGSESILCPSA

SEQ ID NO: 775850 - protein, 226 aa, Homo sapiens
MSFLIDSSIMITSQILFFGFGWLFFMRQLFKDYEIRQYVVQVIFSVTFAFSCTMFELIIFEILGVLNSSSRYFHWKMNLCVILLILVFMVPFYIGYFIVSNIRLRDPFPILSPKHGILSIEQLISRVGVIGVTLMALLSGFGAVNCPYTYMSYFLRNVTDTDILALERRLLQTMDMIISKKKRMAMARRTMFQKGEVHNKPSGFWGMIKSVTTSASGSESILCPSA

SEQ ID NO: 775851 - protein, 260 aa, Homo sapiens
MSFLIDSSIMITSQILFFGFGWLFFMRQLFKDYEIRQYVVQVIFSVTFAFSCTMFELIIFEILGVLNSSSRYFHWKMNLCVILLILVFMVPFYIGYFIVSNIRLLHKQRLLFSCLLWLTFMYFFWKLGDPFPILSPKHGILSIEQLISRVGVIGVTLMALLSGFGAVNCPYTYMSYFLRNVTDTDILALERRLLQTMDMIISKKKRMAMARRTMFQKGEVHNKPSGFWGMIKSVTTSASGSETSLSLCAKWITPWHKTIP

SEQ ID NO: 775852 - protein, 260 aa, Homo sapiens; identical to SEQ ID NO: 775851

SEQ ID NO: 775853 - protein, 391 aa, Homo sapiens
MSFLIDSSIMITSQILFFGFGWLFFMRQLFKDYEIRQYVVQVIFSVTFAFSCTMFELIIFEILGVLNSSSRYFHWKMNLCVILLILVFMVPFYIGYFIVSNIRLLHKQRLLFSCLLWLTFMYFFWKLGDPFPILSPKHGILSIEQLISRVGVIGVTLMALLSGFGAVNCPYTYMSYFLRNVTDTDILALERRLLQTMDMIISKKKRMAMARRTMFQKGEVHNKPSGFWGMIKSVTTSASGSENLTLIQQEVDALEELSRQLFLETADLYATKERIEYSKTFKGKYFNFLGYFFSIYCVWKIFMATINIVFDRVGKTDPVTRGIEITVNYLGIQFDVKFWSQHISFILVGIIIVTSIRGLLITLTKFFYAISSSKSSNVIVLLLAQIMGKFN

SEQ ID NO: 775854 - protein, 432 aa, Homo sapiens
MSFLIDSSIMITSQILFFGFGWLFFMRQLFKDYEIRQYVVQVIFSVTFAFSCTMFELIIFEILGVLNSSSRYFHWKMNLCVILLILVFMVPFYIGYFIVSNIRLRDPFPILSPKHGILSIEQLISRVGVIGVTLMALLSGFGAVNCPYTYMSYFLRNVTDTDILALERRLLQTMDMIISKKKRMAMARRTMFQKGEVHNKPSGFWGMIKSVTTSASGSENLTLIQQEVDALEELSRQLFLETADLYATKERIEYSKTFKGKYFNFLGYFFSIYCVWKIFMATINIVFDRVGKTDPVTRGIEITVNYLGIQFDVKFWSQHISFILVGIIIVTSIRGLLITLTKFFYAISSSKSSNVIVLLLAQIMGMYFVSSVLLIRMSMPLEYRTIITEVLGELQFNFYHRWFDVIFLVSALSSILFLYLAHKQAPEKQMAP

SEQ ID NO: 775855 - protein, 133 aa, Homo sapiens
DAWVDPRVAKHGILSIEQLISRVGVIGVTLMALLSGFGAVNCPYTYMSYFLRNVTDTDILALERRLLQTMDMIISKKKRMAMARRTMFQKGEVHNKPSGFWGMIKSVTTSASGSETSLSLCAKWITPWHKTIP

SEQ ID NO: 775856 - protein, 165 aa, Homo sapiens
  misc_feature (1)..(1): Xaa can be any naturally occurring amino acid
XTLEYPHVDTSASGSENLTLIQQEVDALEELSRQLFLETADLYATKERIEYSKTFKGKYFNFLGYFFSIYCVWKIFMATINIVFDRVGKTDPVTRGIEITVNYLGIQFDVKFWSQHISFILVGIIIVTSIRGLLITLTKFFYAISSSKSSNVIVLLLAQIMGKFN

SEQ ID NO: 775857 - protein, 455 aa, Homo sapiens; identical to SEQ ID NO: 775842

SEQ ID NO: 775858 - protein, 455 aa, Homo sapiens; identical to SEQ ID NO: 775842

SEQ ID NO: 775859 - protein, 455 aa, Homo sapiens; identical to SEQ ID NO: 775842

SEQ ID NO: 775860 - protein, 513 aa, Homo sapiens
MSFLIDSSIMITSQILFFGFGWLFFMRQLFKDYEIRQYVVQVIFSVTFAFSCTMFELIIFEILGVLNSSSRYFHWKMNLCVILLILVFMVPFYIGYFIVSNIRLLHKQRLLFSCLLWLTFMYFFWKLGDPFPILSPKHGILSIEQLISRVGVIGVTLMALLSGFGAVNCPYTYMSYFLRNVTDTDILALERRLLQTMDMIISKKKRMAMARRTMFQKGEVHNKPSGFWGMIKSVTTSASGSENLTLIQQEVDALEELSRQLFLETADLYATKERIEYSKTFKGKYFNFLGYFFSIYCVWKIFMATINIVFDRVGKTDPVTRGIEITVNYLGIQFDVKFWSQHISFILVGIIIVTSIRGLLITLTKFFYAISSSKSSNVIVLLLAQIMGLDWPTQGTAIKVSCLASGSQERTKLYQPPKLKSAEKMWGLKRSWKKSPKCLIHLHMFFFVHKDTIDPKNSVSILKASLLCWATLLNHPDQVALGVLLNSQEEAIVLPFLLGQFTFSGVEGGGHFL

SEQ ID NO: 775861 - protein, 391 aa, Homo sapiens
MSFLIDSSIMITSQILFFGFGWLFFMRQLFKDYEIRQYVVQVIFSVTFAFSCTMFELIIFEILGVLNSSSRYFHWKMNLCVILLILVFMVPFYIGYFIVSNIRLLHKQRLLFSCLLWLTFMYFFWKLGDPFPILSPKHGILSIEQLISRVGVIGVTLMALLSGFGAVNCPYTYMSYFLRNVTDTDILALERRLLQTMDMIISKKKRMAMARRTMFQKGEVHNKPSGFWGMIKSVTTSASGSENLTLIQQEVDALEELSRQLFLETADLYATKERIEYSKTFKGKYFNFLGYFFSIYCVWKIFMATINIVFDRVGKTDPVTRGIEITVNYLGIQFDVKFWSQHISFILVGIIIVTSIRGLLITLTKFFYAISSSKSSNVIVLLLAQIMNGAL

SEQ ID NO: 775862 - protein, 320 aa, Homo sapiens
MSFLIDSSIMITSQILFFGFGWLFFMRQLFKDYEIRQYVVQVIFSVTFAFSCTMFELIIFEILGVLNSSSRYFHWKMNLCVILLILVFMVPFYIGYFIVSNIRLLHKQRLLFSCLLWLTFMYFFWKLGDPFPILSPKHGILSIEQLISRVGVIGVTLMALLSGFGAVNCPYTYMSYFLRNVTDTDILALERRLLQTMDMIISKKKRMAMARRTMFQKGEVHNKPSGFWGMIKSVTTSASGSENLTLIQQEVDALEELSRQLFLETADLYATKERIEYSKTFKGKYFNFLGYFFSIYCVWKIFMATINIVFDRVVTWASSL

SEQ ID NO: 775863 - protein, 249 aa, Homo sapiens; identical to SEQ ID NO: 775846

SEQ ID NO: 775864 - protein, 183 aa, Homo sapiens
ISPRMNRQLLGRCRCREILWATINIVFDRVGKTDPVTRGIEITVNYLGIQFDVKFWSQHISFILVGIIIVTSIRGLLITLTKFFYAISSSKSSNVIVLLLAQIMSHFWINSFDLQGMYFVSSVLLIRMSMPLEYRTIITEVLGELQFNFYHRWFDVIFLVSALSSILFLYLAHKQAPEKQMAP

SEQ ID NO: 775865 - protein, 335 aa, Homo sapiens
MYFFWKLGDPFPILSPKHGILSIEQLISRVGVIGVTLMALLSGFGAVNCPYTYMSYFLRNVTDTDILALERRLLQTMDMIISKKKRMAMARRTMFQKGEVHNKPSGFWGMIKSVTTSASGSENLTLIQQEVDALEELSRQLFLETADLYATKERIEYSKTFKGKYFNFLGYFFSIYCVWKIFMATINIVFDRVGKTDPVTRGIEITVNYLGIQFDVKFWSQHISFILVGIIIVTSIRGLLITLTKFFYAISSSKSSNVIVLLLAQIMGMYFVSSVLLIRMSMPLEYRTIITEVLGELQFNFYHRWFDVIFLVSALSSILFLYLAHKQAPEKQMAP

SEQ ID NO: 775866 - protein, 124 aa, Homo sapiens; identical to SEQ ID NO: 775847

SEQ ID NO: 775867 - protein, 42 aa, Homo sapiens
DPVSLAAGPRPQLSAVSRLEADFCSLLHKPSIVAASCTKASK

SEQ ID NO: 775868 - protein, 165 aa, Homo sapiens
CYRGGEAVCCRVQSSGPAGMESHLSPALLCGYPLCPSCQRICPKSLCRFLSLADEEQVVMGKEGRLRSMGCAESRSPFWTLCPPCGLPTGRETPHWGDQNKYLTIISHFTFSPQWLWAGRGCGLPATSSPVWGAAMVFKQASLPDPLPVIRCHRSPNSTMRGSFF

SEQ ID NO: 775869 - protein, 70 aa, Homo sapiens
AAFPRLPGCTTRGLHVPSDWHKVLSMPLLLAHLLCLWRVPHRATTSLRKASPTAQTSKGLLRVLQSLASH

SEQ ID NO: 775870 - protein, 586 aa, Homo sapiens
MKYILVTGGVISGIGKGIIASSIGTILKSCGLRVTAIKIDPYINIDAGTFSPYEHGEVFVLNDGGEVDLDLGNYERFLDINLYKDNNITTGKIYQHVINKERRGDYLGKTVQVVPHITDAVQEWVMNQAKVPVDGNKEEPQICVIELGGTIGDIEGMPFVEAFRQFQFKAKRENFCNIHVSLVPQLSATGEQKTKPTQNSVRALRGLGLSPDLIVCRSSTPIEMAVKEKISMFCHVNPEQVICIHDVSSTYRVPVLLEEQSIVKYFKERLHLPIGDSASNLLFKWRNMADRYERLQKICSIALVGKYTKLRDCYASVFKALEHSALAINHKLNLMYIDSIDLEKITETEDPVKFHEAWQKLCKADGILVPGGFGIRGTLGKLQAISWARTKKIPFLGVCLGMQLAVIEFARNCLNLKDADSTEFRPNAPVPLVIDMPEHNPGNLGGTMRLGIRRTVFKTENSILRKLYGDVPFIEERHRHRFEVNPNLIKQFEQNDLSFVGQDVDGDRMEIIELANHPYFVGVQFHPEFSSRPMKPSPPYLGLLLAATGNLNAYLQQGCKLSSSDRYSDASDDSFSEPRIAELEIS

SEQ ID NO: 775871 - protein, 586 aa, Homo sapiens; identical to SEQ ID NO: 775870

SEQ ID NO: 775872 - protein, 586 aa, Homo sapiens; identical to SEQ ID NO: 775870

SEQ ID NO: 775873 - protein, 489 aa, Homo sapiens
MKYILVTGGVISGIGKGIIASSIGTILKSCGLRVTAIKIDPYINIDAGTFSPYEHGEVFVLNDGGEVDLDLGNYERFLDINLYKDNNITTGKIYQHVINKERRGDYLGKTVQVVPHITDAVQEWVMNQAKVPVDGNKEEPQICVIELGGTIGDIEGMPFVEAFRQFQFKAKRENFCNIHVSLVPQLSATGEQKTKPTQNSVRALRGLGLSPDLIVCRSSTPIEMAVKEKISMFCHVNPEQVICIHDVSSTYRVPVLLEEQSIVKYFKERLHLPIGDSASNLLFKWRNMADRYERLQKICSIALVGKYTKLRDCYASVFKALEHSALAINHKLNLMVIDMPEHNPGNLGGTMRLGIRRTVFKTENSILRKLYGDVPFIEERHRHRFEVNPNLIKQFEQNDLSFVGQDVDGDRMEIIELANHPYFVGVQFHPEFSSRPMKPSPPYLGLLLAATGNLNAYLQQGCKLSSSDRYSDASDDSFSEPRIAELEIS

SEQ ID NO: 775874 - protein, 586 aa, Homo sapiens; identical to SEQ ID NO: 775870

SEQ ID NO: 775875 - protein, 586 aa, Homo sapiens; identical to SEQ ID NO: 775870

SEQ ID NO: 775876 - protein, 577 aa, Homo sapiens
MKYILVTGGVISGIGKGIIASSIGTILKSCGLRVTAIKIDPYINIDAGTFSPYEHGEVFVLNDGGEVDLDLGNYERFLDINLYKDNNITTGKIYQHVINKERRGDYLGKTVQVVPHITDAVQEWVMNQAKVPVDGNKEEPQICVIELGGTIGDIEGMPFVEAFRQFQFKAKRENFCNIHVSLVPQLSATGEQKTKPTQNSVRALRGLGLSPDLIVCRSSTPIEMAVKEKISMFCHVNPEQVICIHDVSSTYRVPVLLEEQSIVKYFKERLHLPIGDSASNLLFKWRNMADRYERLQKICSIALVGKYTKLRDCYASVFKALEHSALAINHKLNLMYIDSIDLEKITETEDPVKFHEAWQKLCKADGILVPGGFGIRGTLGKLQAISWARTKKIPFLGVCLGMQLAVIEFARNCLNLKDADSTEFRPNAPVPLVIDMPEHNPGNLGGTMRLGIRRTVFKTENSILRKLYGDVPFIEERHRHRFEVNPNLIKQFEQNDLSFVGQDVDGDRMEIIELANHPYFVGVQFHPEFSSRPMKPSPPYLGLLLAATGNLNAYLQQGCKLSSRSLSPSLHVYIQMA

SEQ ID NO: 775877 - protein, 510 aa, Homo sapiens
MKYILVTGGVISGIGKGIIASSIGTILKSCGLRVTAIKIDPYINIDAGTFSPYEHGEVFVLNDGGEVDLDLGNYERFLDINLYKDNNITTGKIYQHVINKERRGDYLGKTVQVVPHITDAVQEWVMNQAKVPVDGNKEEPQICVIELGGTIGDIEGMPFVEAFRQFQFKAKRENFCNIHVSLVPQLSATGEQKTKPTQNSVRALRGLGLSPDLIVCRSSTPIEMAVKEKISMFCHVNPEQVICIHDVSSTYRVPVLLEEQSIVKYFKERLHLPIGDSASNLLFKWRNMADRYERLQKICSIALVGKYTKLRDCYASVFKALEHSALAINHKLNLMYIDSIDLEKITETEDPVKFHEAWQKLCKADGILVPGGFGIRGTLGKLQAISWARTKKIPFLGVCLGMQLAVIEFARNCLNLKDADSTEFRPNAPVPLVIDMPEHNPGNLGGTMRLGIRRTVFKTENSILISLSLGLASVEHTECPSAFDLRDSLFIGLFCELPMLLEMNLDWDLD

SEQ ID NO: 775878 - protein, 383 aa, Homo sapiens
MKYILVTGGVISGIGKGIIASSIGTILKSCGLRVTAIKIDPYINIDAGTFSPYEHGEVFVLNDGGEVDLDLGNYERFLDINLYKDNNITTGKIYQHVINKERRGDYLGKTVQVVPHITDAVQEWVMNQAKVPVDGNKEEPQICVIELGGTIGDIEGMPFVEAFRQFQFKAKRENFCNIHVSLVPQLSATGEQKTKPTQNSVRALRGLGLSPDLIVCRSSTPIEMAVKEKISMFCHVNPEQVICIHDVTSTYQKYLSIKKEHKPSDKTNGEIDPDPSEILHRKRHTRGENRLTREERVQKKKTKAEARKRHAAKNNEERHTGRQRPAKTSSPGTTKTRNENGREEEIHGAEEKTGDERTENNMRKRKSTKTDGEISKGGKKESA

SEQ ID NO: 775879 - protein, 413 aa, Homo sapiens
MKYILVTGGVISGIGKGIIASSIGTILKSCGLRVTAIKIDPYINIDAGTFSPYEHGEVFVLNDGGEVDLDLGNYERFLDINLYKDNNITTGKIYQHVINKERRGDYLGKTVQVVPHITDAVQEWVMNQAKVPVDGNKEEPQICVIELGGTIGDIEGMPFVEAFRQFQFKAKRENFCNIHVSLVPQLSATGEQKTKPTQNSVRALRGLGLSPDLIVCRSSTPIEMAVKEKISMFCHVNPEQVICIHDVSSTYRVPVLLEEQSIVKYFKERLHLPIGDSASNLLFKWRNMADRYERLQKICSIALVGKYTKLRDCYASVFKALEHSALAINHKLNLMVIDMPEHNPGNLGGTMRLGIRRTVFKTENSILISLSLGLASVEHTECPSAFDLRDSLFIGLFCELPMLLEMNLDWDLD

SEQ ID NO: 775880 - protein, 123 aa, Homo sapiens
LSSLPVPSSPVPAVPPWQLRRSEFSQWWGQLTFAKENSQPLSPLLCSTLSLLPLHFLTALDSEKWQTEHGLSSSSHFIKLGGLDSPTQGKTADLDPKSKIGSVVLASSLWQSSSPCLPDFDAH

SEQ ID NO: 775881 - protein, 40 aa, Homo sapiens
HVHTRLREESASWKVLETSQTEKQEEMRINLKTEENGQDL

SEQ ID NO: 775882 - protein, 101 aa, Homo sapiens
MPNSRVQKELGIKRNFKGTALTWAESVCAIQLESQVLRQDVQMPQCRVLLINTCSPVLISNLTHPTLKAHLALVSRSSASVDSATADGKYSENKLDGYVSI

SEQ ID NO: 775883 - protein, 53 aa, Homo sapiens
HTHIYALSWDELHRAGWGLLPGKEAAGPWDAWSRFSRCQPCPLRTGQQQAQAQ

SEQ ID NO: 775884 - protein, 208 aa, Homo sapiens
FSPLPALPDGLQESQERPVVTCLKHEDFELAFLLLTKGADPRAISLTEGDTPLHAALHIFLEIKADIGFSFLSHLLDLFWSNPTEFDYLNPNVQDSNGNTLMHILFQKGMLKRVKKLLDLLVKFDINFNLKNKEGKDARHRIKKNDSLLLAWNKALMENRRRSRQDSAAHLGKLSKSTAPGHTSQLKSQGSFKSVPCGATARTLPEGS

SEQ ID NO: 775885 - protein, 34 aa, Homo sapiens
MVKQGNELKALQKCKVFRVIRCCETMETNSNAWR

SEQ ID NO: 775886 - protein, 69 aa, Homo sapiens
MVISLKGSQIYMLTLITDGMRSSECSTFDKAATSVLTTSMVTMEPGYLFLSSCLGNSLLLKYTEKLQEP

SEQ ID NO: 775887 - protein, 233 aa, Homo sapiens
PGKRCPNYTDPHSLTDVSIFLLLKLSEDPELQPVVAGLFLSMCLVTVLGNLLIILAVSPDSHLHTPMYFILSNLPLPDIGFTSTTVPKMIVDIQSHSRVISYAGCLTQMSLFAIFGGMEERHAPECDGLWPVCSHLSPSISFSNLEPMFLWLPRFVVFVLFCFVFLSLLDSQLHNLIALQMTGFKDVEFLISSGNLLNSPILHVVTPSPGTSTCISLLPYLVFFPSWGPFLLL

SEQ ID NO: 775888 - protein, 129 aa, Homo sapiens
MSAGSLQSSVFSVQQGGSPQTKGMEKMDRWIHPQLSFSAKSSGQEGKEQGSVLAGGWLQAWVLGSGWVGKEVQIGGLVGRDSEKDIGEEPGAAVWSEERGELVRSEPGWGSQGQDVAVGGAAGPLLSVD

SEQ ID NO: 775889 - protein, 410 aa, Homo sapiens
MAFLGLFSLLVLQSMATGATFPEEAIADLSVNMYNRLRATGEDENILFSPLSIALAMGMMELGAQGSTQKEIRHSMGYDSLKNGEEFSFLKEFSNMVTAKESQYVMKIANSLFVQNGFHVNEEFLQMMKKYFNAAVNHVDFSQNVAVANYINKWVENNTNNLVKDLVSPRDFDAATYLALINAVYFKGNWKSQFRPENTRTFSFTKDDESEVQIPMMYQQGEFYYGEFSDGSNEAGGIYQVLEIPYEGDEISMMLVLSRQEVPLATLEPLVKAQLVEEWANSVKKQKVEVYLPRFTVEQEIDLKDVLKALGITEIFIKDANLTGLSDNKEIFLSKAIHKSFLEVNEEGSEAAAVSGMIAISRMAVLYPQVIVDHPFFFLIRNRRTGTILFMGRVMHPETMNTSGHDFEEL

SEQ ID NO: 775890 - protein, 410 aa, Homo sapiens; identical to SEQ ID NO: 775889

SEQ ID NO: 775891 - protein, 47 aa, Homo sapiens
VILRQGTLSLNNSRTAWSFKPHIILTHLLQSLPGGMEGKAAWRSQMQ

SEQ ID NO: 775892 - protein, 126 aa, Homo sapiens
AAARDTPWRPSGPKTRGARFRPRRARPKFPWRRVGRCMALGPGGCRDVAASQGGAGARPRGREAARSRLSACFKPRGNCCTLDCTRSAVQASRFVNIRNFPLSSTASQNAVSLTTSEDPRARVQFW

SEQ ID NO: 775893 - protein, 126 aa, Homo sapiens; identical to SEQ ID NO: 775892

SEQ ID NO: 775894 - protein, 140 aa, Homo sapiens
PKAKKEAPAPSKAEDKAKALKAKKAMLKGVHSHKKKKIRTSPTFRRPKTLRLRRQPKYPRKSAPRRNKLDHYAIIKFPLTTESAMKKIEDNNTLVFIVDVKANKHQIKQAVKKLYDIDVAKVNTLIRPDGEKKAYVLTGS

SEQ ID NO: 775895 - protein, 47 aa, Homo sapiens
MSPYQRQITTSNWSIQECKSPTPLTPGRTVMKNHLTPELLVESRPLL

SEQ ID NO: 775896 - protein, 70 aa, Homo sapiens
VAEAKESLHVSGIARFKPMLFKGQLYAEYKALLPSKQRLLKASHEIVGIHSLSPLPIRAFLYVKGRNALF

SEQ ID NO: 775897 - protein, 69 aa, Homo sapiens
AAFEDAPEGAASRRQSCCEKKTQEIWGSELCVCQRRSSSVGPRKAMHRPKLKKTLQRVWLCNPGLNAVA

SEQ ID NO: 775898 - protein, 69 aa, Homo sapiens; identical to SEQ ID NO: 775897

SEQ ID NO: 775899 - protein, 671 aa, Homo sapiens
DSTGIDLHEFLINTLKNNSRDRMILLKMEQEIIDFIADNNNHYKKFPQMSSYQRMLVHRVAAYFGLDHNVDQTGKSVIINKTSSTRIPEQRFCEHLKDEKGEESQKRFILKRDNSSIDKEDNQSVCSQESLFVENSRLLEDSNICNETYKKRQLFRGNRDGSGRTSGSRQSSSENELKWSDHQRAWSSTDSDSSNRNLKPAMTKTASFGGITVLTRGDSTSSTRSTGKLSKAGSESSSSAGSSGSLSRTHPPLQSTPLVSGVAAGSPGCVPYPENGIGGQVAPSSTSYILLPLEAATGIPPGSILLNPHTGQPFVNPDGTPAIYNPPTSQQPLRSAMVGQSQQQPPQQQPSPQPQQQVQPPQPQMAGPLVTQSVQGLQASSQSVQYPAVSFPPQHLLPVSPTQHFPMRDDVATQFGQMTLSRQSSGETPEPPSGPVYPSSLMPQPAQQPSYVIASTGQQLPTGGFSGSGPPISQQVLQPPPSPQGFVQQPPPAQMPVYYYPSGQYPTSTTQQYRPMAPVQYNAQRSQQMPQAAQQAGYQPVLSGQQGFQGLIGVQQPPQSQNVINNQQGTPVQSVMVSYPTMSSYQVPMTQGSQGLPQQSYQQPIMLPNQAGQGSLPATGMPVYCNVTPPTPQNNLRLIGPHCPSSTVPVMSASCRTNCASMSNAGWQVKF

SEQ ID NO: 775900 - protein, 115 aa, Homo sapiens
DSTGIDLHEFLINTLKNNSRDRMILLKMEQEIIDFIADNNNHYKKFPQMSSYQRMLVHRVAAYFGLDHNVDQTGKSVIINKTSSTRMLPASLVWSTGIPRPNRSAAATSESERDK

SEQ ID NO: 775901 - protein, 556 aa, Homo sapiens
DSTGIDLHEFLINTLKNNSRDRMILLKMEQEIIDFIADNNNHYKKFPQMSSYQRMLVHRVAAYFGLDHNVDQTGKSVIINKTSSTRIPEQRFCEHLKDEKGEESQKRFILKRDNSSIDKEDNQSVCSQESLFVENSRLLEDSNICNETYKKRQLFRGNRDGSGRTSGSRQSSSENELKWSDHQRAWSSTDSDSSNRNLKPAMTKTASFGGITVLTRGDSTSSTRSTGKLSKAGSESSSSAGSSGSLSRTHPPLQSTPLVSGVAAGSPGCVPYPENGIGGQVAPSSTSYILLPLEAATGIPPGSILLNPHTGQPFVNPDGTPAIYNPPTSQQPLRSAMVGQSQQQPPQQQPSPQPQQQVQPPQPQMAGPLVTQSVQGLQASSQSVQYPAVSFPPQHLLPVSPTQHFPMRDDVATQFGQMTLSRQSSGETPEPPSGPVYPSSLMPQPAQQPSYVIASTGQQLPTGGFSGSGPPISQQVLQPPPSPQGFVQQPPPAQMPVYYYPSGQYPTSTTQQYRPMAPVQYNAQRSQQMPQAAQQAVAVTGGFLQTESVAIVLISR

SEQ ID NO: 775902 - protein, 136 aa, Homo sapiens
DSTGIDLHEFLINTLKNNSRDRMILLKMEQEIIDFIADNNNHYKKFPQMSSYQRMLVHRVAAYFGLDHNVDQTGKSVIINKTSSTRIPEQRFCEHLKDEKGEESQKRFILKRDNSSIDKEDNQSVCSQESLFVENR

SEQ ID NO: 775903 - protein, 525 aa, Homo sapiens
DSTGIDLHEFLINTLKNNSRDRMILLKMEQEIIDFIADNNNHYKKFPQMSSYQRMLVHRVAAYFGLDHNVDQTGKSVIINKTSSTRISESSSSAGSSGSLSRTHPPLQSTPLVSGVAAGSPGCVPYPENGIGGQVAPSSTSYILLPLEAATGIPPGSILLNPHTGQPFVNPDGTPAIYNPPTSQQPLRSAMVGQSQQQPPQQQPSPQPQQQVQPPQPQMAGPLVTQSVQGLQASSQSVQYPAVSFPPQHLLPVSPTQHFPMRDDVATQFGQMTLSRQSSGETPEPPSGPVYPSSLMPQPAQQPSYVIASTGQQLPTGGFSGSGPPISQQVLQPPPSPQGFVQQPPPAQMPVYYYPSGQYPTSTTQQYRPMAPVQYNAQRSQQMPQAAQQAGYQPVLSGQQGFQGLIGVQQPPQSQNVINNQQGTPVQSVMVSYPTMSSYQVPMTQGSQGLPQQSYQQPIMLPNQAGQGSLPATGMPVYCNVTPPTPQNNLRLIGPHCPSSTVPVMSASCRTNCASMSNAGWQVKF

SEQ ID NO: 775904 - protein, 671 aa, Homo sapiens; identical to SEQ ID NO: 775899

SEQ ID NO: 775905 - protein, 488 aa, Homo sapiens
DSTGIDLHEFLINTLKNNSRDRMILLKMEQEIIDFIADNNNHYKKFPQMSSYQRMLVHRVAAYFGLDHNVDQTGKSVIINKTSSTRIPEQRFCEHLKDEKGEESQKRFILKRDNSSIDKEDNQSVCSQESLFVENSRLLEDSNICNETYKKRQLFRGNRDGSGRTSGSRQSSSENELKWSDHQRAWSSTDSDSSNRNLKPAMTKTASFGGITVLTRGDSTSSTRSTGKLSKAGSESSSSAGSSGSLSRTHPPLQSTPLVSGVAAGSPGCVPYPENGIGGQVAPSSTSYILLPLEAATGIPPGSILLNPHTGQPFVNPDGTPAIYNPPTSQQPLRSAMVGQSQQQPPQQQPSPQPQQQVQPPQPQMAGPLVTQSVQGLQASSQSVQYPAVSFPPQHLLPVSPTQHFPMVLQPPPSPQGFVQQPPPAQMPVYYYPSGQYPTSTTQQYRPMAPVQYNAQRSQQMPQAAQQAVAVTGGFLQTESVAIVLISR

SEQ ID NO: 775906 - protein, 659 aa, Homo sapiens
MASTVSPSTIAETPEPPPLSDHIRNAADISVIVIYFLVVMAVGLWAMLKTNRGTIGGFFLAGRDMAWWPMGASLFASNIGSNHYVGLAGTGAASGVATVTFEWTSSVMLLILGWIFVPIYIKSGVMTMPEYLKKRFGGERLQVYLSILSLFICVVLLISADIFAGAIFIKLALGLDLYLAIFILLAMTAVYTTTGGLASVIYTDTLQTIIMLIGSFILMGFAFNEVGGYESFTEKYVNATPSVVEGDNLTISASCYTPRADSFHIFRDAVTGDIPWPGIIFGMPITALWYWCTNQVIVQRCLCGKDMSHVKAACIMCAYLKLLPMFLMVMPGMISRILYTDMVACVVPSECVKHCGVDVGCTNYAYPTMVLELMPQGLRGLMLSVMLASLMSSLTSIFNSASTLFTIDLYTKMRKQASEKELLIAGRIFVLLLTVVSIVWVPLVQVSQNGQLIHYTESISSYLGPPIAAVFVLAIFCKRVNEQGAFWGLMVGLAMGLIRMITEFAYGTGSCLAPSNCPKIICGVHYLYFSIVLFFGSMLVTLGISLLTKPIPDVHLYRLCWVLRNSTEERIDIDAEEKSQEETDDGVEEDYPEKSRGCLKKAYDLFCGLQKGPKLTKEEEEALSKKLTDTSERPSWRTIVNINAILLLAVVVFIHGYYA

SEQ ID NO: 775907 - protein, 246 aa, Homo sapiens
MWKQKFRAKIRKRKVTTKINRHDKINGKRKTARKQKMFQRAQELRRRAEDYHKCKIPPSARKPLCNWVRMVAAEHRHSSGLPYWLYLTAETLKNRMGRQPPPPTQQHSITDNSLSLKTPPECLLTPLPPSVDDNIKECPLAPLPPSPLPPSVDDNLKECLFVPLPPSPLPPSVDDNLKECLFVPLPPSPLPPSVDDNLKTPPLATQEAEVEKPPKPKRWRVDEVEQSPQTQEAEGGRGTTITQTQE

SEQ ID NO: 775908 - protein, 181 aa, Homo sapiens
MWKQKFRAKIRKRKVTTKINRHDKINGKRKTARKQKMFQRAQELRRRAEDYHKCKIPPSARKPLCNWVRMVAAEHRHSSGLPYWLYLTAETLKNRMGRQPPPPTQQHSITDNSLSLKTPPECLLTPLPPSVDDNIKECPLAPLPPSPLPPSVDDNLKECLFVPFHPLLFHPQWMIISRLLP

SEQ ID NO: 775909 - protein, 115 aa, Homo sapiens
LPAHLLKPGRCEPRARQPLPFSGVLRASNPRPWGLGPRRTGLEAGLRAFVPSCLPAVARPLLQPLVAGRVLGTWPFSHWAPPSWAKARTLVLGEDEMCSFEMLGFQRESCWRRRK

SEQ ID NO: 775910 - protein, 127 aa, Homo sapiens
MWVWVPLPCGSGDLEDMVNPGQGTCHPCMGSGTAGWSLLGRQPGVQLKSLECGSPSSRPVLRSSCRSFMSVFTGTCGGVSFDPSWRDGSMREPSTFILKMKRVLQLFGVCEVSPALYRCGNRGPGSL

SEQ ID NO: 775911 - protein, 74 aa, Homo sapiens
CSEKVCFASKEAEESVHKLPHAALVLLSHGQQHAIEPLLLLLSAHRAGSDPRPEVCALVLCSLHYFGSRRAQQL

SEQ ID NO: 775912 - protein, 243 aa, Homo sapiens
HLLFLFPTVLSPRPLLLSLSSPRAFPTTVFSPVFFPSHRFLPMSSHRLAAASVSRNLLPTFFSPPPIVFFPQPLILRHLLPLPTFSQQRLPAAFFSPRTLFSPLPLPTVFAPDRLLAHPLLALSNCLSPRSAPRVRPPVSLRLVCLCAAASPMSWAPELRPNSQQETQESRCQGHHGCRRPRPRRYLRTEQCWLRAKDSGARKTAGRGGGGDGEGGKDLGKWDGEKGGEEDSGEKVQGEDSVV

SEQ ID NO: 775913 - protein, 70 aa, Homo sapiens
PRPINQSKFQPGLSESRESQLLSFCAEGQGRGTKIEDQGCAASVPSWTTKFQLPAFFVGICSSQNGFSGT

SEQ ID NO: 775914 - protein, 290 aa, Homo sapiens
MHPINVRRDPSIPIYGLRQSILLNTRLQDCYVDSPALTNIWMARTCAKQNINAPAPATTSSWEVVRNPLIASSFSLVKLVLRRQLKNKCCPPPCKFGEGKLSKRLKHKDDSVMKATQQARKRNFISSKSKQPAGHRRPAGGIRESKESSKEKKLTVRQDLEDRYAEHVAATQALPQDSGTAAWKGRVLLPETQKRQQLSEDTLTIHGLPTEGYQALYHAVVEPMLWNPSGTPKRYSLELGKAIKQKLWEALCSQGAISEGAQRDRFPGRKQPGVHEEPVLKKWPKLKSKK

SEQ ID NO: 775915 - protein, 307 aa, Homo sapiens
  misc_feature (4)..(4): Xaa can be any naturally occurring amino acid
  misc_feature (11)..(11): Xaa can be any naturally occurring amino acid
VSEXRVYSSVXGESSRCKHPINVRRDPSIPIYGLRQSILLNTRLQDCYVDSPALTNIWMARTCAKQNINAPAPATTSSWEVVRNPLIASSFSLVKLVLRRQLKNKCCPPPCKFGEGKLSKRLKHKDDSVMKATQQARKRNFISSKSKQPAGHRRPAGGIRESKESSKEKKLTVRQDLEDRYAEHVAATQALPQDSGTAAWKGRVLLPETQKRQQLSEDTLTIHGLPTEGYQALYHAVVEPMLWNPSGTPKRYSLELGKAIKQKLWEALCSQGAISEGAQRDRFPGRKQPGVHEEPVLKKWPKLKSKK

SEQ ID NO: 775916 - protein, 58 aa, Homo sapiens
GPKAQEGAVGTVHCTPLSQGRCSEAASSLLDCWEGKIHVALRRPTGRNATSDTFRVFM

SEQ ID NO: 775917 - protein, 114 aa, Homo sapiens
HQTRARLPLGRLQVGTDGCSPHHAALLQLTHPQLLPSSLRPCLLPALMPPLPATPVPTCPQLPTGADVAISVCPIIAPSLLGGRSHQCPSLHPENSLWEGLGQCLEEIRGPTHC

SEQ ID NO: 775918 - protein, 58 aa, Homo sapiens
MGSAVAASHVGVAQSHGTIEILPEGGSRWCLWVAPSSGGGVHSMATRGQQRLPRNTGV

SEQ ID NO: 775919 - protein, 123 aa, Homo sapiens
SVRGRCFGRPWVAAGTLTCSRPRPRFAESSGAGPQDLPALPLQSSVGETCVRFPRAGPLPSSALHPRHPGAVGPPPIRLLLLFLTQLGNSETTGASVRPLWPPRDHDPEVGQPRRAGRLTLAQ

SEQ ID NO: 775920 - protein, 79 aa, Homo sapiens
MANSPLLLCSIWALQIGGLRLSPLSQGMNEGEGDEQQGQQGVGSAGLGMGTPEPCCLLLHSFPAQELALTSSRQSCFSI

SEQ ID NO: 775921 - protein, 217 aa, Homo sapiens
RKSRRRWRRWERRGFWPILASKLGEIRMAVEELQSIIKRCQILEEQDFKEEDFGLFQLAGQRCIEEGHTDQLLEIIQNEKNQVIIKNMGWNLVGPVVRCLLCKDKEDSKRKVYFLIFDLLVKLCNPKELLLGLLELIEEPSGKQISQSILLLLQPLQTVIQKLHNKAYSIGLALSTLWNQLSLLPVPYSKEQIQMDDYGLCQCCKALIEFTKPFVEE

SEQ ID NO: 775922 - protein, 493 aa, Homo sapiens
MICVCSVSLRYLNASANSLESLPSACTGEESLSMLQLLYLTNNLLTDQCIPVLVGHLHLRILHLANNQLQTFPASKLNKLEQLEELNLSGNKLKTIPTTIANCKRLHTLVAHSNNISIFPEILQLPQIQFVDLSCNDLTEILIPEALPATLQDLDLTGNTNLVLEHKTLDIFSHITTLKIDQKPLPTTDSTVTSTFWSHGLAEMAGQRNKLCVSALAMDSFAEGVGAVYGMFDGDRNEELPRLLQCTMADVLLEEVQQSTNDTVFMANTFLVSHRKLGMAGQKLGSSALLCYIRPDTADPASSFSLTVANVGTCQAVLCRGGKPVPLSKVFSLEQDPEEAQRVKDQKAIITENWVLNQKHLQDFPGEDKENKHMKPHSLTLQSYELRFRKISKSSRPQIFRCITVTSGLFSAAFVALLFSVATQGQHHAGAVHDHEKTSKGGCCSVGACQLAVHPGETLAGIEPLSCFASVGAIDLQSHVEVNTNACAVAHCR

SEQ ID NO: 775923 - protein, 301 aa, Homo sapiens
  misc_feature (276)..(276): Xaa can be any naturally occurring amino acid
  misc_feature (278)..(278): Xaa can be any naturally occurring amino acid
  misc_feature (295)..(296): Xaa can be any naturally occurring amino acid
MICVCSVSLRYLNASANSLESLPSACTGEESLSMLQLLYLTNNLLTDQCIPVLVGHLHLRILHLANNQLQTFPASKLNKLEQLEELNLSGNKLKTIPTTIANCKRLHTLVAHSNNISIFPEILQLPQIQFVDLSCNDLTEILIPEALPATLQDLDLTGNTNLVLEHKTLDIFSHITTLKIDQKPLPTTDSTVTSTFWSHGLAEMAGQRNKLCVSALAMDSFAEGVGAVYGMFDGDRNEELPRLLQCTMADVLLEEVQQSTNDTVFMANTFLVSHRXIXGMAGAKKFGAPPGPPGXXNPGPG

SEQ ID NO: 775924 - protein, 107 aa, Homo sapiens
MICVCSVSLRYLNASANSLESLPSACTGEESLSMLQLLYLTNNLLTDQCIPVLVGHLHLRILHLANNQLQTFPARLLSSMIILYMSMECGDFGSFKSLWGSSVFSVE

SEQ ID NO: 775925 - protein, 110 aa, Homo sapiens
MLLSGMPECNVWDGCGNKLKTIPTTIANCKRLHTLVAHSNNISIFPEILQLPQIQFVDLSCNDLTEILIPEALPATLQDLDLTGNTNLVLEHKTLDIFRATVNPQATVNP

SEQ ID NO: 775926 - protein, 736 aa, Homo sapiens
MICVCSVSLRYLNASANSLESLPSACTGEESLSMLQLLYLTNNLLTDQCIPVLVGHLHLRILHLANNQLQTFPASKLNKLEQLEELNLSGNKLKTIPTTIANCKRLHTLVAHSNNISIFPEILQLPQIQFVDLSCNDLTEILIPEALPATLQDLDLTGNTNLVLEHKTLDIFSHITTLKIDQKPLPTTDSTVTSTFWSHGLAEMAGQRNKLCVSALAMDSFAEGVGAVYGMFDGDRNEELPRLLQCTMADVLLEEVQQSTNDTVFMANTFLVSHRKLGMAGQKLGSSALLCYIRPDTADPASSFSLTVANVGTCQAVLCRGGKPVPLSKVFSLEQDPEEAQRVKDQKAIITEDNKVNGVTCCTRMLGCTYLYPWILPKPHISSTPLTIQDELLILGNKALWEHLSYTEAVNAVRHVQDPLAAAKKLCTLAQSYGCQDNVGAMVVYLNIGEEGCTCEMNGLTLPGPVGFASTTTIKDAPKPATPSSSSGIASEFSSEMSTSEVSSEVGSTASDEHNAGGLDTALLPRPERRCSLHPTPTSGLFQRQPSSATFSSNQSDNGLDSDDDQPVEGVITNGSKVEVEVDIHCCRGRDLENSPPLIESSPTLCSEEHARGSCFGIRRQNSVNSGMLLPMSKDRMELQKSPSTSCLYGKKLSNGSIVPLEDSLNLIEVATEVPKRKTGYFAAPTQMEPEDQFVVPHDLEEEVKEQMKQHQDSRLEPEPHEEDRTEPPEEFDTAL

SEQ ID NO: 775927 - protein, 736 aa, Homo sapiens; identical to SEQ ID NO: 775926

SEQ ID NO: 775928 - protein, 72 aa, Homo sapiens
PTAARRLKAASVRSHFPDNIVRLLAPWSKTPMVRTPRPRETATPPYIRGERRIVYCWSSCRTCSSSVPSNGE

SEQ ID NO: 775929 - protein, 215 aa, Homo sapiens
MAMNLLEDWCRGMEVDIHRSLLVTGIPEDCGQAEIEETLNGVLSPLGPYRVLNKIFVREENVKAALIEVGEGVNLSTIPREFPGRGGVWRVVCRDPTQDAEFLKNLNEFLDAEGRTWEDVVRLLQLNHPNLSQNQHQPPENWAEALGVLLGAVVQIIFCMDAEIRSREEARAQEAAEFEEMAAWALAAGRKVKKEPGLAAEVGSALKAETPNNWN

SEQ ID NO: 775930 - protein, 199 aa, Homo sapiens
PSSRHALPTVDIKTEDLSDSLPPVCDTVATDLCSTGIDICSFSEDIKPGDSLLLSVEEVLRSLETVSNTEVCCPNLQPNLEATVSNGPFLQLSSQSLSHNVFMSTSPALHGLSCTAATPKIAKLNRKRSRSESDSEKVQPLPISTIIRGPTLGASAPVTVKRESKISLQPIAPLSYCSHNTRIQDNYWLHHRNSYARYV

SEQ ID NO: 775931 - protein, 363 aa, Homo sapiens
PSSRHALPTVDIKTEDLSDSLPPVCDTVATDLCSTGIDICSFSEDIKPGDSLLLSVEEVLRSLETVSNTEVCCPNLQPNLEATVSNGPFLQLSSQSLSHNVFMSTSPALHGLSCTAATPKIAKLNRKRSRSESDSEKVQPLPISTIIRGPTLGASAPVTVKRESKISLQPIATVPNGGTTPKISKTVLLSTKSMKKSHEHGSKKSHSKTKPGILKKDKAVKEKIPSHHFMPGSPTKTVYKKPQEKKGCKCGRATQNPSVLTCRGQRCPCYSNRKACLDCICRGCQNSYMANGEKKLEAFAVPEKALEQTRLTLGINVTSIAVRNASTSTSVINVTGSPVTTFLAASTHDDKSLDEAIDMRFDC

SEQ ID NO: 775932 - protein, 669 aa, Homo sapiens
LRSVVAPDELERWFLSHIFGLEVSGTEGRQGPMCGRIVSAPQTCTDFGYLFGQWFGSDFFRIVANSPSFPGCLLSWIRNFFSPGAIGVEVSAMNPVNATALYISASRLVLNYDPGDPKAFTEINRLLPYFRQSLSCCVCGHLLQDPIAPTNSTCQHYVCKTCKGKKMMMKPSCSWCKDYEQFEENKQLSILVNCYKKLCEYITQTTLARDIIEAVDCSSDILALLNDGSLFCEETEKPSDSSFTLCLTHSPLPSTSEPTTDPQASLSPMSESTLSIAIGSSVINGLPTYNGLSIDRFGINIPSPEHSNTIDVCNTVDIKTEDLSDSLPPVCDTVATDLCSTGIDICSFSEDIKPGDSLLLSVEEVLRSLETVSNTEVCCPNLQPNLEATVSNGPFLQLSSQSLSHNVFMSTSPALHGLSCTAATPKIAKLNRKRSRSESDSEKVQPLPISTIIRGPTLGASAPVTVKRESKISLQPIATVPNGGTTPKISKTVLLSTKSMKKSHEHGSKKSHSKTKPGILKKDKAVKEKIPSHHFMPGSPTKTVYKKPQEKKGCKCGRATQNPSVLTCRGQRCPCYSNRKACLDCICRGCQNSYMANGEKKLEAFAVPEKALEQTRLTLGINVTSIAVRNASTSTSVINVTGSPVTTFLAASTHDDKSLDEAIDMRFDC

SEQ ID NO: 775933 - protein, 493 aa, Homo sapiens
  misc_feature (2)..(2): Xaa can be any naturally occurring amino acid
  misc_feature (30)..(30): Xaa can be any naturally occurring amino acid
MXEYPYNYMSLVLTEPHEFENKADATDLYXMNFGKKNNINLIVYGHALLNDGSLFCEETEKPSDSSFTLCLTHSPLPSTSEPTTDPQASLSPMSESTLSIAIGSSVINGLPTYNGLSIDRFGINIPSPEHSNTIDVCNTVDIKTEDLSDSLPPVCDTVATDLCSTGIDICSFSEDIKPGDSLLLSVEEVLRSLETVSNTEVCCPNLQPNLEATVSNGPFLQLSSQSLSHNVFMSTSPALHGLSCTAATPKIAKLNRKRSRSESDSEKVQPLPISTIIRGPTLGASAPVTVKRESKISLQPIATVPNGGTTPKISKTVLLSTKSMKKSHEHGSKKSHSKTKPGILKKDKAVKEKIPSHHFMPGSPTKTVYKKPQEKKGCKCGRATQNPSVLTCRGQRCPCYSNRKACLDCICRGCQNSYMANGEKKLEAFAVPEKALEQTRLTLGINVTSIAVRNASTSTSVINVTGSPVTTFLAASTHDDKSLDEAIDMRFDC

SEQ ID NO: 775934 - protein, 669 aa, Homo sapiens; identical to SEQ ID NO: 775932

SEQ ID NO: 775935 - protein, 127 aa, Homo sapiens
EIFSSLGFPDSFLSWFSSSQRPMYLEANKEAYISGLLTCRTLLMPHVSSGTPAAAHNTTLFCCWEVTWVRVPRSWSGVRRLPALSPLYLESSKSPPMMHFVDIRSHVPIQGEDLKETLCSAPCPGSP

SEQ ID NO: 775936 - protein, 76 aa, Homo sapiens
MEVSELRGQEGKVGPSPFSLLLSVLCPLSLGAGSTCLSTHSPQLKEVVLKSSKVVRADVCVVGIGELVCGQAGTKQ

SEQ ID NO: 775937 - protein, 394 aa, Homo sapiens
AGLVCAETLRQEGFSDRIVLCTLDRHLPYDRPKLSKSLDTQPEQLALRPKEFFRAYGIEVLTEAQVVTVDVRTKKVVFKDGFKLEYSKLLLAPGSSPKTLSCKGKEVENVFTIRTPEDANRVVRLARGRNVVVVGAGFLGMEVAAYLTEKAHSVSVVELEETPFRRFLGERVGRALMKMFENNRVKFYMQTEVSELRGQEGKLKEVVLKSSKVVRADVCVVGIGAVPATGFLRQSGIGLDSRGFIPVNKMMQTNVPGVFAAGDAVTFPLAWRNNRKVNIPHWQMAHAQGRVAAQNMLAQEAEMSTVPYLWTAMFGKSLRYAGYGEGFDDVIIQGDLEELKFVAFYTKGDEVIAVASMNYDPIVSKVAEVLASGRAIRKREVETGDMSWLTGKGS

SEQ ID NO: 775938 - protein, 71 aa, Homo sapiens
PSGYIFITQRENGLIQLGMVVHACHSSDSEAAGSAVAGITGMCHHARLIFVFLVEMGFHHVGQAGLQLLTW

SEQ ID NO: 775939 - protein, 45 aa, Homo sapiens
TLRIPTLWNRGGTQPTYTTAVHLKGKQNQIKGGQPEYYPSEIIKY

SEQ ID NO: 775940 - protein, 102 aa, Homo sapiens
ASVSPGSPQGARLVILHLPEEESHLPVEQTAPDHPLQRVGVGITSASGYASVISARCDMTAWPGVFSHSSLPCLPPAALVPILADASSEREVHWTWRWKIYA

SEQ ID NO: 775941 - protein, 261 aa, Homo sapiens
MSRYTRPPNTSLFIRNVADATRPEDLRREFGRYGPIVDVYIPLDFYTRRPRGFAYVQFEDVRDAEDALYNLNRKWVCGRQIEIQFAQGDRKTPGQMKSKERHPCSPSDHRRSRSPSQRRTRSRSSSWGRNRRRSDSLKESRHRRFSYSQSKSRSKSLPRRSTSARQSRTPRRNFGSRGRSRSKSLQKRSKSIGKSQSSSPQKQTSSGTKSRSHGRHSDSIARSPCKSPKGYTNSETKVQTAKHSHFRSHSRSRSYRHKNSW

SEQ ID NO: 775942 - protein, 211 aa, Homo sapiens
MQVTLSQFEDVRDAEDALYNLNRKWVCGRQIEIQFAQGDRKTPGQMKSKERHPCSPSDHRRSRSPSQRRTRSRSSSWGRNRRRSDSLKESRHRRFSYSQSKSRSKSLPRRSTSARQSRTPRRNFGSRGRSRSKSLQKRSKSIGKSQSSSPQKQTSSGTKSRSHGRHSDSIARSPCKSPKGYTNSETKVQTAKHSHFRSHSRSRSYRHKNSW

SEQ ID NO: 775943 - protein, 166 aa, Homo sapiens
MKSKERHPCSPSDHRRSRSPSQRRTRSRSSSWGRNRRRSDSLKESRHRRFSYSQSKSRSKSLPRRSTSARQSRTPRRNFGSRGRSRSKSLQKRSKSIGKSQSSSPQKQTSSGTKSRSHGRHSDSIARSPCKSPKGYTNSETKVQTAKHSHFRSHSRSRSYRHKNSW

SEQ ID NO: 775944 - protein, 107 aa, Homo sapiens
MFKQALTSMGLALFGGKSFQQSQVVTGEGRCSINRYRDSKALAERNGPIQAPGKAVAGLRGFNASGQTDDSGRCRGHMLRPPWDGVGSSTQGEDTYHPRYALSGHSA

SEQ ID NO: 775945 - protein, 109 aa, Homo sapiens
MKYAENIMLKLTFSTTQIQQYENVFIFETGYWLTNAIKYNQDYLDICTYQRLQQRLYLQKKIIQKHFEKKKDIRRGIGYLKLICFLIPFLLSLKKKMKVPYLSSLLQPF

SEQ ID NO: 775946 - protein, 710 aa, Homo sapiens
MNVKNNGAAAVPYSLFLLHYVSASLERHLTARRFMVEMTNCFFTTSSPCFLTSWNHPCSCNISNLPVSLTTNHPERIWHSLQLLILSSPEGLLNRWSVHLAFSYSEQSFMIFSFLLSLSPQLPEPRIRQGPPLKRPQRRELGSGPGSPRFDSLLGQDFLNIIAWPWCQGGCGAEGGACAAHFPVEVSCPFPFPYQAQAILGAALLSEGVSPEPLRHSPHSYWVLLTIIPSSAASFCDLWTQVGLCLSCSRRAGKGDSLNCSGHMLLVNILKFDLLQFFRGIESKSHFMEKSNKELVLFLLGDTNNQTGDTSEFKWLVKKKKKNTSENSKSTLMLVLYNRRCSKRFACSNSLNPHNYFMKRRFSNLVTEAMNGQDSGSKTGSPDHDDPSLGLMEIITKSPPLGFSAVGNGVLPAEYCCDLSFRPLCAETAVVCVSAVLLKLVHTFLDFWLSQSAQILNFQTNLFLFGPQPGFVTSAATAVETVDKQGQAAQRENVAVGSLEGLPAHLEGQRPRNPRAIDAQAVIVLRLVGRGVCFSFLLPFSSSLSLALFLSSSFPSSFLPPFLSPLKNKDEVLVKIVHRREASSLKKLFDNIVSHCSLLNKRPKGLRWRGIEVKSGFGSGLNTQTRPALGWVGSAWHEETSKDSVSLREPCWEIFSALDFEVKIKSLAPLAGISERLMGFYCLTVPFPDERPPCMGFVAALCLSLPNDPI

SEQ ID NO: 775947 - protein, 81 aa, Homo sapiens
YLFFTKSEMDENQIQMAGDDVDLPEDLRKMVDEDQEEEEDKDSILGQIQNLQNMDLDTIKEKAQATFTEIKQTAEQKCSVM

SEQ ID NO: 775948 - protein, 104 aa, Homo sapiens
TLCPQGSLLGESMASERMGQVRWGWLLRAGRTRAELEASGPEDPPSDLGQLWARLGPKRPDHPAWQHTRAQARPEGAAPGGPMVHGSLCWPCGHTAQVPGPDDG

SEQ ID NO: 775949 - protein, 196 aa, Homo sapiens
MIRMKDSLICLDCAMESSRNSSMLTLRLSFFDVDSKPLKTLEDALHCFFQPRELSSKSKCFCENCGKKTRGKQVLKLTHLPQTLTIHLMRFSIRNSQTRKICHSLYFPQSLDFSQILPMKRESCDAEEQSGGQYELFAVIAHVGMADSGHYCVYIRNAVDGKWFCFNDSNICLVSWEDIQCTYGNPNYHWLPSRAH

SEQ ID NO: 775950 - protein, 279 aa, Homo sapiens
ITVPRGADEQRRSVPFQMLLLLEKMQDSRQKAVWPLELAYCLQKYNVPLFVQHDAAQLYLKLWNLIKDQIADVHLVERLQALYMIRMKDSLICLDCAMESSRNSSMLTLRLSFFDVDSKPLKTLEDALHCFFQPRELSSKSKCFCENCGKKTRGKQVLKLTHLPQTLTIHLMRFSIRNSQTRKICHSLYFPQSLDFSQILPMKRESCDAEEQSGGQYELFAVIAHVGMADSGHYCVYIRNAVDGKWFCFNDSNICLVSWEDIQCTYGNPNYHWLPSRAH

SEQ ID NO: 775951 - protein, 160 aa, Homo sapiens
MPLTRQQGRLLVTLSPVRTDRQADRRTDKQMLLGQLSTLLCLLSGALPTGSGRPEPQSPRPQSWAAANQTWALGPGALPPLVPASALGSWKAFLGLQKARQLGMGRLQRGQDEVAAVTLPLNPQEVIQGMCKAVPFVQTRESRYVAQASLELLASSNPPT

SEQ ID NO: 775952 - protein, 126 aa, Homo sapiens
MSPGAMRRSLPSTSSTSSTKRLKSVEDEMDSPGEEPFYTGQGAPQEVAVSQVDGMNGARNAISNHTEEVGEVWFQQPLPFTDLLPGNGVHTASPTCHYRTQSKSTCNTIDSSFPDITHYPAAWALL

SEQ ID NO: 775953 - protein, 37 aa, Homo sapiens
YTEADRFSLNSLLRRHCRSSPPGEVEFQESLPGSPSP

SEQ ID NO: 775954 - protein, 38 aa, Homo sapiens
TALHLACASDHVKVVTLLVSRKCQIDICDKENRTPLIQ

SEQ ID NO: 775955 - protein, 219 aa, Homo sapiens
MAASLLAVLLLLLLERGMFSSPSPPPALLEKVFQYIDLHQDEFVQTLKEWVAIESDSVQPVPRFRQELFRMMAVAADTLQRLGARVASVDMGPQQLPDGQSLPIPPVILAELGSDPTKGTVCFYGHLDVQPADRGDGWLTDPYVLTEVDGKLYGRGATDNKGPVLAWINAVSAFRALEQDLPVNIKFIIEGMGRGWLCCPGGTCGTKNRTDSSLVWTTL

SEQ ID NO: 775956 - protein, 232 aa, Homo sapiens
  misc_feature (154)..(154): Xaa can be any naturally occurring amino acid
  misc_feature (170)..(171): Xaa can be any naturally occurring amino acid
  misc_feature (185)..(185): Xaa can be any naturally occurring amino acid
MAASLLAVLLLLLLERGMFSSPSPPPALLEKVFQYIDLHQDEFVQTLKEWVAIESDSVQPVPRFRQELFRMMAVAADTLQRLGARVASVDMGPQQLPDGQSLPIPPVILAELGSDPTKGTVCFYGHLDVQPADRGDGWLTDPYVLTEVDGTYDXERPTQGPACFDNARAXXSLEQTSWDITSSLXDGKSCFVPEDLLKERTISLCDSMDSDTVVSHGASITIDPGTSLIGSE

SEQ ID NO: 775957 - protein, 116 aa, Homo sapiens
MAASLLAVLLLLLLERGMFSSPSPPPALLEKVFQYIDLHQDEFVQTLKEWVAIESDSVQPVPRFRQELFRMMAVAADTLQRLGARVASVDMGPQQGNFMDEERPTTKALSWLGSML

SEQ ID NO: 775958 - protein, 112 aa, Homo sapiens
MDPLSWMEPKTSCVIFALSPSLKYCFWLLLLFSMASSEPMPWYFLSCIPSEKKHSPGASMVAASREPIITVEAPRARALTTCPMVWMPPSAMMGTPKFWVCLATLYTAVPWG

SEQ ID NO: 775959 - protein, 39 aa, Homo sapiens
MARDKNTCIRTSKDEHQDTVNTEAITTSACSRTTTSAVS

SEQ ID NO: 775960 - protein, 136 aa, Homo sapiens
MCENRRHPTGHLVNFNPRATEGAMTRPRPSLQEAVRAAAWTPGSPRVLSPQLVPCASFITNTTQLAPSSHGWLRSWFPGQGRGHDKPPFGAQAPQTAWGHTSWPMCLHCVHRSFLFCSIQQALQRGPQHSTWGGLG

SEQ ID NO: 775961 - protein, 33 aa, Homo sapiens
PHPLAPSARVLRGTRSTTFGGAAEPSAPGTPPP

SEQ ID NO: 775962 - protein, 193 aa, Homo sapiens
MGGGWTVLQARLDGSTNFTRTWQDYKAGFGNLRREFWLGNDKIHLLTKSKEMILRIDLEDFNGVELYALYDQFYVANEFLKYRLHVGNYNGTAGDALRFNKHYNHDLKFFTTPDKDNDRYPSGNCGLYYSSGWWFDACLSANLNGKYYHQKYRGVRNGIFWGTWPGVSEAHPGGYKSSFKEAKMMIRPKHFKP

SEQ ID NO: 775963 - protein, 75 aa, Homo sapiens
AAAYYYYCSNSSFYRCTGTCLSANLNGKYYHQKYRGVRNGIFWGTWPGVSEAHPGGYKSSFKEAKMMIRPKHFKP

SEQ ID NO: 775964 - protein, 452 aa, Homo sapiens
PCALPAGVSSTVKMKLANWYWLSSAVLATYGFLVVANNETEEIKDERAKDVCPVRLESRGKCEEAGECPYQVSLPPLTIQLPKQFSRIEEVFKEVQNLKEIVNSLKKSCQDCKLQADDNGDPGRNGLLLPSTGAPGEVGDNRVRELESEVNKLSSELKNAKEEINVLHGRLEKLNLVNMNNIENYVDSKVANLTFVVNSLDGKCSKCPSQEQIQSRPVQHLIYKDCSDYYAIGKRSSETYRVTPDPKNSSFEVYCDMETMGGGWTVLQARLDGSTNFTRTWQDYKAGFGNLRREFWLGNDKIHLLTKSKEMILRIDLEDFNGVELYALYDQFYVANEFLKYRLHVGNYNGTAGDALRFNKHYNHDLKFFTTPDKDNDRYPSGNCGLYYSSGWWFDACLSANLNGKYYHQKYRGVRNGIFWGTWPGVSEAHPGGYKSSFKEAKMMIRPKHFKP

SEQ ID NO: 775965 - protein, 452 aa, Homo sapiens; identical to SEQ ID NO: 775964

SEQ ID NO: 775966 - protein, 452 aa, Homo sapiens; identical to SEQ ID NO: 775964

SEQ ID NO: 775967 - protein, 309 aa, Homo sapiens
PCALPAGVSSTVKMKLANWYWLSSAVLATYGFLVVANNETEEIKDERAKDVCPVRLESRGKCEEAGECPYQVSLPPLTIQLPKQFSRIEEVFKEVQNLKEIVNSLKKSCQDCKLQADDNGDPGRNGLLLPSTGAPGEVGDNRVRELESEVNKLSSEDKIHLLTKSKEMILRIDLEDFNGVELYALYDQFYVANEFLKYRLHVGNYNGTAGDALRFNKHYNHDLKFFTTPDKDNDRYPSGNCGLYYSSGWWFDACLSANLNGKYYHQKYRGVRNGIFWGTWPGVSEAHPGGYKSSFKEAKMMIRPKHFKP

SEQ ID NO: 775968 - protein, 290 aa, Homo sapiens
MKWLGESKNMVVNGRRNGGKLSNDHQQNQSKLQHTGKDTLKAGKNAVERRSNRCNGNSGFEGQSRYVPSSGMSAKELCENDDLATSLVLDPYLGFQTHKMNTSAFPSRSSRHFSKSDSFSHNNPVRFRPIKGRQEELKEVIERFKKDEHLEKAFKCLTSGEWARHYFLNKNKMQEKLFKEHVFIYLRMFATDSGFEILPCNRYSSEQNGAKIVATKEWKRNDKIELLVGCIAELSEIEENMLLRHGENDFSVMYSTRKNCAQLWLGPAAFINHVCVNWSRYSMCEGSKRH

SEQ ID NO: 775969 - protein, 191 aa, Homo sapiens
MKWLGESKNMVVNGRRNGGKLSNDHQQNQSKLQHTGKDTLKAGKNAVERRSNRCNGNSGFEGQSRYVPSSGMSAKELCENDDLATSLVLDPYLGFQTHKMNTSAFPSRSSRHFSKSDSFSHNNPVRFRPIKGRQEELKEVIERFKKDEHLEKLNVAQGMADYFPDNEEFQTVLLEVDAGECGNPQAFAGEQ

SEQ ID NO: 775970 - protein, 885 aa, Homo sapiens
MKWLGESKNMVVNGRRNGGKLSNDHQQNQSKLQHTGKDTLKAGKNAVERRSNRCNGNSGFEGQSRYVPSSGMSAKELCENDDLATSLVLDPYLGFQTHKMNTSAFPSRSSRHFSKSDSFSHNNPVRFRPIKGRQEELKEVIERFKKDEHLEKAFKCLTSGEWARHYFLNKNKMQEKLFKEHVFIYLRMFATDSGFEILPCNRYSSEQNGAKIVATKEWKRNDKIELLVGCIAELSEIEENMLLRHGENDFSVMYSTRKNCAQLWLGPAAFINHDCRPNCKFVSTGRDTACVKALRDIEPGEEISCYYGDGFFGENNEFCECYTCERRGTGAFKSRVGLPAPAPVINSKYGLRETDKRLNRLKKLGDSSKNSDSQSVSSNTDADTTQEKNNATSNRKSSVGVKKNSKSRTLTRQSMSRIPASSNSTSSKLTHINNSRVPKKLKKPAKPLLSKIKLRNHCKRLEQKNASRKLEMGNLVLKEPKVVLYKNLPIKKDKEPEGPAQAAVASGCLTRHAAREHRQNPVRGAHSQGESSPCTYITRRSVRTRTNLKEASDIKLEPNTLNGYKSSVTEPCPDSGEQLQPAPVLQEEELAHETAQKGEAKCHKSDTGMSKKKSRQGKLVKQFAKIEESTPVHDSPGKDDAVPDLMGPHSDQGEHSGTVGVPVSYTDCAPSPVGCSVVTSDSFKTKDSFRTAKSKKKRRITRYDAQLILENNSGIPKLTLRRRHDSSSKTNDQENDGMNSSKISIKLSKDHDNDNNLYVAKLNNGFNSGSGSSSTKLKIQLKRDEENRGSYTEGLHENGVCCSDPLSLLESRMEVDDYSQYEEESTDDSSSSEGDEEEDDYDDDFEDDFIPLPPAKRLRLIVGKDSIDIDISSRRREDQSLRLNA

SEQ ID NO: 775971 - protein, 885 aa, Homo sapiens; identical to SEQ ID NO: 775970

SEQ ID NO: 775972 - protein, 713 aa, Homo sapiens
MQEKLFKEHVFIYLRMFATDSGFEILPCNRYSSEQNGAKIVATKEWKRNDKIELLVGCIAELSEIEENMLLRHGENDFSVMYSTRKNCAQLWLGPAAFINHDCRPNCKFVSTGRDTACVKALRDIEPGEEISCYYGDGFFGENNEFCECYTCERRGTGAFKSRVGLPAPAPVINSKYGLRETDKRLNRLKKLGDSSKNSDSQSVSSNTDADTTQEKNNATSNRKSSVGVKKNSKSRTLTRQSMSRIPASSNSTSSKLTHINNSRVPKKLKKPAKPLLSKIKLRNHCKRLEQKNASRKLEMGNLVLKEPKVVLYKNLPIKKDKEPEGPAQAAVASGCLTRHAAREHRQNPVRGAHSQGESSPCTYITRRSVRTRTNLKEASDIKLEPNTLNGYKSSVTEPCPDSGEQLQPAPVLQEEELAHETAQKGEAKCHKSDTGMSKKKSRQGKLVKQFAKIEESTPVHDSPGKDDAVPDLMGPHSDQGEHSGTVGVPVSYTDCAPSPVGCSVVTSDSFKTKDSFRTAKSKKKRRITRYDAQLILENNSGIPKLTLRRRHDSSSKTNDQENDGMNSSKISIKLSKDHDNDNNLYVAKLNNGFNSGSGSSSTKLKIQLKRDEENRGSYTEGLHENGVCCSDPLSLLESRMEVDDYSQYEEESTDDSSSSEGDEEEDDYDDDFEDDFIPLPPAKRLRLIVGKDSIDIDISSRRREDQSLRLNA

SEQ ID NO: 775973 - protein, 829 aa, Homo sapiens
EDPRDKQEKLFKEHVFIYLRMFATDSGFEILPCNRYSSEQNGAKIVATKEWKRNDKIELLVACIAELSEIEEDMLLRHGENDFSVMYSTRKNCAQLWLAPAYSGEWARHYFLNKNKMQEKLFKEHVFIYLRMFATDSGFEILPCNRYSSEQNGAKIVATKEWKRNDKIELLVGCIAELSEIEENMLLRHGENDFSVMYSTRKNCAQLWLGPAAFINHDCRPNCKFVSTGRDTACVKALRDIEPGEEISCYYGDGFFGENNEFCECYTCERRGTGAFKSRVGLPAPAPVINSKYGLRETDKRLNRLKKLGDSSKNSDSQSVSSNTDADTTQEKNNATSNRKSSVGVKKNSKSRTLTRQSMSRIPASSNSTSSKLTHINNSRVPKKLKKPAKPLLSKIKLRNHCKRLEQKNASRKLEMGNLVLKEPKVVLYKNLPIKKDKEPEGPAQAAVASGCLTRHAAREHRQNPVRGAHSQGESSPCTYITRRSVRTRTNLKEASDIKLEPNTLNGYKSSVTEPCPDSGEQLQPAPVLQEEELAHETAQKGEAKCHKSDTGMSKKKSRQGKLVKQFAKIEESTPVHDSPGKDDAVPDLMGPHSDQGEHSGTVGVPVSYTDCAPSPVGCSVVTSDSFKTKDSFRTAKSKKKRRITRYDAQLILENNSGIPKLTLRRRHDSSSKTNDQENDGMNSSKISIKLSKDHDNDNNLYVAKLNNGFNSGSGSSSTKLKIQLKRDEENRGSYTEGLHENGVCCSDPLSLLESRMEVDDYSQYEEESTDDSSSSEGDEEEDDYDDDFEDDFIPLPPAKRLRLIVGKDSIDIDISSRRREDQSLRLNA

SEQ ID NO: 775974 - protein, 471 aa, Homo sapiens
MSRIPASSNSTSSKLTHINNSRVPKKLKKPAKPLLSKIKLRNHCKRLEQKNASRKLEMGNLVLKEPKVVLYKNLPIKKDKEPEGPAQAAVASGCLTRHAAREHRQNPVRGAHSQGESSPCTYITRRSVRTRTNLKEASDIKLEPNTLNGYKSSVTEPCPDSGEQLQPAPVLQEEELAHETAQKGEAKCHKSDTGMSKKKSRQGKLVKQFAKIEESTPVHDSPGKDDAVPDLMGPHSDQGEHSGTVGVPVSYTDCAPSPVGCSVVTSDSFKTKDSFRTAKSKKKRRITRYDAQLILENNSGIPKLTLRRRHDSSSKTNDQENDGMNSSKISIKLSKDHDNDNNLYVAKLNNGFNSGSGSSSTKLKIQLKRDEENRGSYTEGLHENGVCCSDPLSLLESRMEVDDYSQYEEESTDDSSSSEGDEEEDDYDDDFEDDFIPLPPAKRLRLIVGKDSIDIDISSRRREDQSLRLNA

SEQ ID NO: 775975 - protein, 774 aa, Homo sapiens
MKWLGESKNMVVNGRRNGGKLSNDHQQNQSKLQHTGKDTLKAGKNAVERRSNRCNGNSGFEGQSRYVPSSGMSAKELCENDDLATSLVLDPYLGFQTHKMNTSAFPSRSSRHFSKSDSFSHNNPVRFRPIKGRQEELKEVIERFKKDEHLEKAFKCLTSGEWARHYFLNKNKMQEKLFKEHVFIYLRMFATDSGFEILPCNRYSSEQNGAKIVATKEWKRNDKIELLVGCIAELSEIEENMLLRHGENDFSVMYSTRKNCAQLWLGPAAFINHDCRPNCKFVSTGRDTACVKALRDIEPGEEISCYYGDGFFGENNEFCECYTCERRGTGAFKSRVGLPAPAPVINSKYGLRETDKRLNRLKKLGDSSKNSDSQSVSSNTDADTTQEKNNATSNRKSSVGVKKNSKSRTLTRQSMSRIPASSNSTSSKLTHINNSRVPKKLKKPAKPLLSKIKLRNHCKRLEQKNASRKLEMGNLVLKEPKVVLYKNLPIKKDKEPEGPAQAAVASGCLTRHAAREHRQNPVRGAHSQGESSPCTYITRRSVRTRTNLKEASDIKLEPNTLNGYKSSVTEPCPDSGEQLQPAPVLQEEELAHETAQKGEAKCHKSDTGMSKKKSRQGKLVKQFAKIEESTPVHDSPGKDDAVPDLMGPHSDQGEHSGTVGVPVSYTDCAPSPVGCSVVTSDSFKTKDSFRTAKSKKKRRITRYDAQLILENNSGIPKLTLRRRHDSSSKTNDQENDGMNSSKISIKLSKDHDNDNNLYVAKLNNGFNSGSGSSS

SEQ ID NO: 775976 - protein, 402 aa, Homo sapiens
MKWLGESKNMVVNGRRNGGKLSNDHQQNQSKLQHTGKDTLKAGKNAVERRSNRCNGNSGFEGQSRYVPSSGMSAKELCENDDLATSLVLDPYLGFQTHKMNTSAFPSRSSRHFSKSDSFSHNNPVRFRPIKGRQEELKEVIERFKKDEHLEKAFKCLTSGEWARHYFLNKNKMQEKLFKEHVFIYLRMFATDSGFEILPCNRYSSEQNGAKIVATKEWKRNDKIELLVGCIAELSEIEENMLLRHGENDFSVMYSTRKNCAQLWLGPAAFINHDCRPNCKFVSTGRDTACVKALRDIEPGEEISCYYGDGFFGENNEFCECYTCERRGTGAFKSRVGLPAPAPVINSKYGLRETDKRLNRLKKLGDSSKNSDSQSVSSNTDADTTQEKNNAKNPEEKGRCFP

SEQ ID NO: 775977 - protein, 713 aa, Homo sapiens; identical to SEQ ID NO: 775972

SEQ ID NO: 775978 - protein, 393 aa, Homo sapiens
MKWLGESKNMVVNGRRNGGKLSNDHQQNQSKLQHTGKDTLKAGKNAVERRSNRCNGNSGFEGQSRYVPSSGMSAKELCENDDLATSLVLDPYLGFQTHKMNTSAFPSRSSRHFSKSDSFSHNNPVRFRPIKGRQEELKEVIERFKKDEHLEKAFKCLTSGEWARHYFLNKNKMQEKLFKEHVFIYLRMFATDSGFEILPCNRYSSEQNGAKIVATKEWKRNDKIELLVGCIAELSEIEENMLLRHGENDFSVMYSTRKNCAQLWLGPAAFINHDCRPNCKFVSTGRDTACVKALRDIEPGEEISCYYGDGFFGENNEFCECYTCERRGTGAFKSRVGLPAPAPVINSKYGLRETDKRLNRLKKLGDSSKNSDSQSVSSNTDADTTQEKNNASK

SEQ ID NO: 775979 - protein, 282 aa, Homo sapiens
MKWLGESKNMVVNGRRNGGKLSNDHQQNQSKLQHTGKDTLKAGKNAVERRSNRCNGNSGFEGQSRYVPSSGMSAKELCENDDLATSLVLDPYLGFQTHKMNTSAFPSRSSRHFSKSDSFSHNNPVRFRPIKGRQEELKEVIERFKKDEHLEKAFKCLTSGEWARHYFLNKNKMQEKLFKEHVFIYLRMFATDSGFEILPCNRYSSEQNGAKIVATKEWKRNDKIELLVGCIAELSEIEENMLLRHGENDFSVMYSTRKNCAQLWLGPAAFINHEAVFPRCWR

SEQ ID NO: 775980 - protein, 173 aa, Homo sapiens
MKWLGESKNMVVNGRRNGGKLSNDHQQNQSKLQHTGKDTLKAGKNAVERRSNRCNGNSGFEGQSRYVPSSGMSAKELCENDDLATSLVLDPYLGFQTHKMNTSAFPSRSSRHFSKSDSFSHNNPVRFRPIKGRQEELKEVIERFKKDEHLEKAFKCLTSGEWARQPKTVPSSI

SEQ ID NO: 775981 - protein, 86 aa, Homo sapiens
VISSTHLSNGHFRNIKGVFRGPLSKNGNKTLDYAEKENTIAKALEDLKANFYCELCDKQYYKHQEFDNHINSYDHAHKQVRKRCEK

SEQ ID NO: 775982 - protein, 82 aa, Homo sapiens
VISSTHLSNGHFRNIKGVFRGPLSKNGNKTLDYAEKENTIAKALEDLKANFYCELCDKQYYKHQEFDNHINSYDHAHKQVGF

SEQ ID NO: 775983 - protein, 48 aa, Homo sapiens
HQKTTVNQMDMDSVLNGPQQLWPTLGSQRGESGSAGEAEKSWMQSPRA

SEQ ID NO: 775984 - protein, 110 aa, Homo sapiens
IPTCYHAGLKRCCSIWDTPQSEADSSPREDLQRQEADLRLPRTWGAGGKYWGAMAKGCNVSFGGDEKRFKIVLGRAQWLTPVIPELWRVEVGGSQGQEFETSLSNTVKPR

SEQ ID NO: 775985 - protein, 64 aa, Homo sapiens
MRYPQPGKRGWSGRRASEELGPCVGPLSGSQGAWDLRSPFRGLFTNRNRNIKPAQTPGLSNFMS

SEQ ID NO: 775986 - protein, 137 aa, Homo sapiens [sequence omitted]

SEQ ID NO: 775987 - protein, 75 aa, Homo sapiens
AFYGCLYCGCVPVTVRPPHPQNLGTTLPTVKMIVEVSKSACVLTTQAVTRLLRSKEAAAAVDIRTWPTILDTGAC

SEQ ID NO: 775988 - protein, 111 aa, Homo sapiens
VARGYHVGQRHPRALLWPKDVQRVRFLGAWEMWRISDVTPDLLDLNLLFNTISRWFKKHWASLETSQCLSRDFQAVVLVKDGRFLLSSLPSQLFSQPAVVFRGPMCVGPCG

SEQ ID NO: 775989 - protein, 192 aa, Homo sapiens
MVRAGAVGAHLPASGLDIFGDLKKMNKRQLYYQVLNFAMIVSSALMIWKGLIVLTGSESPIVVVLSGSMEPAFHRGDLLFLTNFREDPIRAGEIVVFKVEGRDIPIVHRVIKVHEKDNGDIKFLTKGDNNEVDDRGLYKEGQNWLEKKDVVGRARGFLPYVGMVTIIMNDYPKFKYALLAVMGAYVLLKRES

SEQ ID NO: 775990 - protein, 192 aa, Homo sapiens; identical to SEQ ID NO: 775989

SEQ ID NO: 775991 - protein, 156 aa, Homo sapiens
MVRAGAVGAHLPASGLDIFGDLKKMNKRQLYYQVLNFAMIVSSALMIWKGLIVLTGSESPIVVVLSGSMEPAFHRGDLLFLTNFREDPIRAGEIVVFKVEGRDIPIVHRVIKVHEKDNGDIKFLTKGDNNEVDDRGLYKEGQNWLEKKDVVGRARG

SEQ ID NO: 775992 - protein, 146 aa, Homo sapiens
  misc_feature (14)..(14): Xaa can be any naturally occurring amino acid
  misc_feature (16)..(16): Xaa can be any naturally occurring amino acid
  misc_feature (21)..(21): Xaa can be any naturally occurring amino acid
  misc_feature (24)..(24): Xaa can be any naturally occurring amino acid
  misc_feature (29)..(29): Xaa can be any naturally occurring amino acid
GEPDTGTAAFWSLXPXPSGCXLPXFALSXGDLLFLTNFREDPIRAGEIVVFKVEGRDIPIVHRVIKVHEKDNGDIKFLTKGDNNEVDDRGLYKEGQNWLEKKDVVGRARGFLPYVGMVTIIMNDYPKFKYALLAVMGAYVLLKRES

SEQ ID NO: 775993 - protein, 192 aa, Homo sapiens; identical to SEQ ID NO: 775989

SEQ ID NO: 775994 - protein, 192 aa, Homo sapiens; identical to SEQ ID NO: 775989

SEQ ID NO: 775995 - protein, 134 aa, Homo sapiens
TTTKFAAAGSMEPAFHRGDLLFLTNFREDPIRAGEIVVFKVEGRDIPIVHRVIKVHEKDNGDIKFLTKGDNNEVDDRGLYKEGQNWLEKKDVVGRARGFLPYVGMVTIIMNDYPKFKYALLAVMGAYVLLKRES

SEQ ID NO: 775996 - protein, 203 aa, Homo sapiens
MVRAGAVGAHLPASGLDIFGDLKKMNKRQLYYQVLNFAMIVSSALMIWKGLIVLTGSESPIVVVLSGSMEPAFHRGDLLFLTNFREDPIRAGEIVVFKVEGRDIPIVHRVIKVHEKDNGDIKFLTKGDNNEVDDRGLYKEGQNWLEKKDVVGRARGFLPYVGMVTIIMNDYPKFKVGIYVCLYLFTSLNIGAFTSATVNRQSS

SEQ ID NO: 775997 - protein, 161 aa, Homo sapiens
MVRAGAVGAHLPASGLDIFGDLKKMNKRQLYYQVLNFAMIVSSALMIWKGLIVLTGSESPIVVVLSGSMEPAFHRGDLLFLTNFREDPIRAGEIVVFKVEGRDIPIVHRVIKVHEKDNGDIKFLTKGDNNEVDDRGLYKEGQNWLEKKDVVGRARGMLFWL

SEQ ID NO: 775998 - protein, 81 aa, Homo sapiens
FSLRRWQPSVPPRAGGPLGPRRPCYGACGRRGGSSPRVRLGYLRGPEEDEQAPALLPGFKLRHDRVFCTHDMERLDRAHRQ

SEQ ID NO: 775999 - protein, 200 aa, Homo sapiens
MLGLLVALLALGLAVFALLDVWYLVRLPCAVLRARLLQPRVRDLLAEQRFPGRVLPSDLDLLLHMNNARYLREADFARVAHLTRCGVLGALRELRAHTVLAASCARHRRSLRLLEPFEVRTRLLGWDDRAFYLEARFVSLRDGFVCALLRFRQHLLGTSPERVVQHLCQRRVEPPELPADLQHWISYNEASSQLLRMESG

SEQ ID NO: 776000 - protein, 61 aa, Homo sapiens
MRTSTLRGLLTPLSLAVCSPVCSGTGWRKRHISVTIISISASTISSLPHMVALALRTQNSS

SEQ ID NO: 776001 - protein, 75 aa, Homo sapiens
PCLALCGVACLPCHPPLPLSLSPEPTGRWSWKAMCIVACAGARVLLLPLEQAPPFPGHPPSRVGLDTSSLPPEGP

SEQ ID NO: 776002 - protein, 211 aa, Homo sapiens
LTLLFLGLGLHLILSFLLRADPPRVQRGDCPSTITVSPFHGTVDICPQSTSPNLHELNVFNFSFQISTENFFLGLICLIPPSLEVVADNCRQGYLDALRFLERRGLTKEPVLWTLVSKEPPAPADGNWDAGCDQRWKGGLSLNWKVPHVQVKDVPNFEQLSPELEAALKKACTRDPSRWARFWHSGPGQVLTYLLLPCTLPFEYIYFRSRR

SEQ ID NO: 776003 - protein, 361 aa, Homo sapiens
MGFLEEEGRWNLSFSGAGYLGAHHVGATECLRQRAPRLLQGARRIYGSSSGALNAVSIVCGKSVDFCCSHLLGMVGQLERLSLSILHPAYAPIEHVKQQLQDALPPDAHVLASQRLGISLTRWPDGRNFLVTDFATCDELIQALVCTLYFPFYCGLIPPEFRGERYIDGALSNNLPFADCPSTITVSPFHGTVDICPQSTSPNLHELNVFNFSFQISTENFFLGLICLIPPSLEVVADNCRQGYLDALRFLERRGLTKEPVLWTLVSKEPPAPADGNWDAGCDQRWKGGLSLNWKVPHVQVKDVPNFEQLSPELEAALKKACTRDPSRWARFWHSGPGQVLTYLLLPCTLPFEYIYFRSRR

SEQ ID NO: 776004 - protein, 158 aa, Homo sapiens
MGFLEEEGRWNLSFSGAGYLGAHHVGATECLRQRAPRLLQGARRIYGSSSGALNAVSIVCGKSVDFCCSHLLGMVGQLERLSLSILHPAYAPIEHVKQQLQDALPPDAHVLASQRLGISLTRWPDGRNFLVTDFATCDELIQVWGGGCPGLGWWAGSI

SEQ ID NO: 776005 - protein, 85 aa, Homo sapiens
MAEGGFRKLMIIAEGEANKSFFTWAAARRSAEQKGEKTLIKRPIRSVRTHSLSQEQQHGTNCPHDSITSHQVPPMTHGDYGNYIS

SEQ ID NO: 776006 - protein, 46 aa, Homo sapiens
LRLRVEPGQKRNSSWNKESEKTRLLDRTSDEASPQTDEPAAPSKLN

SEQ ID NO: 776007 - protein, 178 aa, Homo sapiens
MGQGPRSPHKVGRRFPAGGKRGRGAKGSGRPLPGRKRQPWPPPDGRSEPAPDSHPHLSPEALGYFRRALSALKEAPETGEERDLMVHNIMKEVETQALALSTNRTGSEMLQELLGFSPLKPLCRVWAALRSNLRTVACHRCGVHVLQSALLQLPRLLGSAAEEEEEEEEDGKDGPTET

SEQ ID NO: 776008 - protein, 335 aa, Homo sapiens
MSAKLGKSSSLLTQTSEECNGILTEKMEEEEQTCDPDSSLHWSSSYSPETFRQQFRQFGYQDSPGPHEALSRLWELCHLWLRPEVHTKEQILELLVLEQFLAILPKELQAWVQKHHPENGEETVTMLEDVERELDGPKQIFFGRRKDMIAEKLAPSEITEELPSSQLMPVKKQLQGASWELQSLRPHDEDIKTTNVKSASRQKTSLGIELHCNVSNILHMNGSQSSTYRGTYEQDGRFEKRQGNPSWKKQQKCDECGKIFSQSSALILHQRIHSGKKPYACDECAKAFSRSAILIQHRRTHTGEKPYKCHDCGKAFSQSSNLFRHRKRHIRKKVP

SEQ ID NO: 776009 - protein, 142 aa, Homo sapiens
GWVTCLLSVHLLKCSPLSFSWHLIAAPTAVQDRHSTVQTAMDGGFRYHPGHETPPEPCPALLSASTLSPRVHLISVGTDSKSMPMTTHANGKSVQRPSREKQGRSQTPPPPHFMTVSASAPMLQIRTNWKDKCSELSQETWE

SEQ ID NO: 776010 - protein, 116 aa, Homo sapiens
SLNRFSSPFLKPVSERQAPGYKDVVKRPMDLTSLKRNLSKGRIRTMAQFLRDLMLMFQNAVMYNDSDHHVYHMAVEMRREVLEQIQVLNIWLDKRKGSSSLEGEPANPVDDGKPVF

SEQ ID NO: 776011 - protein, 74 aa, Homo sapiens
ENAFSPGSLVHPPVISGLPYVPRVDFRRGQGWVVLSGEPEAAGGWRRGEPNEKLPRQPPPHTQPAPRDTRGVAV

SEQ ID NO: 776012 - protein, 41 aa, Homo sapiens
GVRMEEKALGPGSEAQDSEQTQVVGRGDVWKTHRYRSLNTN

SEQ ID NO: 776013 - protein, 355 aa, Homo sapiens
LERSPWAAGPDRTAPGSPAGEFCQISGQMGNSRSRVGRSFCSQFLPEEQAEIDQLFDALSSDKNSPNVSSKSFSLKALQNHVGEALPPEMVTRLYDGMRRVDLTGKAKGPSENVSQEQFTASMSHLLKGNSEEKSLMIMKMISATEGPVKAREVQKFTEDLVGSVVHVLSHRQELRGWTGKEAPGPNPRVQVLAAQLLSEMKLQDGKRLLGPQWLDYDCDRAVIEDWVFRVPHVAIFLSVVICKGFLVLCSSLDLTTLVPERQVDQGRGFESILDVLSVMYINAQLPREQRHRWRLLFSSELHGHSFSQLCGHITHRGPCVAVLEDHDKHVFGGFASCSWEVKPQFQGKTWCPEP

SEQ ID NO: 776014 - protein, 362 aa, Homo sapiens
MGNSRSRVGRSFCSQFLPEEQAEIDQLFDALSSDKNSPNVSSKSFSLKALQNHVGEALPPEMVTRLYDGMRRVDLTGKAKGPSENVSQEQFTASMSHLLKGNSEEKSLMIMKMISATEGPVKAREVQKKSFGERILEENESQGWVLSDLSCPEWFIPSQICFQFTEDLVGSVVHVLSHRQELRGWTGKEAPGPNPRVQVLAAQLLSEMKLQDGKRLLGPQWLDYDCDRAVIEDWVFRVPHVAIFLSVVICKGFLVLCSSLDLTTLVPERQVDQGRGFESILDVLSVMYINAQLPREQRHRWRLLFSSELHGHSFSQLCGHITHRGPCVAVLEDHDKHVFGGFASCSWEVKPQFQGKTWCPEP

SEQ ID NO: 776015 - protein, 138 aa, Homo sapiens
KNVLRKHDQRREMSPEAFRIVQGEIRRVWTKGKAKRWREAGACDVSGRKNDVGKEGGRRVQSGHQSPDLEDGSMGKMAFLEKGRDGALRVGAALEVSSEQVGKESSRWMDGCECNLERKFHFSQTGKYKTTQQKSPIT

SEQ ID NO: 776016 - protein, 68 aa, Homo sapiens
RLKSAFKDSDYVYPSLEQLEKNVVEAFKTMHKCVKQFKDMPGREPSRPIPSSLPLPPASHAFLSYPAA

SEQ ID NO: 776017 - protein, 46 aa, Homo sapiens
TGTASRMQYHAPLSSMMGRTGMPSDFTPAWDTFSQEKSKEAAPQVR

SEQ ID NO: 776018 - protein, 115 aa, Homo sapiens
CRFQLEMETPGAKAALEPLRLPWPLCSPRSPESSHFQHLTPSWGLPSWKPKGQAQGVMGDIPPAHPEPGLWRPHGWRVWWNHLETLECCEDILPGPSCRDRARLTPGWGLFVRIV

SEQ ID NO: 776019 - protein, 68 aa, Homo sapiens
PGPHLTCILCPPSPPGGRRKPTPMVPASGIISLALRSTAFPRTLDVSICSLCFSFPPKRSPWDAMKES

SEQ ID NO: 776020 - protein, 74 aa, Homo sapiens
RSETPPFASLAFTAARDVILVEFRVQSPWVLAVPARAVSGGSKTICVLLFHNLMKTQVLDFFPAPYFRTILKAL

SEQ ID NO: 776021 - protein, 108 aa, Homo sapiens
MSGTGRRKAFQPIHRSPACRIECAVVLLPGRGNTECGAGLRRERYLLELTRIPRPASPGCCQQLPMQPQRRSGSLCPSRPRVLQGRGLVPEVSLCPSSTFRSCRNMSR

SEQ ID NO: 776022 - protein, 96 aa, Homo sapiens
ASPGRAGCTPSTYLAGRASPGTKGALGSKPSPRPREDAALRKEGRCPQGTLPGHPGGGSISTSDEKHGPPGYLGGSEGKCQDGENTPAPHRVSPEE

SEQ ID NO: 776023 - protein, 405 aa, Homo sapiens
KVSRGQYSLGTAAALPGQQKNTELMDLRQQNQALEKQLEKMRKFLDEQAIDREHERDVFQQEIQKLEQQLKVVPRFQPISEHQTREVEQLANHLKEKHRQMQGAYCSLTEPASQGAYTKTRNESNISSNTVEFSSKEELGSKAAYRCDVQAYLFNNGQQDRPNERKRACSKLKPSNSPLASHNIARAELKACHKTSNGKHTRHAQQLSKSQSAHSHEHARNVGTHSKGTATESANQSKHTAQIDKLTRKKRTANLSRPYRTKARNQGQSQLKRHGHGNTGAKQNDQGTTWANVTRKPVNEPTEPSSTEPTKAAQEGEKLGITNPKPAKTKRRNTATKEKTGTPGHRTSLRDTQTENRVPTTNTQGEPGTNKQDQLDKGHPRHPQTGNLPGSKQTTKPRATHTDTR

SEQ ID NO: 776024 - protein, 364 aa, Homo sapiens
RDSTRRLAWPGCSGCCWNPRGGRKRRRQAAVTQAATRASGTPSPRDGTMTQGKLSVANKAPGTEGQQQVHGEKKEAPAVPSAPPSYEEATSGEGMKAGAFPPAPTAVPLHPSWAYVDPSSSSSYDNGFPTGDHELFTTFSWDDQKVRRVFVRKVYTILLIQLLVTLAVVALFTFCDPVKDYVQANPGWYWASYAVFFATYLTLACCSGPRRHFPWNLILLTVFTLSMAYLTGMLSSYYNTTSVLLCLGITALVCLSVTVFSFQTKFDFTSCQGVLFVLLMTLFFSGLILAILLPFQYVPWLHAVYAALGAGVFTLFLALDTQLLMGNRRHSLSPEEYIFGALNIYLDIIYIFTFFLQLFGTNRE

SEQ ID NO: 776025 - protein, 364 aa, Homo sapiens; identical to SEQ ID NO: 776024

SEQ ID NO: 776026 - protein, 274 aa, Homo sapiens
MVYTSHYKSPGRRPLKTHPTVTYWRVNEGSSSSYDNGFPTGDHELFTTFSWDDQKVRRVFVRKVYTILLIQLLVTLAVVALFTFCDPVKDYVQANPGWYWASYAVFFATYLTLACCSGPRRHFPWNLILLTVFTLSMAYLTGMLSSYYNTTSVLLCLGITALVCLSVTVFSFQTKFDFTSCQGVLFVLLMTLFFSGLILAILLPFQYVPWLHAVYAALGAGVFTLFLALDTQLLMGNRRHSLSPEEYIFGALNIYLDIIYIFTFFLQLFGTNRE

SEQ ID NO: 776027 - protein, 155 aa, Homo sapiens [sequence omitted]

SEQ ID NO: 776028 - protein, 93 aa, Homo sapiens
CIDSARGRYAATSRRAADCITNAAQSVSSCLSHPGQALTLCKKGGRGHSWAGGVGGQDGCPSLPIFSWLWDQLALDEPYDLQSNACKNASNAD

SEQ ID NO: 776029 - protein, 364 aa, Homo sapiens; identical to SEQ ID NO: 776024

SEQ ID NO: 776030 - protein, 155 aa, Homo sapiens [sequence omitted]

SEQ ID NO: 776031 - protein, 241 aa, Homo sapiens
SPFVAMEASQQVEINSILTAQRKINSKHRSPFVTARRLFIHESIHDEVVNRLKKAYAQIRVGNPWDPNVLYGPLHTKQAVSMFLGAVEEAKKEGGTVVYGGKVMDRPGNYVEPTIVTGLGHDASIAHTETFAPILYVFKFKNEEEVFAWNNEVKQGLSSSIFTKDLGRIFRWLGPKGSDCGIVNVNIPTSGAEIGGAFGGEKHTGGGRESGSDAWKQYMRRSTCTINYSKDLPLAQGIKFQ

SEQ ID NO: 776032 - protein, 134 aa, Homo sapiens
MPKPPRKPPRFPIPGPPGPPGPPAAPASSAIWCKNEEEVFAWNNEVKQGLSSSIFTKDLGRIFRWLGPKGSDCGIVNVNIPTSGAEIGGAFGGEKHTGGGRESGSDAWKQYMRRSTCTINYSKDLPLAQGIKFQ

SEQ ID NO: 776033 - protein, 153 aa, Homo sapiens
VNKPPIWGYVHVQAGSGHALIEQWNPVGLVGIITAFNFPVAVYGWNNAIAMICGNVCLWKGAPTTSLISVAVTKIIAKVLEDNKLPGAICSLTCGGADIGTAMAKDERVNLLSFTGSTQVGKQVGLMVQERFGAMEMRRYSAVVTYAPDITNE

SEQ ID NO: 776034 - protein, 658 aa, Homo sapiens
MCIYHDDQVITRILQFQNPCYSLLYFSANILLKRIPSWNCGSRSLSPDGSSPLLPVALPLFQAGFSRRLLRKTRGRRGGGGVVPSGRGRVCPMGSPGRGAGLYFSSSQGLGLIPSPGLSMWRLPRALCVHAAKTSKLSGPWSRPAAFMSTLLINQPQYAWLKELGLREENEGVYNGSWGGRGEVITTYCPANNEPIARVRQASVADYEETVKKAREAWKIWADIPAPKRGEIVRQIGDALREKIQVLGSLVSLEMGKILVEGVGEVQEYVDICDYAVGLSRMIGGPILPSERSGHALIEQWNPVGLVGIITAFNFPVAVYGWNNAIAMICGNVCLWKGAPTTSLISVAVTKIIAKVLEDNKLPGAICSLTCGGADIGTAMAKDERVNLLSFTGSTQVGKQVGLMVQERFGRSLLELGGNNAIIAFEDADLSLVVPSALFAAVGTAGQRCTTARRLFIHESIHDEVVNRLKKAYAQIRVGNPWDPNVLYGPLHTKQAVSMFLGAVEEAKKEGGTVVYGGKVMDRPGNYVEPTIVTGLGHDASIAHTETFAPILYVFKFKNEEEVFAWNNEVKQGLSSSIFTKDLGRIFRWLGPKGSDCGIVNVNIPTSGAEIGGAFGGEKHTGGGRESGSDAWKQYMRRSTCTINYSKDLPLAQGIKFQ

SEQ ID NO: 776035 - protein, 539 aa, Homo sapiens
MWRLPRALCVHAAKTSKLSGPWSRPAAFMSTLLINQPQYAWLKELGLREENEGVYNGSWGGRGEVITTYCPANNEPIARVRQASVADYEETVKKAREAWKIWADIPAPKRGEIVRQIGDALREKIQVLGSLVSLEMGKILVEGVGEVQEYVDICDYAVGLSRMIGGPILPSERSGHALIEQWNPVGLVGIITAFNFPVAVYGWNNAIAMICGNVCLWKGAPTTSLISVAVTKIIAKVLEDNKLPGAICSLTCGGADIGTAMAKDERVNLLSFTGSTQVGKQVGLMVQERFGRSLLELGGNNAIIAFEDADLSLVVPSALFAAVGTAGQRCTTARRLFIHESIHDEVVNRLKKAYAQIRVGNPWDPNVLYGPLHTKQAVSMFLGAVEEAKKEGGTVVYGGKVMDRPGNYVEPTIVTGLGHDASIAHTETFAPILYVFKFKNEEEVFAWNNEVKQGLSSSIFTKDLGRIFRWLGPKGSDCGIVNVNIPTSGAEIGGAFGGEKHTGGGRESGSDAWKQYMRRSTCTINYSKDLPLAQGIKFQ

SEQ ID NO: 776036 - protein, 658 aa, Homo sapiens; identical to SEQ ID NO: 776034

SEQ ID NO: 776037 - protein, 658 aa, Homo sapiens; identical to SEQ ID NO: 776034

SEQ ID NO: 776038 - protein, 658 aa, Homo sapiens; identical to SEQ ID NO: 776034

SEQ ID NO: 776039 - protein, 658 aa, Homo sapiens; identical to SEQ ID NO: 776034

SEQ ID NO: 776040 - protein, 627 aa, Homo sapiens
MCIYHDDQVITRILQFQNPCYSLLYFSANILLKRIPSWNCGSRSLSPDGSSPLLPVALPLFQAGFSRRLLRKTRGRRGGGGVVPSGRGRVCPMGSPGRGAGLYFSSSQGLGLIPSPGLSMWRLPRALCVHAAKTSKLSGPWSRPAAFMSTLLINQPQYAWLKELGLREENEGVYNGSWGGRGEVITTYCPANNEPIARVRQASVADYEETVKKAREAWKIWADIPAPKRGEIVRQIGDALREKIQVLGSLVSLEMGKILVEGVGEVQEYVDICDYAVGLSRMIGGPILPSERSGHALIEQWNPVGLVGIITAFNFPVAVYGWNNAIAMICGNVCLWKGAPTTSLISVAVTKIIAKVLEDNKLPGAICSLTCGGADIGTAMAKDERVNLLSFTGSTQVGKQVGLMVQERFGRSLLELGGNNAIIAFEDADLSLVVPSALFAAVGTAGQRCTTARRLFIHESIHDEVVNRLKKAYAQIRVGNPWDPNVLYGPLHTKQAVSMFLGAVEEAKKEGGTVVYGGKVMDRPGNYVEPTIVTGLGHDASIAHTETFAPILYVFKFKNEEEVFAWNNEVKQGLSSSIFTKDLGRIFRWLGPKGSDCGIVNVNIPTSGAEIGGAFGGRRESFYYQLQ

SEQ ID NO: 776041 - protein, 658 aa, Homo sapiens; identical to SEQ ID NO: 776034

SEQ ID NO: 776042 - protein, 673 aa, Homo sapiens
MCIYHDDQVITRILQFQNPCYSLLYFSANILLKRIPSWNCGSRSLSPDGSSPLLPVALPLFQAGFSRRLLRKTRGRRGGGGVVPSGRGRVCPMGSPGRGAGLYFSSSQGLGLIPSPGLSMWRLPRALCVHAAKTSKLSGPWSRPAAFMSTLLINQPQYAWLKELGLREENEGVYNGSWGGRGEVITTYCPANNEPIARVRQASVADYEETVKKAREAWKIWADIPAPKRGEIVRQIGDALREKIQVLGSLVSLEMGKILVEGVGEVQEYVDICDYAVGLSRMIGGPILPSERSGHALIEQWNPVGLVGIITAFNFPVAVYGWNNAIAMICGNVCLWKGAPTTSLISVAVTKIIAKVLEDNKLPGAICSLTCGGADIGTAMAKDERVNLLSFTGSTQVGKQVGLMVQERFGYTCTEEKIGRHYQNWRSLLELGGNNAIIAFEDADLSLVVPSALFAAVGTAGQRCTTARRLFIHESIHDEVVNRLKKAYAQIRVGNPWDPNVLYGPLHTKQAVSMFLGAVEEAKKEGGTVVYGGKVMDRPGNYVEPTIVTGLGHDASIAHTETFAPILYVFKFKNEEEVFAWNNEVKQGLSSSIFTKDLGRIFRWLGPKGSDCGIVNVNIPTSGAEIGGAFGGEKHTGGGRESGSDAWKQYMRRSTCTINYSKDLPLAQGIKFQ

SEQ ID NO: 776043 - protein, 658 aa, Homo sapiens; identical to SEQ ID NO: 776034

SEQ ID NO: 776044 - protein, 660 aa, Homo sapiens
MCIYHDDQVITRILQFQNPCYSLLYFSANILLKRIPSWNCGSRSLSPDGSSPLLPVALPLFQAGFSRRLLRKTRGRRGGGGVVPSGRGRVCPMGSPGRGAGLYFSSSQGLGLIPSPGLSMWRLPRALCVHAAKTSKLSGPWSRPAAFMSTLLINQPQYAWLKELGLREENEGVYNGSWGGRGEVITTYCPANNEPIARVRQASVADYEETVKKAREAWKIWADIPAPKRGEIVRQIGDALREKIQVLGSLVSLEMGKILVEGVGEVQEYVDICDYAVGLSRMIGGPILPSERSGHALIEQWNPVGLVGIITAFNFPVAVYGWNNAIAMICGNVCLWKGAPTTSLISVAVTKIIAKVLEDNKLPGAICSLTCGGADIGTAMAKDERVNLLSFTGSTQVGKQVGLMVQERFGRSLLELGGNNAIIAFEDADLSLVVPSALFAAVGTAGQRCTTARRLFIHESIHDEVVNRLKKAYAQIRVGNPWDPNVLYGPLHTKQAVSMFLGAVEEAKKEGGTVVYGGKVMDRPGNYVEPTIVTGLGHDASIAHTETFAPILYVFKFKNEEEVFAWNNEVKQGLSSSIFTKDLGRIFRWLGPKGSDCGIVNVNIPTSGAEIGGAFGGEKHTGGGRESGSDAWKQYMRRSTCTIQLPVKTFLWPTLAVIPT

SEQ ID NO: 776045 - protein, 422 aa, Homo sapiens
MCIYHDDQVITRILQFQNPCYSLLYFSANILLKRIPSWNCGSRSLSPDGSSPLLPVALPLFQAGFSRRLLRKTRGRRGGGGVVPSGRGRVCPMGSPGRGAGLYFSSSQGLGLIPSPGLSMWRLPRALCVHAAKTSKLSGPWSRPAAFMSTLLINQPQYAWLKELGLREENEGVYNGSWGGRGEVITTYCPANNEPIARVRQASVADYEETVKKAREAWKIWADIPAPKRGEIVRQIGDALREKIQVLGSLVSLEMGKILVEGVGEVQEYVDICDYAVGLSRMIGGPILPSERSGHALIEQWNPVGLVGIITAFNFPVAVYGWNNAIAMICGNVCLWKGAPTTSLISVAVTKIIAKVLEDNKLPGAICSLTCGGADIGTAMAKDERVNLLSFTGSTQVGKQGEVCWNLEETMPLLPLKMQTSA

SEQ ID NO: 776046 - protein, 621 aa, Homo sapiens
MCIYHDDQVITRILQFQNPCYSLLYFSANILLKRIPSWNCGSRSLSPDGSSPLLPVALPLFQAGFSRRLLRKTRGRRGGGGVVPSGRGRVCPMGSPGRGAGLYFSSSQGLGLIPSPGLSMWRLPRALCVHAAKTSKLSGPWSRPAAFMSTLLINQPQYAWLKELGLREENEGVYNGSWGGRGEVITTYCPANNEPIARVRQASVADYEETVKKAREAWKIWADIPAPKRGEIVRQIGDALREKIQVLGSLVSLEMGKILVEGVGEVQEYVDICDYAVGLSRMIGGPILPSERSGHALIEQWNPVGLVGIITAFNFPVAVYGWNNAIAMICGNVCLWKGAPTTSLISVAVTKIIAKVLEDNKLPGAICSLTCGGADIGTAMAKDERVNLLSFTGSTQVGKQVGLMVQERFGRSLLELGGNNAIIAFEDADLSLVVPSALFAAVGTAGQRCTTARRLFIHESIHDEVVNRLKKAYAQIRVGNPWDPNVLYGPLHTKQAVSMFLGAVEEAKKEGGTVVYGGKVMDRPGNYVEPTIVTGLGHDASIAHTETFAPILYVFKFKNEEEVFAWNNEVKQGLSSSIFTKDLGRIFRWLGYNFVYFENLYKSDLCDLQDQTVASIKRVPS

SEQ ID NO: 776047 - protein, 528 aa, Homo sapiens
MCIYHDDQVITRILQFQNPCYSLLYFSANILLKRIPSWNCGSRSLSPDGSSPLLPVALPLFQAGFSRRLLRKTRGRRGGGGVVPSGRGRVCPMGSPGRGAGLYFSSSQGLGLIPSPGLSMWRLPRALCVHAAKTSKLSGPWSRPAAFMSTLLINQPQYAWLKELGLREENEGVYNGSWGGRGEVITTYCPANNEPIARVRQASVADYEETVKKAREAWKIWADIPAPKRGEIVRQIGDALREKIQVLGSLVSLEMGKILVEGVGEVQEYVDICDYAVGLSRMIGGPILPSERSGHALIEQWNPVGLVGIITAFNFPVAVYGWNNAIAMICGNVCLWKGAPTTSLISVAVTKIIAKVLEDNKLPGAICSLTCGGADIGTAMAKDERVNLLSFTGSTQVGKQVGLMVQERFGRSLLELGGNNAIIAFEDADLSLVVPSALFAAVGTAGQRCTTARRLFIHESIHDEVVNRLKKAYAQIRVGNPWDPNVLYGPLHTKQAVSMFLGAVEEAKKEGGTVVYGGKVRDALRSIV

SEQ ID NO: 776048 - protein, 503 aa, Homo sapiens
AFLHCPGLNTAPDTHYCSKQCFIEYNGKVITTYCPANNEPIARVRQASVADYEETVKKAREAWKIWADIPAPKRGEIVRQIGDALREKIQVLGSLVSLEMGKILVEGVGEVQEYVDICDYAVGLSRMIGGPILPSERSGHALIEQWNPVGLVGIITAFNFPVAVYGWNNAIAMICGNVCLWKGAPTTSLISVAVTKIIAKVLEDNKLPGAICSLTCGGADIGTAMAKDERVNLLSFTGSTQVGKQVGLMVQERFGRSLLELGGNNAIIAFEDADLSLVVPSALFAAVGTAGQRCTTARRLFIHESIHDEVVNRLKKAYAQIRVGNPWDPNVLYGPLHTKQAVSMFLGAVEEAKKEGGTVVYGGKVMDRPGNYVEPTIVTGLGHDASIAHTETFAPILYVFKFKNEEEVFAWNNEVKQGLSSSIFTKDLGRIFRWLGPKGSDCGIVNVNIPTSGAEIGGAFGGEKHTGGGRESGSDAWKQYMRRSTCTINYSKDLPLAQGIKFQ

SEQ ID NO: 776049 - protein, 594 aa, Homo sapiens
YFNSSQGLGLIPTSPGSVMCDSLSLRTADVVHCMANRPRERSSWTIGSKLGDELSLLSRHPSSRNRDPQYVVGVKSRLGAYTQHVNKTDVWRCYYEMGKDLVGKCLEGGWFIVAEPYFARCIETKGAQIRKSLDEVMVVDYEETVEKGKKEAWNNLGQSIPAPKRGEIVRQIGDALREKIQVLGSLVSLEMGKILVEGVGEVQEYVDICDYAVGLSRMIGGPILPSERSGHALIEQWNPVGLVGIITAFNFPVAVYGWNNAIAMICGNVCLWKGAPTTSLISVAVTKIIAKVLEDNKLPGAICSLTCGGADIGTAMAKDERVNLLSFTGSTQVGKQVGLMVQERFGRSLLELGGNNAIIAFEDADLSLVVPSALFAAVGTAGQRCTTARRLFIHESIHDEVVNRLKKAYAQIRVGNPWDPNVLYGPLHTKQAVSMFLGAVEEAKKEGGTVVYGGKVMDRPGNYVEPTIVTGLGHDASIAHTETFAPILYVFKFKNEEEVFAWNNEVKQGLSSSIFTKDLGRIFRWLGPKGSDCGIVNVNIPTSGAEIGGAFGGEKHTGGGRESGSDAWKQYMRRSTCTINYSKDLPLAQGIKFQ

SEQ ID NO: 776050 - protein, 631 aa, Homo sapiens
MCIYHDDQVITRILQFQNPCYSLLYFSANILLKRIPSWNCGSRSLSPDGSSPLLPVALPLFQAGFSRRLLRKTRGRRGGGGVVPSGRGRVCPMGSPGRGAGLYFSSSQGLGLIPSPGLSMWRLPRALCVHAAKTSKLSGPWSRPAAFMSTLLINQPQYAWLKELGLREENEGVYNGSWGGRGEVITTYCPANNEPIARVRQASVADYEETVKKAREAWKIWADVSLEMGKILVEGVGEVQEYVDICDYAVGLSRMIGGPILPSERSGHALIEQWNPVGLVGIITAFNFPVAVYGWNNAIAMICGNVCLWKGAPTTSLISVAVTKIIAKVLEDNKLPGAICSLTCGGADIGTAMAKDERVNLLSFTGSTQVGKQVGLMVQERFGRSLLELGGNNAIIAFEDADLSLVVPSALFAAVGTAGQRCTTARRLFIHESIHDEVVNRLKKAYAQIRVGNPWDPNVLYGPLHTKQAVSMFLGAVEEAKKEGGTVVYGGKVMDRPGNYVEPTIVTGLGHDASIAHTETFAPILYVFKFKNEEEVFAWNNEVKQGLSSSIFTKDLGRIFRWLGPKGSDCGIVNVNIPTSGAEIGGAFGGEKHTGGGRESGSDAWKQYMRRSTCTINYSKDLPLAQGIKFQ

SEQ ID NO: 776051 - protein, 430 aa, Homo sapiens
MCIYHDDQVITRILQFQNPCYSLLYFSANILLKRIPSWNCGSRSLSPDGSSPLLPVALPLFQAGFSRRLLRKTRGRRGGGGVVPSGRGRVCPMGSPGRGAGLYFSSSQGLGLIPSPGLSMWRLPRALCVHAAKTSKLSGPWSRPAAFMSTLLINQPQYAWLKELGLREENEGVYNGSWGGRGEVITTYCPANNEPIARVRQASVADYEETVKKAREAWKIWADIPAPKRGEIVRQIGDALREKIQVLGSLVSLEMGKILVEGVGEVQEYVDICDYAVGLSRMIGGPILPSERSGHALIEQWNPVGLVGIITAFNFPVAVYGWNNAIAMICGNVCLWKGAPTTSLISVAVTKIIAKVLEDNKLPGAICSLTCGGADIGTAMAKDERVNLLSFTGSTQVGKQVGLMVQERFGAMEMRRYSAVVTYAPDITNE

SEQ ID NO: 776052 - protein, 279 aa, Homo sapiens [sequence omitted]

SEQ ID NO: 776053 - protein, 292 aa, Homo sapiens
MCIYHDDQVITRILQFQNPCYSLLYFSANILLKRIPSWNCGSRSLSPDGSSPLLPVALPLFQAGFSRRLLRKTRGRRGGGGVVPSGRGRVCPMGSPGRGAGLYFSSSQGLGLIPSPGLSMWRLPRALCVHAAKTSKLSGPWSRPAAFMSTLLINQPQYAWLKELGLREENEGVYNGSWGGRGEVITTYCPANNEPIARVRQASVADYEETVKKAREAWKIWADIPAPKRGEIVRQIGDALREKIQVLGSLVSLEMGKILVEGVGEVQEYVDICDYAVGLSRMIGGPILPSEM

SEQ ID NO: 776054 - protein, 226 aa, Homo sapiens [sequence omitted]

SEQ ID NO: 776055 - protein, 610 aa, Homo sapiens
MCIYHDDQVITRILQFQNPCYSLLYFSANILLKRIPSWNCGSRSLSPDGSSPLLPVALPLFQAGFSRRLLRKTRGRRGGGGVVPSGRGRVCPMGSPGRGAGLYFSSSQGLGLIPSPGLSMWRLPRALCVHAAKTSKLSGPWSRPAAFMSTLLINQPQYAWLKELGLREENEGVYNGSWGGRGEVITTYCPANNEPIARVRQASVADYEETVKKAREAWKIWADIPAPKRGEIVRQIGDALREKIQVLGSLVSLEMGKILVEGVGEVQEYVDICDYAVGLSRMIGGPILPSERSGHALIEQWNPVGLVGIITAFNFPVAVYGWNNAIAMICGNVCLWKGAPTTSLISVAVTKIIAKVLEDNKLPGAICSLTCGGADIGTAMAKDERVNLLSFTGSTQVGKQVGLMVQERFGRSLLELGGNNAIIAFEDADLSLVVPSALFAAVGTAGQRCTTARRLFIHESIHDEVVNRLKKAYAQIRVGNPWDPNVLYGPLHTKQAVSMFLGAVEEAKKEGGTVVYGGKVMDRPGNYVEPTIVTGLGHDASIAHTETFAPILYVFKFKNEEEVFAWNNEVKQGLSSSIFTKDLGRIFRWLGYNFVYFENLYKSDLCGEWT

SEQ ID NO: 776056 - protein, 591 aa, Homo sapiens
MCIYHDDQVITRILQFQNPCYSLLYFSANILLKRIPSWNCGSRSLSPDGSSPLLPVALPLFQAGFSRRLLRKTRGRRGGGGVVPSGRGRVCPMGSPGRGAGLYFSSSQGLGLIPSPGLSMWRLPRALCVHAAKTSKLSGPWSRPAAFMSTLLINQPQYAWLKELGLREENEGVYNGSWGGRGEVITTYCPANNEPIARVRQASVADYEETVKKAREAWKIWADIPAPKRGEIVRQIGDALREKIQVLGSLVSLEMGKILVEGVGEVQEYVDICDYAVGLSRMIGGPILPSERSGHALIEQWNPVGLVGIITAFNFPVAVYGWNNAIAMICGNVCLWKGAPTTSLISVAVTKIIAKVLEDNKLPGAICSLTCGGADIGTAMAKDERVNLLSFTGSTQVGKQVGLMVQERFGRSLLELGGNNAIIAFEDADLSLVVPSALFAAVGTAGQRCTTARRLFIHESIHDEVVNRLKKAYAQIRVGNPWDPNVLYGPLHTKQAVSMFLGAVEEAKKEGGTVVYGGKVMDRPGNYVEPTIVTGLGHDASIAHTETFAPILYVFKFKNEEEVFAWNNEVKQGPREPPLVMYHQYKYPVLN

SEQ ID NO: 776057 - protein, 482 aa, Homo sapiens
MYGPGFESAEETIACYQRANSKSRQASVADYEETVKKAREAWKIWADIPAPKRGEIVRQIGDALREKIQVLGSLVSLEMGKILVEGVGEVQEYVDICDYAVGLSRMIGGPILPSERSGHALIEQWNPVGLVGIITAFNFPVAVYGWNNAIAMICGNVCLWKGAPTTSLISVAVTKIIAKVLEDNKLPGAICSLTCGGADIGTAMAKDERVNLLSFTGSTQVGKQVGLMVQERFGRSLLELGGNNAIIAFEDADLSLVVPSALFAAVGTAGQRCTTARRLFIHESIHDEVVNRLKKAYAQIRVGNPWDPNVLYGPLHTKQAVSMFLGAVEEAKKEGGTVVYGGKVMDRPGNYVEPTIVTGLGHDASIAHTETFAPILYVFKFKNEEEVFAWNNEVKQGLSSSIFTKDLGRIFRWLGPKGSDCGIVNVNIPTSGAEIGGAFGGEKHTGGGRESGSDAWKQYMRRSTCTINYSKDLPLAQGIKFQ

SEQ ID NO: 776058 - protein, 423 aa, Homo sapiens
MENLGRYSCSKTRRNSKTDWRCLAGEDPSTRKLDVDICDYAVGLSRMIGGPILPSERSGHALIEQWNPVGLVGIITAFNFPVAVYGWNNAIAMICGNVCLWKGAPTTSLISVAVTKIIAKVLEDNKLPGAICSLTCGGADIGTAMAKDERVNLLSFTGSTQVGKQVGLMVQERFGRSLLELGGNNAIIAFEDADLSLVVPSALFAAVGTAGQRCTTARRLFIHESIHDEVVNRLKKAYAQIRVGNPWDPNVLYGPLHTKQAVSMFLGAVEEAKKEGGTVVYGGKVMDRPGNYVEPTIVTGLGHDASIAHTETFAPILYVFKFKNEEEVFAWNNEVKQGLSSSIFTKDLGRIFRWLGPKGSDCGIVNVNIPTSGAEIGGAFGGEKHTGGGRESGSDAWKQYMRRSTCTINYSKDLPLAQGIKFQ

SEQ ID NO: 776059 - protein, 640 aa, Homo sapiens
MCIYHDDQVITRILQFQNPCYSLLYFSANILLKRIPSWNCGSRSLSPDGSSPLLPVALPLFQAGFSRRLLRKTRGRRGGGGVVPSGRGRVCPMGSPGRGAGLYFSSSQGLGLIPSPGLSMWRLPRALCVHAAKTSKLSGPWSRPAAFMSTLLINQPQYAWLKELGLREENEGVYNGSWGGRGEVITTYCPANNEPIARVRQASVADYEETVKKAREAWKIWADILLVVLYFLVSLEMGKILVEGVGEVQEYVDICDYAVGLSRMIGGPILPSERSGHALIEQWNPVGLVGIITAFNFPVAVYGWNNAIAMICGNVCLWKGAPTTSLISVAVTKIIAKVLEDNKLPGAICSLTCGGADIGTAMAKDERVNLLSFTGSTQVGKQVGLMVQERFGRSLLELGGNNAIIAFEDADLSLVVPSALFAAVGTAGQRCTTARRLFIHESIHDEVVNRLKKAYAQIRVGNPWDPNVLYGPLHTKQAVSMFLGAVEEAKKEGGTVVYGGKVMDRPGNYVEPTIVTGLGHDASIAHTETFAPILYVFKFKNEEEVFAWNNEVKQGLSSSIFTKDLGRIFRWLGPKGSDCGIVNVNIPTSGAEIGGAFGGEKHTGGGRESGSDAWKQYMRRSTCTINYSKDLPLAQGIKFQ

SEQ ID NO: 776060 - protein, 393 aa, Homo sapiens
MCIYHDDQVITRILQFQNPCYSLLYFSANILLKRIPSWNCGSRSLSPDGSSPLLPVALPLFQAGFSRRLLRKTRGRRGGGGVVPSGRGRVCPMGSPGRGAGLYFSSSQGLGLIPSPGLSMWRLPRALCVHAAKTSKLSGPWSRPAAFMSTLLINQPQYAWLKELGLREENEGVYNGSWGGRGEVITTYCPANNEPIARVRQASVADYEETVKKAREAWKIWADIPAPKRGEIVRQIGDALREKIQVLGSLVSLEMGKILVEGVGEVQEYVDICDYAVGLSRMIGGPILPSERSGHALIEQWNPVGLVGIITAFNFPVAVYGWNNAIAMICGNVCLWKGAPTTSLISVAVTKIIAKVLEDNKLPGAICSLTCGGADIGTAMAKDERVIFCKVIF

SEQ ID NO: 776061 - protein, 268 aa, Homo sapiens
MCIYHDDQVITRILQFQNPCYSLLYFSANILLKRIPSWNCGSRSLSPDGSSPLLPVALPLFQAGFSRRLLRKTRGRRGGGGVVPSGRGRVCPMGSPGRGAGLYFSSSQGLGLIPSPGLSMWRLPRALCVHAAKTSKLSGPWSRPAAFMSTLLINQPQYAWLKELGLREENEGVYNGSWGGRGEVITTYCPANNEPIARVRQASVADYEETVKKAREAWKIWADIPAPKRGEIVRQIGDALREKIQVLGSLVSLEMGKILVEGVGEVQE

SEQ ID NO: 776062 - protein, 117 aa, Homo sapiens
PNSFLDQEYRKRFNIVEEDTVLYCYEYEKGRSSSQGRRESTPTYGKLRPISMPVEYNWVGDYEDPNKMKRDSRRENSLLRYMSNEKIAQEEYMFQRNSKKDTGKKSKKKGDKSNSPT

SEQ ID NO: 776063 - protein, 182 aa, Homo sapiens
PKHLDLPPRARSAGFVQGLRGAASGRGRPGPSTAPTNRLASRDGDPGPARSRPGGLRPRAWPSARPERVGGAELCGGAFRAPGLCRAGFPLRGEAAGRAAVRGSNKGPRPQKRPPRVLCFCVEQTLHTCVFSEGFPCAERLQSGVAPGETRSRCPRLTQGPQPDSGTRGARAGPPGDRGKHR

SEQ ID NO: 776064 - protein, 92 aa, Homo sapiens
LTPMCMLHLHGSSPAHSAELQPIEHPSNGSNTPEICSGSHRPLASKSFYFLFPISGSGQGQMPTHSFSLLFSALPSSHWLCVLSLYPVLIPP

SEQ ID NO: 776065 - protein, 262 aa, Homo sapiens
CDVCGKDFNQKRYLAHHRRCHTGEKPYMCNKCGKVFNKKAYLARHYRRHTGEKPYKCNECGKTFSDKSALLVHKTIHTGEKPYKCNECGKVFNQQSNLARHHRVHTGEKPYQCKECDKVFSRKSYLERHRRIHTGEKPYKCKVCDKAFRHDSHLAQHIVIHTREKPYKCNECGKTFGENSALLVHKTIHTGEKPYKCNECGKVFNQQSNLARHHRLHTGEKPYKCKECDKVFSRKSHLERHRRIHTGEKPYKCKVCDKAFRR

SEQ ID NO: 776066 - protein, 74 aa, Homo sapiens
NGDRRIDRREGVLAERKRVLTVLRRGLAGPRDEASQTSASLGESQLQRLQRSQQIPVPVSLLLPVRGCGTHHEQ

SEQ ID NO: 776067 - protein, 50 aa, Homo sapiens
ANLPGTPGAERRRPDTAPKTRPHLIFKLAPSSQLHQQLVPQPPIHLRRAQ

SEQ ID NO: 776068 - protein, 48 aa, Homo sapiens
MANSGCLLLSNSGSMLPHSVPCPPAFLYLQQSDQDATAPPEAMAQPYP

SEQ ID NO: 776069 - protein, 123 aa, Homo sapiens
CLELTDSCQPYRSAFYILEQQCVGLAVDMDEIEKYQEVEEDQDPSCPRLSRELLAEKEPEVLQDPLDRCYSTPSGYLELPDLGQPYSSAVYSLEEQYLGLALDVDRIKKDQEEEEDQGPPCPR

SEQ ID NO: 776070 - protein, 184 aa, Homo sapiens
WRVECQNFVIVENSGKPPAGQGHEDPPRSTAPRGAQGPRSRPPLGADTSAPDLSRTSSRCRRRRRRGCVSRLGSEGGRRPARHRPTWPRRAEPQVPEECSLPAGVLPAQHGPEPRPRGLQPAAHQLPGERGRGSTAAQHPRRNTESREAQAPPRRAQLHSAASFLLHTYIGVGAEDHLLLADFL

SEQ ID NO: 776071 - protein, 50 aa, Homo sapiens
MGARLLLLSSSPRFRRNARSPLESYQPNTDLSRDHAGCSLQHISYPENAD

SEQ ID NO: 776072 - protein, 590 aa, Homo sapiens
MSGDYEDDLCRRALILVSDLCARVRDADTNDRCQEFNDRIRGYPRGPDADISVSLLSVIVTFCGIVLLGVSLFVSWKLCWVPWRDKGGSAVGGGPLRKDLGPGVGLAGLVGGGGHHLAAGLGGHPLLGGPHHHAHAAHHPPFAELLEPGSLGGSDTPEPSYLDMDSYPEAAAAAVAAGVKPSQTSPELPSEGGAGSGLLLLPPSGGGLPSAQSHQQVTSLAPTTRYPALPRPLTQQTLTSQPDPSSEERPPALPLPLPGGEEKAKLIGQIKPELYQGTGPGGRRSGGGPGSGEAGTGAPCGRISFALRYLYGSDQLVVRILQALDLPAKDSNGFSDPYVKIYLLPDRKKKFQTKVHRKTLNPVFNETFQFSVPLAELAQRKLHFSVYDFDRFSRHDLIGQVVLDNLLELAEQPPDRPLWRDIVEGGSEKADLGELNFSLCYLPTAGRLTVTIIKASNLKAMDLTGFSDPYVKASLISEGRRLKKRKTSIKKNTLNPTYNEALVFDVAPESVENVGLSIAVVDYDCIGHNEVIGVCRVGPDAADPHGREHWAEMLANPRKPVEHWHQLVEEKTVTSFTKGSKGLSEKENSE

SEQ ID NO: 776073 - protein, 590 aa, Homo sapiens; identical to SEQ ID NO: 776072

SEQ ID NO: 776074 - protein, 590 aa, Homo sapiens; identical to SEQ ID NO: 776072

SEQ ID NO: 776075 - protein, 605 aa, Homo sapiens
MSGDYEDDLCRRALILVSDLCARVRDADTNDRCQEFNDRIRGYPRGPDADISVSLLSVIVTFCGIVLLGVSLFVSWKLCWVPWRDKGGSAVGGGPLRKDLGPGVGLAGLVGGGGHHLAAGLGGHPLLGGPHHHAHAAHHPPFAELLEPGSLGGSDTPEPSYLDMDSYPEAAAAAVAAGVKPSQTSPELPSEGGAGSGLLLLPPSGGGLPSAQSHQQVTSLAPTTRYPALPRPLTQQTLTSQPDPSSEERPPALPLPLPGGEEKAKLIGQIKPELYQGTGPGGRRSGGGPGSGEAGTGAPCGRISFALRYLYGSDQLVVRILQALDLPAKDSNGFSDPYVKIYLLPDRKKKFQTKVHRKTLNPVFNETFQFSVPLAELAQRKLHFSVYDFDRFSRHDLIGQVVLDNLLELAEQPPDRPLWRDIVEGGSEKADLGELNFSLCYLPTAGRLTVTIIKASNLKAMDLTGFSDPYVKASLISEGRRLKKRKTSIKKNTLNPTYNEALVFDVAPESVENVGLSIAVVDYDCIGHNEVIGVCRVGPDAADPHGREHWAEMLANPRKPVEHWHQLVEVSRGPTPTPDKHPCTLGPFIHATNALHVRESQSQAS

SEQ ID NO: 776076 - protein, 381 aa, Homo sapiens
GARGCGGGGGGSGGSGYPALPRPLTQQTLTSQPDPSSEERPPALPLPLPGGEEKAKLIGQIKPELYQGTGPGGRRSGGGPGSGEAGTGAPCGRISFALRYLYGSDQLVVRILQALDLPAKDSNGFSDPYVKIYLLPDRKKKFQTKVHRKTLNPVFNETFQFSVPLAELAQRKLHFSVYDFDRFSRHDLIGQVVLDNLLELAEQPPDRPLWRDIVEGGSEKADLGELNFSLCYLPTAGRLTVTIIKASNLKAMDLTGFSDPYVKASLISEGRRLKKRKTSIKKNTLNPTYNEALVFDVAPESVENVGLSIAVVDYDCIGHNEVIGVCRVGPDAADPHGREHWAEMLANPRKPVEHWHQLVEEKTVTSFTKGSKGLSEKENSE

SEQ ID NO: 776077 - protein, 130 aa, Homo sapiens
MDLTGFSDPYVKASLISEGRRLKKRKTSIKKNTLNPTYNEALVFDVAPESVENVGLSIAVVDYDCIGHNEVIGVCRVGPDAADPHGREHWAEMLANPRKPVEHWHQLVEEKTVTSFTKGSKGLSEKENSE

SEQ ID NO: 776078 - protein, 89 aa, Homo sapiens
MASSFPPIWPRVVGGLEVKVRRCPSETTQEACVFSLFLPAGPSCESPCGAAAAGALLQASVPSRGEAYKLPGTCSSSGGGRAGSLVSSP

SEQ ID NO: 776079 - protein, 108 aa, Homo sapiens
EGEGRASLGGDAFKKSSTAAVETVLFGFIYTEWFFSEMLSCLKEEMPPQELTRRLATVITHVDEIMQQEVRPLMAVEIIEQLHRQFAILSGGRGEDGAPIITVPEFSG

SEQ ID NO: 776080 - protein, 142 aa, Homo sapiens
MEKVWIPVEMGFEPRSVQAQGLCFDCIRPPSDYMPAPLLEFVSPRQANSPFYRLLILKECTPHTDFFQFSRLVLTSPFLLLVVTVITVSYLQFFKDSCSWAAFGDQQATESHHRKEGLAVTIGQMKILILREPPPQLDPART

SEQ ID NO: 776081 - protein, 82 aa, Homo sapiens
MPRPQGKEAEELGLLQEPGVQPSLAPWAGLTVALQAGVGGETHRHLPHLHGLPSPGLPASRSAVMGAILLAASRRKQSTALM

SEQ ID NO: 776082 - protein, 39 aa, Homo sapiens
MALSPPPLLSTPTTAIVICVPMASLLHGGTSSGLPVATV

SEQ ID NO: 776083 - protein, 638 aa, Homo sapiens
MGRYSAVGSVTERIFTLYYDHLGFLHKLTLGRFEASGPPTAFGNSRNLFGQPPDMGFETALAPQHTSLDEIIFFAYVPENEPQETIYSKKFGNIHYGKVIHSGKTGRAYIRKVLQHTTPKGFLSSVIAEMKEPFGLEEVNESSCLSSSLLINKAGNVYKLTLDSQVVQALFEDTDIEKTVVLPGYSSFLITSILDNKNALAIATMPESAPNNMTFLKSTWFLYNFGQRNGRTWKIYSKPCNYWFQHDDSPSLNIVKYIDLGNSYVLKAKVIRNAKGFRMLEIPLLTVFVGNPNLLEVTAEVTFDDTDSYVITISAASKVLHQGSTSLAFIMWSASTECFVTTMVPTLKSSCSYLRSMHHIPSKFIPFEDWISGVHKDSQGFNLIKTLPINYRPPSNMGIAIPLTDNFYHADPSKPIPRNMFHMSKKTGKFKQCANVSTREECNCTKDQKFSHAVAFSDCREKVPRFKFPITQYPVSLEIINEDGRVPLQSPYLVTVTEVNMRHNWKLKHTVPENIKRMKQLVEPILGAAVYNPSGLNLSIKGSELFHFRVTVISGVTFCNLIEEFQIYVDEAPLPFPGHTLIAVATAVVLGGLIFIAFMFQLQGIHPWRTFQRWIRRNQEKFSSISLSELIHRSKSEE

SEQ ID NO: 776084 - protein, 103 aa, Homo sapiens
MGRYSAVGSVTERIFTLYYDHLGFLHKLTLGRFEASGPPTAFGNSRNLFGQPPDMGFETALAPQHTSLDEIIFFAYVPENEPQETIYSKKFGNIHYGKVIHSG

SEQ ID NO: 776085 - protein, 104 aa, Homo sapiens
GAGAGAIPGVSKGQGGGQILVLWLPEDANGNLEASDLDSTIPWLGTSTDLWKFPGGPQPFWYHHHLTYDRPASPTVCCPLFLHKRLWSLFPTWCSEAPSINSST

SEQ ID NO: 776086 - protein, 67 aa, Homo sapiens
MLEDDLLLTSSTLPGLPPVGENIKCQECGPAPEPGPACRGGWHSWDAPCPVAGPRVSKCEAVPTGTT

SEQ ID NO: 776087 - protein, 79 aa, Homo sapiens
MSGEKEHQNNRGVNKNLNDPNERPEHERKILQTEKPNTDQRNPRTKHPRDTENARPKSEVETNNERGTKRKIPEPQRED

SEQ ID NO: 776088 - protein, 49 aa, Homo sapiens
MNTQSVSSSILLTVYSQALTPYQRGKVNLPQNTIWFNYRCILDIFNQRL

SEQ ID NO: 776089 - protein, 67 aa, Homo sapiens
MPPRTVVYFPVRGRCADLSMLLADQGQSWKEEVVTVEMWQEGSLKASCLYGQLPNVPVTETSPLYQV

SEQ ID NO: 776090 - protein, 40 aa, Homo sapiens
THRASVIESESEILHHEKQYEPFYSSFVALSTHYITTVCS

SEQ ID NO: 776091 - protein, 75 aa, Homo sapiens
EPVRLGLGQESWACDISQGGLWSRDPDSISATSAAGLSGFKSHKVTVHESQNVPGLWIPKNKASTVMMVTSRSCS

SEQ ID NO: 776092 - protein, 59 aa, Homo sapiens
MRQDTDDIDSLNAVSRKWYIDWWDSEAQRIPLSSSHGKHDPRQLDAFGSASEEAHQMRP

SEQ ID NO: 776093 - protein, 41 aa, Homo sapiens
MVGWGLDSGAEVALEHSCCLLTVAGCGSDSLEQKWRLRTSR

SEQ ID NO: 776094 - protein, 595 aa, Homo sapiens
SLIKLIPLPPRVRAALSRERRHARSAGCGHAGTGPDPEPDPEPKPEPEPERDPEPEPERDPRCGAATPAEAAGAGRALRPGGCAAASTMGAAASRRRALRSEAMSSVAAKVRAARAFGEYLSQSHPENRNGADHLLADAYSGHDGSPEMQPAPQNKRRLSLVSNGCYEGSLSEEPSIRKPAGEGPQPRVYTISGEPALLPSPEAEAIELAVVKGRRQRHPHHHSQPLRASPGGSREDVSRPCQSWAGSRQGSKECPGCAQLAPGPTPRAFGLDQPPLPETSGRRKKLERMYSVDRVSDDIPIRTWFPKENLFSFQTATTTMQAISNFRKHLRMVGSRRVKAQTFAERRERSFSRSWSDPTPMKADTSHDSRDSSDLQSSHCTLDEAFEDLDWDTEKGLEAVACDTEGFVPPKVMLISSKVPKAEYIPTIIRRDDPSIIPILYDHEHATFEDILEEIERKLNVYHKGAKIWKMLIFCQGGPGHLYLLKNKVATFAKVEKEEDMIHFWKRLSRLMSKVNPEPNVIHIMGCYILGNPNGEKLFQNLRTLMTPYRVTFESPLELSAQGKQMIETYFDFRLYRLWKSRQHSKLLDFDDVL

SEQ ID NO: 776095 - protein, 400 aa, Homo sapiens
DHWPGPALGTWQAGEAMWPGLQESISPSVLHSEGTCLCLGWGQQQGPPPPLQSHRCVWEAFLPVLDVGPWQGPKFGGGEDLPLRWLKDTEQERGLLQAPSPPWGGADRSPALLQRRQAGSSATWAWRLRANFRKHLRMVGSRRVKAQTFAERRERSFSRSWSDPTPMKADTSHDSRDSSDLQSSHCTLDEAFEDLDWDTEKGLEAVACDTEGFVPPKVMLISSKVPKAEYIPTIIRRDDPSIIPILYDHEHATFEDILEEIERKLNVYHKGAKIWKMLIFCQGGPGHLYLLKNKVATFAKVEKEEDMIHFWKRLSRLMSKVNPEPNVIHIMGCYILGNPNGEKLFQNLRTLMTPYRVTFESPLELSAQGKQMIETYFDFRLYRLWKSRQHSKLLDFDDVL

SEQ ID NO: 776096 - protein, 470 aa, Homo sapiens
RPLAWPCSGDVAGRRGHVARAAGKHLTLSPALRGHVSLSGLGPAARPPSPTPITQMCLGSFFARFGCWALAGSKVWWRRGPAPEVAQGHRAGEGAPAGPQPAMGWCRQEPRSAAAQAGWILCHMGVEAQGVSPGRGRKVRAWECSSGGDLIQSARHCTFVLELKGSPGRLSREEHWVGFAFGWEVVPGARESTGFPHLKGNFRKHLRMVGSRRVKAQTFAERRERSFSRSWSDPTPMKADTSHDSRDSSDLQSSHCTLDEAFEDLDWDTEKGLEAVACDTEGFVPPKVMLISSKVPKAEYIPTIIRRDDPSIIPILYDHEHATFEDILEEIERKLNVYHKGAKIWKMLIFCQGGPGHLYLLKNKVATFAKVEKEEDMIHFWKRLSRLMSKVNPEPNVIHIMGCYILGNPNGEKLFQNLRTLMTPYRVTFESPLELSAQGKQMIETYFDFRLYRLWKSRQHSKLLDFDDVL

SEQ ID NO: 776097 - protein, 618 aa, Homo sapiens
SLIKLIPLPPRVRAALSRERRHARSAGCGHAGTGPDPEPDPEPKPEPEPERDPEPEPERDPRCGAATPAEAAGAGRALRPGGCAAASTMGAAASRRRALRSEAMSSVAAKVRAARAFGEYLSQSHPENRNGADHLLADAYSGHDGSPEMQPAPQNKRRLSLVSNGCYEGSLSEEPSIRKPAGEGPQPRVYTISGEPALLPSPEAEAIELAVVKGRRQRHPHHHSQPLRASPGGSREDVSRPCQSWAGSRQGSKECPGCAQLAPGPTPRAFGLDQPPLPETSGRRKKLERMYSVDRVSDDIPIRTWFPKENLFSFQTATTTMQAISVFRGYAERKRRKRENDSASVIQRNFRKHLRMVGSRRVKAQTFAERRERSFSRSWSDPTPMKADTSHDSRDSSDLQSSHCTLDEAFEDLDWDTEKGLEAVACDTEGFVPPKVMLISSKVPKAEYIPTIIRRDDPSIIPILYDHEHATFEDILEEIERKLNVYHKGAKIWKMLIFCQGGPGHLYLLKNKVATFAKVEKEEDMIHFWKRLSRLMSKVNPEPNVIHIMGCYILGNPNGEKLFQNLRTLMTPYRVTFESPLELSAQGKQMIETYFDFRLYRLWKSRQHSKLLDFDDVL

SEQ ID NO: 776098 - protein, 733 aa, Homo sapiens
RPLAWPCSGDVAGRRGHVARAAGKHLTLSPALRGHVSLSGLGPAARPPSPTPITQMCLGSFFARFGCWALAGSKVWWRRGPAPEVAQGHRAGEGAPAGPQPAMGWCRQEPRSAAAQAGWILCHMGVEAQGVSPGRGRKVRAWECSSGGDLIQSARHCTFVLELKGSPGRLSREEHWVGFAFGWEVVPGARESTGFPHLKGNFRKHLRMVGSRRVKAQTFAERRERSFSRSWSDPTPMKADTSHDSRDSRCPAQARPPSPEPPLDPRPLLGVPCQGRWAAAFALLNLGLPVCEMGTPSASPIAKAGLTTAAAVLAGGACRAVPTATRKRPSGAGGCGARPHSLPGARRTWLELMPARAFHRPRTRVSLPTSGRCPVVSTGLSCRAGGDLCMVLPLAWRTLRDGAFGPCGPWGHGQDRRCCRACCPGDPLASQGSDLQSSHCTLDEAFEDLDWDTEKGLEAVACDTEGFVPPKVMVEAQPGQCSSTPRAGLRPNPSPASSAWDHAAFSSCLGEGVSQGYTLGLPGSQKVASWGLPQPLGFWMGLGPLSSSLSPQLISSKVPKAEYIPTIIRRDDPSIIPILYDHEHATFEDILEEIERKLNVYHKGAKIWKMLIFCQGGPGHLYLLKNKVATFAKVEKEEDMIHFWKRLSRLMSKVNPEPNVIHIMGCYILGNPNGEKLFQNLRTLMTPYRVTFESPLELSAQGKQMIETYFDFRLYRLWKSRQHSKLLDFDDVL

SEQ ID NO: 776099 - protein, 618 aa, Homo sapiens; identical to SEQ ID NO: 776097

SEQ ID NO: 776100 - protein, 645 aa, Homo sapiens
SLIKLIPLPPRVRAALSRERRHARSAGCGHAGTGPDPEPDPEPKPEPEPERDPEPEPERDPRCGAATPAEAAGAGRALRPGGCAAASTMGAAASRRRALRSEAMSSVAAKVRAARAFGEYLSQSHPENRNGADHLLADAYSGHDGSPEMQPAPQNKRRLSLVSNGCYEGSLSEEPSIRKPAGEGPQPRVYTISGEPALLPSPEAEAIELAVVKGRRQRHPHHHSQPLRASPGGSREDVSRPCQSWAGSRQGSKECPGCAQLAPGPTPRAFGLDQPPLPETSGRRKKLERMYSVDRVSDDIPIRTWFPKENLFSFQTATTTMQAISNFRKHLRMVGSRRVKAQTFAERRERSFSRSWSDPTPMKADTSHDSRDSSDLQSSHCTLDEAFEDLDWDTEKGLEAVACDTEGFVPPKVMLISSKVPKAEYIPTIIRRDDPSIIPILYVSPAPGLPPTDALLLAPPWASAGTPGPQGAVALLALTQPCCGLVACVCPQDHEHATFEDILEEIERKLNVYHKGAKIWKMLIFCQGGPGHLYLLKNKVATFAKVEKEEDMIHFWKRLSRLMSKVNPEPNVIHIMGCYILGNPNGEKLFQNLRTLMTPYRVTFESPLELSAQGKQMIETYFDFRLYRLWKSRQHSKLLDFDDVL

SEQ ID NO: 776101 - protein, 618 aa, Homo sapiens; identical to SEQ ID NO: 776097

SEQ ID NO: 776102 - protein, 162 aa, Homo sapiens
AAKSTGERNGSLPATFEDILEEIERKLNVYHKGAKIWKMLIFCQGGPGHLYLLKNKVATFAKVEKEEDMIHFWKRLSRLMSKVNPEPNVIHIMGCYILGNPNGEKLFQNLRTLMTPYRVTFESPLELSAQGKQMIETYFDFRLYRLWKSRQHSKLLDFDDVL

SEQ ID NO: 776103 - protein, 138 aa, Homo sapiens
NIGLGTRLGGADLENADFLPGGPGHLYLLKNKVATFAKVEKEEDMIHFWKRLSRLMSKVNPEPNVIHIMGCYILGNPNGEKLFQNLRTLMTPYRVTFESPLELSAQGKQMIETYFDFRLYRLWKSRQHSKLLDFDDVL

SEQ ID NO: 776104 - protein, 254 aa, Homo sapiens
AGTGLGCSDLQSSHCTLDEAFEDLDWDTEKGLEAVACDTEGFVPPKVMLISSKVPKAEYIPTIIRRDDPSIIPILYDHEHATFEDILEEIERKLNVYHKGAKIWKMLIFCQGGPGHLYLLKNKVATFAKVEKEEDMIHPSSTVRSVEWGACPLPLGDPPLSTSFWKRLSRLMSKVNPEPNVIHIMGCYILGNPNGEKLFQNLRTLMTPYRVTFESPLELSAQGKQMIETYFDFRLYRLWKSRQHSKLLDFDDVL

SEQ ID NO: 776105 - protein, 618 aa, Homo sapiens; identical to SEQ ID NO: 776097

SEQ ID NO: 776106 - protein, 618 aa, Homo sapiens; identical to SEQ ID NO: 776097

SEQ ID NO: 776107 - protein, 344 aa, Homo sapiens
SLIKLIPLPPRVRAALSRERRHARSAGCGHAGTGPDPEPDPEPKPEPEPERDPEPEPERDPRCGAATPAEAAGAGRALRPGGCAAASTMGAAASRRRALRSEAMSSVAAKVRAARAFGEYLSQSHPENRNGADHLLADAYSGHDGSPEMQPAPQNKRRLSLVSNGCYEGSLSEEPSIRKPAGEGPQPRVYTISGEPALLPSPEAEAIELAVVKGRRQRHPHHHSQPLRASPGGSREDVSRPCQSWAGSRQGSKECPGCAQLAPGPTPRAFGLDQPPLPETSGRRKKLERMYSVDRVSDDIPIRTWFPKENLFSFQTATTTMQASRCSGATRRGSAGNGRMIPRL

SEQ ID NO: 776108 - protein, 149 aa, Homo sapiens
MGEGWWRPLAWPCSGDVAGRRGHVARAAGKHLTLSPALRGHVSLSGLGPAARPPSPTPITQMCLGSFFARFGCWALAGSKVWWRRGPAPEVAQGHRAGEGAPAGPQPAMGWCRQEPRSAAAQAGWILCHMGVEAQGVSPGRGRKVRAWE

SEQ ID NO: 776109 - protein, 618 aa, Homo sapiens; identical to SEQ ID NO: 776097

SEQ ID NO: 776110 - protein, 674 aa, Homo sapiens
SLIKLIPLPPRVRAALSRERRHARSAGCGHAGTGPDPEPDPEPKPEPEPERDPEPEPERDPRCGAATPAEAAGAGRALRPGGCAAASTMGAAASRRRALRSEAMSSVAAKVRAARAFGEYLSQSHPENRNGADHLLADAYSGHDGSPEMQPAPQNKRRLSLVSNGCYEGSLSEEPSIRKPAGEGPQPRVYTISGEPALLPSPEAEAIELAVVKGRRQRHPHHHSQPLRASPGGSREDVSRPCQSWAGSRQGSKECPGCAQLAPGPTPRAFGLDQPPLPETSGRRKKLERMYSVDRVSDDIPIRTWFPKENLFSFQTATTTMQAISNFRKHLRMVGSRRVKAQTFAERRERSFSRSWSDPTPMKADTSHDSRDSSDLQSSHCTLDEAFEDLDWDTEKGLEAVACDTEGFVPPKVMVRPSPGSAPLHPEQDSAPTRVQPALPGTTQPSPAAWGRVSHRAIPLGCLAAKKVASWGLPQPLGFWMGLGPLSSSLSPQLISSKVPKAEYIPTIIRRDDPSIIPILYDHEHATFEDILEEIERKLNVYHKGAKIWKMLIFCQGGPGHLYLLKNKVATFAKVEKEEDMIHFWKRLSRLMSKVNPEPNVIHIMGCYILGNPNGEKLFQNLRTLMTPYRVTFESPLELSAQGKQMIETYFDFRLYRLWKSRQHSKLLDFDDVL

SEQ ID NO: 776111 - protein, 316 aa, Homo sapiens
MSLKDPPEALNGQTFAERRERSFSRSWSDPTPMKADTSHDSRDSSDLQSSHCTLDEAFEDLDWDTEKGLEAVACDTEGFVPPKVMLISSKVPKAEYIPTIIRRDDPSIIPILYVSPAPGLPPTDALLRPHPGPAPAPQVPRVLWRCWLCRSLDVAFVACVCPQDHEHATFEDILEEIERKLNVYHKGAKIWKMLIFCQGGPGHLYLLKNKVATFAKVEKEEDMIHFWKRLSRLMSKVNPEPNVIHIMGCYILGNPNGEKLFQNLRTLMTPYRVTFESPLELSAQGKQMIETYFDFRLYRLWKSRQHSKLLDFDDVL

SEQ ID NO: 776112 - protein, 618 aa, Homo sapiens; identical to SEQ ID NO: 776097

SEQ ID NO: 776113 - protein, 618 aa, Homo sapiens; identical to SEQ ID NO: 776097

SEQ ID NO: 776114 - protein, 618 aa, Homo sapiens; identical to SEQ ID NO: 776097

SEQ ID NO: 776115 - protein, 269 aa, Homo sapiens
  misc_feature (264)..(264): Xaa can be any naturally occurring amino acid
  misc_feature (269)..(269): Xaa can be any naturally occurring amino acid
SLIKLIPLPPRVRAALSRERRHARSAGCGHAGTGPDPEPDPEPKPEPEPERDPEPEPERDPRCGAATPAEAAGAGRALRPGGCAAASTMGAAASRRRALRSEAMSSVAAKVRAARAFGEYLSQSHPENRNGADHLLADAYSGHDGSPEMQPAPQNKRRLSLVSNGCYEGSLSEEPSIRKPAGEGPQPRVYTISGEPALLPSPEAEAIELAVVKGRRQRHPHHHSQPLRASPGGSREDVSRPCQSWAGSRQGSKECPGCAQLLCXLSVFX

SEQ ID NO: 776116 - protein, 108 aa, Homo sapiens
PAEGPAVPRKEPTQPLGSTRERPWVGPCSMAGARQVSRPLAAHRTESPSPALPQTINSGLSCSQEASPGPLAPAAQPGGGWIPVPVTLSGAAPHPQVCTWHSHCPRIP

SEQ ID NO: 776117 - protein, 432 aa, Homo sapiens
MAASAAAASAAAASAASGSPGPGEGSAGGEKRSTAPSAAASASASAAASSPAGGGAEALELLEHCGVCRERLRPEREPRLLPCLHSACSACLGPAAPAAANSSGDGGAAGDGTVVDCPVCKQQCFSKDIVENYFMRDSGSKAATDAQDANQCCTSCEDNAPATSYCVECSEPLCETCVEAHQRVKYTKDHTVRSTGPAKSRDGERTVYCNVHKHEPLVLFCESCDTLTCRDCQLNAHKDHQYQFLEDAVRNQRKLLASLVKRLGDKHATLQKSTKEVRSSIRQVSDVQKRVQVDVKMAILQIMKELNKRGRVLVNDAQKVTEGQQERLERQHWTMTKIQKHQEHILRFASWALESDNNTALLLSKKLIYFQLHRALKMIVDPVEPHGEMKFQWDLNAWTKSAEAFGKIVAERPGTNSTGPAPMAPPRAPGGP

SEQ ID NO: 776118 - protein, 122 aa, Homo sapiens
PSNSVGSCREVTHFSWRRARTGQIQVHRAGQGEGGVGSQLMQCGGSGFVTEEGRMFKQFNKLTEDKADVQSIIGLQRFFETRMNEAFGDTKFSAVLVEPPPMSLPGAGLSSQELSGGPGDGP

SEQ ID NO: 776119 - protein, 393 aa, Homo sapiens [sequence omitted]

SEQ ID NO: 776120 - protein, 393 aa, Homo sapiens [sequence omitted]

SEQ ID NO: 776121 - protein, 393 aa, Homo sapiens [sequence omitted]

SEQ ID NO: 776122 - protein, 393 aa, Homo sapiens [sequence omitted]

SEQ ID NO: 776123 - protein, 432 aa, Homo sapiens; identical to SEQ ID NO: 776117

SEQ ID NO: 776124 - protein, 432 aa, Homo sapiens; identical to SEQ ID NO: 776117

SEQ ID NO: 776125 - protein, 432 aa, Homo sapiens; identical to SEQ ID NO: 776117

SEQ ID NO: 776126 - protein, 393 aa, Homo sapiens [sequence omitted]

SEQ ID NO: 776127 - protein, 432 aa, Homo sapiens; identical to SEQ ID NO: 776117

SEQ ID NO: 776128 - protein, 432 aa, Homo sapiens; identical to SEQ ID NO: 776117

SEQ ID NO: 776129 - protein, 393 aa, Homo sapiens [sequence omitted]

SEQ ID NO: 776130 - protein, 432 aa, Homo sapiens; identical to SEQ ID NO: 776117

SEQ ID NO: 776131 - protein, 432 aa, Homo sapiens; identical to SEQ ID NO: 776117

SEQ ID NO: 776132 - protein, 432 aa, Homo sapiens; identical to SEQ ID NO: 776117

SEQ ID NO: 776133 - protein, 863 aa, Homo sapiens
MAASAAAASAAAASAASGSPGPGEGSAGGEKRSTAPSAAASASASAAASSPAGGGAEALELLEHCGVCRERLRPEREPRLLPCLHSACSACLGPAAPAAANSSGDGGAAGDGTVVDCPVCKQQCFSKDIVENYFMRDSGSKAATDAQDANQCCTSCEDNAPATSYCVECSEPLCETCVEAHQRVKYTKDHTVRSTGPAKSRDGERTVYCNVHKHEPLVLFCESCDTLTCRDCQLNAHKDHQYQFLEDAVRNQRKLLASLVKRLGDKHATLQKSTKEVRSSIRQVSDVQKRVQVDVKMAILQIMKELNKRGRVLVNDAQQQGALQGQPGSAHGAGRQHGPMTKDPRSNTGGQQFVQLQPHWSIWRRDNNHSPYLTILTEVDLLPDMPPETSSMHCRHPVAATWRDDSIQKGPSMPGTKEVAEGLYGERKDGKLQSLSNKLQAEPMRAQWNHSKAAPRDPRSKAGTLAAASPWRCRKAMASETGDDPYSSAEPHVSGVKRSRSGEGEVSGLMRKVPRVSLERLDLDLTADSQPPVFKVFPGSTTEDYNLIVIERGAAAAATGQPGTAPAGTPGAPPLAGMAIVKEEETEAAIGAPPTATEGPETKPVLMALAEGPGAEGPRLASPSGSTSSGLEVVAPEGTSAPGGGPGTLDDSATICRVCQKPGDLVMCNQCEFCFHLDCHLPALQDVPGEEWSCSLCHVLPDLKEEDGSLSLDGADSTGVVAKLSPANQRKCERVLLALFCHEPCRPLHQLATDSTFSLDQPGGTLDLTLIRARLQEKLSPPYSSPQEFAQDVGRMFKQFNKLTEDKADVQSIIGLQRFFETRMNEAFGDTKFSAVLVEPPPMSLPGAGLSSQELSGGPGDGP

SEQ ID NO: 776134 - protein, 432 aa, Homo sapiens; identical to SEQ ID NO: 776117

SEQ ID NO: 776135 - protein, 432 aa, Homo sapiens; identical to SEQ ID NO: 776117

SEQ ID NO: 776136 - protein, 432 aa, Homo sapiens; identical to SEQ ID NO: 776117

SEQ ID NO: 776137 - protein, 338 aa, Homo sapiens
ASANRLAHTIRQVSGWRTQYNLIVIERGAAAAATGQPGTAPAGTPGAPPLAGMAIVKEEETEAAIGAPPTATEGPETKPVLMALAEGPGAEGPRLASPSGSTSSGLEVVAPEGTSAPGGGPGTLDDSATICRVCQKPGDLVMCNQCEFCFHLDCHLPALQDVPGEEWSCSLCHVLPDLKEEDGSLSLDGADSTGVVAKLSPANQRKCERVLLALFCHEPCRPLHQLATDSTFSLDQPGGTLDLTLIRARLQEKLSPPYSSPQEFAQDVGRMFKQFNKLTEDKADVQSIIGLQRFFETRMNEAFGDTKFSAVLVEPPPMSLPGAGLSSQELSGGPGDGP

SEQ ID NO: 776138 - protein, 337 aa, Homo sapiens
MAASAAAASAAAASAASGSPGPGEGSAGGEKRSTAPSAAASASASAAASSPAGGGAEALELLEHCGVCRERLRPEREPRLLPCLHSACSACLGPAAPAAANSSGDGGAAGDGTVVDCPVCKQQCFSKDIVENYFMRDSGSKAATDAQDANQCCTSCEDNAPATSYCVECSEPLCETCVEAHQRVKYTKDHTVRSTGPAKSRDGERTVYCNVHKHEPLVLFCESCDTLTCRDCQLNAHKDHQYQFLEDAVRNQRKLLASLVKRLGDKHATLQKSTKEVRSSIRQVSDVQKRVQVDVKMAILQIMKELNKRGRVLVNDAQQDPEAPGAHSALCLLGSGE

SEQ ID NO: 776139 - protein, 432 aa, Homo sapiens; identical to SEQ ID NO: 776117

SEQ ID NO: 776140 - protein, 432 aa, Homo sapiens; identical to SEQ ID NO: 776117

SEQ ID NO: 776141 - protein, 403 aa, Homo sapiens
MAASAAAASAAAASAASGSPGPGEGSAGGEKRSTAPSAAASASASAAASSPAGGGAEALELLEHCGVCRERLRPEREPRLLPCLHSACSACLGPAAPAAANSSGDGGAAGDGTVVDCPVCKQQCFSKDIVENYFMRDSGSKAATDAQDANQCCTSCEDNAPATSYCVECSEPLCETCVEAHQRVKYTKDHTVRSTGPAKSRDGERTVYCNVHKHEPLVLFCESCDTLTCRDCQLNAHKDHQYQFLEDAVRNQRKLLASLVKRLGDKHATLQKSTKEVRSSIRQVSDVQKRVQVDVKMAILQIMKELNKRGRVLVNDAQKVTEGQQERLERQHWTMTKIQKHQEHILRFASWALESDNNTALLLSKKLIYFQLHRALKMIVDPVEPHGALHLSRDHLLTQSHSL

SEQ ID NO: 776142 - protein, 359 aa, Homo sapiens
GTWTSQLTASHPSSPEQAGTLAAASPWRCRKAMASETGDDPYSSAEPHVSGVKRSRSGEGEVSGLMRKVPRVSLERLDLDLTADSQPPVFKVFPGSTTEDYNLIVIERGAAAAATGQPGTAPAGTPGAPPLAGMAIVKEEETEAAIGAPPTATEGPETKPVLMALAEGPGAEGPRLASPSGSTSSGLEVVAPEGTSAPGGGPGTLDDSATICRVCQKPGDLVMCNQCEFCFHLDCHLPALQDVPGCVSCVIFCLLDQPGGTLDLTLIRARLQEKLSPPYSSPQEFAQDVGRMFKQFNKLTEDKADVQSIIGLQRFFETRMNEAFGDTKFSAVLVEPPPMSLPGAGLSSQELSGGPGDGP

SEQ ID NO: 776143 - protein, 111 aa, Homo sapiens [sequence omitted]

SEQ ID NO: 776144 - protein, 432 aa, Homo sapiens; identical to SEQ ID NO: 776117

SEQ ID NO: 776145 - protein, 180 aa, Homo sapiens
SAWMVQTAHGRGCHPPPSGQGAEDGSLSLDGADSTGVVAKLSPANQRKCERVLLALFCHEPCRPLHQLATDSTFSLDQPGGTLDLTLIRARLQEKLSPPYSSPQEFAQDVGRMFKQFNKLTEDKADVQSIIGLQRFFETRMNEAFGDTKFSAVLVEPPPMSLPGAGLSSQELSGGPGDGP

SEQ ID NO: 776146 - protein, 117 aa, Homo sapiens
RPTRPDPRVREFAQDVGRMFKQFNKLTEVSQWNGEAVGRGRCEGKNYGPIHPLHSCLAQDKADVQSIIGLQRFFETRMNEAFGDTKFSAVLVEPPPMSLPGAGLSSQELSGGPGDGP

SEQ ID NO: 776147 - protein, 397 aa, Homo sapiens
MGARTGHGKYFLGPAYERGFVLAAEMGHLTKVGEKKARGGEGLVRCGIMVGGPPSRGMVGAITWVGTCNSLPHPCFSEVVDCPVCKQQCFSKDIVENYFMRDSGSKAATDAQDANQCCTSCEDNAPATSYCVECSEPLCETCVEAHQRVKYTKDHTVRSTGPAKSRDGERTVYCNVHKHEPLVLFCESCDTLTCRDCQLNAHKDHQYQFLEDAVRNQRKLLASLVKRLGDKHATLQKSTKEVRSSIRQVSDVQKRVQVDVKMAILQIMKELNKRGRVLVNDAQKVTEGQQERLERQHWTMTKIQKHQEHILRFASWALESDNNTALLLSKKLIYFQLHRALKMIVDPVEPHGEMKFQWDLNAWTKSAEAFGKIVAERPGTNSTGPAPMAPPRAPGGP

SEQ ID NO: 776148 - protein, 393 aa, Homo sapiens [sequence omitted]

SEQ ID NO: 776149 - protein, 432 aa, Homo sapiens; identical to SEQ ID NO: 776117

SEQ ID NO: 776150 - protein, 393 aa, Homo sapiens [sequence omitted]

SEQ ID NO: 776151 - protein, 393 aa, Homo sapiens [sequence omitted]

SEQ ID NO: 776152 - protein, 432 aa, Homo sapiens; identical to SEQ ID NO: 776117

SEQ ID NO: 776153 - protein, 393 aa, Homo sapiens [sequence omitted]

SEQ ID NO: 776154 - protein, 432 aa, Homo sapiens; identical to SEQ ID NO: 776117

SEQ ID NO: 776155 - protein, 432 aa, Homo sapiens; identical to SEQ ID NO: 776117

SEQ ID NO: 776156 - protein, 432 aa, Homo sapiens; identical to SEQ ID NO: 776117

SEQ ID NO: 776157 - protein, 432 aa, Homo sapiens; identical to SEQ ID NO: 776117

SEQ ID NO: 776158 - protein, 432 aa, Homo sapiens; identical to SEQ ID NO: 776117

SEQ ID NO: 776159 - protein, 354 aa, Homo sapiens
MRKVPRVSLERLDLDLTADSQPPVFKVFPGSTTEDYNLIVIERGAAAAATGQPGTAPAGTPGAPPLAGMAIVKEEETEAAIGAPPTATEGPETKPVLMALAEGPGAEGPRLASPSGSTSSGLEVVAPEGTSAPGGGPGTLDDSATICRVCQKPGDLVMCNQCEFCFHLDCHLPALQDVPGEEWSCSLCHVLPDLKEEDGSLSLDGADSTGVVAKLSPANQRKCERVLLALFCHEPCRPLHQLATDSTFSLDQPGGTLDLTLIRARLQEKLSPPYSSPQEFAQDVGRMFKQFNKLTEDKADVQSIIGLQRFFETRMNEAFGDTKFSAVLVEPPPMSLPGAGLSSQELSGGPGDGP

SEQ ID NO: 776160 - protein, 230 aa, Homo sapiens
ISHSARRVCIVRGGNLDDSATICRVCQKPGDLVMCNQCEFCFHLDCHLPALQDVPGEEWSCSLCHVLPDLKEEDGSLSLDGADSTGVVAKLSPANQRKCERVLLALFCHEPCRPLHQLATDSTFSLDQPGGTLDLTLIRARLQEKLSPPYSSPQEFAQDVGRMFKQFNKLTEDKADVQSIIGLQRFFETRMNEAFGDTKFSAVLVEPPPMSLPGAGLSSQELSGGPGDGP

SEQ ID NO: 776161 - protein, 432 aa, Homo sapiens; identical to SEQ ID NO: 776117

SEQ ID NO: 776162 - protein, 432 aa, Homo sapiens; identical to SEQ ID NO: 776117

SEQ ID NO: 776163 - protein, 212 aa, Homo sapiens
MAASAAAASAAAASAASGSPGPGEGSAGGEKRSTAPSAAASASASAAASSPAGGGAEALELLEHCGVCRERLRPEREPRLLPCLHSACSACLGPAAPAAANSSGDGGAAGDGTVVDCPVCKQQCFSKDIVENYFMRDSGSKAATDAQDANQCCTSCEDNAPATSYCVECSEPLCETCVEAHQRVKYTKDHTVRSTATPAQSSDHHDKVHHDT

SEQ ID NO: 776164 - protein, 34 aa, Homo sapiens
VLGEDPDLAIFQWHLFHHEFLRQSDGATLFQNNH

SEQ ID NO: 776165 - protein, 46 aa, Homo sapiens
ENWSGFQMSATVRRAAKERQLRVLCGSCIAFPWVSTRSLGAHHLPW

SEQ ID NO: 776166 - protein, 107 aa, Homo sapiens
MEPPSPPGPWPCAELCPIKFLDVKKKPKKHGRAQCGADNKGRQGPGHGVPDRVRSRETAGPKEGKRSTGTGRPEEKTRGGRHLTKARHAGHHHRARTTITRNGVHAR

SEQ ID NO: 776167 - protein, 451 aa, Homo sapiens
MDSPGYNCFVDKDKMDAAIQDLGPKELSCTELQELKQLARQGYWAQSHALRGKVYQRLIRDIPCRTVTPDASVYSDIVGKIVGKHSSSCLPLPEFVDNTQVPSYCLNARGEGAVRKILLCLANQFPDISFCPALPAVVALLLHYSIDEAECFEKACRILACNDPGRRLIDQSFLAFESSCMTFGDLVNKYCQAAHKLMVAVSEDVLQVYADWQRWLFGELPLCYFARVFDVFLVEGYKVLYRVALAILKFFHKVRAGQPLESDSVKQDIRTFVRDIAKTVSPEKLLEKAFAIRLFSRKEIQLLQMANEKALKQKGITVKQKRSLGAAYGTAKSGTGIAAMSVMRPEQIMKSIIPVVMAGIIAIYGLVVAVLIANSLNDDISLYKSFLQLGAGLSVGLSGLAAGFAIGIVGDAGVRGTAQQPRLFVGMILILIFAEVLGLYGLIVALILSTK

SEQ ID NO: 776168 - protein, 558 aa, Homo sapiens
MDSPGYNCFVDKDKMDAAIQDLGPKELSCTELQELKQLARQGYWAQSHALRGKVYQRLIRDIPCRTVTPDASVYSDIVGKIVGKHSSSCLPLPEFVDNTQVPSYCLNARGEGAVRKILLCLANQFPDISFCPALPAVVALLLHYSIDEAECFEKACRILACNDPGRRLIDQSFLAFESSCMTFGDLVNKYCQAAHKLMVAVSEDVLQVYADWQRWLFGELPLCYFARVFDVFLVEGYKVLYRVALAILKFFHKVRAGQPLESDSVKQDIRTFVRDIAKTVSPEKLLEKAFAIRLFSRKEIQLLQMANEKALKQKGITVKQKRFAPLRQFVHLAVHAENFRSEIVSVREMRDIWSWVPERFALCQPLLLFSSLQHGYSLARFYFQCEGHEPTLLLIKTMQKEVCGAYLSTDWSERNKFGGKLGFFGTGECFVFRLQPEVQRYEWVVIKHPELTKPPPLMAAEPTAPLSHSASSDPADRLSPFLAARHFNLPSKTESMFMAGGSDCLIVGGGGGQALYIDGDLNRGRTSHCDTFNNQPLCSENFLIAAVEAWGFQDPDTQ

SEQ ID NO: 776169 - protein, 218 aa, Homo sapiens
PCAGSPSSRSVSPLLLPFAVPAPPAFSRSPPLFVSVAPAQLARPVSASVSSLFLLLSAVFLLSCCPSPVLPAPLCPLPSSPFVVCVSSCSLFFRFGLAFGLFLSSLVLFSRVCRFGCWFVLFVCLFRDYGFCWCCFLWSLWYKTVCSLSLIFCFGVTFFFLFGDFCCACFYPFLYALQYVLYIPPMDAFYCSWCVNVVPIFSLCTVFEVFVTTRGCTR

SEQ ID NO: 776170 - protein, 114 aa, Homo sapiens
  misc_feature (11)..(11): Xaa can be any naturally occurring amino acid
IRHEGALGTIXGRAKSGTGIAAMSVMRPEQIMKSIIPVVMAGIIAIYGLVVAVLIANSLNDDISLYKSFLQLGAAQAHAQAGRIAFAAARPQTFVPGPSSPPGMRRPDSGPLML

SEQ ID NO: 776171 - protein, 286 aa, Homo sapiens
RRETGPTLRRSRGRRRPETPAEAEAGRGRAPGPGRWAGGTARGRSTGRPGVPGTRLPHGAKWYGSQGRGPGHVTRPRPPFCSAVLVFRAQRLTGRIAFAAARPQTFVPGPSSPPPPPPPRPAELAPSPPADMSESKSGPEYASFFAVMGASAAMVFSALGAAYGTAKSGTGIAAMSVMRPEQIMKSIIPVVMAGIIAIYGLVVAVLIANSLNDDISLYKSFLQLGAGLSVGLSGLAAGFAIGIVGDAGVRGTAQQPRLFVGMILILIFAEVLGLYGLIVALILSTK

SEQ ID NO: 776172 - protein, 286 aa, Homo sapiens; identical to SEQ ID NO: 776171

SEQ ID NO: 776173 - protein, 204 aa, Homo sapiens
  misc_feature (11)..(11): Xaa can be any naturally occurring amino acid
  misc_feature (15)..(16): Xaa can be any naturally occurring amino acid
DTPFTGAIGSXMALXXLQKLLCIVGAGPSSPPPPPPPRPAELAPSPPADMSESKSGPEYASFFAVMGASAAMVFSALGAAYGTAKSGTGIAAMSVMRPEQIMKSIIPVVMAGIIAIYGLVVAVLIANSLNDDISLYKSFLQLGAGLSVGLSGLAAGFAIGIVGDAGVRGTAQQPRLFVGMILILIFAEVLGLYGLIVALILSTK

SEQ ID NO: 776174 - protein, 286 aa, Homo sapiens; identical to SEQ ID NO: 776171

SEQ ID NO: 776175 - protein, 155 aa, Homo sapiens
MSESKSGPEYASFFAVMGASAAMVFSALGAAYGTAKSGTGIAAMSVMRPEQIMKSIIPVVMAGIIAIYGLVVAVLIANSLNDDISLYKSFLQLGAGLSVGLSGLAAGFAIGIVGDAGVRGTAQQPRLFVGMILILIFAEVLGLYGLIVALILSTK

SEQ ID NO: 776176 - protein, 177 aa, Homo sapiens
SHPRTLLDTAPRRATAPSPPADMSESKSGPEYASFFAVMGASAAMVFSALGAAYGTAKSGTGIAAMSVMRPEQIMKSIIPVVMAGIIAIYGLVVAVLIANSLNDDISLYKSFLQLGAGLSVGLSGLAAGFAIGIVGDAGVRGTAQQPRLFVGMILILIFAEVLGLYGLIVALILSTK

SEQ ID NO: 776177 - protein, 171 aa, Homo sapiens
RLVRHGVVDAPSPPADMSESKSGPEYASFFAVMGASAAMVFSALGAAYGTAKSGTGIAAMSVMRPEQIMKSIIPVVMAGIIAIYGLVVAVLIANSLNDDISLYKSFLQLGAGLSVGLSGLAAGFAIGIVGDAGVRGTAQQPRLFVGMILILIFAEVLGLYGLIVALILSTK

SEQ ID NO: 776178 - protein, 360 aa, Homo sapiens
RRETGPTLRRSRGRRRPETPAEAEAGRGRAPGPGRWAGGTARGRSTGRPGVPGTRLPHGAKWYGSQGRGPGHVTRPRPPFCSAVLVFRAQRLTGRIAFAAARPQTFVPGPSSPPPPPPPRPAELAPSPPADMSESKSGPEYASFFAVMGASAAMVFSGERGRQGGTRGRGRAQSLMPAARRGPVCDVTLTVIPELTGAPRASCDSGRGSAPRGLRGASRGSGAQGMRAWTGSLGAAYGTAKSGTGIAAMSVMRPEQIMKSIIPVVMAGIIAIYGLVVAVLIANSLNDDISLYKSFLQLGAGLSVGLSGLAAGFAIGIVGDAGVRGTAQQPRLFVGMILILIFAEVLGLYGLIVALILSTK

SEQ ID NO: 776179 - protein, 112 aa, Homo sapiens
MSVMRPEQIMKSIIPVVMAGIIAIYGLVVAVLIANSLNDDISLYKSFLQLGAGLSVGLSGLAAGFAIGIVGDAGVRGTAQQPRLFVGMILILIFAEVLGLYGLIVALILSTK

SEQ ID NO: 776180 - protein, 112 aa, Homo sapiens; identical to SEQ ID NO: 776179

SEQ ID NO: 776181 - protein, 173 aa, Homo sapiens
MRIRIMPTNSRGCWAVPARQRPPRCRLQSRLPGRSGHAQAGAQLEEALVEADVVIQGVGDEDCHHQAVDGDDASHDHWDNGIIAIYGLVVAVLIANSLNDDISLYKSFLQLGAGLSVGLSGLAAGFAIGIVGDAGVRGTAQQPRLFVGMILILIFAEVLGLYGLIVALILSTK

SEQ ID NO: 776182 - protein, 173 aa, Homo sapiens; identical to SEQ ID NO: 776181

SEQ ID NO: 776183 - protein, 173 aa, Homo sapiens; identical to SEQ ID NO: 776181

SEQ ID NO: 776184 - protein, 286 aa, Homo sapiens; identical to SEQ ID NO: 776171

SEQ ID NO: 776185 - protein, 117 aa, Homo sapiens
IANSLNDDIQAVDGDDASHDHWDNGIIAIYGLVVAVLIANSLNDDISLYKSFLQLGAGLSVGLSGLAAGFAIGIVGDAGVRGTAQQPRLFVGMILILIFAEVLGLYGLIVALILSTK

SEQ ID NO: 776186 - protein, 218 aa, Homo sapiens; identical to SEQ ID NO: 776169

SEQ ID NO: 776187 - protein, 275 aa, Homo sapiens
RRETGPTLRRSRGRRRPETPAEAEAGRGRAPGPGRWAGGTARGRSTGRPGVPGTRLPHGAKWYGSQGRGPGHVTRPRPPFCSAVLVFRAQRLTGRIAFAAARPQTFVPGPSSPPPPPPPRPAELAPSPPADMSESKSGPEYASFFAVMGASAAMVFSALGAAYGTAKSGTGIAAMSVMRPEQIMKSIIPVVMAGIIAIYGLVVAVLIANSLNDDISLYKSFLQLGAGLSVGLSGLAAGFAIGIVGDAGVRGTAQQPRLFVGMILILIVALILSTK

SEQ ID NO: 776188 - protein, 286 aa, Homo sapiens; identical to SEQ ID NO: 776171

SEQ ID NO: 776189 - protein, 263 aa, Homo sapiens
RRETGPTLRRSRGRRRPETPAEAEAGRGRAPGPGRWAGGTARGRSTGRPGVPGTRLPHGAKWYGSQGRGPGHVTRPRPPFCSAVLVFRAQRLTGRIAFAAARPQTFVPGPSSPPPPPPPRPAELAPSPPADMSESKSGPEYASFFAVMGASAAMVFSALGAAYGTAKSGTGIAAMSVMRPEQIMKSIIPVVMAGIIAIYGLVVAVLIANSLNDDISLYKSFLQLGAAQAHAQAGRIAFAAARPQPSCPARPRPRACADLIRGR

SEQ ID NO: 776190 - protein, 210 aa, Homo sapiens
RRETGPTLRRSRGRRRPETPAEAEAGRGRAPGPGRWAGGTARGRSTGRPGVPGTRLPHGAKWYGSQGRGPGHVTRPRPPFCSAVLVFRAQRLTGRIAFAAARPQTFVPGPSSPPPPPPPRPAELAPSPPADMSESKSGPEYASFFAVMGASAAMVFSALGAAYGTAKSGTGIAAMSVMRPEQIMKSIIPVVMAGIIAIYGLVVAVLIANP

SEQ ID NO: 776191 - protein, 107 aa, Homo sapiens; identical to SEQ ID NO: 776166

SEQ ID NO: 776192 - protein, 201 aa, Homo sapiens
RRETGPTLRRSRGRRRPETPAEAEAGRGRAPGPGRWAGGTARGRSTGRPGVPGTRLPHGAKWYGSQGRGPGHVTRPRPPFCSAVLVFRAQRLTGRIAFAAARPQTFVPGPSSPPPPPPPRPAELCAPRPHTAARTMSGVQGGGTTEYAFSHVSTDHWCCSSETARWSFQPAPWAAWLTGYMPKMRGTPGKRGDVLSNACRE

SEQ ID NO: 776193 - protein, 173 aa, Homo sapiens
RRETGPTLRRSRGRRRPETPAEAPSPPADMSESKSGPEYASFFAVMGASAAMVFSALGAAYGTAKSGTGIAAMSVMRPEQIMKSIIPVVMAGIIAIYGLVVAVLIANSLNDDISLYKSFLQLGAGLSVGLSGLAAGFAIGIVGDAGVRGTAQQPRLFVGMILILIVALILSTK

SEQ ID NO: 776194 - protein, 65 aa, Homo sapiens
MRSVLVPIVCFPGLAPIVQALPTTYGSSCRLTTYTGGQEDRAVIKLEMSSGPTLAGTVVIHPNVF

SEQ ID NO: 776195 - protein, 138 aa, Homo sapiens
MASTRPGLNWPRLVFRAQRLTGRIAFAAARPQTFVPGPSSPPPPPPPRPAELAPSPPADMSESKSGPEYASFFAVMGASAAMVFSALGAAYGTAKSGTGIAAMSVMRPEQIMKSIIPVVMAGIIAIYGLVVAVLIANP

SEQ ID NO: 776196 - protein, 97 aa, Homo sapiens
  misc_feature (92)..(92): Xaa can be any naturally occurring amino acid
MRIRIMPTNSRGCWAVPARQRPPRCRLQSRLPGRSGHAQAGAQLEEALVEADVVIQGVGDEDCHHQAVDGDDASHDHWDNGLHDLLRPHDRXGRHAG

SEQ ID NO: 776197 - protein, 142 aa, Homo sapiens
MVLEMEAGVLLRCGRGGEWSRSAQPKCLLSLQGPGIQQPKRLLSLQGPHIQQPKRLLSLQGPHIQQPKRLFSLQGPHIQQPKRLLSIQGPHIQQPKRLLSLQGPHIQQPKRLLSLQGPHIQQPKRLLSLQGPHIQQPKRLLS

SEQ ID NO: 776198 - protein, 40 aa, Homo sapiens
ASETCHPSMAPLEPGTDSLSAMLRKQGAMTGPIPADSPGE

SEQ ID NO: 776199 - protein, 103 aa, Homo sapiens
WRSLRPLKSPFTGQSPDHRAALSQQQLVGVFTRPGLLLQQVHESLASYPMQHPWWERMCLVLTLRQSSPVVQRATKCLEQPQLMEPSPQRDTTSRQAVWCLPW

SEQ ID NO: 776200 - protein, 87 aa, Homo sapiens
WHGDLPTVPCPGSVPPGGPCMVAQLALALLYACAQQAPPVLCRHLQNPASPFSPAQPPQVASSSSCKPPGREPRSQCHVCSVVQPHS

SEQ ID NO: 776201 - protein, 113 aa, Homo sapiens
AASGFTAPPRAQPLWGLRGSRRQDACPAEWQGISSPFQGKVGPGLWALNMKAGGRGTRGPREARRAHGRARHPWLRSVGLGRLAPAWKLAGWCLRETVLSLVRRQTLRIYCRC

SEQ ID NO: 776202 - protein, 165 aa, Homo sapiens
HQASTSPRVNRPRQGPELIVDYQMYDYSLDMWSLGCMLASMIFRREPFFHGQDNYDQLVRIAKVLGTEELYGYLKKYHIDLDPHFNDILGQHSRKRWENFIHSENRHLVSPEALDLLDKLLRYDHQQRLTAKEAMEHPYFYPVVKEQSQPCADNAVLSSGLTAAR

SEQ ID NO: 776203 - protein, 289 aa, Homo sapiens
AGSRARVYAEVNSLRSREYWDYEAHVPSWGNQDDYQLVRKLGRGKYSEVFEAINITNNERVVVKILKPVKKKKIKREVKILENLRGGTNIIKLIDTVKDPVSQKTPALVFEYINNTDFKQLYQILTDFDIRFYMYELLKALDYCHSKGIMHRDVKPHNVMIDHQQKKLRLIDWGLAEFYHPAQEYNVRVASRYFKGPELLVDYQMYDYSLDMWSLGCMLASMIFRREPFFHGQDNYDQLVRIAKVLGTEELYGYLKKYHIDLDPHFNDILGQHSRKRWENFIHICKPSC

SEQ ID NO: 776204 - protein, 118 aa, Homo sapiens
VIWSVCFVFQLVRIAKVLGTEELYGYLKKYHIDLDPHFNDILGQHSRKRWENFIHSENRHLVSPEALDLLDKLLRYDHQQRLTAKEAMEHPYFYPVVKEQSQPCADNAVLSSGLTAAR

SEQ ID NO: 776205 - protein, 337 aa, Homo sapiens
AGSRARVYAEVNSLRSREYWDYEAHVPSWGNQDDYQLVRKLGRGKYSEVFEAINITNNERVVVKILKPVKKKKIKREVKILENLRGGTNIIKLIDTVKDPVSQKTPALVFEYINNTDFKQLYQILTDFDIRFYMYELLKALDYCHSKGIMHRDVKPHNVMIDHQQKKLRLIDWGLAEFYHPAQEYNVRVASRYFKGPELLVDYQMYDYSLDMWSLGCMLASMIFRREPFFHGQDNYDQLVRIAKVLGTEELYGYLKKYHIDLDPHFNDILGQHSRKRWENFIHSENRHLVSPEALDLLDKLLRYDHQQRLTAKEAMEHPYFYPVVNGLWPRDRGSST

SEQ ID NO: 776206 - protein, 346 aa, Homo sapiens
AGSRARVYAEVNSLRSREYWDYEAHVPSWGNQDDYQLVRKLGRGKYSEVFEAINITNNERVVVKILKPVKKKKIKREVKILENLRGGTNIIKLIDTVKDPVSQKTPALVFEYINNTDFKQLYQILTDFDIRFYMYELLKALDYCHSKGIMHRDVKPHNVMIDHQQKKLRLIDWGLAEFYHPAQEYNVRVASRYFKGPELLVDYQMYDYSLDMWSLGCMLASMIFRREPFFHGQDNYDQLVRIAKVLGTEELYGYLKKYHIDLDPHFNDILGQHSRKRWENFIHSENRHLVSPEALDLLDKLLRYDHQQRLTAKEAMEHPYFYPVVKEQSQPCADNAVLSSGLTAAR

SEQ ID NO: 776207 - protein, 346 aa, Homo sapiens; identical to SEQ ID NO: 776206

SEQ ID NO: 776208 - protein, 347 aa, Homo sapiens
MENLMTSSTLPPLFADEDGSKESNDLATTGLNHPEVPYSSGATSSTNNPEFVEDLSQGQLLQSESSNAAEGNEQRHEDEQRSKRGGWSKGRKRKKPLRDSNAPKSPLTGYVRFMNERREQLRAKRPEVPFPEITRMLGNEWSKLPPEEKQRYLDEADRDKERYMKELEQYQKTEAYKVFSRKTQDRQKGKSHRQDAARQATHDHEKETEVKERSVFDIPIFTEEFLNHSKAREAELRQLRKSNMEFEERNAALQKHVESMRTAVEKLEVDVIQERSRNTVLQQHLETLRQVLTSSFASMPLPGSGETPTVDTIDSYMNRLHSIILANPQDNENFIATVREVVNRLDR

SEQ ID NO: 776209 - protein, 347 aa, Homo sapiens; identical to SEQ ID NO: 776208

SEQ ID NO: 776210 - protein, 347 aa, Homo sapiens; identical to SEQ ID NO: 776208

SEQ ID NO: 776211 - protein, 347 aa, Homo sapiens; identical to SEQ ID NO: 776208

SEQ ID NO: 776212 - protein, 347 aa, Homo sapiens; identical to SEQ ID NO: 776208

SEQ ID NO: 776213 - protein, 347 aa, Homo sapiens; identical to SEQ ID NO: 776208

SEQ ID NO: 776214 - protein, 347 aa, Homo sapiens; identical to SEQ ID NO: 776208

SEQ ID NO: 776215 - protein, 348 aa, Homo sapiens [sequence omitted]

SEQ ID NO: 776216 - protein, 204 aa, Homo sapiens
MPGWRLLTQVGAQVLGRLGDGLGAALGPGNRTHIWLFVRGLHGKSGTWWDEHLSEENVPFIKQLVSDEDKAQLASKLCPLKDEPWPIHPWEPGSFRVGLIALKLGMMPLWTKDGQKHVVTLLQVQDCHVLKYTSKENCNGKMATLSVGGKTVSRFRKATSILEFYRELGLPPKQTVKIFNITDNAAIKPALPLYCCSLSVQGQL

SEQ ID NO: 776217 - protein, 195 aa, Homo sapiens
MPGWRLLTQVGAQVLGRLGDGLGAALGPGNRTHIWLFVRGLHGKSGTWWDEHLSEENVPFIKQLVSDEDKAQLASKLCPLKDEPWPIHPWEPGSFRVGLIALKLGMMPLWTKDGQKHVVTLLQVQDCHVLKYTSKENCNGKMATLSVGGKTVSRFRKATSILEFYRELGLPPKQTVKIFNITDNAAIKPGFSLPI

SEQ ID NO: 776218 - protein, 53 aa, Homo sapiens
MPGWRLLTQVGAQVLGRLGDGLGAALGPGNRVTTNSLNVSLIRRNVGSEEKVG

SEQ ID NO: 776219 - protein, 348 aa, Homo sapiens [sequence omitted]

SEQ ID NO: 776220 - protein, 348 aa, Homo sapiens [sequence omitted]

SEQ ID NO: 776221 - protein, 348 aa, Homo sapiens [sequence omitted]

SEQ ID NO: 776222 - protein, 348 aa, Homo sapiens [sequence omitted]

SEQ ID NO: 776223 - protein, 372 aa, Homo sapiens
  misc_feature (5)..(7): Xaa can be any naturally occurring amino acid
  misc_feature (13)..(13): Xaa can be any naturally occurring amino acid
KCLEXXXAPSRVXGMRASAGDRSGGHCENFPTATASTWRWRGDSLKAERQGARKSTHIWLFVRGLHGKSGTWWDEHLSEENVPFIKQLVSDEDKAQLASKLCPLKDEPWPIHPWEPGSFRVGLIALKLGMMPLWTKDGQKHVVTLLQVQDCHVLKYTSKENCNGKMATLSVGGKTVSRFRKATSILEFYRELGLPPKQTVKIFNITDNAAIKPGTPLYAAHFRPGQYVDVTAKTIGKGFQGVMKRWGFKGQPATHGQTKTHRRPGAVATGDIGRVWPGTKMPGKMGNIYRTEYGLKVWRINTKHNIIYVNGSVPGHKNCLVKVKDSKLPAYKDLGKNLPFPTYFPDGDEEELPEDLYDENVCQPGAPSITFA

SEQ ID NO: 776224 - protein, 322 aa, Homo sapiens
MPGWRLLTQVGAQVLGRLGDGLGAALGPGNRTHIWLFVRGLHGKSGTWWDEHLSEENVPFIKQLVSDEDKAQLASKLCPLKDEPWPIHPWEPGSFRVGLIALKLGMMPLWTKDGQKHVVTLLQVQDCHVLKYTSKENCNGKMATLSVGGKTVSRFRKATSILEFYRELGLPPKQTVKIFNITDNAAIKPGTPLYAAHFRPGQYVDVTAKTIGKGFQGVMKRWGFKGQPATHGQTKTHRRPGAVATGDIGRVWPGTKMPGKMGNIYRTEYGLKCGITPKATIYVMVVLAKWSAGQDLRRFSPENYIPILVGQGAHIFRRFRGL

SEQ ID NO: 776225 - protein, 268 aa, Homo sapiens
MPGWRLLTQVGAQVLGRLGDGLGAALGPGNRTHIWLFVRGLHGKSGTWWDEHLSEENVPFIKQLVSDEDKAQLASKLCPLKDEPWPIHPWEPGSFRVGLIALKLGMMPLWTKDGQKHVVTLLQVQDCHVLKYTSKENCNGKMATLSVGGKTVSRFRKATSILEFYRELGLPPKQTVKIFNITDNAAIKPGTPLYAAHFRPGQYVDVTAKTIGKGFQGVMKRWGFKGQPATHGQTKTHRRPGAVATGDFGGVWPGPNCLEIGNFSGRFG

SEQ ID NO: 776226 - protein, 130 aa, Homo sapiens [sequence omitted]

SEQ ID NO: 776227 - protein, 204 aa, Homo sapiens; identical to SEQ ID NO: 776216

SEQ ID NO: 776228 - protein, 70 aa, Homo sapiens
RERERERERERVDHKNGLVKVKDSKLPAYKDLGKNLPFPTYFPDGDEEELPEDLYDENVCQPGAPSITFA

SEQ ID NO: 776229 - protein, 70 aa, Homo sapiens; identical to SEQ ID NO: 776228

SEQ ID NO: 776230 - protein, 348 aa, Homo sapiens [sequence omitted]

SEQ ID NO: 776231 - protein, 348 aa, Homo sapiens [sequence omitted]

SEQ ID NO: 776232 - protein, 348 aa, Homo sapiens [sequence omitted]

SEQ ID NO: 776233 - protein, 242 aa, Homo sapiens
MPLWTKDGQKHVVTLLQVQDCHVLKYTSKENCNGKMATLSVGGKTVSRFRKATSILEFYRELGLPPKQTVKIFNITDNAAIKPGTPLYAAHFRPGQYVDVTAKTIGKGFQGVMKRWGFKGQPATHGQTKTHRRPGAVATGDIGRVWPGTKMPGKMGNIYRTEYGLKVWRINTKHNIIYVNGSVPGHKNCLVKVKDSKLPAYKDLGKNLPFPTYFPDGDEEELPEDLYDENVCQPGAPSITFA

SEQ ID NO: 776234 - protein, 330 aa, Homo sapiens
MPGWRLLTQVGAQVLGRLGDGLGAALGPGNRTHIWLFVRGLHGKSGTWWDEHLSEASKLCPLKDEPWPIHPWEPGSFRVGLIALKLGMMPLWTKDGQKHVVTLLQVQDCHVLKYTSKENCNGKMATLSVGGKTVSRFRKATSILEFYRELGLPPKQTVKIFNITDNAAIKPGTPLYAAHFRPGQYVDVTAKTIGKGFQGVMKRWGFKGQPATHGQTKTHRRPGAVATGDIGRVWPGTKMPGKMGNIYRTEYGLKVWRINTKHNIIYVNGSVPGHKNCLVKVKDSKLPAYKDLGKNLPFPTYFPDGDEEELPEDLYDENVCQPGAPSITFA

SEQ ID NO: 776235 - protein, 315 aa, Homo sapiens
MPGWRLLTQVGAQVLGRLGDGLGAALGPGNRTHIWLFVRGLHGKSGTWWDEHLSEENVPFIKQLVSDEDKAQLASKLCPLKDEPWPIHPWEPGSFRVGLIALKLGMMPLWTKDGQKHVVTLLQKATSILEFYRELGLPPKQTVKIFNITDNAAIKPGTPLYAAHFRPGQYVDVTAKTIGKGFQGVMKRWGFKGQPATHGQTKTHRRPGAVATGDIGRVWPGTKMPGKMGNIYRTEYGLKVWRINTKHNIIYVNGSVPGHKNCLVKVKDSKLPAYKDLGKNLPFPTYFPDGDEEELPEDLYDENVCQPGAPSITFA

SEQ ID NO: 776236 - protein, 195 aa, Homo sapiens; identical to SEQ ID NO: 776217

SEQ ID NO: 776237 - protein, 163 aa, Homo sapiens
MPGWRLLTQVGAQVLGRLGDGLGAALGPGNRTHIWLFVRGLHGKSGTWWDEHLSEENVPFIKQLVSDEDKAQLASKLCPLKDEPWPIHPWEPGSFRVGLIALKLGMMPLWTKDGQKHVVTLLQVQDCHVLKYTSKENCNGKMATLSVGGKTVSRFRVRMYFHS

SEQ ID NO: 776238 - protein, 480 aa, Homo sapiens
MSDGFDRAPGAGRGRSRGLGRGGGGPEGGGFPNGAGPAERARHQPPQPKAPGFLQPPPLRQPRTTPPPGAQCEVPASPQRPSRPGALAPEQTRPLRAPPSSQDKIPQQNSESAMAKPQVVVAPVLMSKLSVNAPEFYPSGYSSSYTESYEDGCEDYPTLSEYVQDFLNHLTEQPGSFETEIEQFAETLNGCVTTDDALQELVELIYQQATSIPNFSYMGARLCNYLSHHLTISPQSGNFRQLLLQRCRTEYEVKDQAAKGDEVTRKRFHAFVLFLGELYLNLEIKGTNGQVTRADILQVGLRELLNALFSNPMDDNLICAVKLLKLTGSVLEDAWKEKGKMDMEEIIQRIENVVLDANCSRDVKQMLLKLVELRSSNWGRVHATSTYREATPENDPNYFMNEPTFYTSDGVPFTAADPDYQEKYQELLEREDFFPDYEENGTDLSGAGDPYLDDIDDEMDPEIEEAYEKFCLESERKRKQ

SEQ ID NO: 776239 - protein, 400 aa, Homo sapiens
MSDGFDRAPEQTRPLRAPPSSQDKIPQQNSESAMAKPQVVVAPVLMSKLSVNAPEFYPSGYSSSYTESYEDGCEDYPTLSEYVQDFLNHLTEQPGSFETEIEQFAETLNGCVTTDDALQELVELIYQQATSIPNFSYMGARLCNYLSHHLTISPQSGNFRQLLLQRCRTEYEVKDQAAKGDEVTRKRFHAFVLFLGELYLNLEIKGTNGQVTRADILQVGLRELLNALFSNPMDDNLICAVKLLKLTGSVLEDAWKEKGKMDMEEIIQRIENVVLDANCSRDVKQMLLKLVELRSSNWGRVHATSTYREATPENDPNYFMNEPTFYTSDGVPFTAADPDYQEKYQELLEREDFFPDYEENGTDLSGAGDPYLDDIDDEMDPEIEEAYEKFCLESERKRKQ

SEQ ID NO: 776240 - protein, 400 aa, Homo sapiens; identical to SEQ ID NO: 776239

SEQ ID NO: 776241 - protein, 367 aa, Homo sapiens
MAKPQVVVAPVLMSKLSVNAPEFYPSGYSSSYTESYEDGCEDYPTLSEYVQDFLNHLTEQPGSFETEIEQFAETLNGCVTTDDALQELVELIYQQATSIPNFSYMGARLCNYLSHHLTISPQSGNFRQLLLQRCRTEYEVKDQAAKGDEVTRKRFHAFVLFLGELYLNLEIKGTNGQVTRADILQVGLRELLNALFSNPMDDNLICAVKLLKLTGSVLEDAWKEKGKMDMEEIIQRIENVVLDANCSRDVKQMLLKLVELRSSNWGRVHATSTYREATPENDPNYFMNEPTFYTSDGVPFTAADPDYQEKYQELLEREDFFPDYEENGTDLSGAGDPYLDDIDDEMDPEIEEAYEKFCLESERKRKQ

SEQ ID NO: 776242 - protein, 465 aa, Homo sapiens
MSDGFDRAPGAGRGRSRGLGRGGGGPEGGGFPNGAGPAERARHQPPQPKAPGFLQPPPLRQPRTTPPPGAQCEVPASPQRPSRPGALAPEQTRPLRAPPSSQDMVVAPVLMSKLSVNAPEFYPSGYSSSYTESYEDGCEDYPTLSEYVQDFLNHLTEQPGSFETEIEQFAETLNGCVTTDDALQELVELIYQQATSIPNFSYMGARLCNYLSHHLTISPQSGNFRQLLLQRCRTEYEVKDQAAKGDEVTRKRFHAFVLFLGELYLNLEIKGTNGQVTRADILQVGLRELLNALFSNPMDDNLICAVKLLKLTGSVLEDAWKEKGKMDMEEIIQRIENVVLDANCSRDVKQMLLKLVELRSSNWGRVHATSTYREATPENDPNYFMNEPTFYTSDGVPFTAADPDYQEKYQELLEREDFFPDYEENGTDLSGAGDPYLDDIDDEMDPEIEEAYEKFCLESERKRKQ

SEQ ID NO: 776243 - protein, 400 aa, Homo sapiens; identical to SEQ ID NO: 776239

SEQ ID NO: 776244 - protein, 400 aa, Homo sapiens; identical to SEQ ID NO: 776239

SEQ ID NO: 776245 - protein, 400 aa, Homo sapiens; identical to SEQ ID NO: 776239

SEQ ID NO: 776246 - protein, 140 aa, Homo sapiens [sequence omitted]

SEQ ID NO: 776247 - protein, 74 aa, Homo sapiens
PPRPFPPALRDPDYQEKYQELLEREDFFPDYEENGTDLSGAGDPYLDDIDDEMDPEIEEAYEKFCLESERKRKQ

SEQ ID NO: 776248 - protein, 480 aa, Homo sapiens; identical to SEQ ID NO: 776238

SEQ ID NO: 776249 - protein, 400 aa, Homo sapiens; identical to SEQ ID NO: 776239

SEQ ID NO: 776250 - protein, 367 aa, Homo sapiens; identical to SEQ ID NO: 776241

SEQ ID NO: 776251 - protein, 403 aa, Homo sapiens
MKKRAELHCKAPEQTRPLRAPPSSQDKIPQQNSESAMAKPQVVVAPVLMSKLSVNAPEFYPSGYSSSYTESYEDGCEDYPTLSEYVQDFLNHLTEQPGSFETEIEQFAETLNGCVTTDDALQELVELIYQQATSIPNFSYMGARLCNYLSHHLTISPQSGNFRQLLLQRCRTEYEVKDQAAKGDEVTRKRFHAFVLFLGELYLNLEIKGTNGQVTRADILQVGLRELLNALFSNPMDDNLICAVKLLKLTGSVLEDAWKEKGKMDMEEIIQRIENVVLDANCSRDVKQMLLKLVELRSSNWGRVHATSTYREATPENDPNYFMNEPTFYTSDGVPFTAADPDYQEKYQELLEREDFFPDYEENGTDLSGAGDPYLDDIDDEMDPEIEEAYEKFCLESERKRKQ

SEQ ID NO: 776252 - protein, 263 aa, Homo sapiens [sequence omitted]

SEQ ID NO: 776253 - protein, 285 aa, Homo sapiens
  misc_feature (8)..(8): Xaa can be any naturally occurring amino acid
RVVTDSLXLPRLTATSIPNFSYMGARLCNYLSHHLTISPQSGNFRQLLLQRCRTEYEVKDQAAKGDEVTRKRFHAFVLFLGELYLNLEIKGTNGQVTRADILQVGLRELLNALFSNPMDDNLICAVKLLKLTGSVLEDAWKEKGKMDMEEIIQRIENVVLDANCSRDVKQMLLKLVELRSSNWGRVHATSTYREATPENDPNYFMNEPTFYTSDGVPFTAADPDYQEKYQELLEREDFFPDYEENGTDLSGAGDPYLDDIDDEMDPEIEEAYEKFCLESERKRKQ

SEQ ID NO: 776254 - protein, 140 aa, Homo sapiens [sequence omitted]

SEQ ID NO: 776255 - protein, 347 aa, Homo sapiens
MSDGFDRAPEQTRPLRAPPSSQDKIPQQNSESAMAKPQVVVAPVLMSKLSVNAPEFYPSGYSSSYTESYEDGCEDYPTLSEYVQDFLNHLTEQPGSFETEIEQFAETLNGCVTTDDALQELVELIYQQATSIPNFSYMGARLCNYLSHHLTISPQSGNFRQLLLQRCRTEYEVKDQAAKGDEVTRKRFHAFVLFLGELYLNLEIKGTNGQVTRADILQVGLRELLNALFSNPMDDNLICAVKLLKLTGSVLEDAWKEKGKMDMEEIIQRIENVVLDANCSRDVKQMLLKLVELRSSNWGRVHATSTYREATPENDPNYFMNEPTFYTSDGVPFTAAIRYDMWGSSRS

SEQ ID NO: 776256 - protein, 763 aa, Homo sapiens
MNQKTILVLLILAVITIFALVCVLLVGRGGDGGEPSQLPHCPSVSPSAQPWTHPGQSQLFADLSREELTAVMRFLTQRLGPGLVDAAQARPSDNCVFSVELQLPPKAAALAHLDRGSPPPAREALAIVFFGRQPQPNVSELVVGPLPHPSYMRDVTVERHGGPLPYHRRPVLFQEYLDIDQMIFNRELPQASGLLHHCCFYKHRGRNLVTMTTAPRGLQSGDRATWFGLYYNISGAGFFLHHVGLELLVNHKALDPARWTIQKVFYQGRYYDSLAQLEAQFEAGLVNVVLIPDNGTGGSWSLKSPVPPGPAPPLQFYPQGPRFSVQGSRVASSLWTFSFGLGAFSGPRIFDVRFQGERLVYEISLQEALAIYGGNSPAAMTTRYVDGGFGMGKYTTPLTRGVDCPYLATYVDWHFLLESQAPKTIRDAFCVFEQNQGLPLRRHHSDLYSHYFGGLAETVLVVRSMSTLLNYDYVWDTVFHPSGAIEIRFYATGYISSAFLFGATGKYGNQVSEHTLGTVHTHSAHFKVDLDVAGLENWVWAEDMVFVPMAVPWSPEHQLQRLQVTRKLLEMEEQAAFLVGSATPRYLYLASNHSNKWGHPRGYRIQMLSFAGEPLPQNSSMARGFSWERYQLAVTQRKEEEPSSSSVFNQNDPWAPTVDFSDFINNETIAGKDLVAWVTAGFLHIPHAEDIPNTVTVGNGVGFFLRPYNFFDEDPSFYSADSIYFRGDQDAGACEVNPLACLPQAAACAPDLPAFSHGGFSHN

SEQ ID NO: 776257 - protein, 763 aa, Homo sapiens; identical to SEQ ID NO: 776256

SEQ ID NO: 776258 - protein, 763 aa, Homo sapiens; identical to SEQ ID NO: 776256

SEQ ID NO: 776259 - protein, 52 aa, Homo sapiens
WRPDQCLPRYQLAVTQRKEEEPSSSSVFNQNDPWAPTVDFSDFINNETIAGK

SEQ ID NO: 776260 - protein, 220 aa, Homo sapiens
MVFVPMAVPWSPEHQLQRLQVTRKLLEMEEQAAFLVGSATPRYLYLASNHSNKWGHPRGYRIQMLSFAGEPLPQNSSMARGFSWERYQLAVTQRKEEEPSSSSVFNQNDPWAPTVDFSDFINNETIAGKDLVAWVTAGFLHIPHAEDIPNTVTVGNGVGFFLRPYNFFDEDPSFYSADSIYFRGDQDAGACEVNPLACLPQAAACAPDLPAFSHGGFSHN

SEQ ID NO: 776261 - protein, 215 aa, Homo sapiens [sequence omitted]

SEQ ID NO: 776262 - protein, 547 aa, Homo sapiens
MNQKTILVLLILAVITIFALVCVLLVGRGGDGGEPSQLPHCPSVSPSAQPWTHPGQSQLFADLSREELTAVMRFLTQRLGPGLVDAAQARPSDNCVFSVELQLPPKAAALAHLDRGSPPPAREALAIVFFGRQPQPNVSELVVGPLPHPSYMRDVTVERHGGPLPYHRRPVLFQEYLDIDQMIFNRELPQASGLLHHCCFYKHRGRNLVTMTTAPRGLQSGDRATWFGLYYNISGAGFFLHHVGLELLVNHKALDPARWTIQKVFYQGRYYDSLAQLEAQFEAGLVNVVLIPDNGTGGSWSLKSPVPPGPAPPLQFYPQGPRFSVQGSRVASSLWTFSFGLGAFSGPRIFDVRFQGERLVYEISLQEALAIYGGNSPAAMTTRYVDGGFGMGKYTTPLTRGVDCPYLATYVDWHFLLESQAPKTIRDAFCVFEQNQGLPLRRHHSDLYSHYFGGLAETVLVVRSMSTLLNYDYVWDTVFHPSGAIEIRFYATGYISSAFLFGATGKYGNQVSEHTLGTVHTHSAHFKVDLDVAGKTFWWGEGFWKKG

SEQ ID NO: 776263 - protein, 112 aa, Homo sapiens
RRRRSEIGRWLCQERLLSKPGGHCPVSPFGPLLVLLVGLGGLSARSLGRRSTGPFTEATHGAGVSGSHRQAPSVQMQLPGSGRRELASSSQERLSVVGRVAGVGCAGAVGQH

SEQ ID NO: 776264 - protein, 112 aa, Homo sapiens; identical to SEQ ID NO: 776263

SEQ ID NO: 776265 - protein, 34 aa, Homo sapiens
IFEDSSFNPPLLLPQNYIEVEQEGKAVEKNTALK

SEQ ID NO: 776266 - protein, 129 aa, Homo sapiens
SATEPCIGSKAPKHDKSRGADNPVADLKKHVEFLVAEKERLWKESKQVKAEKARLLKGPVEKELDVGADFVEKSELRSSPLHSETAIPSSALQRFAADARKAKYIPIPNLFPQIFHLQSFPLWSFLRIF

SEQ ID NO: 776267 - protein, 129 aa, Homo sapiens; identical to SEQ ID NO: 776266

SEQ ID NO: 776268 - protein, 62 aa, Homo sapiens
MAAADGGGPGGASVGTEEDGGGVGHRTVYLFDRREKESELGDRPLQVGERSDYAGFRACVCQ

SEQ ID NO: 776269 - protein, 103 aa, Homo sapiens
VETEFCHVGQASLKLLPSGDLPTSASQTAGITGVSHHVRPINNSFYLIFPTLKPTIPLIYNPSSTQVKNCLVLLTCKTTAYPSGISSSPTNQKCIFIKPSLNR

SEQ ID NO: 776270 - protein, 56 aa, Homo sapiens
MVFESASDKKKGTCQIHSGRFKTQWQLHPVPICTISKCSWMPMLEPLALLPLGTGC

SEQ ID NO: 776271 - protein, 227 aa, Homo sapiens
MFEPVSCTFTYLLGDRESREAVLIDPVLETAPRDAQLIKELGLRLLYAVNTHCHADHITGSGLLRSLLPGCQSVISRLSGAQADLHIEDGDSIRFGRFALETRASPGHTPGCVTFVLNDHSMAFTGDALLIRGCGRTDFQQGCAKTLYHSVHEKIFTLPGDCLIYPAHDYHGFTVSTVEEERTLNPRLTLSCEEFVKIMGNLNLPKPQQIDFAVPANMRCGVQTPTA

SEQ ID NO: 776272 - protein, 254 aa, Homo sapiens
MAEAVLRVARRQLSQRGGSGAPILLRQMFEPVSCTFTYLLGDRESREAVLIDPVLETAPRDAQLIKELGLRLLYAVNTHCHADHITGSGLLRSLLPGCQSVISRLSGAQADLHIEDGDSIRFGRFALETRASPGHTPGCVTFVLNDHSMAFTGDALLIRGCGRTDFQQGCAKTLYHSVHEKIFTLPGDCLIYPAHDYHGFTVSTVEEERTLNPRLTLSCEEFVKIMGNLNLPKPQQIDFAVPANMRCGVQTPTA

SEQ ID NO: 776273 - protein, 184 aa, Homo sapiens
MAEAVLRVARRQLSQRGGSGAPILLRQMFEPVSCTFTYLLGDRESREAVLIDPVLETAPRDAQLIKELGLRLLYAVNTHCHADHITGSGLLRSLLPGCQCAKTLYHSVHEKIFTLPGDCLIYPAHDYHGFTVSTVEEERTLNPRLTLSCEEFVKIMGNLNLPKPQQIDFAVPANMRCGVQTPTA

SEQ ID NO: 776274 - protein, 243 aa, Homo sapiens
MAEAVLRVARRQLSQRGGSGAPILLRQMFEPVSCTFTYLLGDRESREAVLIDPVLETAPRDAQLIKELGLRLLYAGSGLLRSLLPGCQSVISRLSGAQADLHIEDGDSIRFGRFALETRASPGHTPGCVTFVLNDHSMAFTGDALLIRGCGRTDFQQGCAKTLYHSVHEKIFTLPGDCLIYPAHDYHGFTVSTVEEERTLNPRLTLSCEEFVKIMGNLNLPKPQQIDFAVPANMRCGVQTPTA

SEQ ID NO: 776275 - protein, 108 aa, Homo sapiens [sequence omitted]

SEQ ID NO: 776276 - protein, 106 aa, Homo sapiens
APHPQSCGSAETPQLEQSEGHTHLRLPSQLPLQGAGPSSGAPARPYPQNHCLGSGPDNRKLGALSLHCLSFPARPCWRGETAPPPGPPPPAAEGGGIRHSSPLLRK

SEQ ID NO: 776277 - protein, 110 aa, Homo sapiens
LAQETRPTMEFKDNPTKEKTSRVGDAWAPRTGGELHFPQMERFLTPGQLSRNMAGLPDPNSPSFLAALVTTGPSSSEAWTKEALARTGFGGQWVEKSVLAAPWSPWINIC

SEQ ID NO: 776278 - protein, 67 aa, Homo sapiens
EPCGSRGGDWTQPHDNAQTWARNWKPVVPLGCRGWGPTVMAEPGPHTQQHGLQTRAGPPFWSQGDLG

SEQ ID NO: 776279 - protein, 610 aa, Homo sapiens
MGLKAAQKTLFPLRSIDDVVRLFAAELGREEPDLVLLSLVLGFVEHFLAVNRVIPTNVPELTFQPSPAPDPPGGLTYFPVADLSIIAALYARFTAQIRGAVDLSLYPREGGVSSRELVKKVSDVIWNSLSRSYFKDRAHIQSLFSFITGTKLDSSGVAFAVVGACQALGLRDVHLALSEDHAWVVFGPNGEQTAEVTWHGKGNEDRRGQTVNAGVAERSWLYLKGSYMRCDRKMEVAFMVCAINPSIDLHTDSLELLQLQQKLLWLLYDLGHLERYPMALGNLADLEELEPTPGRPDPLTLYHKGIASAKTYYRDEHIYPYMYLAGYHCRNRNVREALQAWADTATVIQDYNYCREDEEIYKEFFEVANDVIPNLLKEAASLLEAGEERPGEQSQGTQSQGSALQDPECFAHLLRFYDGICKWEEGSPTPVLHVGWATFLVQSLGRFEGQVRQKVRIVSREAEAAEAEEPWGEEAREGRRRGPRRESKPEEPPPPKKPALDKGLGTGQGAVSGPPRKPPGTVAGTARGPEGGSTAQVPAPAASPPPEGPVLTFQSEKMKGMKELLVATKINSSAIKLQLTAQSQVQMKKQKVSTPSDYTLSFLKRQRKGL

SEQ ID NO: 776280 - protein, 399 aa, Homo sapiens
MISSPPKSWLYLKGSYMRCDRKMEVAFMVCAINPSIDLHTDSLELLQLQQKLLWLLYDLGHLERYPMALGNLADLEELEPTPGRPDPLTLYHKGIASAKTYYRDEHIYPYMYLAGYHCRNRNVREALQAWADTATVIQDYNYCREDEEIYKEFFEVANDVIPNLLKEAASLLEAGEERPGEQSQGTQSQGSALQDPECFAHLLRFYDGICKWEEGSPTPVLHVGWATFLVQSLGRFEGQVRQKVRIVSREAEAAEAEEPWGEEAREGRRRGPRRESKPEEPPPPKKPALDKGLGTGQGAVSGPPRKPPGTVAGTARGPEGGSTAQVPAPAASPPPEGPVLTFQSEKMKGMKELLVATKINSSAIKLQLTAQSQVQMKKQKVSTPSDYTLSFLKRQRKGL

SEQ ID NO: 776281 - protein, 600 aa, Homo sapiens
HEGAACAAVPSVGCKRGGRRPPPAAMGLKAAQKTLFPLRSIDDVVRLFAAELGREEPDLVLLSLVLGFVEHFLAVNRVIPTNVPELTFQPSPAPDPPGGLTYFPVADLSIIAALYARFTAQIRGAVDLSLYPREGGVSSRELVKKVSDVIWNSLSRSYFKDRAHIQSLFSFITGTKLDSSGVAFAVVGACQALGLRDVHLALSEDHAWSWLYLKGSYMRCDRKMEVAFMVCAINPSIDLHTDSLELLQLQQKLLWLLYDLGHLERYPMALGNLADLEELEPTPGRPDPLTLYHKGIASAKTYYRDEHIYPYMYLAGYHCRNRNVREALQAWADTATVIQDYNYCREDEEIYKEFFEVANDVIPNLLKEAASLLEAGEERPGEQSQGTQSQGSALQDPECFAHLLRFYDGICKWEEGSPTPVLHVGWATFLVQSLGRFEGQVRQKVRIVSREAEAAEAEEPWGEEAREGRRRGPRRESKPEEPPPPKKPALDKGLGTGQGAVSGPPRKPPGTVAGTARGPEGGSTAQVPAPAASPPPEGPVLTFQSEKMKGMKELLVATKINSSAIKLQLTAQSQVQMKKQKVSTPSDYTLSFLKRQRKGL

SEQ ID NO: 776282 - protein, 399 aa, Homo sapiens; identical to SEQ ID NO: 776280

SEQ ID NO: 776283 - protein, 301 aa, Homo sapiens
VPRDQQEITAYSGSAPPLKLTAAVCVFVLEVSKTASPPGGADDSGRAIFKSCNTHREVRGFILKVGETNNPAEGINSAHREKMPFHHVTAGLLYKGNYLNRSLSAGSDSEQLANISVEELDEIREAFRVLDRDGNGFISKQELGMAMRSLGYMPSEVELAIIMQRLDMDGDGQVDFDEFMTILGPKLVSSEGRDGFLGNTIDSIFWQFDMQRITLEELKHILYHAFRDHLTMKDIENIIINEEESLNETSGNCQTEFEGVHSQKQNRQTCVRKSLICAFAMAFIISVMLIAANQILRSGME

SEQ ID NO: 776284 - protein, 312 aa, Homo sapiens
RPDRAPSRRGGSCRSRRARGERPGGAEGAGGSEDAGTGTRLPAGGVSERLSAARSAHPFRTAPSLRASEEAPRAVRRRLGCRAAEPRPSKREKMPFHHVTAGLLYKGNYLNRSLSAGSDSEQLANISVEELDEIREAFRVLDRDGNGFISKQELGMAMRSLGYMPSEVELAIIMQRLDMDGDGQVDFDEFMTILGPKLVSSEGRDGFLGNTIDSIFWQFDMQRITLEELKHILYHAFRDHLTMKDIENIIINEEESLNETSGNCQTEFEGVHSQKQNRQTCVRKSLICAFAMAFIISVMLIAANQILRSGME

SEQ ID NO: 776285 - protein, 261 aa, Homo sapiens
MRLPEQPGEGKPENEKKGDGGALGGGEEPPRSQAPDFPTWEKMPFHHVTAGLLYKGNYLNRSLSAGSDSEQLANISVEELDEIREAFRVLDRDGNGFISKQELGMAMRSLGYMPSEVELAIIMQRLDMDGDGQVDFDEFMTILGPKLVSSEGRDGFLGNTIDSIFWQFDMQRITLEELKHILYHAFRDHLTMKDIENIIINEEESLNETSGNCQTEFEGVHSQKQNRQTCVRKSLICAFAMAFIISVMLIAANQILRSGME

SEQ ID NO: 776286 - protein, 215 aa, Homo sapiens
CWSQELEEILAAEVKIAKLWNQPKSPSTNEWIKKCEIREAFRVLDRDGNGFISKQELGMAMRSLGYMPSEVELAIIMQRLDMDGDGQVDFDEFMTILGPKLVSSEGRDGFLGNTIDSIFWQFDMQRITLEELKHILYHAFRDHLTMKDIENIIINEEESLNETSGNCQTEFEGVHSQKQNRQTCVRKSLICAFAMAFIISVMLIAANQILRSGME

SEQ ID NO: 776287 - protein, 170 aa, Homo sapiens
CIDVIFFFHTLFLLDFSSKACSAASSLRRSGAVDGYFIVSAAHRAGPGDPALSQSCKSTLRCAFPGGGCLPLLPLPLCPSSSSARELRSPTPGLSGQPAPAASPGPGLQVAPATAARRASSLCSTLTAVPRAAFLASFRPACLLSLSAGAFGSLSPQQPPPAASPGAGAA

SEQ ID NO: 776288 - protein, 119 aa, Homo sapiens
VRNPRPGTRAGPSLAEGRPGTRVPTRDHRTHHHHSGNCPAAPRSPGPAAEVGPRAQRPRNSARSPQPQCRGARWPRATPHPAPGAHRWPHNFAARAAPAGPSTLPRDLPNVECVPAPSR

SEQ ID NO: 776289 - protein, 53 aa, Homo sapiens
CWSGGAGAQARGAAVAATFLRRFGEGPLISTRPAPAALASGRGGGKTGDWQQG

SEQ ID NO: 776290 - protein, 217 aa, Homo sapiens
MSFRGGGRGGFNRGGGGGGFNRGGSSNHFRGGGGGGGGGNFRGGGRGGFGRGGGRGGFNKGQDQGPPERVVLLGEFLHPCEDDIVCKCTTDENKVPYFNAPVYLENKEQIGKVDEIFGQLRDFYFSVKLSENMKASSFKKLQKFYIDPYKLLPLQRFLPRPPGEKGPPRGGGRGGRGGGRGGGGRGGGRGGGFRGGRGGGGGGFRGGRGGGFRGRGH

SEQ ID NO: 776291 - protein, 238 aa, Homo sapiens
VLQRTPLLYVTSTAQRQGGERMSFRGGGRGGFNRGGGGGGFNRGGSSNHFRGGGGGGGGGNFRGGGRGGFGRGGGRGGFNKGQDQGPPERVVLLGEFLHPCEDDIVCKCTTDENKVPYFNAPVYLENKEQIGKVDEIFGQLRDFYFSVKLSENMKASSFKKLQKFYIDPYKLLPLQRFLPRPPGEKGPPRGGGRGGRGGGRGGGGRGGGRGGGFRGGRGGGGGGFRGGRGGGFRGRGH

SEQ ID NO: 776292 - protein, 241 aa, Homo sapiens
EEARINRKRASWPLCCKLVVKVIYYCHFSSAKGCFGTSVACSAGDWLFFLANQLFKFLVFKKLCGGTVTEEVPARRKYPAGGCVRKARARGARGAVLGEFLHPCEDDIVCKCTTDENKVPYFNAPVYLENKEQIGKVDEIFGQLRDFYFSVKLSENMKASSFKKLQKFYIDPYKLLPLQRFLPRPPGEKGPPRGGGRGGRGGGRGGGGRGGGRGGGFRGGRGGGGGGFRGGRGGGFRGRGH

SEQ ID NO: 776293 - protein, 217 aa, Homo sapiens; identical to SEQ ID NO: 776290

SEQ ID NO: 776294 - protein, 572 aa, Homo sapiens
AAFEVARPGDQGKAGGGSPGWGCAGIPDSAPGAGVLQAGAVGPARGGQGAEEVGESAGGGEERRVRHPQAPALRLLNRKPQGGSGEIKTPENDLQRGRLSRGPRTAPPAPGMGDRSGQQERSVPHSPGAPVGTSAAAVNGLLHNGFHPPPVQPPHVCSRGPVGGSDAAPQRLPLLPELQPQPLLPQHDSPAKKCRLRRRMDSGRKNRPPFPWFGMDIGGTLVKLVYFEPKDITAEEEQEEVENLKSIRKYLTSNTAYGKTGIRDVHLELKNLTMCGRKGNLHFIRFPSCAMHRFIQMGSEKNFSSLHTTLCATGGGAFKFEEDFRMIADLQLHKLDELDCLIQGLLYVDSVGFNGKPECYYFENPTNPELCQKKPYCLDNPYPMLLVNMGSGVSILAVYSKDNYKRVTGTSLGGGTFLGLCCLLTGCETFEEALEMAAKGDSTNVDKLVKDIYGGDYERFGLQGSAVASSFGNMMSKEKRDSISKEDLARATLVTITNNIGSIARMCALNENIDRVVFVGNFLRINMVSMKLLAYAMDFWSKGQLKALFLEHEGYFGAVGALLELFKMTDDK

SEQ ID NO: 776295 - protein, 513 aa, Homo sapiens
AAFEVARPGDQGKAGGGSPGWGCAGIPDSAPGAGVLQAGAVGPARGGQGAEEVGESAGGGEERRVRHPQAPALRLLNRKPQGGSGEIKTPENDLQRGRLSRGPRTAPPAPGMGDRSGQQERSVPHSPGAPVGTSAAAVNGLLHNGFHPPPVQPPHVCSRGPVGGSDAAPQRLPLLPELQPQPLLPQHDSPAKKCRLRRRMDSGRKNRPPFPWFGMDIGGTLVKLVYFEPKDITAEEEQEEVENLKSIRKYLTSNTAYGKTGIRDVHLELKNLTMCGRKGNLHFIRFPSCAMHRFIQMGSEKNFSSLHTTLCATGGGAFKFEEDFRMIADLQLHKLDELDCLIQGLLYVDSVGFNGKPECYYFENPTNPELCQKKPYCLDNPYPMLLVNMGSGVSILAVYSKDNYKRVTGTSFGNMMSKEKRDSISKEDLARATLVTITNNIGSIARMCALNENIDRVVFVGNFLRINMVSMKLLAYAMDFWSKGQLKALFLEHEGYFGAVGALLELFKMTDDK

SEQ ID NO: 776296 - protein, 572 aa, Homo sapiens; identical to SEQ ID NO: 776294

SEQ ID NO: 776297 - protein, 411 aa, Homo sapiens
AAFEVARPGDQGKAGGGSPGWGCAGIPDSAPGAGVLQAGAVGPARGGQGAEEVGESAGGGEERRVRHPQAPALRLLNRKPQGGSGEIKTPENDLQRGRLSRGPRTAPPAPGMGDRSGQQERSVPHSPGAPVGTSAAAVNGLLHNGFHPPPVQPPHVCSRGPVGGSDAAPQRLPLLPELQPQPLLPQHDSPAKKCRLRRRMDSGRKNRPPFPWFGMDIGGTLVKLVYFEPKDITAEEEQEEVENLKSIRKYLTSNTAYGKTGIRDVHLELKNLTMCGRKGNLHFIRFPSCAMHRFIQMGSEKNFSSLHTTLCATGGGAFKFEEDFRMIADLQLHKLDELDCLIQGLLYVDSVGFNGKPECYYFENPTNPELCQKKPYCLDNPYPMLLVNMGSGVSILAVYSKDNYKRVTGTR

SEQ ID NO: 776298 - protein, 45 aa, Homo sapiens
AVCSQAKVWTGLGTACESYPRKYKITFTQQDTALPASEVTQIKAS

SEQ ID NO: 776299 - protein, 43 aa, Homo sapiens
PAELACHSPSVLFWLKNESLGLSCLGVLRNSDVCEPGSGTLKF

SEQ ID NO: 776300 - protein, 87 aa, Homo sapiens
ETPGAGEGEVDFLLVFPSHETSWLGGNRRVSSSSLEESTFLQGWGSAEWEEDTNTNFIARMQKEASAVARAWNPSTLEGELGGSLEM

SEQ ID NO: 776301 - protein, 115 aa, Homo sapiens
RVFEGKNADLHRMHKINVTVWRGNQPDLGYGSDQDIFGSRVKRNLIISRLETGQTCKIENRMKLKVFWIWRSRNKFYGNIWFKYTYLKHRSETGFPLKKKTLAEAPSLGKEAEKS

SEQ ID NO: 776302 - protein, 810 aa, Homo sapiens
MPMDLILVVWFCVCTARTVVGFGMDPDLQMDIVTELDLVNTTLGVAQVSGMHNASKAFLFQDIEREIHAAPHVSEKLIQLFQNKSEFTILATVQQKPSTSGVILSIRELEHSYFELESSGLRDEIRYHYIHNGKPRTEALPYRMADGQWHKVALSVSASHLLLHVDCNRIYERVIDPPDTNLPPGINLWLGQRNQKHGLFKGIIQDGKIIFMPNGYITQCPNLNHTCPTCSDFLSLVQGIMDLQELLAKMTAKLNYAETRLSQLENCHCEKTCQVSGLLYRDQDSWVDGDHCRNCTCKSGAVECRRMSCPPLNCSPDSLPVHIAGQCCKVCRPKCIYGGKVLAEGQRILTKSCRECRGGVLVKITEMCPPLNCSEKDHILPENQCCRVCRGHNFCAEGPKCGENSECKNWNTKATCECKSGYISVQGDSAYCEDIDECAAKMHYCHANTVCVNLPGLYRCDCVPGYIRVDDFSCTEHDECGSGQHNCDENAICTNTVQGHSCTCKPGYVGNGTICRAFCEEGCRYGGTCVAPNKCVCPSGFTGSHCEKDIDECSEGIIECHNHSRCVNLPGWYHCECRSGFHDDGTYSLSGESCIDIDECALRTHTCWNDSACINLAGGFDCLCPSGPSCSGDCPHEGGLKHNGQVWTLKEDRCSVCSCKDGKIFCRRTACDCQNPSADLFCCPECDTRVTSQCLDQNGHKLYRSGDNWTHSCQQCRCLEGEVDCWPLTCPNLSCEYTAILEGECCPRCVSDPCLADNITYDIRKTCLDSYGVSRLSGSVWTMAGSPCTTCKCKNGRVCCSVDFECLQNN

SEQ ID NO: 776303 - protein, 790 aa, Homo sapiens
MESGSLSPRLECSGATLAYYNFLLPGSSDSPALASQVAGITDIEREIHAAPHVSEKLIQLFQNKSEFTILATVQQKPSTSGVILSIRELEHSYFELESSGLRDEIRYHYIHNGKPRTEALPYRMADGQWHKVALSVSASHLLLHVDCNRIYERVIDPPDTNLPPGINLWLGQRNQKHGLFKGIIQDGKIIFMPNGYITQCPNLNHTCPTCSDFLSLVQGIMDLQELLAKMTAKLNYAETRLSQLENCHCEKTCQVSGLLYRDQDSWVDGDHCRNCTCKSGAVECRRMSCPPLNCSPDSLPVHIAGQCCKVCRPKCIYGGKVLAEGQRILTKSCRECRGGVLVKITEMCPPLNCSEKDHILPENQCCRVCRGHNFCAEGPKCGENSECKNWNTKATCECKSGYISVQGDSAYCEDIDECAAKMHYCHANTVCVNLPGLYRCDCVPGYIRVDDFSCTEHDECGSGQHNCDENAICTNTVQGHSCTCKPGYVGNGTICRAFCEEGCRYGGTCVAPNKCVCPSGFTGSHCEKDIDECSEGIIECHNHSRCVNLPGWYHCECRSGFHDDGTYSLSGESCIDIDECALRTHTCWNDSACINLAGGFDCLCPSGPSCSGDCPHEGGLKHNGQVWTLKEDRCSVCSCKDGKIFCRRTACDCQNPSADLFCCPECDTRVTSQCLDQNGHKLYRSGDNWTHSCQQCRCLEGEVDCWPLTCPNLSCEYTAILEGECCPRCVSDPCLADNITYDIRKTCLDSYGVSRLSGSVWTMAGSPCTTCKCKNGRVCCSVDFECLQNN

SEQ ID NO: 776304 - protein, 763 aa, Homo sapiens [sequence omitted]

SEQ ID NO: 776305 - protein, 555 aa, Homo sapiens
MPMDLILVVWFCVCTARTVVGFGMDPDLQMDIVTELDLVNTTLGVAQVSGMHNASKAFLFQDIEREIHAAPHVSEKLIQLFQNKSEFTILATVQQKPSTSGVILSIRELEHSYFELESSGLRDEIRYHYIHNGKPRTEALPYRMADGQWHKVALSVSASHLLLHVDCNRIYERVIDPPDTNLPPGINLWLGQRNQKHGLFKGIIQDGKIIFMPNGYITQCPNLNHTCPTCSDFLSLVQGIMDLQELLAKMTAKLNYAETRLSQLENCHCEKTCQVSGLLYRDQDSWVDGDHCRNCTCKSGAVECRRMSCPPLNCSPDSLPVHIAGQCCKVCRPKCIYGGKVLAEGQRILTKSCRECRGGVLVKITEMCPPLNCSEKDHILPENQCCRVCRGHNFCAEGPKCGENSECKNWNTKATCECKSGYISVQGDSAYCEDIDECAAKMHYCHANTVCVNLPGLYRCDCVPGYIRVDDFSCTEHDECGSGQHNCDENAICTNTVQGHSCTCKPGYVGNGTICRAFCEEGCRYGGTCVAPNKCVCPSGFTGSHCEKVVRMLAP

SEQ ID NO: 776306 - protein, 311 aa, Homo sapiens
MERRRLLGGMALLLLQALPSPLSARAEPPQVRKPVWVPCNQSYICDFRTLLWTVSVLQRTTMNSGGSGWMWMPLPPQGPQCCGGAKVGSVTHASYPNSISLSLQGQISTYLLGQRDVFEKPPGYRRLGLCPEDDILCVTGYQAWCTDTEPYQKAERDTPFRDRGGHVIGTHDLEQRRKAQYVLRTVYRCCPCHCHAYSHASKTRDRARMRKDTDADQVINEEPAGRYRQTTSTPRGTPSTRRKQDPTHDRLTMPRERYRDARAEATHKRTNRTRAETEAREAREGIAATHYGPTKTPETQPDKHSANNYTT

SEQ ID NO: 776307 - protein, 879 aa, Homo sapiens
MRLHLLLLLALCGAGTTAAELSYSLRGNWSICNGNGSLELPGAVPGCVHSALFQQGLIQDSYYRFNDLNYRWVSLDNWTYSKEFKIPFEISKWQKVNLILEGVDTVSKILFNEVTIGETDNMFNRYSFDITNVVRDVNSIELRFQSAVLYAAQQSKAHTRYQVPPDCPPLVQKGECHVNFVRKEQCSFSWDWGPSFPTQGIWKDVRIEAYNICHLNYFTFSPIYDKSAQEWNLEIESTFDVVSSKPVGGQVIVAIPKLQTQQTYSIELQPGKRIVELFVNISKNITVETWWPHGHGNQTGYNMTVLFELDGGLNIEKSAKVYFRTVELIEEPIKGSPGLSFYFKINGFPIFLKGSNWIPADSFQDRVTSELLRLLLQSVVDANMNTLRVWGGGIYEQDEFYELCDELGIMVWQDFMFACALYPTDQGFLDSVTAEVAYQIKRLKSHPSIIIWSGNNENEEALMMNWYHISFTDRPIYIKDYVTLYVKNIRELVLAGDKSRPFITSSPTNGAETVAEAWVSQNPNSNYFGDVHFYDYISDCWNWKVFPKARFASEYGYQSWPSFSTLEKVSSTEDWSFNSKFSLHRQHHEGGNKQMLYQAGLHFKLPQSTDPLRTFKDTIYLTQVMQAQCVKTETEFYRRSRSEIVDQQGHTMGALYWQLNDIWQAPSWASLEYGGKWKMLHYFAQNFFAPLLPVGFENENTFYIYGVSDLHSDYSMTLSVRVHTWSSLEPVCSRVTERFVMKGGEAVCLYEEPVSELLRRCGNCTRESCVVSFYLSADHELLSPTNYHFLSSPKEAVGLCKAQITAIISQQGDIFVFDLETSAVAPFVWLDVGSIPGRFSDNGFLMTEKTRTILFYPWEPTSKNELEQSFHVTSLTDIY

SEQ ID NO: 776308 - protein, 842 aa, Homo sapiens
WLPGRVRTIAGSPGKWAQAPPEDSYYRFNDLNYRWVSLDNWTYSKEFKIPFEISKWQKVNLILEGVDTVSKILFNEVTIGETDNMFNRYSFDITNVVRDVNSIELRFQSAVLYAAQQSKAHTRYQVPPDCPPLVQKGECHVNFVRKEQCSFSWDWGPSFPTQGIWKDVRIEAYNICHLNYFTFSPIYDKSAQEWNLEIESTFDVVSSKPVGGQVIVAIPKLQTQQTYSIELQPGKRIVELFVNISKNITVETWWPHGHGNQTGYNMTVLFELDGGLNIEKSAKVYFRTVELIEEPIKGSPGLSFYFKINGFPIFLKGSNWIPADSFQDRVTSELLRLLLQSVVDANMNTLRVWGGGIYEQDEFYELCDELGIMVWQDFMFACALYPTDQGFLDSVTAEVAYQIKRLKSHPSIIIWSGNNENEEALMMNWYHISFTDRPIYIKDYVTLYVKNIRELVLAGDKSRPFITSSPTNGAETVAEAWVSQNPNSNYFGDVHFYDYISDCWNWKVFPKARFASEYGYQSWPSFSTLEKVSSTEDWSFNSKFSLHRQHHEGGNKQMLYQAGLHFKLPQSTDPLRTFKDTIYLTQVMQAQCVKTETEFYRRSRSEIVDQQGHTMGALYWQLNDIWQAPSWASLEYGGKWKMLHYFAQNFFAPLLPVGFENENTFYIYGVSDLHSDYSMTLSVRVHTWSSLEPVCSRVTERFVMKGGEAVCLYEEPVSELLRRCGNCTRESCVVSFYLSADHELLSPTNYHFLSSPKEAVGLCKAQITAIISQQGDIFVFDLETSAVAPFVWLDVGSIPGRFSDNGFLMTEKTRTILFYPWEPTSKNELEQSFHVTSLTDIY

SEQ ID NO: 776309 - protein, 783 aa, Homo sapiens
MRLHLLLLLALCGAGTTAAELSYSLRGNWSICNGNGSLELPGAVPGCVHSALFQQGLIQDSYYRFNDLNYRWVSLDNWTYSKEFKIPFEISKWQKVNLILEGVDTVSKILFNEVTIGETDNMFNRYSFDITNVVRDVNSIELRFQSAVLYAAQQSKAHTRYQVPPDCPPLVQKGECHVNFVRKEQCSFSWDWGPSFPTQGIWKDVRIEAYNICHLNYFTFSPIYDKSAQEWNLEIESTFDVVSSKPVGGQVIVAIPKLQTQQTYSIELQPGKRIVELFVNISKNITVETWWPHGHGNQTGYNMTVLFELDGGLNIEKSAKVYFRTVELIEEPIKGSPGLSFYFKINGFPIFLKGSNWIPADSFQDRVTSELLRLLLQSVVDANMNTLRVWGGGIYEQDEFYELCDELGIMVWQDFMFACALYPTDQGFLDSVTAEVAYQIKRLKSHPSIIIWSGNNENEEALMMNWYHISFTDRPIYIKDYVTLYVKNIRELVLAGDKSRPFITSSPTNGAETVAEAWVSQNPNSNYFGDVHFYDYISDCWNWKVFPKARFASEYGYQSWPSFSTLEKVSSTEDWSFNSKFSLHRQHHEGGNKQMLYQAGLHFKLPQSTDPLRTFKDTIYLTQVRVHTWSSLEPVCSRVTERFVMKGGEAVCLYEEPVSELLRRCGNCTRESCVVSFYLSADHELLSPTNYHFLSSPKEAVGLCKAQITAIISQQGDIFVFDLETSAVAPFVWLDVGSIPGRFSDNGFLMTEKTRTILFYPWEPTSKNELEQSFHVTSLTDIY

SEQ ID NO: 776310 - protein, 309 aa, Homo sapiens
MRLHLLLLLALCGAGTTAAELSYSLRGNWSICNGNGSLELPGAVPGCVHSALFQQGLIQDSYYRFNDLNYRWVSLDNWTYSKEFKIPFEISKWQKVNLILEGVDTVSKILFNEVTIGETDNMFNRYSFDITNVVRDVNSIELRFQSAVLYAAQQSKAHTRYQVPPDCPPLVQKGECHVNFVRKEQCSFSWDWGPSFPTQGIWKDVRIEAYNICHLNYFTFSPIYDKSAQEWNLEIESTFDVVSSKPVGGQVIVAIPKLQTQQTYSIEPDSLPASYPVQWTQVTGLTLRAYMGASLLVVLVEYTFLHRRR

SEQ ID NO: 776311 - protein, 76 aa, Homo sapiens
SFDITNVVRDVNSIELRFQSAVLYAAQQSKAHTRYQVPPDCPPLVQKGECHVNFVRKVMVSQTGRVLFLRTGCAGI

SEQ ID NO: 776312 - protein, 166 aa, Homo sapiens
MLHYFAQNFFAPLLPVGFENENTFYIYGVSDLHSDYSMTLSVRVHTWSSLEPVCSRVTERFVMKGGEAVCLYEEPVSELLRRCGNCTRESCVVSFYLSADHELLSPTNYHFLSSPKEAVGLCKAQITVSTGHGGGQGTVALWGSPALGPAPCILRFACVPLGAEFT

SEQ ID NO: 776313 - protein, 844 aa, Homo sapiens
MRLHLLLLLALCGAGTTAAELSYSLRGNWSICNGNGSLELPGAVPGCVHSALFQQGLIQDSYYRFNDLNYRWVSLDNWTYSKEFKIPFEISKWQKVNLILEGVDTVSKILFNEVTIGETDNMFNRYSFDITNVVRDVNSIELRFQSAVLYAAQQSKAHTRYQVPPDCPPLVQKGECHVNFVRKEQCSFSWDWGPSFPTQGIWKDVRIEAYNICHLNYFTFSPIYDKSAQEWNLEIESTFDVVSSKPVGGQVIVAIPKLQTQQTYSIELQPGKRIVELFVNISKNITVETWWPHGHGNQTGYNMTVLFELDGGLNIEKSAKVYFRTVELIEEPIKGSPGLSFYFKINGFPIFLKGSNWIPADSFQDRVTSELLRLLLQSVVDANMNTLRVWGGGIYEQDEFYELCDELGIMVWQDFMFACALYPTDQGFLDSVTAEVAYQIKRLKSHPSIIIWSGNNENEEALMMNWYHISFTDRPIYIKDYVTLYVKNIRELVLAGDKSRPFITSSPTNGAETVAEAWVSQNPNSNYFGDVHFYDYISDCWNWKVFPKARFASEYGYQSWPSFSTLEKVSSTEDWSFNSKFSLHRQHHEGGNKQMLYQAGLHFKLPQSTDPLRTFKDTIYLTQVMQAQCVKTETEFYRRSRSEIVDQQGHTMGALYWQLNDIWQAPSWASLEYGGKWKMLHYFAQNFFAPLLPVGFENENTFYIYGVSDLHSDYSMTLSVRVHTWSSLEPVCSRVTERFVMKGGEAVCLYEEPVSELLRRCGNCTRESCVVSFYLSADHELLSPTNYHFLSSPKEAVGLCKAQITVSTGHGGGQGTVALWGSPALGPAPCILRFACVPLGAEFT

SEQ ID NO: 776314 - protein, 225 aa, Homo sapiens
MRLHLLLLLALCGAGTTAAELSYSLRGNWSICNGNGSLELPGAVPGCVHSALFQQGLIQDSYYRFNDLNYRWVSLDNWTYSKEFKIPFEISKWQKVNLILEGVDTVSKILFNEVTIGETDNMFNRYSFDITNVVRDVNSIELRFQSAVLYAAQQSKAHTRYQVPPDCPPLVQKGECHVNFVRKEQCSFSWDWGPSFPTQGIWKDVRIEAYNICHLNYFTFSPIYE

SEQ ID NO: 776315 - protein, 138 aa, Homo sapiens
SLQTEAQVASDLPKSTRLWEVEQGFKGGPEATQPGWVSKAIFFSSLLHPFIVESKPAPQELPFIPSLSPLCSSSSRLPHAPPTLKFPATPRPVPACLCRLSVLGAGEQVLSPLCCPQKSQNILAPPSLGPKPFRVPSF

SEQ ID NO: 776316 - protein, 75 aa, Homo sapiens
QRLGQDSLTPEQVAWRKLQEEYYEEKRRKEEQIGLHGSRPLQDMMGMGGMMVRGPPPPYHSKPGDQWPPGRWCAA

SEQ ID NO: 776317 - protein, 114 aa, Homo sapiens
NIKKSGLFGSWFCTFVQSLTVPTLTCPLPRGLSEPFRNAAAVIRNFENLPRALEGVSRPGRFLVTAKGEQQGGEGNLIPQRQTELSLKTLAQHFPAGDDPGQVSRLPVLQFSLL

SEQ ID NO: 776318 - protein, 114 aa, Homo sapiens
RGPSSGAERVWLKPQVCGRLLGLRELRLPGGSRASSFARGFEAASPEIRSFWGRTAAVGIWFTQIRQPPSAWAHSVSGAQKAASSGSFLSTAVQPPGSGEPGFAGSALTPVCGG

SEQ ID NO: 776319 - protein, 88 aa, Homo sapiens
TGNGIANLVAARAGYSGLAQDSGRPHIPLVLLPRALASREKSWDHVEYGEYPFLFEKLLLGHRERWGGQRLGPWEVPGSDLFGLAVEG

SEQ ID NO: 776320 - protein, 351 aa, Homo sapiens
LGSCGAPGVAMNIVVEFFVVTFKVLWAFVLAAARWLVRPKEKSVAGQVCLITGAGSGLGRLFALEFARRRALLVLWDINTQSNEETAGMVRHIYRDLEAADAAALQAGNGEEEILPHCNLQVFTYTCDVGKRENVYLTAERVRKEVGEVSVLVNNAGVVSGHHLLECPDELIERTMMVNCHAHFWTTKAFLPTMLEINHGHIVTVASSLGLFSTAGVEDYCASKFGVVGFHESLSHELKAAEKDGIKTTLVCPYLVDTGMFRGCRIRKEIEPFLPPLKPDYCVKQAMKAILTDQPMICTPRLMYIVTFMKSILPFEAVVCMYRFLGADKCMYPFIAQRKQATNNNEAKNGI

SEQ ID NO: 776321 - protein, 333 aa, Homo sapiens
LGSCGAPGVAMNIVVEFFVVTFKVLWAFVLAAARWLVRPKEKSVAGQVCLITGAGSGLGRLFALEFARRRALLVLWDINTQSNEETAGMVRHIYRDLEAADAAALQAGNGEEEILPHCNLQVFTYTCDVGKRENVYLTAERVRKEVGEVSVLVNNAGVVSGHHLLECPDELIERTMMVNCHAHFWTTKAFLPTMLEINHGHIVTVASSLGLFSTAGVEDYCASKFGVVGFHESLSHELKAAEKDGIKTTKEIEPFLPPLKPDYCVKQAMKAILTDQPMICTPRLMYIVTFMKSILPFEAVVCMYRFLGADKCMYPFIAQRKQATNNNEAKNGI

SEQ ID NO: 776322 - protein, 351 aa, Homo sapiens; identical to SEQ ID NO: 776320

SEQ ID NO: 776323 - protein, 351 aa, Homo sapiens; identical to SEQ ID NO: 776320

SEQ ID NO: 776324 - protein, 351 aa, Homo sapiens; identical to SEQ ID NO: 776320

SEQ ID NO: 776325 - protein, 351 aa, Homo sapiens; identical to SEQ ID NO: 776320

SEQ ID NO: 776326 - protein, 263 aa, Homo sapiens
LGSCGAPGVAMNIVVEFFVVTFKVLWAFVLAAARWLVRPKEKSVAGQVCLITGAGSGLGRLFALEFARRRALLVLWDINTQSNEETAGMVRHIYRDLEAADAAALQAGNGEEEILPHCNLQVFTYTCDVGKRENVYLTAERVRKEVGEVSVLVNNAGVVSGHHLLECPDELIERTMMVNCHAHFWTTKAFLPTMLEINHGHIVTVASSLGLFSTAGVEDYCASKFGVVGFHESLSHELPADAIGWESILPLVALIFDDTGSVQ

SEQ ID NO: 776327 - protein, 75 aa, Homo sapiens
GSLCGAPLQGLGCSIPSASAVPFVPLEPLAGPCIDKPSDQKWGLTARGLSGGSRATRAGGGSYAEDYDSDATRTY

SEQ ID NO: 776328 - protein, 419 aa, Homo sapiens
DSLVWQVVSQTVHALKFCLALLKSKRKVKGRNKNKKKDYIDFKIMQKLQLCVYIYLFMLIVAGPVDLNENSEQKENVEKEGLCNACTWRQNTKSSRIEAIKIQILSKLRLETAPNISKDVIRQLLPKAPPLRELIDQYDVQRDDSSDGSLEDDDYHATTETIITMPTESDFLMQVDGKPKCCFFKFSSKIQYNKVVKAQLWIYLRPVETPTTVFVQILRLIKPMKDGTRYTGIRSLKLDMNPGTGIWQSIDVKTVLQNWLKQPESNLGIEIKALDENGHDLAVTFPGPGEDGLNPFLEVKVTDTPKRSRRDFGLDCDEHSTESRCCRYPLTVDFEAFGWDWIIAPKRYKANYCSGECEFVFLQKYPHTHLVHQANPRGSAGPCCTPTKMSPINMLYFNGKEQIIYGKIPAMVVDRCGCS

SEQ ID NO: 776329 - protein, 610 aa, Homo sapiens
GCKRGGRRPPPAAMGLKAAQKTLFPLRSIDDVVRLFAAELGREEPDLVLLSLVLGFVEHFLAVNRVIPTNVPELTFQPSPAPDPPGGLTYFPVADLSIIAALYARFTAQIRGAVDLSLYPREGGVSSRELVKKVSDVIWNSLSRSYFKDRAHIQSLFSFITGTKLDSSGVAFAVVGACQALGLRDVHLALSEDHAWVVFGPNGEQTAEVTWHGKGNEDRRGQTVNAGVAERSWLYLKGSYMRCDRKMEVAFMVCAINPSIDLHTDSLELLQLQQKLLWLLYDLGHLERYPMALGNLADLEELEPTPGRPDPLTLYHKGIASAKTYYRDEHIYPYMYLAGYHCRNRNVREALQAWADTATVIQDYNYCREDEEIYKEFFEVANDVIPNLLKEAASLLEAGEERPGEQSQAPRAKVPPSRTLSASPTCCDFYDGICKWEEGSPTPVLHVGWATFLVQSLGRFEGQVRQKVRIVSREAEAAEAEEPWGEEAREGRRRGPRRESKPEEPPPPKKPALDKGLGTGQVQCQDPPGSLLGLSLAQPEALKVAARLRCQQPQASPPAEGPVLTFQSEKLKGMKELMVATKITRAPFKACSHGTVAVADEEAESVHPSG

SEQ ID NO: 776330 - protein, 386 aa, Homo sapiens
MISSPPKSWLYLKGSYMRCDRKMEVAFMVCAINPSIDLHTDSLELLQLQQKLLWLLYDLGHLERYPMALGNLADLEELEPTPGRPDPLTLYHKGIASAKTYYRDEHIYPYMYLAGYHCRNRNVREALQAWADTATVIQDYNYCREDEEIYKEFFEVANDVIPNLLKEAASLLEAGEERPGEQSQAPRAKVPPSRTLSASPTCCDFYDGICKWEEGSPTPVLHVGWATFLVQSLGRFEGQVRQKVRIVSREAEAAEAEEPWGEEAREGRRRGPRRESKPEEPPPPKKPALDKGLGTGQVQCQDPPGSLLGLSLAQPEALKVAARLRCQQPQASPPAEGPVLTFQSEKLKGMKELMVATKITRAPFKACSHGTVAVADEEAESVHPSG

SEQ ID NO: 776331 - protein, 555 aa, Homo sapiens
MGDRGQDSSLGFGGLTWVRFWTDFTAPDPPGGLTYFPVADLSIIAALYARFTAQIRGAVDLSLYPREGGVSSRELVKKVSDVIWNSLSRSYFKDRAHIQSLFSFITGTKLDSSGVAFAVVGACQALGLRDVHLALSEDHAWVVFGPNGEQTAEVTWHGKGNEDRRGQTVNAGVAERSWLYLKGSYMRCDRKMEVAFMVCAINPSIDLHTDSLELLQLQQKLLWLLYDLGHLERYPMALGNLADLEELEPTPGRPDPLTLYHKGIASAKTYYRDEHIYPYMYLAGYHCRNRNVREALQAWADTATVIQDYNYCREDEEIYKEFFEVANDVIPNLLKEAASLLEAGEERPGEQSQAPRAKVPPSRTLSASPTCCDFYDGICKWEEGSPTPVLHVGWATFLVQSLGRFEGQVRQKVRIVSREAEAAEAEEPWGEEAREGRRRGPRRESKPEEPPPPKKPALDKGLGTGQVQCQDPPGSLLGLSLAQPEALKVAARLRCQQPQASPPAEGPVLTFQSEKLKGMKELMVATKITRAPFKACSHGTVAVADEEAESVHPSG

SEQ ID NO: 776332 - protein, 575 aa, Homo sapiens
GCKRGGRRPPPAAMGLKAAQKTLFPLRSIDDVVRLFAAELGREEPDLVLLSLVLGFVEHFLAVNRVIPTNVPELTFQPSPAPDPPGGLTYFPVADLSIIAALYARFTAQIRGAVDLSLYPREGGVSSRELVKKVSDVIWNSLSRSYFKDRAHIQSLFSFITGTKLDSSGVAFAVVGACQALGLRDVHLALSEDHAWSWLYLKGSYMRCDRKMEVAFMVCAINPSIDLHTDSLELLQLQQKLLWLLYDLGHLERYPMALGNLADLEELEPTPGRPDPLTLYHKGIASAKTYYRDEHIYPYMYLAGYHCRNRNVREALQAWADTATVIQDYNYCREDEEIYKEFFEVANDVIPNLLKEAASLLEAGEERPGEQSQAPRAKVSALQDPECFAHLLRFYDGICKWEEGSPTPVLHVGWATFLVQSLGRFEGQVRQKVRIVSREAEAAEAEEPWGEEAREGRRRGPRRESKPEEPPPPKKPALDKGLGTGQVQCQDPPGSLLGLSLAQPEALKVAARLRCQQPQASPPAEGPVLTFQSEKLKGMKELMVATKITRAPFKACSHGTVAVADEEAESVHPSG

SEQ ID NO: 776333 - protein, 124 aa, Homo sapiens
MAVGLCKAMSQGLVTFRDVALDFSQEEWEWLKPSQKDLYRDVMLENYRNLVWLGLSISKPNMISLLEQGKEPWMVERKMSQGHCAGSHSVAQAGVQWHDLGSLQPIPTELKQSSHLSMHTTAPG

SEQ ID NO: 776334 - protein, 609 aa, Homo sapiens
MAVGLCKAMSQGLVTFRDVALDFSQEEWEWLKPSQKDLYRDVMLENYRNLVWLGLSISKPNMISLLEQGKEPWMVERKMSQGHCADWESWCEIEELSPKWFIDEDEISQEMVMERLASHGLECSSFREAWKYKGEFELHQGNAERHFMQVTAVKEISTGKRDNEFSNSGRSIPLKSVFLTQQKVPTIQQVHKFDIYDKLFPQNSVIIEYKRLHAEKESLIGNECEEFNQSTYLSKDIGIPPGEKPYESHDFSKLLSFHSLFTQHQTTHFGKLPHGYDECGDAFSCYSFFTQPQRIHSGEKPYACNDCGKAFSHDFFLSEHQRTHIGEKPYECKECNKAFRQSAHLAQHQRIHTGEKPFACNECGKAFSRYAFLVEHQRIHTGEKPYECKECNKAFRQSAHLNQHQRIHTGEKPYECNQCGKAFSRRIALTLHQRIHTGEKPFKCSECGKTFGYRSHLNQHQRIHTGEKPYECIKCGKFFRTDSQLNRHHRIHTGERPFECSKCGKAFSDALVLIHHKRSHAGEKPYECNKCGKAFSCGSYLNQHQRIHTGEKPYECSECGKAFHQILSLRLHQRIHAGEKPYKCNECGNNFSCVSALRRHQRIHNRETL

SEQ ID NO: 776335 - protein, 95 aa, Homo sapiens
PFSDVHFVSTLEPLSNAVKRNVPRCIIILVLQEPAPFRISVTSSCFVQNTLTKLLKDDEFLSFVGTRMKMETIILSKLSQGQKNKHCMFSLIGGN

SEQ ID NO: 776336 - protein, 192 aa, Homo sapiens
FKISDALIKRVQVSQEQWVKGALEPKVSAEFDLTLDSEPLLQAIHQLDFIQMKCRVPPVPLLQLEKCCTRNNSVTLAWRMPPFTHSPVDGYILELDDGAGGQFREVYVGKETLCTIDGLHFNSTYNARVKAFNSSGVGPYSKTVVLQTSDVAWFTFDPNSGHRDIILSNDNQTATCSSYDDRVVLGTAAFSK

SEQ ID NO: 776337 - protein, 36 aa, Homo sapiens
DTLQDEINHHTSTPCHPGAHTHLLTPRLISTKGDNK

SEQ ID NO: 776338 - protein, 67 aa, Homo sapiens
MGSVCGSCCPWLAHSAGGLCGLSSVATRTQGLWVSGLVPTLPLGRLPGWRPCSRVLGPLDAKCWPEQ

SEQ ID NO: 776339 - protein, 41 aa, Homo sapiens
TPMGIQYSSSSISKQHFHNVMELTFKTRRLGVFESICSLTP

SEQ ID NO: 776340 - protein, 48 aa, Homo sapiens
AVFSNDSHIKLGDGIHPKDKRANQERGRHQIEEIRIPTMERSEKKKIL

SEQ ID NO: 776341 - protein, 551 aa, Homo sapiens
MADGVDHIDIYADVGEEFNQEAEYGGHDQIDLYDDVISPSANNGDAPEDRDYMDTLPPTVGDDVGKGAAPNVVYTYTGKRIALYIGNLTWWTTDEDLTEAVHSLGVNDILEIKFFENRANGQSKGFALVGVGSEASSKKLMDLLPKRELHGQNPVVTPCNKQFLSQFEMQSRKTTQSGQMSGEGKAGPPGGSSRAAFPQGGRGRGRFPGAVPGGDRFPGPAGPGGPPPPFPAGQTPPRPPLGPPGPPGPPGPPPPGQVLPPPLAGPPNRGDRPPPPVLFPGQPFGQPPLGPLPPGPPPPVPGYGPPPGPPPPQQGPPPPPGPFPPRPPGPLGPPLTLAPPPHLPGPPPGAPPPAPHVNPAFFPPPTNSGMPTSDSRGPPPTDPYGRPPPYDRGDYGPPGREMDTARTPLSEAEFEEIMNRNRAISSSAISRAVSDASAGDYGSAIETLVTAISLIKQSKVSADDRCKVLISSLQDCLHGIESKSYGSGSRRERSRERDHSRSREKSRRHKSRSRDRHDDYYRERSRERERHRDRDRDRDRERDREREYRHR

SEQ ID NO: 776342 - protein, 588 aa, Homo sapiens
MADGVDHIDIYADVGEEFNQEAEYGGHDQIDLYDDVISPSANNGDAPEDRDYMDTLPPTVGDDVGKGAAPNVVYTYTGKRIALYIGNLTWWTTDEDLTEAVHSLGVNDILEIKFFENRANGQSKGFALVGVGSEASSKKLMDLLPKRELHGQNPVVTPCNKQFLSQFEMQSRKTTQSGQMSGEGKAGPPGGSSRAAFPQGGRGRGRFPGAVPGGDRFPGPAGPGGPPPPFPGNLIKHLVKGTRPLFLETRIPWHMGHSIEEIPIFGLKAGQTPPRPPLGPPGPPGPPGPPPPGQVLPPPLAGPPNRGDRPPPPVLFPGQPFGQPPLGPLPPGPPPPVPGYGPPPGPPPPQQGPPPPPGPFPPRPPGPLGPPLTLAPPPHLPGPPPGAPPPAPHVNPAFFPPPTNSGMPTSDSRGPPPTDPYGRPPPYDRGDYGPPGREMDTARTPLSEAEFEEIMNRNRAISSSAISRAVSDASAGDYGSAIETLVTAISLIKQSKVSADDRCKVLISSLQDCLHGIESKSYGSGSRRERSRERDHSRSREKSRRHKSRSRDRHDDYYRERSRERERHRDRDRDRDRERDREREYRHR

SEQ ID NO: 776343 - protein, 478 aa, Homo sapiens
MADGVDHIDIYADVGEEFNQEAEYGGHDQIDLYDDVISPSANNGDAPEDRDYMDTLPPTVGDDVGKGAAPNVVYTYTGKRIALYIGNLTWWTTDEDLTEAVHSLGVNDILEIKFFENRANGQSKGFALVGVGSEASSKKLMDLLPKRELHGQNPVVTPCNKQFLSQFEMQSRKTTQSGQMSGEGKAGPPLAGPPNRGDRPPPPVLFPGQPFGQPPLGPLPPGPPPPVPGYGPPPGPPPPQQGPPPPPGPFPPRPPGPLGPPLTLAPPPHLPGPPPGAPPPAPHVNPAFFPPPTNSGMPTSDSRGPPPTDPYGRPPPYDRGDYGPPGREMDTARTPLSEAEFEEIMNRNRAISSSAISRAVSDASAGDYGSAIETLVTAISLIKQSKVSADDRCKVLISSLQDCLHGIESKSYGSGSRRERSRERDHSRSREKSRRHKSRSRDRHDDYYRERSRERERHRDRDRDRDRERDREREYRHR

SEQ ID NO: 776344 - protein, 79 aa, Homo sapiens
RRWIRCCCRGGRTCRRRRRRRRPRLKEDGGRRGPHRHLRGCRRRVQPDYRERSRERERHRDRDRDRDRERDREREYRHR

SEQ ID NO: 776345 - protein, 79 aa, Homo sapiens; identical to SEQ ID NO: 776344

SEQ ID NO: 776346 - protein, 551 aa, Homo sapiens; identical to SEQ ID NO: 776341

SEQ ID NO: 776347 - protein, 551 aa, Homo sapiens; identical to SEQ ID NO: 776341

SEQ ID NO: 776348 - protein, 535 aa, Homo sapiens
MADGVDHIDIYADVGEEFNQEAEYGGHDQIDLYDDVISPSANNGDAPEDRDYMDTLPPTVGDDVGKGAAPNVVYTYTGKRIALYIGNLTWWTTDEDLTEAVHSLGVNDILEIKFFENRANGQSKGFALVGVGSEASSKKLMDLLPKRELHGQNPVVTPCNKQFLSQFEMQSRKTTQSGQMSGEGKAGPPGGSSRAAFPQGGRGRGRFPGAVPGGDRFPGPAGPGGPPPPFPAGQTPPRPPLGPPGPPGPPGPPPPGQVLPPPLAGPPNRGDRPPPPVLFPGQPFGQPPLGPLPPGPPPPVPGYGPPPGPPPPQQGPPPPPGPFPPRPPGPLGPPLTLAPPPHLPGPPPGAPPPAPHVNPAFFPPPTNSGMPTSDSRGPPPTDPYGRPPPYDRGDYGPPGREMDTARTPLSEAEFEEIMNRNRAISSSAISRAVSDASAGDYGSAIETLVTAISLIKQSKVSADDRCKVLISSLQDCLHGIESKSYGSGSRRERSRERDHSRSRDYRERSRERERHRDRDRDRDRERDREREYRHR

SEQ ID NO: 776349 - protein, 588 aa, Homo sapiens; identical to SEQ ID NO: 776342

SEQ ID NO: 776350 - protein, 499 aa, Homo sapiens
MDTLPPTVGDDVGKGAAPNVVYTYTGKRIALYIGNLTWWTTDEDLTEAVHSLGVNDILEIKFFENRANGQSKGFALVGVGSEASSKKLMDLLPKRELHGQNPVVTPCNKQFLSQFEMQSRKTTQSGQMSGEGKAGPPGGSSRAAFPQGGRGRGRFPGAVPGGDRFPGPAGPGGPPPPFPAGQTPPRPPLGPPGPPGPPGPPPPGQVLPPPLAGPPNRGDRPPPPVLFPGQPFGQPPLGPLPPGPPPPVPGYGPPPGPPPPQQGPPPPPGPFPPRPPGPLGPPLTLAPPPHLPGPPPGAPPPAPHVNPAFFPPPTNSGMPTSDSRGPPPTDPYGRPPPYDRGDYGPPGREMDTARTPLSEAEFEEIMNRNRAISSSAISRAVSDASAGDYGSAIETLVTAISLIKQSKVSADDRCKVLISSLQDCLHGIESKSYGSGSRRERSRERDHSRSREKSRRHKSRSRDRHDDYYRERSRERERHRDRDRDRDRERDREREYRHR

SEQ ID NO: 776351 - protein, 478 aa, Homo sapiens; identical to SEQ ID NO: 776343

SEQ ID NO: 776352 - protein, 402 aa, Homo sapiens
MADGVDHIDIYADVGEEFNQEAEYGGHDQIDLYDDVISPSANNGDAPEDRDYMDTLPPTVGDDVGKGAAPNVVYTYTGKRIALYIGNLTWWTTDEDLTEAVHSLGVNDILEIKFFENRANGQSKGFALVGVGSEASSKKLMDLLPKRELHGQNPVVTPCNKQFLSQFEMQSRKIPPRPPGPLGPPLTLAPPPHLPGPPPGAPPPAPHVNPAFFPPPTNSGMPTSDSRGPPPTDPYGRPPPYDRGDYGPPGREMDTARTPLSEAEFEEIMNRNRAISSSAISRAVSDASAGDYGSAIETLVTAISLIKQSKVSADDRCKVLISSLQDCLHGIESKSYGSGSRRERSRERDHSRSREKSRRHKSRSRDRHDDYYRERSRERERHRDRDRDRDRERDREREYRHR

SEQ ID NO: 776353 - protein, 182 aa, Homo sapiens
MPTSDSRGPPPTDPYGRPPPYDRGDYGPPGREMDTARTPLSEAEFEEIMNRNRAISSSAISRAVSDASAGDYGSAIETLVTAISLIKQSKVSADDRCKVLISSLQDCLHGIESKSYGSGSRRERSRERDHSRSREKSRRHKSRSRDRHDDYYRERSRERERHRDRDRDRDRERDREREYRHR

SEQ ID NO: 776354 - protein, 551 aa, Homo sapiens; identical to SEQ ID NO: 776341

SEQ ID NO: 776355 - protein, 551 aa, Homo sapiens; identical to SEQ ID NO: 776341

SEQ ID NO: 776356 - protein, 310 aa, Homo sapiens
MADGVDHIDIYADVGEEFNQEAEYGGHDQIDLYDDVISPSANNGDAPEDRDYMDTPPPVPGYGPPPGPPPPQQGPPPPPGPFPPRPPGPLGPPLTLAPPPHLPGPPPGAPPPAPHVNPAFFPPPTNSGMPTSDSRGPPPTDPYGRPPPYDRGDYGPPGREMDTARTPLSEAEFEEIMNRNRAISSSAISRAVSDASAGDYGSAIETLVTAISLIKQSKVSADDRCKVLISSLQDCLHGIESKSYGSGSRRERSRERDHSRSREKSRRHKSRSRDRHDDYYRERSRERERHRDRDRDRDRERDREREYRHR

SEQ ID NO: 776357 - protein, 329 aa, Homo sapiens
MTIHVQKRYKIYETCEKPSSQGQELSESLTSSKGNLHHKKYEQFLNSLLRLSVVQNLYHFFKPTNTSKCVETVRSAMYKSMSTISRVLAKPRLSKSTPCTVPPRPPGPLGPPLTLAPPPHLPGPPPGAPPPAPHVNPAFFPPPTNSGMPTSDSRGPPPTDPYGRPPPYDRGDYGPPGREMDTARTPLSEAEFEEIMNRNRAISSSAISRAVSDASAGDYGSAIETLVTAISLIKQSKVSADDRCKVLISSLQDCLHGIESKSYGSGSRRERSRERDHSRSREKSRRHKSRSRDRHDDYYRERSRERERHRDRDRDRDRERDREREYRHR

SEQ ID NO: 776358 - protein, 238 aa, Homo sapiens
SYLEDPRLGIPPRPPGPLGPPLTLAPPPHLPGPPPGAPPPAPHVNPAFFPPPTNSGMPTSDSRGPPPTDPYGRPPPYDRGDYGPPGREMDTARTPLSEAEFEEIMNRNRAISSSAISRAVSDASAGDYGSAIETLVTAISLIKQSKVSADDRCKVLISSLQDCLHGIESKSYGSGSRRERSRERDHSRSREKSRRHKSRSRDRHDDYYRERSRERERHRDRDRDRDRERDREREYRHR

SEQ ID NO: 776359 - protein, 132 aa, Homo sapiens
RNCSYQCLNSTPIITSTGIRHSSRNSTAGDCPISLIKQSKVSADDRCKVLISSLQDCLHGIESKSYGSGSRRERSRERDHSRSREKSRRHKSRSRDRHDDYYRERSRERERHRDRDRDRDRERDREREYRHR

SEQ ID NO: 776360 - protein, 182 aa, Homo sapiens; identical to SEQ ID NO: 776353

SEQ ID NO: 776361 - protein, 551 aa, Homo sapiens; identical to SEQ ID NO: 776341

SEQ ID NO: 776362 - protein, 79 aa, Homo sapiens; identical to SEQ ID NO: 776344

SEQ ID NO: 776363 - protein, 120 aa, Homo sapiens
AGWYWSGMLGWRAGVSDPQSSRTFGSSRCGCDPREGAGLVGLLQPVSVGWRWGLEPPRPAFGRCRRNPLAAALRREQGLGPSAGWELRSPECRFPSGAGAVACLCGPRILKENESGTLQK

SEQ ID NO: 776364 - protein, 1120 aa, Homo sapiens [sequence omitted]

SEQ ID NO: 776365 - protein, 903 aa, Homo sapiens
MVLNSLDKMIQLQKNTANIRNICVLAHVDHGKTTLADCLISSNGIISSRLAGKLRYMDSREDEQIRGITMKSSAISLHYATGNEEYLINLIDSPGHVDFSSEVSTAVRICDGCIIVVDAVEGVCPQTQAVLRQAWLENIRPVLVINKIDRLIVELKFTPQEAYSHLKNILEQINALTGTLFTSKVLEERAERETESQVNPNSEQGEQVYDWSTGLEDTDDSHLYFSPEQGNVVFTSAIDGWGFGIEHFARIYSQKIGIKKEVLMKTLWGDYYINMKAKKIMKGDQAKGKKPLFVQLILENIWSLYDAVLKKDKDKIDKIVTSLGLKIGAREARHSDPKVQINAICSQWLPISHAVLAMVCQKLPSPLDITAERVERLMCTGSQTFDSFPPETQALKAAFMKCGSEDTAPVIIFVSKMFAVDAKALPQNKPRPLTQEEIAQRRERARQRHAEKLAAAQGQAPLEPTQDGSAIETCPKGDEPRGDEQQVESMTPKPVLQEENNQESFIAFARVFSGVARRGKKIFVLGPKYSPLEFLRRVPLGFSAPPDGLPQVPHMAYCALENLYLLMGRELEYLEEVPPGNVLGIGGLQDFVLKSATLCSLPSCPPFIPLNFEATPIVRVAVEPKHPSEMPQLVKGMKLLNQADPCVQILIQETGEHVLVTAGEVHLQRCLDDLKERFAKIHISVSEPIIPFRETITKPPKVDMVNEEIGKQQKVAVIHQMKEDQSKIPEGIQVDSDGLITITTPNKLATLSVRAMPLPEEVTQILEENSDLIRSMEQLTSSLNEGENTHMIHQKTQEKIWEFKGKLEQHLTGRRWRNIVDQIWSFGPRKCGPNILVNKSEDFQNSVWTGPADKASKEASRYRDLGNSIVSGFQLATLSGPMCEEPLMGVCFVLEKWDLSKFV

SEQ ID NO: 776366 - protein, 713 aa, Homo sapiens
MVLNSLDKMIQLQKNTANIRNICVLAHVDHGKTTLADCLISSNGIISSRLAGKLRYMDSREDEQIRGITMKSSAISLHYATGNEEYLINLIDSPGHVDFSSEVSTAVRICDGCIIVVDAVEGVCPQTQAVLRQAWLENIRPVLVINKIDRLIVELKFTPQEAYSHLKNILEQINALTGTLFTSKVLEERAERETESQVNPNSEQGEQVYDWSTGLEDTDDSHLYFSPEQGNVVFTSAIDGWGFGIEHFARIYSQKIGIKKEVLMKTLWGDYYINMKAKKIMKGDQAKGKKPLFVQLILENIWSLYDAVLKKDKDKIDKIVTSLGLKIGAREARHSDPKVQINAICSQWLPISHAVLAMVCQKLPSPLDITAERVERLMCTGSQTFDSFPPETQALKAAFMKCGSEDTAPVIIFVSKMFAVDAKALPQNKPRPLTQEEIAQRRERARQRHAEKLAAAQGQAPLEPTQDGSAIETCPKGDEPRGDEQQVESMTPKPVLQEENNQESFIAFARVFSGVARRGKKIFVLGPKYSPLEFLRRVPLGFSAPPDGLPQVPHMAYCALENLYLLMGRELEYLEEVPPGNVLGIGGLQDFVLKSATLCSLPSCPPFIPLNFEATPIVRVAVEPKHPSEMPQLVKGMKLLNQADPCVQILIQETGEHVLVTAGEVHLQRCLDDLKERLGENDSDGEMIALNQWDVLVFPKPVELRLRLIFGEK

SEQ ID NO: 776367 - protein, 79 aa, Homo sapiens
  misc_feature (16)..(16): Xaa can be any naturally occurring amino acid
TELFKCETSIAQQREXLIIPSDPFWVPTTEEEYLHFGEKADSENQARKYMNAVRKRKGLYVEEKIVEHAEKQRTLSKNK

SEQ ID NO: 776368 - protein, 1120 aa, Homo sapiens [sequence omitted]

SEQ ID NO: 776369 - protein, 584 aa, Homo sapiens
MVPLGFSAPPDGLPQVPHMAYCALENLYLLMGRELEYLEEVPPGNVLGIGGLQDFVLKSATLCSLPSCPPFIPLNFEATPIVRVAVEPKHPSEMPQLVKGMKLLNQADPCVQILIQETGEHVLVTAGEVHLQRCLDDLKERFAKIHISVSEPIIPFRETITKPPKVDMVNEEIGKQQKVAVIHQMKEDQSKIPEGIQVDSDGLITITTPNKLATLSVRAMPLPEEVTQILEENSDLIRSMEQLTSSLNEGENTHMIHQKTQEKIWEFKGKLEQHLTGRRWRNIVDQIWSFGPRKCGPNILVNKSEDFQNSVWTGPADKASKEASRYRDLGNSIVSGFQLATLSGPMCEEPLMGVCFVLEKWDLSKFEEQGASDLAKEGQEENETCSGGNENQELQDGCSEAFEKRTSQKGESPLTDCYGPFSGQLIATMKEACRYALQVKPQRLMAAMYTCDIMATGDVLGRVYAVLSKREGRVLQEEMKEGTDMFIIKAVLPVAESFGFADEIRKRTSGLASPQLVFSHWEIIPSDPFWVPTTEEEYLHFGEKADSENQARKYMNAVRKRKGLYVEEKIVEHAEKQRTLSKNK

SEQ ID NO: 776370 - protein, 79 aa, Homo sapiens
RILNQQKPPNELTQKTLIIPSDPFWVPTTEEEYLHFGEKADSENQARKYMNAVRKRKGLYVEEKIVEHAEKQRTLSKNK

SEQ ID NO: 776371 - protein, 281 aa, Homo sapiens
SCRDLSSRNYVRKEGVHILTGLPSKSPSGPCTANSKTPVTSEIRSAWDCASVRPPNLKLQLLFDCSGLLPVCHSDLQPLSETLLLLLYCFGGSCSPQMNSVTSQATRHCELLCCCPSQNPVLERRAPCASCQVMGGSVPGQSPRGDGDLQNSNALCSYSLFFCSCSVAFIWFPFEFPAPISLQRLLMSQASEHIRSSQRLSPGEAAMHFTKQTSPWAAGPFGCHDNVGSLCRGVCCALILASQGPLPQLSFPDPFNRLPASWRHLHINCCSIWSSFVLISK

SEQ ID NO: 776372 - protein, 85 aa, Homo sapiens
GRRGIHHVHPGLGQVKHQPQQEVLKESSGPALSPCEDDWEDCTSVGEDLQTGLRGESSLQPFKAKTGQGERMKGGRWCPPHLSQV

SEQ ID NO: 776373 - protein, 94 aa, Homo sapiens
ERVRVTSPPPTCLPTVILKENCFMKDAEGSQTPPETFYRNNLSMPFLSGVLGPNTFILLIFLCQTKFQTHWNLHSMCGSNRHVCSTIPSCNSPV

SEQ ID NO: 776374 - protein, 414 aa, Homo sapiens
ACGGHQAGLGQPKMRARPLTANAQPPGTQDRPRVVGWALCQMTAGECLGARWPRLVQGPPCAPTVCWGRGHSRSGSHPLEAPSPARDQLGVAVGGQCCMGWPALRDAGAPLQGSMVHSTSAHGSYEEHKEGFLDKQCGKQPEYLTGGLRQLTPLRESQQRCTDKGTSDQQEQRKHALGQTAIQRLRVHYLTNPSGTQKKQHATRTHDQQPATRLQPSHWTPKVQMATTGEDTHRENTQTRINLTKRATRTADTQAGIPMEPEHAIRTRTLTWDGNRKCEPQLHGTSTTPTMAPPHRPIPKPTVHHTHRQQASAHCTASYQRRRQYHTSSPHESARSHTVSDPSPPPPVPAPTHTNLTLHYPLTSLLLLTCYTTINLAPCTLPQYNKTPPLPPSNISPTKYSNTLIHLIILPSIP

SEQ ID NO: 776375 - protein, 472 aa, Homo sapiens
MSSHGNSLFLRESGQRLGRVGWLQRLQESLQQRALRTRLRLQTMTLEHVLRFLRRNAFILLTVSAVVIGVSLAFALRPYQLTYRQIKYFSFPGELLMRMLQMLVLPLIVSSLVTGMASLDNKATGRMGMRAAVYYMVTTIIAVFIGILMVTIIHPGKGSKEGLHREGRIETIPTADAFMDLIRNMFPPNLVEACFKQFKTQYSTRVVTRTMVRTENGSEPGASMPPPFSVENGTSFLENVTRALGTLQEMLSFEETVPVPGSANGINALGLVVFSVAFGLVIGGMKHKGRVLRDFFDSLNEAIMRLVGIIIWYAPVGILFLIAGKILEMEDMAVLGGQLGMYTLTVIVGLFLHAGIVLPLIYFLVTHRNPFPFIGGMLQALITMVIVLTSVGLPTEDITLIIAVDWFLDRLRTMTNVLGDSIGAAVIEHLSQRELELQEAELTLPSLGKPYKSLMAQEKGASRGRGGNESAM

SEQ ID NO: 776376 - protein, 564 aa, Homo sapiens
MSSHGNSLFLRESGQRLGRVGWLQRLQESLQQRALRTRLRLQTMTLEHVLRFLRRNAFILLTVSAVVIGVSLAFALRPYQLTYRQIKYFSFPGELLMRMLQMLVLPLIVSSLVTGMASLDNKATGRMGMRAAVYYMVTTIIAVFIGILMVTIIHPGKGSKEGLHREGRIETIPTADAFMDLIRNMFPPNLVEACFKQFKTQYSTRVVTRTMVRTENGSEPGASMPPPFSVENGTSFLENVTRALGTLQEMLSFEETVPVPGSANGINALGLVVFSVAFGLVIGGMKHKGRVLRDFFDSLNEAIMRLVGIIIWYAPVGILFLIAGKILEMEDMAVLGGQLGMYTLTVIVGLFLHAGIVLPLIYFLVTHRNPFPFIGGMLQALITAMGTSSSSATLPITFRCLEEGLGVDRRITRFVLPVGATVNMDGTALYEALAAIFIAQVNNYELNLGQITTISITATAASVGAAGIPQAGLVTMVIVLTSVGLPTEDITLIIAVDWFLDRLRTMTNVLGDSIGAAVIEHLSQRELELQEAELTLPSLGKPYKSLMAQEKGASRGRGGNESAM

SEQ ID NO: 776377 - protein, 304 aa, Homo sapiens
ARSISSLTRFNFLSFNFLWGRPSHLPCLAEEARLREGEELAQGHTAAKWPRPEGAPARRRGQRSPLPGCCYWDTRAAPSPGLRRGCWSGSRGARACSPRSARDAGASEGSGGGLGGGGAEARLRAGGGGWMPERPLTPAHPQSPSLRKHAVPLLPHGCGAWAGRGGGGGHRGGDPAPSPGRSVPPHPRERRAGPDPSRSIARPGSAPVPPRSGPRAGAAQSLAGPRGPGRALRRAPAPASGRSAQAEARAGRPRRSGRRDVRGSEKQPTHLIRSKCLEVGRTKWERPTLTPHPVETGNTRRDIF

SEQ ID NO: 776378 - protein, 101 aa, Homo sapiens
CEGENCKASQGYASYGMIPGVKGIYSRGVMFRKDPLRTGMSLETSYQLKLHPWPAEYPLLPSITLRIHSPSLLGFFFFKLSDFPAPKLLPLQYLQNWGPRW

SEQ ID NO: 776379 - protein, 66 aa, Homo sapiens
TVMRVNTLNSLSERIPVRGSQCSIYALKCSIPMLEGNVLWFNSVNTYQLVRLVNLAVSNKYPNLTS

SEQ ID NO: 776380 - protein, 133 aa, Homo sapiens
  misc_feature (133)..(133): Xaa can be any naturally occurring amino acid
MSAPFGPVDFLQSLGGGEWGLLPALGAAAVQAPITSVKMDLESGNSEHGYGCRSAHDEGIGGQFNGGGPEPMGSGVGIGDLTRFLFIAQAPRLRDIGATHNSVQTQQRHNESRRAKTEDTHQLSSSSWRRLVX

SEQ ID NO: 776381 - protein, 104 aa, Homo sapiens
MAEGEGKQGTSSQGGRRIVKQRRKSPIKSLDLVRTHYHKNSMEETTPMHLVSLDTWVFVEITIEDEIWVGAQSLTTSVDVNQKVKSDTEDVEKREQTIQSWWGI

SEQ ID NO: 776382 - protein, 51 aa, Homo sapiens
PPPPAKPSLTSPLHTKLLDKAVHILHPYFVISHSLCNPLQLASVPGFEIGD

SEQ ID NO: 776383 - protein, 102 aa, Homo sapiens
LYLNHKGRCVLTLAQSKILSSLEDRGLSLYPSVHGTVLGTQSLFGEINLRKDRGAQELIPKAHNYSLECRATGEEQTAGHARLGRGHALRCFPFLPEIREVS

SEQ ID NO: 776384 - protein, 102 aa, Homo sapiens; identical to SEQ ID NO: 776383

SEQ ID NO: 776385 - protein, 113 aa, Homo sapiens
PSSPLCPPPLLSVCSWNTCLSFHALSSALPGEAGRCSGHHRDNLCGRLSCNLPQISIRILLFPTLSFKGKWASWVGKGWWVLPAQFSDAQGRYYPQFPRAIILFHTYRVSHVR

SEQ ID NO: 776386 - protein, 186 aa, Homo sapiens
MWATCAIVWSSWTTAFWAPSGAKFAGSPIIGELDIHRDTRQGLPPRLNEPTLTTALTPDTTAQQRPAATHPDATTTHRGPTTPTLEHHHTHARSKAAEETHGLIPHQMSAKEKTQHHLTDNPAQETSRSATSTRARDATAAGTPKADQKRDDEQPSKRRRRTNGNNKEERRRRARTPTTQTTAHQQ

SEQ ID NO: 776387 - protein, 119 aa, Homo sapiens
MSLPKKRAQTRERTDGAETCKTKGGFQQVGGPKKAGVQKNRLETTVQSKENLIRAQTKKEKRTAPRKTEKKTNPRTKRTTKPTEERGTKTQKDNGGARREDRRKEQEREEEAKKEESAK

SEQ ID NO: 776388 - protein, 105 aa, Homo sapiens
MTRVLTGTRRWQPRRKLPARARPARDSHISSQRMGVMRPCRPICPVLWGRGSCGTGQLQHSQLWHQLQVRNVRRDPAPSTSEGPWQTGGCRHLRVPSLPTRQCAW

SEQ ID NO: 776389 - protein, 201 aa, Homo sapiens [sequence omitted]

SEQ ID NO: 776390 - protein, 445 aa, Homo sapiens
RRRPGRDPGRALRSRPVACALTPAASPARGPSAAGPRLAGCGSGLKMDEDGGGEGGGVPEDLSLEEREELLDIRRRKKELIDDIERLKYEIAEVMTEIDNLTSVEESKTTQRNKQIAMGRKKFNMDPKKGIQFLIENDLLQSSPEDVAQFLYKGEGLNKTVIGDYLGERDEFNIKVLQAFVELHEFADLNLVQALRQFLWSFRLPGEAQKIDRMMEAFASRYCLCNPGVFQSTDTCYVLSFAIIMLNTSLHNHNVRDKPTAERFIAMNRGINEGGDLPEELLRNLYESIKNEPFKIPEDDGNDLTHTFFNPDREGWLLKLGGRVKTWKRRWFILTDNCLYYFEYTTDKEPRGIIPLENLSIREVEDPRKPNCFELYNPSHKGQVIKACKTEADGRVVEGNHVVYRISAPSPEEKEEWMKSIKASISRDPFYDMLATRKRRIANKK

SEQ ID NO: 776391 - protein, 445 aa, Homo sapiens; identical to SEQ ID NO: 776390

SEQ ID NO: 776392 - protein, 351 aa, Homo sapiens
MTEIDNLTSVEESKTTQRNKQIAMGRKKFNMDPKKGIQFLIENDLLQSSPEDVAQFLYKGEGLNKTVIGDYLGERDEFNIKVLQAFVELHEFADLNLVQALRQFLWSFRLPGEAQKIDRMMEAFASRYCLCNPGVFQSTDTCYVLSFAIIMLNTSLHNHNVRDKPTAERFIAMNRGINEGGDLPEELLRNLYESIKNEPFKIPEDDGNDLTHTFFNPDREGWLLKLGGRVKTWKRRWFILTDNCLYYFEYTTDKEPRGIIPLENLSIREVEDPRKPNCFELYNPSHKGQVIKACKTEADGRVVEGNHVVYRISAPSPEEKEEWMKSIKASISRDPFYDMLATRKRRIANKK

SEQ ID NO: 776393 - protein, 114 aa, Homo sapiens
KVPGTERGRIPSTGELWGALSVEALSCESRRNTCYVVSREWLPWVRRWGRGRMLVTCWQCPTREKPLHRTLRHDAPTLSKCVGISVKCLRSQPGGQRPQGRSCRLRGRVRFPSK

SEQ ID NO: 776394 - protein, 122 aa, Homo sapiens
NQAVTPVFSAHFLHLAFRTPGDPGSPPTSLAPSVVLPSLMEFRSRADNPHVRISGHPFPPKHHMCIHAHLTSHLDVDQLSPTCPKQNFGSPLPTPSFSINLFLLPQSSPPRGWCLPPTEVTA

SEQ ID NO: 776395 - protein, 45 aa, Homo sapiens
QQSQDLHNIKQFQLMNHQTVMDSPALPAMATALTGQEADCSNFLL

SEQ ID NO: 776396 - protein, 140 aa, Homo sapiens
AESSPKMAATMKKAAAEDVNVTFEDQQKINKFARNTSRITELKEEIEVKKKQLQNLEDACDDIMLADDDCLMIPYQIGDVFISHSQEETQEMLEEAKKNLQEEIDALESRVESIQRVLADLKVQLYAKFGSNINLEADES

SEQ ID NO: 776397 - protein, 140 aa, Homo sapiens; identical to SEQ ID NO: 776396

SEQ ID NO: 776398 - protein, 140 aa, Homo sapiens; identical to SEQ ID NO: 776396

SEQ ID NO: 776399 - protein, 71 aa, Homo sapiens
ALSVCGSAPGQPRRGAGAGAGSLEGRRSASRDAEGAPGESEEPAAPASPLRCGKPKVPLSVVGLDSGVAPA

SEQ ID NO: 776400 - protein, 71 aa, Homo sapiens; identical to SEQ ID NO: 776399

SEQ ID NO: 776401 - protein, 71 aa, Homo sapiens; identical to SEQ ID NO: 776399

SEQ ID NO: 776402 - protein, 58 aa, Homo sapiens
GRQKPETETGAQAKIEDGTQSLRKFPGCMFDRPSPRSLELGRPLELDRPLELVRPLEL

SEQ ID NO: 776403 - protein, 514 aa, Homo sapiens
ALAADTGAAAAPRCPPEMADPEVVVSSCSSHEEENRCNFNQQTSPSEELLLEDQMRRKLKFFFMNPCEKFWARGRKPWKLAIQILKIAMVTIQYLQLYNVSVGNHAYENKGTKQSAMAICQHFYKRGNIYPGNDTFDIDPEIETECFFVEPDEPFHIGTPAENKLNLTLDFHRLLTVELQFKLKAINLQTVRHQELPDCYDFTLTITFDNKAHSGRIKISLDNDISIRECKDWHVSGSIQKNTHYMMIFDAFVILTCLVSLILCIRSVIRGLQLQQEFVNFFLLHYKKEVSVSDQMEFVNGWYIMIIISDILTIIGSILKMEIQAKSLTSYDVCSILLGTSTMLVWLGVIRYLGFFAKYNLLILTLQAALPNVIRFCCCAAMIYLGYCFCGWIVLGPYHDKFRSLNMVSECLFSLINGDDMFATFAKMQQKSYLVWLFSRIYLYSFISLFIYMILSLFIALITDTYETIKQYQQDGFPETELRTFISECKDLPNSGKYRLEDDPPVSLFCCCKK

SEQ ID NO: 776404 - protein, 497 aa, Homo sapiens
MADPEVVVSSCSSHEEENRCNFNQQTSPSEELLLEDQMRRKLKFFFMNPCEKFWARGRKPWKLAIQILKIAMVTIQYLQLYNVSVGNHAYENKGTKQSAMAICQHFYKRGNIYPGNDTFDIDPEIETECFFVEPDEPFHIGTPAENKLNLTLDFHRLLTVELQFKLKAINLQTVRHQELPDCYDFTLTITFDNKAHSGRIKISLDNDISIRECKDWHVSGSIQKNTHYMMIFDAFVILTCLVSLILCIRSVIRGLQLQQEFVNFFLLHYKKEVSVSDQMEFVNGWYIMIIISDILTIIGSILKMEIQAKSLTSYDVCSILLGTSTMLVWLGVIRYLGFFAKYNLLILTLQAALPNVIRFCCCAAMIYLGYCFCGWIVLGPYHDKFRSLNMVSECLFSLINGDDMFATFAKMQQKSYLVWLFSRIYLYSFISLFIYMILSLFIALITDTYETIKQYQQDGFPETELRTFISECKDLPNSGKYRLEDDPPVSLFCCCKK

SEQ ID NO: 776405 - protein, 134 aa, Homo sapiens
MADPEVVVSSCSSHEEENRCNFNQQTSPSEELLLEDQMRRKLKFFFMNPCEKFWARGRKPWKLAIQILKIAMVTIQLVLFGLSNQMVVAFKEENTIAFKHLFLKGYMDRMDDTYAVYTQSDVYDQLIFAVNQVN

SEQ ID NO: 776406 - protein, 1114 aa, Homo sapiens
MLKEERKRELEEKVKAVEVDRAKRRKLREERAWLLAQGKELPPELSHLDPNSPMREEKKTKDLFELDDDFTAMYKVLDVVKAHKDSWPFLEPVDESYAPNYYQIIKAPMDISSMEKKLNGGLYCTKEEFVNDMKTMFRNCRKYNGESSEYTKMSDNLERCFHRAMMKHFPGEDGDTDEEFWIREDEKREKRRSRAGRSGGSHVWTRSRDPEGSSRKQQPMENGGKSLPPTRRAPSSGDDQSSSSTQPPREVGTSNGRGFSHPLHCGGTPSQAPFLNQMRPAVPGTFGPLRGSDPATLYGSSGVLEPHPGEPVQQRQPFTMQPPVGINSLRGPRLGTPEEKQMCGGLTHLSNMGPHPGSLQLGQISGPSQDGSMYAPAQFQPGFIPPRHGGAPARPPDFPESSEIPPSHMYRSYKYLNRVHSAVWNGNHGATNQGPLGPDEKPHLGPGPSHQPRTLGHVMDSRVMRPPVPPNQWTEQSGFLPHGVPSSGYMRPPCKSAGHRLQPPPVPAPSSLFGAPAQALRGVQGGDSMMDSPEMIAMQQLSSRVCPPGVPYHPHQPAHPRLPGPFPQVAHPMSVTVSAPKPALGNPGRAPENSEAQEPENDQAEPLPGLEEKPPGVGTSEGVYLTQLPHPTPPLQTDCTRQSSPQERETVGPELKSSSSESADNCKAMKGKNPWPSDSSYPGPAAQGCVRDLSTVADRGALSENGVIGEASPCGSEGKGLGSSGSEKLLCPRGRTLQETMPCTGQNAATPPSTDPGLTGGTVSQFPPLYMPGLEYPNSAAHYHISPGLQGVGPVMGGKSPASHPQHFPPRGFQSNHPHSGGFPRYRPPQGMRYSYHPPPQPSYHHYQRTPYYACPQSFSDWQRPLHPQGSPSGPPASQPPPPRSLFSDKNAMASLQGCETLNAALTSPTRMDAVAAKVPNDGQNPGPEEEKLDESMERPESPKEFLDLDNHNAATKRQSSLSASEYLYGTPPPLSSGMGFGSSAFPPHSVMLQTGPPYTPQRPASHFQPRAYSSPVAALPPHHPGATQPNGLSQEGPIYRCQEEGLGHFQAVMMEQIGTRSGIRGPFQEMYRPSGMQMHPVQSQASFPKTPTAATSQEEVPPHKPPTLPLDQS

SEQ ID NO: 776407 - protein, 1484 aa, Homo sapiens
MCPEEGGAAGLGELRSWWEVPAIAHFCSLFRTAFRLPDFEIEELEAALHRDDVEFISDLIACLLQGCYQRRDITPQTFHSYLEDIINYRWELEEGKPNPLREASFQDLPLRTRVEILHRLCDYRLDADDVFDLLKGLDADSLRVEPLGEDNSGALYWYFYGTRMYKEDPVQGKSNGELSLSRESEGQKNVSSIPGKTGKRRGRPPKRKKLQEEILLSEKQEENSLASEPQTRHGSQGPGQGTWWLLCQTEEEWRQVTESFRERTSLRERQLYKLLSEDFLPEICNMIAQKGKRPQRTKAELHPRWMSDHLSIKPVKQEGDSCADQNRKTKAQRGGRRASDSSSSAEEGAGADAKGREETRVGGEGQGSGRYVQCPRGLERCMSVDQPSLDRAKRRKLREERAWLLAQGKELPPELSHLDPNSPMREEKKTKDLFELDDDFTAMYKVLDVVKAHKDSWPFLEPVDESYAPNYYQIIKAPMDISSMEKKLNGGLYCTKEEFVNDMKTMFRNCRKYNGESSEYTKMSDNLERCFHRAMMKHFPGEDGDTDEEFWIREDEKREKRRSRAGRSGGSHVWTRSRDPEGSSRKQQPMENGGKSLPPTRRAPSSGDDQSSSSTQPPREVGTSNGRGFSHPLHCGGTPSQAPFLNQMRPAVPGTFGPLRGSDPATLYGSSGVLEPHPGEPVQQRQPFTMQPPVGINSLRGPRLGTPEEKQMCGGLTHLSNMGPHPGSLQLGQISGPSQDGSMYAPAQFQPGFIPPRHGGAPARPPDFPESSEIPPSHMYRSYKYLNRVHSAVWNGNHGATNQGPLGPDEKPHLGPGPSHQPRTLGHVMDSRVMRPPVPPNQWTEQSGFLPHGVPSSGYMRPPCKSAGHRLQPPPVPAPSSLFGAPAQALRGVQGGDSMMDSPEMIAMQQLSSRVCPPGVPYHPHQPAHPRLPGPFPQVAHPMSVTVSAPKPALGNPGRAPENSEAQEPENDQAEPLPGLEEKPPGVGTSEGVYLTQLPHPTPPLQTDCTRQSSPQERETVGPELKSSSSESADNCKAMKGKNPWPSDSSYPGPAAQGCVRDLSTVADRGALSENGVIGEASPCGSEGKGLGSSGSEKLLCPRGRTLQETMPCTGQNAATPPSTDPGLTGGTVSQFPPLYMPGLEYPNSAAHYHISPGLQGVGPVMGGKSPASHPQHFPPRGFQSNHPHSGGFPRYRPPQGMRYSYHPPPQPSYHHYQRTPYYACPQSFSDWQRPLHPQGSPSGPPASQPPPPRSLFSDKNAMASLQGCETLNAALTSPTRMDAVAAKVPNDGQNPGPEEEKLDESMERPESPKEFLDLDNHNAATKRQSSLSASEYLYGTPPPLSSGMGFGSSAFPPHSVMLQTGPPYTPQRPASHFQPRAYSSPVAALPPHHPGATQPNGLSQEGPIYRCQEEGLGHFQAVMMEQIGTRSGIRGPFQEMYRPSGMQMHPVQSQASFPKTPTAATSQEEVPPHKPPTLPLDQS

SEQ ID NO: 776408 - protein, 498 aa, Homo sapiens
MCPEEGGAAGLGELRSWWEVPAIAHFCSLFRTAFRLPDFEIEELEAALHRDDVEFISDLIACLLQGCYQRRDITPQTFHSYLEDIINYRWELEEGKPNPLREASFQDLPLRTRVEILHRLCDYRLDADDVFDLLKGLDADSLRVEPLGEDNSGALYWYFYGTRMYKEDPVQGKSNGELSLSRESEGQKNVSSIPGKTGKRRGRPPKRKKLQEEILLSEKQEENSLASEPQTRHGSQGPGQGTWWLLCQTEEEWRQVTESFRERTSLRERQLYKLLSEDFLPEICNMIAQKGDSCADQNRKTKAQRGGRRASDSSSSAEEGAGADAKGREETRVGGEGQGSGRYVQCPRGLERCMSVDQPSLDRAKRRKLREERAWLLAQGKELPPELSHLDPNSPMREEKKTKDLFELDDDFTAMYKVLDVVKAHKDSWPFLEPVDESYAPNYYQIIKAPMDISSMEKKLNGGLYCTKEEFVNDMKTMFRNCRKYNGESSGKQGRSLC

SEQ ID NO: 776409 - protein, 36 aa, Homo sapiens
QRFCICEKELHYFRKNLLESDDLSSDLGSDTNYVSL

SEQ ID NO: 776410 - protein, 284 aa, Homo sapiens
VSNTEFEKFVNSTGYLTEAEKFGDSFVFEGMLSEQVKTNIQQAGCFEVAAAPWWLPVKGANWRHPEGPDSTILHRPDHPVLHVSWNDAVAYCTWAGKRLPTEAEWEYSCRGGLHNRLFPWGNKLQPKGQHYANIWQGEFPVTNTGEDGFQGTAPVDAFPPNGYGLYNIVGNAWEWTSDWWTVHHSVEETLNPKGPPSGKDRVKKGGSYMCHRSQEYYDPYFQDVASEMLRRHTASRWKAFSSLEPCCSIRRHQQYAAIERLTCGKFELRCAVSTKYTLNFEDLV

SEQ ID NO: 776411 - protein, 248 aa, Homo sapiens
VSNTEFEKFVNSTGYLTEAEKFGDSFVFEGMLSEQVKTNIQQAGCFEVAAAPWWLPVKGANWRHPEGPDSTILHRPDHPVLHVSWNDAVAYCTWAGKRLPTEAEWEYSCRGGLHNRLFPWGNKLQPKGQHYANIWQGEFPVTNTGEDGFQGTAPVDAFPPNGYGLYNIVGNAWEWTSDWWTVHHSVEETLNPKGPPSGKDRVKKGGSYMCHRSYCYRYRCAARSQNTPDSSASNLGFRCAADRLPTMD

SEQ ID NO: 776412 - protein, 113 aa, Homo sapiens
HEPLTLETVSPGLLVPCNKLYIPIPLLILKDSRAGEEGSIRAVDHAVIGGVVAVVVFAMLCLLIILGRYFARHKGTYFTHEAKGADDAADADTAIINAEGGQNNSEEKKEYFI

SEQ ID NO: 776413 - protein, 387 aa, Homo sapiens
MASVVLPSGSQCAAAAAAAAPPGLRLRLLLLLFSAAALIPTGDGQNLFTKDVTVIEGEVATISCQVNKSDDSVIQLLNPNRQTIYFRDFRPLKDSRFQLLNFSSSELKVSLTNVSISDEGRYFCQLYTDPPQESYTTITVLVPPRNLMIDIQKDTAVEGEEIEVNCTAMASKPATTIRWFKGNTELKGKSEVEEWSDMYTVTSQLMLKVHKEDDGVPVICQVEHPAVTGNLQTQRYLEVQYKPQVHIQMTYPLQGLTREGDALELTCEAIGKPQPVMVTWVRVDDEMPQHAVLSGPNLFINNLNKTDNGTYRCEASNIVGKAHSDYMLYVYDPPTTIPPPTTTTTTTTTTTTTILTIITDTTATTEPAVHEIPEQVKKARSGQWIMP

SEQ ID NO: 776414 - protein, 442 aa, Homo sapiens
MASVVLPSGSQCAAAAAAAAPPGLRLRLLLLLFSAAALIPTGDGQNLFTKDVTVIEGEVATISCQVNKSDDSVIQLLNPNRQTIYFRDFRPLKDSRFQLLNFSSSELKVSLTNVSISDEGRYFCQLYTDPPQESYTTITVLVPPRNLMIDIQKDTAVEGEEIEVNCTAMASKPATTIRWFKGNTELKGKSEVEEWSDMYTVTSQLMLKVHKEDDGVPVICQVEHPAVTGNLQTQRYLEVQYKPQVHIQMTYPLQGLTREGDALELTCEAIGKPQPVMVTWVRVDDEMPQHAVLSGPNLFINNLNKTDNGTYRCEASNIVGKAHSDYMLYVYDPPTTIPPPTTTTTTTTTTTTTILTIITDSRAGEEGSIRAVDHAVIGGVVAVVVFAMLCLLIILGRYFARHKGTYFTHEAKGADDAADADTAIINAEGGQNNSEEKKEYFI

SEQ ID NO: 776415 - protein, 295 aa, Homo sapiens
MIDIQKDTAVEGEEIEVNCTAMASKPATTIRWFKGNTELKGKSEVEEWSDMYTVTSQLMLKVHKEDDGVPVICQVEHPAVTGNLQTQRYLEVQYKPQVHIQMTYPLQGLTREGDALELTCEAIGKPQPVMVTWVRVDDEMPQHAVLSGPNLFINNLNKTDNGTYRCEASNIVGKAHSDYMLYVYDPPTTIPPPTTTTTTTTTTTTTILTIITDSRAGEEGSIRAVDHAVIGGVVAVVVFAMLCLLIILGRYFARHKGTYFTHEAKGADDAADADTAIINAEGGQNNSEEKKEYFI

SEQ ID NO: 776416 - protein, 382 aa, Homo sapiens
ERERERERERESVIQLLNPNRQTIYFRDFRPLKDSRFQLLNFSSSELKVSLTNVSISDEGRYFCQLYTDPPQESYTTITVLVPPRNLMIDIQKDTAVEGEEIEVNCTAMASKPATTIRWFKGNTELKGKSEVEEWSDMYTVTSQLMLKVHKEDDGVPVICQVEHPAVTGNLQTQRYLEVQYKPQVHIQMTYPLQGLTREGDALELTCEAIGKPQPVMVTWVRVDDEMPQHAVLSGPNLFINNLNKTDNGTYRCEASNIVGKAHSDYMLYVYDPPTTIPPPTTTTTTTTTTTTTILTIITDSRAGEEGSIRAVDHAVIGGVVAVVVFAMLCLLIILGRYFARHKGTYFTHEAKGADDAADADTAIINAEGGQNNSEEKKEYFI

SEQ ID NO: 776417 - protein, 442 aa, Homo sapiens; identical to SEQ ID NO: 776414

SEQ ID NO: 776418 - protein, 354 aa, Homo sapiens
MASVVLPSGSQCAAAAAAAAPPGLRLRLLLLLFSAAALIPTGDGQNLFTKDVTVIEGEVATISCQVNKSDDSVIQLLNPNRQTIYFRDFRPLKDSRFQLLNFSSSELKVSLTNVSISDEGRYFCQLYTDPPQESYTTITVLVPPRNLMIDIQKDTAVEGEEIEVNCTAMASKPATTIRWFKGNTELKGKSEVEEWSDMYTVTSQLMLKVHKEDDGVPVICQVEHPAVTGNLQTQRYLEVQYKPQVHIQMTYPLQGLTREGDALELTCEAIGKPQPVMVTWVRVDDEMPQHAVLSGPNLFINNLNKTDNGTYRCEASNIVGKAHSDYMLYVYDPPTTIPAWCLWPLGASGLLGVS

SEQ ID NO: 776419 - protein, 387 aa, Homo sapiens; identical to SEQ ID NO: 776413

SEQ ID NO: 776420 - protein, 442 aa, Homo sapiens; identical to SEQ ID NO: 776414

SEQ ID NO: 776421 - protein, 442 aa, Homo sapiens; identical to SEQ ID NO: 776414

SEQ ID NO: 776422 - protein, 405 aa, Homo sapiens
MASVVLPSGSQCAAAAAAAAPPGLRLRLLLLLFSAAALIPTGDGQNLFTKDVTVIEGEVATISCQVNKSDDSVIQLLNPNRQTIYFRDFRPLKDSRFQLLNFSSSELKVSLTNVSISDEGRYFCQLYTDPPQESYTTITVLVPPRNLMIDIQKDTAVEGEEIEVNCTAMASKPATTIRWFKGNTELKGKSEVEEWSDMYTVTSQLMLKVHKEDDGVPVICQVEHPAVTGNLQTQRYLEVQYKPQVHIQMTYPLQGLTREGDALELTCEAIGKPQPVMVTWVRVDDEMPQHAVLSGPNLFINNLNKTDNGTYRCEASNIVGKAHSDYMLYVYDPPTTIPPPTTTTTTTTTTTTTILTIITDTTATTEPAVHGLTQLPNSAEELDSEDLSEIPEQVKKARSGQWIMP

SEQ ID NO: 776423 - protein, 409 aa, Homo sapiens
MASVVLPSGDGQNLFTKDVTVIEGEVATISCQVNKSDDSVIQLLNPNRQTIYFRDFRPLKDSRFQLLNFSSSELKVSLTNVSISDEGRYFCQLYTDPPQESYTTITVLVPPRNLMIDIQKDTAVEGEEIEVNCTAMASKPATTIRWFKGNTELKGKSEVEEWSDMYTVTSQLMLKVHKEDDGVPVICQVEHPAVTGNLQTQRYLEVQYKPQVHIQMTYPLQGLTREGDALELTCEAIGKPQPVMVTWVRVDDEMPQHAVLSGPNLFINNLNKTDNGTYRCEASNIVGKAHSDYMLYVYDPPTTIPPPTTTTTTTTTTTTTILTIITDSRAGEEGSIRAVDHAVIGGVVAVVVFAMLCLLIILGRYFARHKGTYFTHEAKGADDAADADTAIINAEGGQNNSEEKKEYFI

SEQ ID NO: 776424 - protein, 217 aa, Homo sapiens
MISFAKHYTLCFCHTDKPQVHIQMTYPLQGLTREGDALELTCEAIGKPQPVMVTWVRVDDEMPQHAVLSGPNLFINNLNKTDNGTYRCEASNIVGKAHSDYMLYVYDPPTTIPPPTTTTTTTTTTTTTILTIITDSRAGEEGSIRAVDHAVIGGVVAVVVFAMLCLLIILGRYFARHKGTYFTHEAKGADDAADADTAIINAEGGQNNSEEKKEYFI

SEQ ID NO: 776425 - protein, 442 aa, Homo sapiens; identical to SEQ ID NO: 776414

SEQ ID NO: 776426 - protein, 67 aa, Homo sapiens
KGAGLRVGLGAEAPGRTTDVSPGLAGTQQVPRSTCQLAPSNAWLHLTERGRGPSRSLADPSFIPDSG

SEQ ID NO: 776427 - protein, 57 aa, Homo sapiens
MRWTARRPTWATVHLGSGSPSLGLCFLTCRTGVNNSAQVRVGRHERLRTTLESSLQP

SEQ ID NO: 776428 - protein, 257 aa, Homo sapiens
AYRSPALPGWVAVEARREFEHGTGRPAVLGDLAPPSAAAGPGAKPLTAPGLGAQAGCSECGGLPSPRPPGTHAGLQVCAQPWFPPAPLPPHLPTSRGSQLQPRPAQSGAPTVQRQAEGLLKRGQSGRGGRGGAKSELRAASTLSPLTMNNWQDSHGLDLRKVCSGLTYPRAAAPGSLSAFHISCINLVAHKDSIENKLMRIIPLIMEPASPASNQAMCTCTLDDSRIEASVDICLLFVSRVWWDASITVALSDGRQP

SEQ ID NO: 776429 - protein, 245 aa, Homo sapiens
RESAARLSPAGRTLGSFQPQKLRAPAYRDFFRAEKSSRALLTSFLLGGERSLSLGAAGRAMPRSRGRELGRCGCPAGRARGETGISALVPGAGSRWGRPPPPTPPPLLLLLGCGLLSVSAAAGQNCTFQLHGPNGTVESPGFPYGYPNYANCTWTITAEEQHRIQLVFQSFALEEDFDVLSVFDGPPQPENLRTRLTGFQLPATIVSAATTLSLRLISDYAVSAQGFHATYEGKCLPHRPQEPEM

SEQ ID NO: 776430 - protein, 239 aa, Homo sapiens
RESAARLSPAGRTLGSFQPQKLRAPAYRDFFRAEKSSRALLTSFLLGGERSLSLGAAGRAMPRSRGRELGRCGCPAGRARGETGISALVPGAGSRWGRPPPPTPPPLLLLLGCGLLSVSAAAGQNCTFQLHGPNGTVESPGFPYGYPNYANCTWTITAEEQHRIQLVFQSFALEEDFDVLSVFDGPPQPENLRTRLTGFQLPATIVSAATTLSLRLISDYAVSAQGFHATYEDRDDGKK

SEQ ID NO: 776431 - protein, 122 aa, Homo sapiens
MEQRGLGYKLERKEILACWGEGRGTDEGRRVLAKQELNEWPEAPSPKGSHSHWPGPVRALCHLLGHPLLQAFSTTGPQLSLLLPKVESPKVPSVWPILCPPPVASSSPPPLSLSAIGRSPGP

SEQ ID NO: 776432 - protein, 150 aa, Homo sapiens
IIIKYLYARYCWDDPSIHKLPPLSRHVIMSLTSLRLIMMPCCLEDKVQPPNHSFGAFCDPAFPYTSNFTDLPLTTYTFCTVFQIQWTSSTPHIHPLCLLFTDIWGVSPPPCSVSSLPRWGWATHFCFPKDPHACSSQSANYTAVNCGLFV

SEQ ID NO: 776433 - protein, 121 aa, Homo sapiens
VFLVVTGFHHVGQAGLELLTSGGPPASAAQSAGITGMSHHAWPSLILLRCNLGYPTPSGVQHKVCFQICTCVTCSQTRPQKDLRPGGSLSSLLPASHFCINTLVLSQFTTEQWPPLCQTVP

SEQ ID NO: 776434 - protein, 126 aa, Homo sapiens
MLLRLVLNSWIKQFSHLGLPKCWDYRYEPPHLVLGVFKAKTSTPLETNVKEPEEAGRVAAGVRCSWAKLQGLHFRAVFPGDRVGQLRGPLNLLHRTPRPENGSLIKGCYFLFVFPSTGLLMILVKK

SEQ ID NO: 776435 - protein, 333 aa, Homo sapiens
  misc_feature (326)..(326): Xaa can be any naturally occurring amino acid
MVGAHLQLGREILDSINSCASRQVCLVIDAAKDLQTITLESGPSKHPVGVPRRARSVHYAAMKMQRMPFRRPSSAWTLGDSVWADVTYETPLDLLAVTWAPGTEPNDHGTTGHTETHNDSHEDFRALRKTAEDMNLFKTNHVFFLLLLAHIIALESIAWFTVFYFGNGWIPTLITAFVLATSQAQAGWLQHDYGHLSVYRKPKWNHLVHKFVIGHLKVPLALVESSAISATGQAKSSQGSDVNADVLAWRMQPIQRQENCIGLDTVPNISNVAAKHPGFRYNYRQCPKGGTRRKKGITRLEEPSHSCEVWPTRDDTSTHWLTRGKXHTYTHAN

SEQ ID NO: 776436 - protein, 112 aa, Homo sapiens
MQRTHWPPPFPVKIPPWLPSAQETESKSLYLMRKDLLDMVPVSFSTLPWPGSASWSPSQKEINYSTCSSLRAMPFFSSMSLLMWTPCLCSKRTSRQNPLCLEELTVTPLCLA

SEQ ID NO: 776437 - protein, 193 aa, Homo sapiens
APDATAAEMLMPKKNRIAIYELLFKEGAMVAKKDVYTPKQPELADKNVPNLHVMKAMQSLKSRGYMKEQFAWRHFYWYLTNEGIHISVITFICPRRLCLPPYATAVQRLAGLGLKVWRVSDLQDSQEGKPTGIPTDGMLCSLVLTRKPMLGVGQQPNSSLEADLVVDMVSHLSKIGEDYFALNKLTAKKKKVK

SEQ ID NO: 776438 - protein, 82 aa, Homo sapiens
  misc_feature (6)..(6): Xaa can be any naturally occurring amino acid
  misc_feature (11)..(11): Xaa can be any naturally occurring amino acid
  misc_feature (13)..(13): Xaa can be any naturally occurring amino acid
SLFPGXSGHDXPXLHAKRTTINTEDVKLLARRSNSLLKYITDKSEEIAQINLERKAQKKKKSEDGSKNSRQPAEAGVVESEN

SEQ ID NO: 776439 - protein, 122 aa, Homo sapiens [sequence omitted]

SEQ ID NO: 776440 - protein, 138 aa, Homo sapiens
MEEEAETEEQQRFSYQQRLKAAVHYTVGCLCEEVALDKEMQFSKQTIAAISELTFRQCENFAKDLEMFARHAKRTTINTEDVKLLARRSNSLLKYITDKSEEIAQINLERKAQKKKKSEDGSKNSRQPAEAGVVESEN

SEQ ID NO: 776441 - protein, 122 aa, Homo sapiens [sequence omitted]

SEQ ID NO: 776442 - protein, 122 aa, Homo sapiens [sequence omitted]

SEQ ID NO: 776443 - protein, 155 aa, Homo sapiens
MYRHKNSWRLGLKYPPSSKEETQVPKTLISGLPGRKSSSRVGEKLQSAHKMPLSPGLLLLLLSGATATAALPLEGGPTGRDSEHMQEAAGIRKSSLLTFLAWWFEWTSQASAGPLIGEEAREVARRQEGAPPQQSARRDRMPCRNFFWKTFSSCK

SEQ ID NO: 776444 - protein, 122 aa, Homo sapiens [sequence omitted]

SEQ ID NO: 776445 - protein, 122 aa, Homo sapiens [sequence omitted]

SEQ ID NO: 776446 - protein, 122 aa, Homo sapiens [sequence omitted]

SEQ ID NO: 776447 - protein, 90 aa, Homo sapiens
QKAHTPRSAPPDPFMVTEHMQEAAGIRKSSLLTFLAWWFEWTSQASAGPLIGEEAREVARRQEGAPPQQSARRDRMPCRNFFWKTFSSCK

SEQ ID NO: 776448 - protein, 155 aa, Homo sapiens; identical to SEQ ID NO: 776443

SEQ ID NO: 776449 - protein, 133 aa, Homo sapiens
MSPRRPATSAEQAEQGAGWRPTAESPQRSAARGRARQGGAAYFVRPRGPSLAPRRENPTWPRTTAPSRPSCVCPGSARSDGGGGGDRGAAAILLPTGTGKRGSGWAGAGRRRVSGQKSTRQPPAASHRHPAPG

SEQ ID NO: 776450 - protein, 122 aa, Homo sapiens [sequence omitted]

SEQ ID NO: 776451 - protein, 122 aa, Homo sapiens [sequence omitted]

SEQ ID NO: 776452 - protein, 122 aa, Homo sapiens [sequence omitted]

SEQ ID NO: 776453 - protein, 122 aa, Homo sapiens [sequence omitted]

SEQ ID NO: 776454 - protein, 125 aa, Homo sapiens
MQFSKQTIAAISELTFRQCENFAKDLEMFARHAKRTTINTEDVKLLARRSNSLHMQEAAGIRKSSLLTFLAWWFEWTSQASAGPLIGEEAREVARRQEGAPPQQSARRDRMPCRNFFWKTFSSCK

SEQ ID NO: 776455 - protein, 122 aa, Homo sapiens [sequence omitted]

SEQ ID NO: 776456 - protein, 27 aa, Homo sapiens
MHSAKRWLVKDQWHGEVSPGCTAFAAV

SEQ ID NO: 776457 - protein, 70 aa, Homo sapiens
GVRERRTKQVCSPGNDSTPSEKTGRVQTWPGSELENCQQGAEAEDSHCQGTASVTEETHRCGDEGGMRGW

SEQ ID NO: 776458 - protein, 139 aa, Homo sapiens
TQLHSYSCLEYCVQKDLAGCWWLLSFQLICPTLAPILSTQPSPPAAQYRLMATHHSLSVCRGFLCRRKTTYAYNVRIRHVDLYDPTWRMISIFLALMNLLLEYSSPYLMPSFSLLLKSYSSFMSHSRQAVSVIQVQEIH

SEQ ID NO: 776459 - protein, 201 aa, Homo sapiens
MRIKYLGIQLTRDVKDLFKENYKPLLKEIKEDTNKWKNIPCSWVERINIVKMAILLKVIYRFNAIPIKLPMTFFTELEKTTLKFIWNQKRAHIAKSILSQKNKAGGITLPDFKLYYKATVTKTAWYWYQNRDIDQWNRTEPSEIMPHIYNYLIFDKPEKNKQWGKDSLFNKWCWENWLAICRKLKLDPFLTPYTKINSRWI

SEQ ID NO: 776460 - protein, 93 aa, Homo sapiens
RGYATRRRASGTLSETRPTRPSPPRHTDQNPLLESDWDLFLVTDSASFCSWQVPFLQIPHLYRFRIRMFQQGSITAVSILRETTHLGNNSFLE

SEQ ID NO: 776461 - protein, 108 aa, Homo sapiens [sequence omitted]

SEQ ID NO: 776462 - protein, 77 aa, Homo sapiens
PDTHAQTHSHPRAHLDMDTHTGSHKHSHIQTPMRTLTLTGTPRHGYTGTHILGHPRIDTFTHGHTQTDAHEHRHALV

SEQ ID NO: 776463 - protein, 133 aa, Homo sapiens
RLLPEPPAQASCLEHRRTQPHCLLPPKRVQLQFPFQGATPSLQHPQPLGRAPSQLLNGVGMQRRPRETDAPPQRQSRGMGSGAILHMRVYVYTGMCLHAGTFMHAQACVCLHADVFMRVQACVFACRHVFMCA

SEQ ID NO: 776464 - protein, 944 aa, Homo sapiens
MMDLLRECDQRLSLGFWGPFCFLPPPVLRPSLSHAEKTGRLPRAEMSSPCSEAVKCLLREKGRVRIARFCSIPSRLLHLPGGASESLPARDSFPLEERVGRLGENPRASCGHVVFHLPCLIWHLYEPEGVVLDPNLSQMFQAEVFWQNRFCHFDKNRFAVFCDFESLTLSCSENQLLKLNLVCKICILHQQQKTPEPRGHFIDTVKQVRWDARILNCGGLSDFCHGKHCERCIMNVLNPLLSLAVFENAKKIRPLMERFGIHEKDRVPTTEETWLPCKTEHLYQEHGDLLSFGIRKKIKHWIGNILRSLCKRHTPAVQTEVLICKRYLRGKRSGFQTALASKEMACFPASLRTCTQKEALFPASLSETSRRNNTNRRGQAEYARRKVQSPGGREKMRRVTGNLPPALSHSRQPVGGDLVGGDIAAALGLPLTWGHCKFLTLFVFLPPWVPCMTGTHSRSWEHFMNDSGHAVKRLDVAPEKAAMVTPNKDQRNQEPLGLGSGHDSAPGFLCDVGTAISLLGHWVSCVYLGTVGWMSRALEFPSACGKPLFSLEHHCTVRVGLWQVLREVLVGDSRSKYREMLGSTHFIVKGYPFYESEDEQIDPGGNPHPRLPSVGVEVCILIAGKGAIKILESLINEGASVNEPVLDFLSFSFVRSMGFIFSSPGLLLCPLSNPAITSHLWALRSFTAVHIPFWQERICEIDSHYGNNEFMCNLSCACDTCSKEDWMKRVRLPEEEGVLMVGFQACDTHPSSGMPSCPPHQPGGWKLLGKETGQGLVGSLFGFIGLQIFTVQELKGDILPLSSSGSPWFGCGEEQVCFPAEPLPTPAGLVGASMEPAASACAHPSLNISPVLWAEHPLTSLQSVHTGPFSSQDEVKGTRLNISASEGEATEARNRMVAERSLGSLCRGSRGVGGCGPEEAASLWTGRKVASGGRGQGRMSLSQK

SEQ ID NO: 776465 - protein, 103 aa, Homo sapiens
ESCCPCCWGVWLMFSEPGMVQDRATGRHCRQQACAICDQAPCPWNFTPDSSGTPTLRKFQRPFKKFLLQLITVECQGLPSQNWFVLEQRTAILPRAQQGHCDP

SEQ ID NO: 776466 - protein, 114 aa, Homo sapiens
PIRVDLLKAVITEAVCSFLFHSALLHFQEVRTKLRIHLLAALITFLVYAGGSLTGAVFNPALALSLHFMCFDEAFPQFFIVYWLAPSLGILLMILMFSFFLPWLHNNHTINKKE

SEQ ID NO: 776467 - protein, 75 aa, Homo sapiens
PIRVDLLKAVITEAVCSFLFHSALLHFQEVRTKLRIHLLAALITFLVYAGILLMILMFSFFLPWLHNNHTINKKE

SEQ ID NO: 776468 - protein, 114 aa, Homo sapiens; identical to SEQ ID NO: 776466

SEQ ID NO: 776469 - protein, 67 aa, Homo sapiens
NQKSITSKVCNYKPTENKYMNSTTVNWTALGNTDEESQHRFVLQYLAPFSARLATPGIMPEKSPGRL

SEQ ID NO: 776470 - protein, 76 aa, Homo sapiens
EDIKTMKGYNLPTSFTRSVCIPSLLSGPLAQNVPTEGGAPGGCMKRLSPGGTPWTWGKQAMSAPEFWPMDRCPREL

SEQ ID NO: 776471 - protein, 164 aa, Homo sapiens
LSPRGASAAPAPGWWLLSERRGVVADSLGVQLRSPAGSVRFVSGLGFDLLQDSQPLPGRTVQEKMAPKSPDPGPLTFGDVAVAFTRIEWRHLDAAQRALYRDVMLENYGNLVSVGLLSSKPKLITQLEQGAEPWTEVREAPSGTHAVEDYWFETHDVSPKAQHF

SEQ ID NO: 776472 - protein, 161 aa, Homo sapiens
MPRLNTLSSSWGNGHSTSVAIPSVRASDIACLGARHAGKWSPWLGSGSWWQCDSTEGKYSFWKAVSHHYHTRHPYRTHHHLPLPLDSNKKTSLTLAFSECPVQWGDLAPHSDDLEWFVPTTMRSTGQMGQDRDGGGTGRGVGAGVGGGTGSYGIPGKVPDS

SEQ ID NO: 776473 - protein, 126 aa, Homo sapiens
HTNLYLSTPLSELQTYISTSLLDIFFETGSHSVAQAGAQWHDHGSLKPRPPDLSLPSSWDYRHAPPCLAHFFVFFLKRQGSTMLPRLVANYWAQAIHLPRPPKVLGLQARATVPGLHLAVLMAHKN

SEQ ID NO: 776474 - protein, 324 aa, Homo sapiens
GVGGGGGPPHETQRPGLERPALQRIMVQQAESLEAESNLPREALDTEEGEFMACSPVALDESDPDWCKTASGHIKRPMNAFMVWSKIERRKIMEQSPDMHNAEISKRLGKRWKMLKDSEKIPFIREAERLRLKHMADYPDYKYRPRKKPKMDPSAKPSASQSPEKSAAGGGGGSAGGGAGGAKTSKGSSKKCGSRLYYSFKNITKQHPPPLAQPALSPASSRSVSTSSSSSSGSSSGSSGEDADDLMFDLSLNFSQSAHSASEQQLGGGAAAGNLSLSLVDKDLDSFSEGSLGSHFEFPDYCTQKIRKIEKRGMAEEELIRPGD

SEQ ID NO: 776475 - protein, 441 aa, Homo sapiens
MVQQAESLEAESNLPREALDTEEGEFMACSPVALDESDPDWCKTASGHIKRPMNAFMVWSKIERRKIMEQSPDMHNAEISKRLGKRWKMLKDSEKIPFIREAERLRLKHMADYPDYKYRPRKKPKMDPSAKPSASQSPEKSAAGGGGGSAGGGAGGAKTSKGSSKKCGKLKAPAAAGAKAGAGKAAQSGDYGGAGDDYVLGSLRVSGSGGGGAGKTVKCVFLDEDDDDDDDDDELQLQIKQEPDEEDEEPPHQQLLQPPGQQPSQLLRRYNVAKVPASPTLSSSAESPEGASLYDEVRAGATSGAGGGSRLYYSFKNITKQHPPPLAQPALSPASSRSVSTSSSSSSGSSSGSSGEDADDLMFDLSLNFSQSAHSASEQQLGGGAAAGNLSLSLVDKDLDSFSEGSLGSHFEFPDYCTPELSEMIAGDWLEANFSDLVFTY

SEQ ID NO: 776476 - protein, 441 aa, Homo sapiens; identical to SEQ ID NO: 776475

SEQ ID NO: 776477 - protein, 378 aa, Homo sapiens
ARGAGLARRRRAEAGPEGWGRRGGGGRRSAPLQLGFMSRQAKDDFLRHYTVSDPRTHPKGYTEYKVTAQFISKKDPEDVKEVVVWKRYSDFRKLHGDLAYTHRNLFRRLEEFPAFPRAQVFGRFEASVIEERRKGAEDLLRFTVHIPALNNSPQLKEFFRGGEVTRPLEVSRDLHILPPPLIPTPPPDDPRLSQLLPAERRGLEELEVPVDPPPSSPAQEALDLLFNCESTEEASGSPARGPLTEAELALFDPFSKEEGAAPSPTHVAELATMEVESARLDQEPWEPGGQEEEEDGEGGPTPAYLSQATELITQALRDEKAGAYAAALQGYRDGVHVLLQGVPSDPLPARQEGVKKKAAEYLKRAEEILRLHLSQLPP

SEQ ID NO: 776478 - protein, 368 aa, Homo sapiens
PRDPPTTIRGRRGGGGRRSAPLQLGFMSRQAKDDFLRHYTVSDPRTHPKGYTEYKVTAQFISKKDPEDVKEVVVWKRYSDFRKLHGDLAYTHRNLFRRLEEFPAFPRAQVFGRFEASVIEERRKGAEDLLRFTVHIPALNNSPQLKEFFRGGEVTRPLEVSRDLHILPPPLIPTPPPDDPRLSQLLPAERRGLEELEVPVDPPPSSPAQEALDLLFNCESTEEASGSPARGPLTEAELALFDPFSKEEGAAPSPTHVAELATMEVESARLDQEPWEPGGQEEEEDGEGGPTPAYLSQATELITQALRDEKAGAYAAALQGYRDGVHVLLQGVPSDPLPARQEGVKKKAAEYLKRAEEILRLHLSQLPP

SEQ ID NO: 776479 - protein, 292 aa, Homo sapiens
ARGAGLARRRRAEAGPEGWGRRGGGGRRSAPLQLGFMSRQAKDDFLRHYTVSDPRTHPKGYTEYKVTAQFISKKDPEDVKEVVVWKRYSDFRKLHGDLAYTHRNLFRRLEEFPAFPRAQVFGRFEASVIEERRKGAEDLLRFTVHIPALNNSPQLKEFFRGGEVTRPLEVSRDLHILPPPLIPTPPPDDPRLSQLLPAERRGLEELEVPVDPPPSSPAQEALDLLFNCESTEEASGSPARGPLTEAELALFDPFSKEGDPLPARQEGVKKKAAEYLKRAEEILRLHLSQLPP

SEQ ID NO: 776480 - protein, 292 aa, Homo sapiens; identical to SEQ ID NO: 776479

SEQ ID NO: 776481 - protein, 280 aa, Homo sapiens
ARGAGLARRRRAEAGPEGWGRRGGGGRRSAPLQLGFMSRQAKDDFLRHYTVSDPRTHPKGYTEYKVTAQFISKKDPEDVKEVVVWKRYSDFRKLHGDLAYTHRNLFRRLEEFPAFPRAQVFGRFEASVIEERRKGAEDLLRFTVHIPALNNSPQLKEFFRGGEVTRPLEVSRDLHILPPPLIPTPPPDDPRLSQLLPAERRGLEELEVPVDPPPSSPAQEALDLLFNCESTEEASGSPARGPLTEAELALFDPFSKEVSQSAEITGMSHYARPMSVCLDV

SEQ ID NO: 776482 - protein, 262 aa, Homo sapiens
MSKRWWSGSGTATSASCMETWPTPTATSSAASRSSPLSPGPRCLGGEVTRPLEVSRDLHILPPPLIPTPPPDDPRLSQLLPAERRGLEELEVPVDPPPSSPAQEALDLLFNCESTEEASGSPARGPLTEAELALFDPFSKEEGAAPSPTHVAELATMEVESARLDQEPWEPGGQEEEEDGEGGPTPAYLSQATELITQALRDEKAGAYAAALQGYRDGVHVLLQGVPSDPLPARQEGVKKKAAEYLKRAEEILRLHLSQLPP

SEQ ID NO: 776483 - protein, 401 aa, Homo sapiens
ARGAGLARRRRAEAGPEGWGRRGGGGRRSAPLQLGFMSRQAKDDFLRHYTVSDPRTHPKGYTEYKVTAQFISKKDPEDVKEVRLLGGRGTVLQFQIWKLLKGQLVVVWKRYSDFRKLHGDLAYTHRNLFRRLEEFPAFPRAQVFGRFEASVIEERRKGAEDLLRFTVHIPALNNSPQLKEFFRGGEVTRPLEVSRDLHILPPPLIPTPPPDDPRLSQLLPAERRGLEELEVPVDPPPSSPAQEALDLLFNCESTEEASGSPARGPLTEAELALFDPFSKEEGAAPSPTHVAELATMEVESARLDQEPWEPGGQEEEEDGEGGPTPAYLSQATELITQALRDEKAGAYAAALQGYRDGVHVLLQGVPSDPLPARQEGVKKKAAEYLKRAEEILRLHLSQLPP

SEQ ID NO: 776484 - protein, 356 aa, Homo sapiens
PRDPPTTIRGRRGGGGRRSAPLQLGFMSRQAKDDFLRHYTVSDPRTHPKGYTEYKVTAQVVVWKRYSDFRKLHGDLAYTHRNLFRRLEEFPAFPRAQVFGRFEASVIEERRKGAEDLLRFTVHIPALNNSPQLKEFFRGGEVTRPLEVSRDLHILPPPLIPTPPPDDPRLSQLLPAERRGLEELEVPVDPPPSSPAQEALDLLFNCESTEEASGSPARGPLTEAELALFDPFSKEEGAAPSPTHVAELATMEVESARLDQEPWEPGGQEEEEDGEGGPTPAYLSQATELITQALRDEKAGAYAAALQGYRDGVHVLLQGVPSDPLPARQEGVKKKAAEYLKRAEEILRLHLSQLPP

SEQ ID NO: 776485 - protein, 335 aa, Homo sapiens [sequence omitted]

SEQ ID NO: 776486 - protein, 213 aa, Homo sapiens
MGDTAKPYFVKRTKDRGTMDDDDFRRGHPQQDYLIIDDHAKGHGSKMEKGLQKKKITPGNYGNTPRKGPCAVSSNPYAFKNPIYSQPAWMNDSHKDQSKRWLSDEHTGNSDNWREFKPGPRIPVINRQRKDSFQENEDGYRWQDTRGCRTVRRLFHKDLTSLETTSEMEAGSPGNVFQLVRSQPQSQQCFILFHPNEFCYFQQFSFSFSQFLF

SEQ ID NO: 776487 - protein, 677 aa, Homo sapiens
MAKVNITRDLIRRQIKERGALSFERRYHVTDPFIRRLGLEAELQGHSGCVNCLEWNEKGDLLASGSDDQHTIVWDPLHHKKLLSMHTGHTANIFSVKFLPHAGDRILITGAADSKVHVHDLTVKETIHMFGDHTNRVKRIATAPMWPNTFWSAAEDGLIRQYDLRENSKHSEVLIDLTEYCGQLVEAKCLTVNPQDNNCLAVGASGPFVRLYDIRMIHNHRKSMKQSPSAGVHTFCDRQKPLPDGAAQYYVAGHLPVKLPDYNNRLRVLVATYVTFSPNGTELLVNMGGEQVYLFDLTYKQRPYTFLLPRKCHSSGEVQNGKMSTNGVSNGVSNGLHLHSNGFRLPESRGHVSPQVELPPYLERVKQQANEAFACQQWTQAIQLYSKAVQRAPHNAMLYGNRAAAYMKRKWDGDHYDALRDCLKAISLNPCHLKAHFRLARCLFELKYVAEALECLDDFKGKFPEQAHSSACDALGRDITAALFSKNDGEEKKGPGGGAPVRLRSTSRKDSISEDEMVLRERSYDYQFRYCGHCNTTTDIKEANFFGSNAQYIVSGSDDGSFFIWEKETTNLVRVLQGDESIVNCLQPHPSYCFLATSGIDPVVRLWNPRPESEDLTGRVVEDMEGASQANQRRMNADPLEVMLLNMGYRITGLSSGGAGASDDEDSSEGQVQCRPS

SEQ ID NO: 776488 - protein, 597 aa, Homo sapiens
MAKVNITRDLIRRQIKERGALSFERRYHVTDPFIRRLGLEAELQGHSGCVNCLEWNEKGDLLASGSDDQHTIVWDPLHHKKLLSMHTGHTANIFSVKFLPHAGDRILITGAADSKVHVHDLTVKETIHMFGDHTNRVKRIATAPMWPNTFWSAAEDGLIRQYDLRENSKHSEVLIDLTEYCGQLVEAKCLTVNPQDNNCLAVGASGPFVRLYDIRMIHNHRKSMKQSPSAGVHTFCDRQKPLPDGAAQYYVAGHLPVKLPDYNNRLRVLVATYVTFSPNGTELLVNMGGEQVYLFDLTYKQRPYTFLLPRKCHSSGEVQNGKMSTNGVSNGVSNGLHLHSNGFRLPESRGHVSPQVELPPYLERVKQQANEAFACQQWTQAIQLYSKAVQRAPHNAMLYGNRAAAYMKRKWDGDHYDALRDCLKAISLNPCHLKAHFRLARCLFELKYVAEALECLDDFKGKFPEQAHSSACDALGRDITAALFSKNDGEEKKGPGGGAPVRLRSTSRKDSISEDEMVLRERSYDYQFRYCGHCNTTTDIKEANFFGRSEALKRRVQPSWQREVEWGVLGHNGFREESQIPALPLYPWANGFTFVSL

SEQ ID NO: 776489 - protein, 677 aa, Homo sapiens; identical to SEQ ID NO: 776487

SEQ ID NO: 776490 - protein, 574 aa, Homo sapiens
MAKVNITRDLIRRQIKERGALSFERRYHVTDPFIRRLGLEAELQGHSGCVNCLEWNEKGDLLASGSDDQHTIVWDPLHHKKLLSMHTGHTANIFSVKFLPHAGDRILITGAADSKVHVHDLTVKETIHMFGDHTNRVKRIATAPMWPNTFWSAAEDGLIRQYDLRENSKHSEVLIDLTEYCGQLVEAKCLTVNPQDNNCLAVGASGPFVRLYDIRMIHNQQKEHEAEPFSGCAHLHSNGFRLPESRGHVSPQVELPPYLERVKQQANEAFACQQWTQAIQLYSKAVQRAPHNAMLYGNRAAAYMKRKWDGDHYDALRDCLKAISLNPCHLKAHFRLARCLFELKYVAEALECLDDFKGKFPEQAHSSACDALGRDITAALFSKNDGEEKKGPGGGAPVRLRSTSRKDSISEDEMVLRERSYDYQFRYCGHCNTTTDIKEANFFGSNAQYIVSGSDDGSFFIWEKETTNLVRVLQGDESIVNCLQPHPSYCFLATSGIDPVVRLWNPRPESEDLTGRVVEDMEGASQANQRRMNADPLEVMLLNMGYRITGLSSGGAGASDDEDSSEGQVQCRPS

SEQ ID NO: 776491 - protein, 574 aa, Homo sapiens; identical to SEQ ID NO: 776490

SEQ ID NO: 776492 - protein, 574 aa, Homo sapiens; identical to SEQ ID NO: 776490

SEQ ID NO: 776493 - protein, 574 aa, Homo sapiens; identical to SEQ ID NO: 776490

SEQ ID NO: 776494 - protein, 442 aa, Homo sapiens
MAKVNITRDLIRRQIKERGALSFERRYHVTDPFIRRLGLEAELQGHSGCVNCLEWNEKGDLLASGSDDQHTIVWDPLHHKKLLSMHTGHTANIFSVKFLPHAGDRILITGAADSKVHVHDLTVKETIHMFGDHTNRVKRIATAPMWPNTFWSAAEDGLIRQYDLRENSKHSEVLIDLTEYCGQLVEAKCLTVNPQDNNCLAVGASGPFVRLYDIRMIHNHRKSMKQSPSAGVHTFCDRQKPLPDGAAQYYVAGHLPVKLPDYNNRLRVLVATYVTFSPNGTELLVNMGGEQVYLFDLTYKQRPYTFLLPRKCHSSGEVQNGKMSTNGVSNGVSNGLHLHSNGFRLPESRGHVSPQVELPPYLERVKQQANEAFACQQWTQAIQLYSKAVQRAPHNAMLYGNRAAAYMKRKWDGDHYDAPRDCHDHHYHYHHHCHHHRYHHHH

SEQ ID NO: 776495 - protein, 615 aa, Homo sapiens
MAKVNITRDLIRRQIKERGALSFERRYHVTDPFIRRLGLEAELQGHSGCVNCLEWNEKGDLLASGSDDQHTIVWDPLHHKKLLSMHTGHTANIFSVKFLPHAGDRILITGAADSKVHVHDLTVKETIHMFGDHTNRVKRIATAPMWPNTFWSAAEDGLIRQYDLRENSKHSEVLIDLTEYCGQLVEAKCLTVNPQDNNCLAVGASGPFVRLYDIRMIHNHRKSMKQSPSAGVHTFCDRQKPLPDGAAQYYVAGHLPVKLPDYNNRLRVLVATYVTFSPNGTELLVNMGGEQVYLFDLTYKQRPYTFLLPRKCHSSGEVQNGKMSTNGVSNGVSNGLHLHSNGFRLPESRGHVSPQVELPPYLERVKQQANEAFACQQWTQAIQLYSKAVQRAPHNAMLYGNRAAAYMKRKWDGDHYDALRDCLKAISLNPCHLKAHFRLARCLFELKYVAEALECLDDFKGKFPEQAHSSACDALGRDITAALFSKNDGEEKKGPGGGAPVRLRSTSRKDSISEDEMVLRERSYDYQFRYCGHCNTTTDIKEANFFGRRPPTWSVCSKGMSPLSTACSHTPATASWPPVASILLCGSGTPDQRVKTSQAESWKIWRVLHRPTSGA

SEQ ID NO: 776496 - protein, 574 aa, Homo sapiens; identical to SEQ ID NO: 776490

SEQ ID NO: 776497 - protein, 494 aa, Homo sapiens
MAKVNITRDLIRRQIKERGALSFERRYHVTDPFIRRLGLEAELQGHSGCVNCLEWNEKGDLLASGSDDQHTIVWDPLHHKKLLSMHTGHTANIFSVKFLPHAGDRILITGAADSKVHVHDLTVKETIHMFGDHTNRVKRIATAPMWPNTFWSAAEDGLIRQYDLRENSKHSEVLIDLTEYCGQLVEAKCLTVNPQDNNCLAVGASGPFVRLYDIRMIHNQQKEHEAEPFSGCAHLHSNGFRLPESRGHVSPQVELPPYLERVKQQANEAFACQQWTQAIQLYSKAVQRAPHNAMLYGNRAAAYMKRKWDGDHYDALRDCLKAISLNPCHLKAHFRLARCLFELKYVAEALECLDDFKGKFPEQAHSSACDALGRDITAALFSKNDGEEKKGPGGGAPVRLRSTSRKDSISEDEMVLRERSYDYQFRYCGHCNTTTDIKEANFFGRSEALKRRVQPSWQREVEWGVLGHNGFREESQIPALPLYPWANGFTFVSL

SEQ ID NO: 776498 - protein, 194 aa, Homo sapiens
RYSGPFLQRDLGSWRPRLWTQWWSREVPVSGPLSLGAPGAQGHQPWRSPGLLPSTPNPTPCCWVLLYDPGCSGSTGAGHTCHGDSGHRAGEVGAHSLAATAISWALGELPPPPHLCSLQGEKCQLRPGELSHWGLRGPDATVSRAMGEMHRHACEAWGPYLPLAWPLSPPTPGQPQERGSVASLAHMIGSVATW

SEQ ID NO: 776499 - protein, 103 aa, Homo sapiens
ISVNFSSLPAQKNDAVLCAVPMNTTRRALLSDSAFQGASQGFEAASSLSSLKFFWISSMAWRDIFKTMEIFQDWQKGSPRHSAKTITNISYVKKNPKLKISGT

SEQ ID NO: 776500 - protein, 98 aa, Homo sapiens
VFGRWGHDWVRLRFWRLPNHFQPYGLGKLAYLSSLSDTTGFCDPWFAPGVKPSYLLSLAPLTTSVGVLTPAPALVLVHFLSPALLGLPEVTSVFKDLC

SEQ ID NO: 776501 - protein, 67 aa, Homo sapiens
LPALPAQVDHAAQGPWISSESDWWGHYNLVPCPQMPCRDNQWKSCVLSIRLLMSLQSSTLKLTSNHK

SEQ ID NO: 776502 - protein, 37 aa, Homo sapiens
LSIGEGGFWEGTVKGRTGWFPADCVEEVQMRQHDTRP

SEQ ID NO: 776503 - protein, 130 aa, Homo sapiens
LRPSELHGLGREAVPRAGLASPGELLAAGGGRAAGSSELIRKSRKPMTSLGTWASYASAGCHGSGSLSAAPRGHLLVGGARTFIHERGRTGPPLRPPRGRGGGITGFSAGQPWFGLSSAASWPRGLGQIS

SEQ ID NO: 776504 - protein, 133 aa, Homo sapiens
RLPQDWLPALKEPPGSPWHNSLHEAPSRRRAHCPEPDTVRDGGLTESRPRTGPPLDPESRPQASPSPGSPQTLSVGTQGLEPLDYILVALIWDLIFNLSNSGIKEKRLRQARPGFLAQAFGSLNKRKKSKRRK

SEQ ID NO: 776505 - protein, 248 aa, Homo sapiens
QVLGSQSRDCHPKACRVSPMTMSGPKKYPESLSRSGKPHHVRLENFRKMEGMVHPILHRKMSPQNIGAARPIKRSLEDLDLVIAGKKARAVSPLDPSKEVSGKEKASEQESEGSKAAHGGHSGGGSEGHKLPLSSPIFPGLYSGSLCNSGLNSRLPAGYSHSLQYLKNQTVLSPLMQPLAFHSLVMQRGIFTSPTNSQQLYRHLAAATPVGSSYGDLLHNSIYPLAAINPQAAFPSSQLSSVHPSTKL

SEQ ID NO: 776506 - protein, 248 aa, Homo sapiens; identical to SEQ ID NO: 776505

SEQ ID NO: 776507 - protein, 248 aa, Homo sapiens; identical to SEQ ID NO: 776505

SEQ ID NO: 776508 - protein, 248 aa, Homo sapiens; identical to SEQ ID NO: 776505

SEQ ID NO: 776509 - protein, 248 aa, Homo sapiens; identical to SEQ ID NO: 776505

SEQ ID NO: 776510 - protein, 248 aa, Homo sapiens; identical to SEQ ID NO: 776505

SEQ ID NO: 776511 - protein, 248 aa, Homo sapiens; identical to SEQ ID NO: 776505

SEQ ID NO: 776512 - protein, 117 aa, Homo sapiens
MAGWQLAPWRWPPQPRPIGEEANVLVLWNGKGKKLLYCWAWERVRCSMTHTGIPHSPRHTQRRPHTTLVTLKKAAACLVRKPRVMFLSTEICTASQADPQGMGLMLGLGLLVLLAPC

SEQ ID NO: 776513 - protein, 106 aa, Homo sapiens
MIPILLATSKAWSSGASGHMPSSLHQVDSVLALATPMSWSLLPSSLHQVDSVLALATLMSWSSLPSSLHQVDSVLTLATQMSWNSFIACSIWCLLALTSTVDTSVL

SEQ ID NO: 776514 - protein, 71 aa, Homo sapiens
GFRPQEFGTIESSENMSRRYDSRTTIFSPEGRLYQVEYAMEAIGHAGTCLGILANDGVLLAAERRNIHKLL

SEQ ID NO: 776515 - protein, 67 aa, Homo sapiens
RQRIFLCLAEEGGPPSVEIATLTRENGKTVIRVLKQKEVEQLIKKHEEEEAKAEREKKEKEQKEKDK

SEQ ID NO: 776516 - protein, 67 aa, Homo sapiens; identical to SEQ ID NO: 776515

SEQ ID NO: 776517 - protein, 261 aa, Homo sapiens
MSRRYDSRTTIFSPEGRLYQVEYAMEAIGHAGTCLGILANDGVLLAAERRNIHKLLDEVFFSEKIYKLNEDMACSVAGITSDANVLTNELRLIAQRYLLQYQEPIPCEQLVTALCDIKQAYTQFGGKRPFGVSLLYIGWDKHYGFQLYQSDPSGNYGGWKATCIGNNSAAAVSMLKQDYKEGEMTLKSALALAIKVLNKTMDVSKLSAEKVEIATLTRENGKTVIRVLKQKEVEQLIKKHEEEEAKAEREKKEKEQKEKDK

SEQ ID NO: 776518 - protein, 261 aa, Homo sapiens; identical to SEQ ID NO: 776517

SEQ ID NO: 776519 - protein, 261 aa, Homo sapiens; identical to SEQ ID NO: 776517

SEQ ID NO: 776520 - protein, 261 aa, Homo sapiens; identical to SEQ ID NO: 776517

SEQ ID NO: 776521 - protein, 261 aa, Homo sapiens; identical to SEQ ID NO: 776517

SEQ ID NO: 776522 - protein, 104 aa, Homo sapiens
MTLHRLLCDGPTAGNGPRRPPSGASQCQAWTPGPARGRAEGGGLWAGPRVGVASVLRSSELYKVQKTCLEDMTPGPLYFLQKVAYTKLNMPWKLLDMQAPVWEF

SEQ ID NO: 776523 - protein, 69 aa, Homo sapiens
  misc_feature (15)..(16): Xaa can be any naturally occurring amino acid
RFPESRCSTIRDNTXXAVLEIATLTRENGKTVIRVLKQKEVEQLIKKHEEEEAKAEREKKEKEQKEKDK

SEQ ID NO: 776524 - protein, 166 aa, Homo sapiens
MTMTFSITYYQLPPLKPQSKHHLPLCSASIITQHHQRHHHFSPSQRSRQHLHHPSTHLQACNVPLITMITHPHVLRDIRDAPAQRARAYTQRTLSLGCRERDPITRTSYNAETSTSTILCPQSSSRHNVLSPRADSHSNHTGITRRRYQRLHRATEVDTQDTIYGI

SEQ ID NO: 776525 - protein, 261 aa, Homo sapiens; identical to SEQ ID NO: 776517

SEQ ID NO: 776526 - protein, 261 aa, Homo sapiens; identical to SEQ ID NO: 776517

SEQ ID NO: 776527 - protein, 261 aa, Homo sapiens; identical to SEQ ID NO: 776517

SEQ ID NO: 776528 - protein, 261 aa, Homo sapiens; identical to SEQ ID NO: 776517

SEQ ID NO: 776529 - protein, 70 aa, Homo sapiens
LSLCGSRRDFTDEETKAQRSKVTFQKVTQPVSDGRINPGLPDVAAQVLSSMPCWEEETKREKRVEMDGRR

SEQ ID NO: 776530 - protein, 39 aa, Homo sapiens
  misc_feature (32)..(32): Xaa can be any naturally occurring amino acid
MSEEAGDETPDVDPELLRYLLGRILVGKRGTXEGVGSPV

SEQ ID NO: 776531 - protein, 180 aa, Homo sapiens
MADSELQLVEQRIRSFPDFPTPGVVFRDISPVLKDPASFRAAIGLLARHLKATHGGRIDYIAGLDSRGFLFGPSLAQELGLGCVLIRKRGKLPGPTLWASYSLEYGKAELEIQKDALEPGQRVVVVDDLLATGGTMNAACELLGRLQAEVLECVSLVELTSLKGREKLAPVPFFSLLQYE

SEQ ID NO: 776532 - protein, 180 aa, Homo sapiens; identical to SEQ ID NO: 776531

SEQ ID NO: 776533 - protein, 180 aa, Homo sapiens; identical to SEQ ID NO: 776531

SEQ ID NO: 776534 - protein, 122 aa, Homo sapiens
PIPWSTGGPQSGAWQLPPLSDEHAAQSKLLGQELPGPTLWASYSLEYGKAELEIQKDALEPGQRVVVVDDLLATGGTMNAACELLGRLQAEVLECVSLVELTSLKGREKLAPVPFFSLLQYE

SEQ ID NO: 776535 - protein, 125 aa, Homo sapiens
PGGGAVKQDRWVGGGPRVDISPVLKDPASFRAAIGLLARHLKATHGGRIDYIAGLDSRGFLFGPSLAQELGLGCVLIRKRGKLPGPTLWASYSLEYGKAELEIQKDALEPGQRVVVVDDLLATGV

SEQ ID NO: 776536 - protein, 180 aa, Homo sapiens; identical to SEQ ID NO: 776531

SEQ ID NO: 776537 - protein, 199 aa, Homo sapiens
MGYPGPPGNYGIAGSSHAAMADSELQLVEQRIRSFPDFPTPGVVFRDISPVLKDPASFRAAIGLLARHLKATHGGRIDYIAGLDSRGFLFGPSLAQELGLGCVLIRKRGKLPGPTLWASYSLEYGKAELEIQKDALEPGQRVVVVDDLLATGGTMNAACELLGRLQAEVLECVSLVELTSLKGREKLAPVPFFSLLQYE

SEQ ID NO: 776538 - protein, 180 aa, Homo sapiens; identical to SEQ ID NO: 776531

SEQ ID NO: 776539 - protein, 253 aa, Homo sapiens
MVTLGPPGIMGSLALRTRPWPTPSCSWLSSGSAASPTSPPQAWYSGARTGRPRGAPTCGPTDGSAWPATSGRAGREPSSFAPGALPSFGPGVTRPVLGSRDISPVLKDPASFRAAIGLLARHLKATHGGRIDYIAGLDSRGFLFGPSLAQELGLGCVLIRKRGKLPGPTLWASYSLEYGKAELEIQKDALEPGQRVVVVDDLLATGGTMNAACELLGRLQAEVLECVSLVELTSLKGREKLAPVPFFSLLQYE

SEQ ID NO: 776540 - protein, 153 aa, Homo sapiens
MGYPGPPGNYGIAGSSHAAMADSELQLVEQRIRSFPDFPTPGVVFRDISPVLKDPASFRAAIGLLARHLKATHGGRIDYIAGLDSRGFLFGPSLAQELGLGCVLIRKRGKLPGPTLWASYSLEYGKAELEIQKDALEPGQRVVVVDDLLATGV

SEQ ID NO: 776541 - protein, 181 aa, Homo sapiens
MGYPGPPGNYGIAGSSHAAMADSELQLVEQRIRSFPDFPTPGVVFRDISPVLKDPASFRAAIGLLARHLKATHGGRIDYIAGLDSRGFLFGPSLAQELGLGCVLIRKRGKLPGPTLWASYSLEYGKAELEIQKDALEPGQRVVVVDDLLATGGAGLEHLLSAAQANWGPHPPIPRNHERCL

SEQ ID NO: 776542 - protein, 164 aa, Homo sapiens
MGYPGPPGNYGIAGSSHAAMADSELQLVEQRIRSFPDFPTPGVVFRCTHRPPSWRPDLRAYGWERVARDLRAGGAGTLVFRPRGPALLRPRRHQACPWVQGHLARPEGPRLLPRRHRPPGATPEGDPRGPHRLHRRLSWRFRKTPWSQDRGWSSWMICWPLVEP

SEQ ID NO: 776543 - protein, 128 aa, Homo sapiens
MGYPGPPGNYGIAGSSHAAMADSELQLVEQRIRSFPDFPTPGVVFRDISPVLKDPASFRAAIGLLARHLKATHGGRIDYIAGLDSRGFLFGPSLAQELGLGCVLIRKRGKLPGPTLWASYSLEYGKEP

SEQ ID NO: 776544 - protein, 227 aa, Homo sapiens
MVTLGPPGIMGSLALRTRPWPTPSCSWLSSGSAASPTSPPQAWYSGARTGRPRGAPTCGPTDGSAWPATSGRAGREPSSFAPGALPSFGPGVTRPVLGSRDISPVLKDPASFRAAIGLLARHLKATHGGRIDYIAGECPVAASRALPPLRAPRAARGLCASAWGRAFGVLQGAPGRAPCLGRPGRVVRLSPRGRRAVQASFPQVPGPQPRTGVTELPGQLVSLECPS

SEQ ID NO: 776545 - protein, 153 aa, Homo sapiens; identical to SEQ ID NO: 776540

SEQ ID NO: 776546 - protein, 275 aa, Homo sapiens
MGYPGPPGNYGIAGSSHAAMADSELQLVEQRIRSFPDFPTPGVVFRDISPVLKDPASFRAAIGLLARHLKATHGGRIDYIAGLDSRGFLFGPSLAQELGLGCVLIRKRGKLPGPTLWASYSLEYGKAELEIQKDALEPGQRVVVVDDLLATGGKGLPAANCCGSKGLVGVGQDLAVYMGCSLLLSRGCLVARPTPSSPHAFPSPTQGLAWSTCSLQPRPTGDLTLPSPGTMNAACELLGRLQAEVLECVSLVELTSLKGREKLAPVPFFSLLQYE

SEQ ID NO: 776547 - protein, 107 aa, Homo sapiens
MVHVTGLSAGSQPGTPCHRPTLAPGDSHAAESLLSLTLTGLDSRGFLFGPSLAQELGLGCVLIRKRGKLPGPTLWASYSLEYGKKVRGLGWPEEGQGQATVATLPQF

SEQ ID NO: 776548 - protein, 130 aa, Homo sapiens [sequence omitted]

SEQ ID NO: 776549 - protein, 154 aa, Homo sapiens
MGYPGPPGNYGIAGSSHAAMADSELQLVEQRIRSFPDFPTPGVVFRDISPVLKDPASFRAAIGLLARHLKATHGGRIDYIAGLDSRGFLFGPSLAQELGLGCVLIRKRGKLPGPTLWASYSLEYGKCVSLVELTSLKGREKLAPVPFFSLLQYE

SEQ ID NO: 776550 - protein, 878 aa, Homo sapiens
DVWKQFLEDVTTATVTILDQEAAGSLILPAPPIVVTLADYDHVEEVTKEGVKKSPSPGYPLVCVTPCDPHFPRYAVMKERCSEAGINQTSVQVQLGRWLPHTDGNGARSPFETITDNTPFTSVNHMVLDSIYFSRRFHVRCVAKAVDKVGHVGTPLRSNIVTIGTDSAICHTPVVAGTSRGFQAQSFIATLKYLDVKHKEHPNRIHISVQIPHQDGMLPLISTMPLHNLHFLLSESIYRHQHVCSNLVTTYDLRGISEAGFLDDVVYDSTALGPGYDRPFQFDPSVREPKTIQLYKHLNLKSCVWTFDAYYDMTELIDVCGGSVTADFQVRDSAQSFLTVHVPLYVSYIYVTAPRGWASLEHHTEMEFSFFYDTVLWRTGIQTDSVLSARLQIIRIYIREDGRLVIEFKTHAKFRGQFVMEHHTLPEVKSFVLTPDHLGGIEFDLQLLWSAQTFDSPHQLWRATSSYNRKDYSGEYTIYLIPCTVQPTQPWVDPGEKPLACTAHAPERFLIPIAFQQTTRPVPVVYSLNTEFQLCNNEKVFLMDPNTSDMSLAEMDYKGAFSKGQILYGRVLWNPEQNLNSAYKLQLEKVYLCTGKDGYVPFFDPTGTIYNEGPQYGCIQPNKHLKHRFLLLDRNQPEVTDKYFHDVPFEAHFASELPDFHVVSNMPGVDGFTLKVDALYKVEAGHQWYLQVIYIIGPDTISGPRVQRSLTAPLRRNRRDLVEPDGQLILDDSLIYDNEGDQVKNGTNMKSLNLEMQELAVAASLSQTGASIGSALAAIMLLLLVFLVACFINRKCQKQRKKKPAEDILEEYPLNTKVEVPKRHPDRVEKNVNRHYCTVRNVNILSEPEAAYTFKGAKVKRLNLEVRVHNNLQDGTEV

SEQ ID NO: 776551 - protein, 878 aa, Homo sapiens; identical to SEQ ID NO: 776550

SEQ ID NO: 776552 - protein, 878 aa, Homo sapiens; identical to SEQ ID NO: 776550

SEQ ID NO: 776553 - protein, 878 aa, Homo sapiens; identical to SEQ ID NO: 776550

SEQ ID NO: 776554 - protein, 310 aa, Homo sapiens
DVLEAVLGDVTTATVTILDQEAAGSLILPAPPIVVTLADYDHVEEVTKEGVKKSPSPGYPLVCVTPCDPHFPRYAVMKERCSEAGINQTSVQVQLGRWLPHTDGNGARSPFETITDNTPFTSVNHMVLDSIYFSRRFHVRCVAKAVDKVGHVGTPLRSNIVTIGTDSAICHTPVVAGTSRGFQAQSFIATLKYLDVKHKEHPNRIHISVQIPHQDGMLPLISTMPLHNLHFLLSESIYRHQHVCSNLVTTYDLRGISEAGFLDDVVYDSTALGPGYDRPFQFDPSVLDALFPSDRGDYRGELTDNDRDPL

SEQ ID NO: 776555 - protein, 643 aa, Homo sapiens
METSSSCESLGSQPAAARPPSVDSLSSASTSHSENSVHTKSASVVSSDSISTSADNFSPDLRVLRESNKLAEMEEPPLLPGENIKDMAKDVTYICPFTGAVRGTLTVTNYRLYFKSMERDPPFVLDASLGVINRVEKIGGASSRGENSYGLETVCKDIRNLRFAHKPEGRTRRSIFENLMKYAFPVSNNLPLFAFEYKEVFPENGWKLYDPLLEYRRQGIPNESWRITKINERYELCDTYPALLVVPANIPDEELKRVASFRSRGRIPVLSWIHPESQATITRCSQPMVGVSGKRSKEDEKYLQAIMDSNAQSHKIFIFDARPSVNAVANKAKGGGYESEDAYQNAELVFLDIHNIHVMRESLRKLKEIVYPNIEETHWLSNLESTHWLEHIKLILAGALRIADKVESGKTSVVVHCSDGWDRTAQLTSLAMLMLDGYYRTIRGFEVLVEKEWLSFGHRFQLRVGHGDKNHADADRSPVFLQFIDCVWQMTRQFPTAFEFNEYFLITILDHLYSCLFGTFLCNSEQQRGKENLPKRTVSLWSYINSQLEDFTNPLYGSYSNHVLYPVASMRHLELWVGYYIRWNPRMKPQEPIHNRYKELLAKRAELQKKVEELQREISNRSTSSSERASSPAQCVTPVQTVV

SEQ ID NO: 776556 - protein, 571 aa, Homo sapiens
MEEPPLLPGENIKDMAKDVTYICPFTGAVRGTLTVTNYRLYFKSMERDPPFVLDASLGVINRVEKIGGASSRGENSYGLETVCKDIRNLRFAHKPEGRTRRSIFENLMKYAFPVSNNLPLFAFEYKEVFPENGWKLYDPLLEYRRQGIPNESWRITKINERYELCDTYPALLVVPANIPDEELKRVASFRSRGRIPVLSWIHPESQATITRCSQPMVGVSGKRSKEDEKYLQAIMDSNAQSHKIFIFDARPSVNAVANKAKGGGYESEDAYQNAELVFLDIHNIHVMRESLRKLKEIVYPNIEETHWLSNLESTHWLEHIKLILAGALRIADKVESGKTSVVVHCSDGWDRTAQLTSLAMLMLDGYYRTIRGFEVLVEKEWLSFGHRFQLRVGHGDKNHADADRSPVFLQFIDCVWQMTRQFPTAFEFNEYFLITILDHLYSCLFGTFLCNSEQQRGKENLPKRTVSLWSYINSQLEDFTNPLYGSYSNHVLYPVASMRHLELWVGYYIRWNPRMKPQEPIHNRYKELLAKRAELQKKVEELQREISNRSTSSSERASSPAQCVTPVQTVV

SEQ ID NO: 776557 - protein, 571 aa, Homo sapiens; identical to SEQ ID NO: 776556

SEQ ID NO: 776558 - protein, 571 aa, Homo sapiens; identical to SEQ ID NO: 776556

SEQ ID NO: 776559 - protein, 571 aa, Homo sapiens; identical to SEQ ID NO: 776556

SEQ ID NO: 776560 - protein, 571 aa, Homo sapiens; identical to SEQ ID NO: 776556

SEQ ID NO: 776561 - protein, 571 aa, Homo sapiens; identical to SEQ ID NO: 776556

SEQ ID NO: 776562 - protein, 571 aa, Homo sapiens; identical to SEQ ID NO: 776556

SEQ ID NO: 776563 - protein, 356 aa, Homo sapiens
MVGVSGKRSKEDEKYLQAIMDSNAQSHKIFIFDARPSVNAVANKAKGGGYESEDAYQNAELVFLDIHNIHVMRESLRKLKEIVYPNIEETHWLSNLESTHWLEHIKLILAGALRIADKVESGKTSVVVHCSDGWDRTAQLTSLAMLMLDGYYRTIRGFEVLVEKEWLSFGHRFQLRVGHGDKNHADADRSPVFLQFIDCVWQMTRQFPTAFEFNEYFLITILDHLYSCLFGTFLCNSEQQRGKENLPKRTVSLWSYINSQLEDFTNPLYGSYSNHVLYPVASMRHLELWVGYYIRWNPRMKPQEPIHNRYKELLAKRAELQKKVEELQREISNRSTSSSERASSPAQCVTPVQTVV

SEQ ID NO: 776564 - protein, 203 aa, Homo sapiens
VTLTPSMGWLHRVIVADFQDESMIKLGYGLLICRMPLSLILQFIDCVWQMTRQFPTAFEFNEYFLITILDHLYSCLFGTFLCNSEQQRGKENLPKRTVSLWSYINSQLEDFTNPLYGSYSNHVLYPVASMRHLELWVGYYIRWNPRMKPQEPIHNRYKELLAKRAELQKKVEELQREISNRSTSSSERASSPAQCVTPVQTVV

SEQ ID NO: 776565 - protein, 252 aa, Homo sapiens
MEEPPLLPGENIKDMAKDVTYICPFTGAVRGTLTVTNYRLYFKSMERDPPFVLDASLGVINRVEKIGGASSRGENSYGLETVCKDIRNLRFAHKPEGRTRRSIFENLMKYAFPVSNNLPLFAFEYKEVFPENGWKLYDPLLEYRRQGIPNESWRITKINERYELCDTYPALLVVPANIPDEELKRVASFRSRGRIPVLSWIHPESQATITRCSQPMVGVSGKRSKEDEKYLQAIMDSNAQSHKILLITLAAL

SEQ ID NO: 776566 - protein, 584 aa, Homo sapiens
MEEPPLLPGENIKDMAKDVTYICPFTGAVRGTLTVTNYRLYFKSMERDPPFVLDASLGVINRVEKIGGASSRGENSYGLETVCKDIRNLRFAHKPEGRTRRSIFENLMKYAFPVSNNLPLFAFEYKEVFPENGWKLYDPLLEYRRQGIPNESWRITKINERYELCDTYPALLVVPANIPDEELKRVASFRSRGRIPVLSWIHPESQATITRCSQPMVGVSGKRSKEDEKYLQAIMDSNAQSHKIFIFDARPSVNAVANKAKGGGYESEDAYQNAELVFLDIHNIHVMRESLRKLKEIVYPNIEETHWLSNLESTHWLEHIKLILAGALRIADKVESGKTSVVVHCSDGWDRTAQLTSLAMLMLDGYYRTIRGFEVLVEKEWLSFGHRFQLRVGHGDKNHADADRSPVFLQFIDCVWQMTRQFPTAFEFNEYFLITILDHLYSCLFGTFLCNSEQQRGKENLPKRTVSLWSYINSQLEDFTNPLYGSYSNHVLYPVASMRHLELWVGYYIRWNPRMKPQVCALQYTMGVFIHAVQLCLRKSSWKDYLCIFKTLLLPWQHSGTSCHQIREGPGLHIMEVDPLERAM

SEQ ID NO: 776567 - protein, 99 aa, Homo sapiens
QGSRHVRDVAKVDLEKGMLGAWEVEGHWRSWRWTERGRPHASKTRFHVCKMRWKAMPPRASGGWQVTERAPRASSSSRVPQGLAWAHQQQQAFRKDLLN

SEQ ID NO: 776568 - protein, 111 aa, Homo sapiens
LGSLLFEMVLTGQRGGQRGCKLPHGLMCAPRRELKPWGLVSRQQKNRLGRLGVVVHLCNPRKIGFGRPRQSDHFRSGIRDQPGQHGETPSLLKMQKKISQAWWLVPVIQLL

SEQ ID NO: 776569 - protein, 74 aa, Homo sapiens
MKSVRKRGQTLNQVPNAQPSLPELRTLARATPAPACRCLHSRSSFLGKQTVDQISKALSFPEFGRAPAQRSPSQ

SEQ ID NO: 776570 - protein, 69 aa, Homo sapiens
SKVVLEEAESPCLPLQRSTSRPVREPSSAPMQSLFLIGECLGTAFVCRCTHRWLRVLMQGCADVYKSRM

SEQ ID NO: 776571 - protein, 110 aa, Homo sapiens
MCGELTGMSQFGYIFLPGSAPFYGVLLNHLRYSIDMKYLALRDHFWSGEICAFLTQNRNLHKSIIGLHSVLTIIVHMPTLNANLGSPSTPTRWVLLLSLTFDQRDCLIRV

SEQ ID NO: 776572 - protein, 54 aa, Homo sapiens
MLVSANLLCFQSDKSPAHTVYPGKPKHWIPLDYTIIFIVILEHIPSAYILKSYL

SEQ ID NO: 776573 - protein, 79 aa, Homo sapiens
EGCGRETRRGGEEKQTPGRDRDGREMEGHLRYRELGPPNSSGFQGNGDGGAPGMIPSPWNGSELTPRTSQFHFNVPLTP

SEQ ID NO: 776574 - protein, 258 aa, Homo sapiens
  misc_feature (14)..(14): Xaa can be any naturally occurring amino acid
EVTLERSLAGRSPXLAVGSEVLEQVLHTLSKSGSLEELVLDNAGLKTDFVQKLAGVFGENGSCVLHALTLSHNPIEDKGFLSLSQQLLCFPSGLTKLCLAKTAISPRGLQALGQTFGANPAFASSLRYLDLSKNPGLLATDEANALYSFLAQPNALVHLDLSGTDCVIDLLLGALLHGCCSHLTYLNLARNSCSHRKGREAPPAFKQFFSSAYTLSHVNLSATKLPLEALRALLQGLSLNSHLSDLHLDLSSCEVSPQ

SEQ ID NO: 776575 - protein, 122 aa, Homo sapiens
MPQAPGQLMPGVHTPGQGSGQLMPGVHTPGQGSGQLMPGVHTPGQGSGQLMPGVHTPGQGSGQLMPGVHTPGQAPGQLMPGVHTPGQGSGTVDAWVSNSWKGPRDSDPGVQSWQALASVLGS

SEQ ID NO: 776576 - protein, 122 aa, Homo sapiens
RIKIFPFGCSNGGSQYNLSKMERKSKEKPKTARVSQSTEPGRGQNELAPAASPQGGCPEHLVQKLSPDKWSTPRGICSPALKAALGCGHNLLSISYITSAEPLASRIEIPTLFFHASSLLHH

SEQ ID NO: 776577 - protein, 114 aa, Homo sapiens
MRSVGFIRGFCFHLALILPACRHVRPAFRHDCEAFPATWNCESIKPLFLYKLPSLRNVFVTTDFYFLNWKMHMTSLISPYIKTHDEVLRGTRNHRDRKQNGGCQQLEGGGNGEF

SEQ ID NO: 776578 - protein, 50 aa, Homo sapiens
MVIVLYLSRKYQIRGHWYPPELQARTCVDEYLAWKHVTIQLPATNVYLCK

SEQ ID NO: 776579 - protein, 100 aa, Homo sapiens
VFIFQFVNFYSSPVYIAFFKGRFVGYPGNYHTLFGVRNEEVSVPEARDWGMSCVLPLTSILPFSFDLQQFLPPPAISIAQPGPAVQLTTQGSQPLFTTYS

SEQ ID NO: 776580 - protein, 115 aa, Homo sapiens
ERERGKDCLLEIWCEPDPRYPSVICTPGLEGGAGVGGVVKSSFQVALSIPGERGRQTQVLGPGTRGTVWTDMRGLVYPAEGLAFALEAVETVSQVGMAGSDLGFKSLPLAAKSLL

SEQ ID NO: 776581 - protein, 30 aa, Homo sapiens
QEPRQLTVETFHPVTLCLKGALGMKSEYAM

SEQ ID NO: 776582 - protein, 116 aa, Homo sapiens
LNHPGQISAGYAPVLDCHTAHIACKFAELKEKIDRRSGKKLEDGPKFLKSGDAAIVDMVPGKPMCVESFSDYPPLGRFAVRDMRQTVAVGVIKAVDKKAAGAGKVTKSAQKAQKAK

SEQ ID NO: 776583 - protein, 109 aa, Homo sapiens
TGEKQPRPHGFRCSHGSKRAPALLGAPARRPPAHIPAQPRWPRLQPVAKRRARPVPPGLPGAPKQAALTPGRRPLTPAAFAPKASRDQQMGPLRCKEFNLSQVTQFGRG

SEQ ID NO: 776584 - protein, 224 aa, Homo sapiens
WIRILFGFRGFCKNIIICYITEYHPGAKKVSESTTKNDPVKNIHIESSHNIDLNKIAMNSNLQVVVKRLEDTISIAKKSWNNQPLSEGYKASKKLIEIDGKDQHADRNMTLTLNRMTCKEQSLSKSVVASGNIINSHCMPTVDLNNKRLENLKKSSILDMGRLISSVENVPAKYEGTESSSVSNYSSPIKLMFLSEVKSSEGVKYTLTSVGTSHSNVVLPSEKP

SEQ ID NO: 776585 - protein, 190 aa, Homo sapiens
RCARLAGGTVSSRQTPTGPAGMEQPPPLAPEPASARSRRRREPESPPAPIPLFGARTVVQRSPDEPALSKAEFVEKVRQSNQACHDGDFHTAIVLYNEALAVDPQNCILYSNRSAAYMKTQQYHKALDDAIKARLLNPKWPKAYFRQGVALQYLGRHADALAAFASGLAQDPKSLQLLVGMVEAAMKSPM

SEQ ID NO: 776586 - protein, 79 aa, Homo sapiens
SKVCLNDPFKEFCQLVRFVLFLLLWMDEKAVIKPSLKNQRQRQDSYILNSLFWILGGCKNIKSYIAFSTVEKYNLTKAP

SEQ ID NO: 776587 - protein, 213 aa, Homo sapiens
AVAAALAEVRARTWKMLLAPQGRSFSKKRMGLNRWKRFTRKPSPKPTFGPDSVEHWIKRVEKASEFAVSNAFFTRNSDLPRSPWGQITDLKTSEQIEDHDEIYAEAQELVNDWLDTKLKQELASEEEGDAKNTVSSVTIMPGANGHLKYDKFDDLCGYLEEEEESTTVQKFIDHLLHKNVVDSAMMEDLGRKENQDKKQQKDPRLTMEMRHKQ

SEQ ID NO: 776588 - protein, 111 aa, Homo sapiens
HGNNDHHTSLYCVFCYSNHTPPSRTGMNRYYSERGTRPRPTAGLTILSACPSSQWMSNSWLNPSAMESWLALGRGEAGGWLGPGLDQGGWGPRFPPCIRSWHRDCPHCTDR

SEQ ID NO: 776589 - protein, 90 aa, Homo sapiens
ADVACSYEGQSVGPMDSGDREVALAASAWHCPGRGSPAANMTILPAGGACPGVVLAAICPAQHLLVVIVCSTLEALPVHWGSHVPSHWVI

SEQ ID NO: 776590 - protein, 64 aa, Homo sapiens
MRGARPGPSPGYVIPGPTGRLCIQSCLCGTLKRDVLHSPSVVFNTTRGGTAEWSREGKRSQERL

SEQ ID NO: 776591 - protein, 38 aa, Homo sapiens
WVHWSSRGALVIWAEPTSLRLGTHPQDRHLLELSGSLD

SEQ ID NO: 776592 - protein, 44 aa, Homo sapiens
PTSHWALRVVWGAMGRLQLYGSQPATQRKPAHFPFSSPAEMLTP

SEQ ID NO: 776593 - protein, 129 aa, Homo sapiens
AVPSNGDQSPTPPTSSFSCFTLLHHPPPNFIVFSSLKTSLDMHKTKFLFWGPVNTYSDFFLVPRLTPFSGKPSYFVSSEHFLAGAPAKWGEFHWSTPPNFWERVHSHQPILSAFPSLGLSYLWKSFRDF

SEQ ID NO: 776594 - protein, 77 aa, Homo sapiens
PPFSALSHGTLFHPGFLLSTSSTRVSHGALFLHLGFILSSSSSYVSSSELLLPRECPMGLLLPPCVILRHSFTCVPH

SEQ ID NO: 776595 - protein, 92 aa, Homo sapiens
GGQPGVVVVESVAPVGSGLSPGTAFGSPSIGTIPTLGPKVAMLLWICFPSRGSSACPLPAHSMAWEQLRLGASSSRVDSWKCYQCLLWRLDP

SEQ ID NO: 776596 - protein, 101 aa, Homo sapiens
MLLEREIAALSLAPLLPSVLSTSYLSSVYIILQVSCSTVVALLGTPVMWFKVGASQSERYSFFHPEHLHNVPWANSLNRLFPTFYSCKIAVIRVFFSLIYH

SEQ ID NO: 776597 - protein, 111 aa, Homo sapiens
RTSSQVSSGCQLSSVPCDCRTEISVFLLAVSQGPLAAPRGLPCSHCMLPPASRGGSPCMETLLHFTSLQEVLSPSKELTFTRSSSSDNLSILNLTDLGSRLHLLTCFCHKL

SEQ ID NO: 776598 - protein, 150 aa, Homo sapiens
KDSALGDSNGEKGRNKQKDGEKATTSDLGEPGAGILQPQCTWKITLIAMWRVNCGRTPVEAGRLNQKTVTVVQIRDAYVINRHVKKMLCFPFAFCHDCEFREASTAMLPVLQNCLRLDITSSEQSSLMTQLLYISGWNPPLCSNESVAVC

SEQ ID NO: 776599 - protein, 260 aa, Homo sapiens
MMWSNFFLQEENRRRGAAGRRRAHGQGRSGLTPEREGKVKLALLLAAVGATLAVLSVGTEFWVELNTYKANGSAVCEAAHLGLWKACTKRLWQADVPVDRDTCGPAELPGEANCTYFKFFTTGENARIFQRTTKKEVNLAAAVIAVLGLAVMALGCLCIIMVLSKGAEFLLRVGAVCFGLSGLLLLVSLEVFRHSVRALLQRVSPEPPPAPRLTYEYSWSLGCGVGAGLILLLGAGCFLLLTLPSWPWGSLCPKRGHRAT

SEQ ID NO: 776600 - protein, 119 aa, Homo sapiens
GPRRPGSSPLRSKILEANCTYFKFFTTGENARIFQRTTKKGLLLLVSLEVFRHSVRALLQRVSPEPPPAPRLTYEYSWSLGCGVGAGLILLLGAGCFLLLTLPSWPWGSLCPKRGHRAT

SEQ ID NO: 776601 - protein, 211 aa, Homo sapiens
FKQVAEMLSASRYPTISMVKPLLHMLLNTTLNIKETDSKELSMAKEVIAKELSKTYQETPEIDMFLNVATFLDPRYKRLPFLSAFERQQVENRVVEEAKGLLDKVKDGGYRPAEDKIFPVPEEPPVKKLMRTSTPPPASVINNMLAEIFCQTGGVEDQEEWHAQVVEELSNFKSQKVLGLNEDPLKWWSDRLALFPLLPKVLQKYWCVTAT

SEQ ID NO: 776602 - protein, 143 aa, Homo sapiens
VAAPGRASAPPPPPPVYCVCRQPYDVNRFMIECDICKDWFHGSCVGVEEHHAVDIDLYHCPNCAVLHGSSLMKKRRNWHRHDYTEIDDGSKPVQAGTRTFIKELRSRVFPSADEIIIKMHGSQLTQRYLEKHGFDVPIMVPKL

SEQ ID NO: 776603 - protein, 156 aa, Homo sapiens
VTVVEPEAPPSPDVLQAATHRVVELRPPSRSRSTSSSRSRKKAKRKRVSREHGRTRSGTRSESRDRSSRSASPSVGEERPRRQRSKAKSRRSSSDRSSSRERAKRKKAKDKSREHRRGPWGHSRRTSRSRSGSPGSSSYEHYESRKKKKRRSASRP

SEQ ID NO: 776604 - protein, 233 aa, Homo sapiens
MVSDKCHILDLIKAQRRQMLILPEGFREGSWSTLLFRATHHLALHPFLGLFGALSPTQWQAISLTVIEKVQIAAIVLGSLFLVASISWLIWSSLSPSAKWQRQDLLFQICYGMYGFMDVVCIGLIIHEGSSVYRIFKRWQAVNQQWKVLNYDKTKDIGGDAGGGTAGKSGPRNSRTGPTSGATSRPPAAQRMRTLLPQRCGYTILHLLGQLRPPDARSSSHSGREVVMRVTTV

SEQ ID NO: 776605 - protein, 233 aa, Homo sapiens; identical to SEQ ID NO: 776604

SEQ ID NO: 776606 - protein, 292 aa, Homo sapiens
EEEYYGSEPRARGLAGDKEPRAGPLPPPAPPLPPPGALDALSLSSSLDSGLRTPQCRICFQGPEQGELLSPCRCDGSVRCTHQPCLIRWISERGSWSCELCYFKYQVLAISTKNPLQWQAISLTVIEKVQIAAIVLGSLFLVASISWLIWSSLSPSAKWQRQDLLFQICYGMYGFMDVVCIGLIIHEGSSVYRIFKRWQAVNQQWKVLNYDKTKDIGGDAGGGTAGKSGPRNSRTGPTSGATSRPPAAQRMRTLLPQRCGYTILHLLGQLRPPDARSSSHSGREVVMRVTTV

SEQ ID NO: 776607 - protein, 239 aa, Homo sapiens
MAEQGPSSLFLQGELLSPCRCDGSVRCTHQPCLIRWISERGSWSCELCYFKYQVLAISTKNPLQWQAISLTVIEKVQIAAIVLGSLFLVASISWLIWSSLSPSAKWQRQDLLFQICYGMYGFMDVVCIGLIIHEGSSVYRIFKRWQAVNQQWKVLNYDKTKDIGGDAGGGTAGKSGPRNSRTGPTSGATSRPPAAQRMRTLLPQRCGYTILHLLGQLRPPDARSSSHSGREVVMRVTTV

SEQ ID NO: 776608 - protein, 108 aa, Homo sapiens
MPTSARLYYRSAECKSVRMRWAAGGRLVAPEVGPVREFLGPDFPAVPPPGISSYVLGCHEGHYSLNWTPGAGILSQCISQRRTLMAAGGTSWTRCLGHAAPVTEDLCG

SEQ ID NO: 776609 - protein, 233 aa, Homo sapiens; identical to SEQ ID NO: 776604

SEQ ID NO: 776610 - protein, 306 aa, Homo sapiens
DKCHILDLIKAQRRQMLILPEGFREGSWSTLLFRATHHLALHPFLGLFGALSPTQWQAISLTVIEKVQIAAIVLGSLFLVASISWLIWSSLSPSAKWQRQDLLFQICYGMYGFMDVVCIGEGTSLSFTCSVSSSYTPNSPAHPLSFLALFSATVAFSAILVPPQPTSLLLQGPLQLYLLTLKKCLLKYLWPRSRPQLTLDFYSYCSGLIIHEGSSVYRIFKRWQAVNQQWKVLNYDKTKDIGGDAGGGTAGKSGPRNSRTGPTSGATSRPPAAQRMRTLLPQRCGYTILHLLGQLRPPDARSSSHS

SEQ ID NO: 776611 - protein, 44 aa, Homo sapiens
TRPSPAVESGRERRGRRARARVWCASEGGGGGGGGGVWGPPPPP

SEQ ID NO: 776612 - protein, 118 aa, Homo sapiens
CWDYKCEPPHPASFSSKSTSYISCVVPSSSKLKSSMTENCPSSAPMMWRGFVSSPNGVGSECVLEASGPPCGLLEMRVSLPQGTDPRNPQVPQRKDLKLLRGTQMLPDLCLGGAAPNR

SEQ ID NO: 776613 - protein, 340 aa, Homo sapiens
WCLCLQNTVNPCPDDTLISFLPLAHMFERVVECVMLCHGAKIGFFQGDIRLLMDDLKVLQPTVFPVVPRLLNRMFDRIFGQANTTLKRWLLDFASKRKEAELRSGIIRNNSLWDRLIFHKVQSSLGGRVRLMVTGAAPVSATVLTFLRAALGCQFYEGYGQTECTAGCCLTMPGDWTAGHVGAPMPCNLIKLVDVEEMNYMAAEGEGEVCVKGPNVFQGYLKDPAKTAEALDKDGWLHTGDIGKLVTNGTWKIIDRKKSTYLGWPTGEYIALKKDGKFLHAKWSLCSGEAKKKRSIPCHGDRSAHQSGPTERNARREHVKNPNGQKPRHRETAYYTGQRT

SEQ ID NO: 776614 - protein, 108 aa, Homo sapiens
FVGTWGLTMLPRLVSNFWAQAIHPPWPGVFAKSMSSLPLCREQAWALSVGIQGFTGCLCVREAAISAHGLPRGAESAGRLRWSWAFPSVPSLQRHELPPVLGCSLRLL

SEQ ID NO: 776615 - protein, 115 aa, Homo sapiens
FQTEPTACSRRQLRTGEATVTPCGSFHPAVGRVLRPRGERETSKHSLERKAGRAPPASHAPLLALPDAICVFSFPCPRPLPKAIGSMAKIPLWGRKKQRRRHELLISKDRQIAGG

SEQ ID NO: 776616 - protein, 105 aa, Homo sapiens
LMRKKCQRQVCMIVVKTAVQRTVRSWKDSRDRQTVSIDPKAQNRTGNNVGWFWGLFLRQGLTVWAQLECSGRIMAQCSLDLLGLGDPPTSDSRVTETTGMCHAQL

SEQ ID NO: 776617 - protein, 181 aa, Homo sapiens
MPGQSPRMCQASPAASTVPDVGICAHPGHILRGRGCLAVSKTEGPWFPQNITNELLRIEPEKTRSTAEGEAFIQALPGSGTTPLLRTQVEDTNRKYEHLLQLLDLAQEKVDVANRLEKSLQQSWELLATHENHLNQDDTVPESSRVLDSKGQELAVSLGPKSWESFSEQVRASGTSTRPSG

SEQ ID NO: 776618 - protein, 1756 aa, Homo sapiens [sequence omitted]

SEQ ID NO: 776619 - protein, 1255 aa, Homo sapiens
MPGQSPRMCQASPAASTVPDVGICAHPGHILRGRGCLAVSKTEGPWFPQNITNELLRIEPEKTRSTAEGEAFIQALPGSGTTPLLRTQVEDTNRKYEHLLQLLDLAQEKVDVANRLEKSLQQSWELLATHENHLNQDDTVPESSRVLDSKGQELAAMACELQAQKSLLGEVEQNLQAAKQCSSTLASRFQEHCPDLERQEAEVHKLGQRFNNLRQQVERRAQSLQSAKAAYEHFHRGHDHVLQFLVSIPSYEPQETDSLSQMETKLKNQKNLLDEIASREQEVQKICANSQQYQQAVKDYELEAEKLRSLLDLENGRSSHVSKRARLQSPATKVKEEEAALAAKFTEVYAINRQRLQNLEFALNLLRQQPEVEVTHETLQRNRPDSGVEEAWKIRKELDEETERRRQLENEVKSTQEEIWTLRNQGPQESVVRKEVLKKVPDPVLEESFQQLQRTLAEEQHKNQLLQEELEALQLQLRALEQETRDGGQEYVVKEVLRIEPDRAQADEVLQLREELEALRRQKGAREAEVLLLQQRVAALAEEKSRAQEKVTEKEVVKLQNDPQLEAEYQQLQEDHQRQDQLREKQEEELSFLQDKLKRLEKERAMAEGKITVKEVLKVEKDAATEREVSDLTRQYEDEAAKARASQREKTELLRKIWALEEENAKVVVQEKVREIVRPDPKAESEVANLRLELVEQERKYRGAEEQLRSYQSELEALRRRGPQVEVKEVTKEVIKYKTDPEMEKELQRLREEIVDKTRLIERCDLEIYQLKKEIQALKDTKPQVQTKEVVQEILQFQEDPQTKEEVASLRAKLSEEQKKQVDLERERASQEEQIARKEEELSRVKERVVQQEVVRYEEEPGLRAEASAFAESIDVELRQIDKLRAELRRLQRRRTELERQLEELERERQARREAEREVQRLQQRLAALEQEEAEAREKVTHTQKVVLQQDPQQAREHALLRLQLEEEQHRRQLLEGELETLRRKLAALEKAEVKEKVVLSESVQVEKGDTEQEIQRLKSSLEEESRSKRELDVEVSRLEARLSELEFHNSKSSKELDFLREENHKLQLERENLQLETRRLQSEINMAATETRDLRNMTVADSGTNHDSRLWSLERELDDLKRLSKDKDLEIDELQKRLGSVAVKREQRENHLRRSIVVIHPDTGRELSPEEAHRAGLIDWNMFVKLRSQECDWEEISVKGPNGESSVIHDRKSGKKFSIEEALQSGRLTPAQYDRYVNKDMSIQELAVLVSGQK

SEQ ID NO: 776620 - protein, 1621 aa, Homo sapiens
MNSLFRKRNKGKYSPTVQTRSISNKELSELIEQLQKNADQVEKNIVDTEAKMQSDLARLQEGRQPEHRDVTLQKVLDSEKLLYVLEADAAIAKHMKHPQGDMIAEDIRQLKERVTNLRGKHKQIYRLAVKEVDPQVNWAALVEEKLDKLNNQSFGTDLPLVDHQVEEHNIFHNEVKAIGPHLAKDGDKEQNSELRAKYQKLLAASQARQQHLSSLQDYMQRCTNELYWLDQQAKGRMQYDWSDRNLDYPSRRRQYENFINRNLEAKEERINKLHSEGDQLLAAEHPGRNSIEAHMEAVHADWKEYLNLLICEESHLKYMEDYHQFHEDVKDAQELLRKVDSDLNQKYGPDFKDRYQIELLLRELDDQEKVLDKYEDVVQGLQKRGQQVVPLKYRRETPLKPIPVEALCDFEGEQGLISRGYSYTLQKNNGESWELMDSAGNKLIAPAVCFVIPPTDPEALALADSLGSQYRSVRQKAAGSKRTLQQRYEVLKTENPGDASDLQGRQLLAGLDKVASDLDRQEKAITGILRPPLEQGRAVQDSAERAKDLKNITNELLRIEPEKTRSTAEGEAFIQALPGSGTTPLLRTQVEDTNRKYEHLLQLLDLAQEKVDVANRLEKSLQQSWELLATHENHLNQDDTVPESSRVLDSKGQELAAMACELQAQKSLLGEVEQNLQAAKQCSSTLASRFQEHCPDLERQEAEVHKLGQRFNNLRQQVERRAQSLQSAKAAYEHFHRGHDHVLQFLVSIPSYEPQETDSLSQMETKLKNQKNLLDEIASREQEVQKICANSQQYQQAVKDYELEAEKLRSLLDLENGRSSHVSKRARLQSPATKVKEEEAALAAKFTEVYAINRQRLQNLEFALNLLRQQPEVEVTHETLQRNRPDSGVEEAWKIRKELDEETERRRQLENEVKSTQEEIWTLRNQGPQESVVRKEVLKKVPDPVLEESFQQLQRTLAEEQHKNQLLQEELEALQLQLRALEQETRDGGQEYVVKEVLRIEPDRAQADEVLQLREELEALRRQKGAREAEVLLLQQRVAALAEEKSRAQEKVTEKEVVKLQNDPQLEAEYQQLQEDHQRQDQLREKQEEELSFLQDKLKRLEKERAMAEGKITVKEVLKVEKDAATEREVSDLTRQYEDEAAKARASQREKTELLRKIWALEEENAKVVVQEKVREIVRPDPKAESEVANLRLELVEQERKYRGAEEQLRSYQSELEALRRRGPQVEVKEVTKEVIKYKTDPEMEKELQRLREEIVDKTRLIERCDLEIYQLKKEIQALKDTKPQVQTKEVVQEILQFQEDPQTKEEVASLRAKLSEEQKKQVDLERERASQEEQIARKEEELSRVKERVVQQEVVRYEEEPGLRAEASAFAESIDVELRQIDKLRAELRRLQRRRTELERQLEELERERQARREAEREVQRLQQRLAALEQEEAEAREKVTHTQKVVLQQDPQQAREHALLRLQLEEEQHRRQLLEGELETLRRKLAALEKAEVKEKVVLSESVQVEKGDTEQEIQRLKSSLEEESRSKRELDVEVSRLEARLSEWNMFVKLRSQECDWEEISVKGPNGESSVIHDRKSGKKFSIEEALQSGRLTPAQYDRYVNKDMSIQELAVLVSGQK

SEQ ID NO: 776621 - protein, 1756 aa, Homo sapiens [sequence omitted]

SEQ ID NO: 776622 - protein, 682 aa, Homo sapiens
MNSLFRKRNKGKYSPTVQTRSISNKELSELIEQLQKNADQVEKNIVDTEAKMQSDLARLQEGRQPEHRDVTLQKVLDSEKLLYVLEADAAIAKHMKHPQGDMIAEDIRQLKERVTNLRGKHKQIYRLAVKEVDPQVNWAALVEEKLDKLNNQSFGTDLPLVDHQVEEHNIFHNEVKAIGPHLAKDGDKEQNSELRAKYQKLLAASQARQQHLSSLQDYMQRCTNELYWLDQQAKGRMQYDWSDRNLDYPSRRRQYENFINRNLEAKEERINKLHSEGDQLLAAEHPGRNSIEAHMEAVHADWKEYLNLLICEESHLKYMEDYHQFHEDVKDAQELLRKVDSDLNQKYGPDFKDRYQIELLLRELDDQEKVLDKYEDVVQGLQKRGQQVVPLKYRRETPLKPIPVEALCDFEGEQGLISRGYSYTLQKNNGESWELMDSAGNKLIAPAVCFVIPPTDPEALALADSLGSQYRSVRQKAAGSKRTLQQRYEVLKTENPGDASDLQGRQLLAGLDKVASDLDRQEKAITGILRPPLEQGRAVQDSAERAKDLKNITNELLRIEPEKTRSTAEGEAFIQALPGSGTTPLLRTQVEDTNRKYEHLLQLLDLAQEKVDVANRLEKSLQQSWELLATHENHLNQDDTVPESSRVLDSKGQELAVSLGPKSWESFSEQVRASGTSTRPSG

SEQ ID NO: 776623 - protein, 38 aa, Homo sapiens
AKFTEVYAINRQRLQNLEFALNLLRQVTDLSKKFYFRL

SEQ ID NO: 776624 - protein, 1756 aa, Homo sapiens [sequence omitted]

SEQ ID NO: 776625 - protein, 1637 aa, Homo sapiens
  misc_feature (1633)..(1633): Xaa can be any naturally occurring amino acid
MNSLFRKRNKGKYSPTVQTRSISNKELSELIEQLQKNADQVEKNIVDTEAKMQSDLARLQEGRQPEHRDVTLQKVLDSEKLLYVLEADAAIAKHMKHPQGDMIAEDIRQLKERVTNLRGKHKQIYRLAVKEVDPQVNWAALVEEKLDKLNNQSFGTDLPLVDHQVEEHNIFHNEVKAIGPHLAKDGDKEQNSELRAKYQKLLAASQARQQHLSSLQDYMQRCTNELYWLDQQAKGRMQYDWSDRNLDYPSRRRQYENFINRNLEAKEERINKLHSEGDQLLAAEHPGRNSIEAHMEAVHADWKEYLNLLICEESHLKYMEDYHQFHEDVKDAQELLRKVDSDLNQKYGPDFKDRYQIELLLRELDDQEKVLDKYEDVVQGLQKRGQQVVPLKYRRETPLKPIPVEALCDFEGEQGLISRGYSYTLQKNNGESWELMDSAGNKLIAPAVCFVIPPTDPEALALADSLGSQYRSVRQKAAGSKRTLQQRYEVLKTENPGDASDLQGRQLLAGLDKVASDLDRQEKAITGILRPPLEQGRAVQDSAERAKDLKNITNELLRIEPEKTRSTAEGEAFIQALPGSGTTPLLRTQVEDTNRKYEHLLQLLDLAQEKVDVANRLEKSLQQSWELLATHENHLNQDDTVPESSRVLDSKGQELAAMACELQAQKSLLGEVEQNLQAAKQCSSTLASRFQEHCPDLERQEAEVHKLGQRFNNLRQQVERRAQSLQSAKAAYEHFHRGHDHVLQFLVSIPSYEPQETDSLSQMETKLKNQKNLLDEIASREQEVQKICANSQQYQQAVKDYELEAEKLRSLLDLENGRSSHVSKRARLQSPATKVKEEEAALAAKFTEVYAINRQRLQNLEFALNLLRQQPEVEVTHETLQRNRPDSGVEEAWKIRKELDEETERRRQLENEVKSTQEEIWTLRNQGPQESVVRKEVLKKVPDPVLEESFQQLQRTLAEEQHKNQLLQEELEALQLQLRALEQETRDGGQEYVVKEVLRIEPDRAQADEVLQLREELEALRRQKGAREAEVLLLQQRVAALAEEKSRAQEKVTEKEVVKLQNDPQLEAEYQQLQEDHQRQDQLREKQEEELSFLQDKLKRLEKERAMAEGKITVKEVLKVEKDAATEREVSDLTRQYEDEAAKARASQREKTELLRKIWALEEENAKVVVQEKVREIVRPDPKAESEVANLRLELVEQERKYRGAEEQLRSYQSELEALRRRGPQVEVKEVTKEVIKYKTDPEMEKELQRLREEIVDKTRLIERCDLEIYQLKKEIQALKDTKPQVQTKEVVQEILQFQEDPQTKEEVASLRAKLSEEQKKQVDLERERASQEEQIARKEEELSRVKERVVQQEVVRYEEEPGLRAEASAFAESIDVELRQIDKLRAELRRLQRRRTELERQLEELERERQARREAEREVQRLQQRLAALEQEEAEAREKVTHTQKVVLQQDPQQAREHALLRLQLEEEQHRRQLLEGELETLRRKLAALEKAEVKEKVVLSESVQVEKGDTEQEIQRLKSSLEEESRSKRELDVEVSRLEARLSELEFHNSKSSKELDFLREENHKLQLERENLQLETRRLQSEINMAATETRDLRNMTVADSGTNHDSRLWSLERELDDLKRLSKDKDLEXLFHG

SEQ ID NO: 776626 - protein, 102 aa, Homo sapiens
GYITSNGIAELNGSPILSSLRNLQTTFHRGSINLHLHQQCISVPFSLQPCQHLLLVDFLVIAILTGVRWYLIVVFIYISLVISDVEHCSCLLAAFHGLLALC

SEQ ID NO: 776627 - protein, 1224 aa, Homo sapiens
MKVRLLRQLSAAAKVKAPSGLQGPPQAHQFISLLLEEYGALCQAARSISTFLGTLENEHLKKFQVTWELHNKHLFENLVFSEPLLQSNLPALVSQIRLGTTTHDTCSEDTYSTLLQRYQRSEEELRRVAEEWLECQKRIDAYVDEQMTMKTKQRMLTEDWELFKQRRFIEEQLTNKKAVTGENNFTDTMRHMLSSRLSMPDCPNCNYRRRCACDDCSLSHILTCGIMDPPVTDDIHIHQLPLQVDPAPDYLAERSPPSVSSASSGSGSSSPITIQQHPRLILTDSGSAPTFCSDDEDVAPLSAKFADIYPLSNYDDTEVVANMNGIHSELNGGGENMALKDESPQISSTSSSSSEADDEEADGESSGEPPGAPKEDGVLGSRSPRTEESKADSPPPSYPTQQAEQAPNTCECHVCKQEASGLTPSAMTAGALPPGHQFLSPEKPTHPALHLYPHIHGHVPLHTVPHLPRPLIHPTLYATPPFTHSKALPPAPVQNHTNKHQVFNASLQDHIYPSCFGNTPEWNSSKFISLWGSEVMNDKNWNPGTFLPDTISGSEILGPTLSETRPEALPPPSSNETPAVSDSKEKKNAAKKKCLYNFQDAFMEANKVVMATSSATSSVSCTATTVQSSNSQFRVSSKRPPSVGDVFHGISKEDHRHSAPAAPRNSPTGLAPLPALSPAALSPAALSPASTPHLANLAAPSFPKTATTTPGFVDTRKSFCPAPLPPATDGSISAPPSVCSDPDCEGHRCENGVYDPQQDDGDESADEDSCSEHSSSTSTSTNQKEGKYCDCCYCEFFGHGGPPAAPTSRNYAEMREKLRLRLTKRKEEQPKKMDQISERESVVDHRRVEDLLQFINSSETKPVSSTRAAKRARHKQRKLEEKARLEAEARAREHLHLQEEQRRREEEEDEEEEEDRFKEEFQRLQELQKLRAVKKKKKERPSKDCPKLDMLTRNFQAATESVPNSGNIHNGSLEQTEEPETSSHSPSRHMNHSEPRPGLGADGDAADPVDTRDSKFLLPKEVNGKQHEPLSFFFDIMQHHKEGNGKQKLRQTSKASSEPARRPTEPPKATEGQSKPRAQTESKAKVVDLMSITEQKREERKVNSNNNNKKQLNHIKDEKSNPTPMEPTSPGEHQQNSKLVLAESPQPKGKNKKNKKKKGDRVNNSIDDVFLPKDIDLDSVDMDETEREVEYFKRFCLDSARQTRQRLSINWSNFSLKKATFAAH

SEQ ID NO: 776628 - protein, 1208 aa, Homo sapiens
MKVRLLRQLSAAAKVKAPSGLQGPPQAHQFISLLLEEYGALCQAARSISTFLGTLENEHLKKFQVTWELHNKHLFENLVFSEPLLQSNLPALVSQIRLGTTTHDTCSEDTYSTLLQRYQRSEEELRRVAEEWLECQKRIDAYVDEQMTMKTKQRMLTEDWELFKQRRFIEEQLTNKKAVTGENNFTDTMRHMLSSRLSMPDCPNCNYRRRCACDDCSLSHILTCGIMDPPVTDDIHIHQLPLQVDPAPDYLAERSPPSVSSASSGSGSSSPITIQQHPRLILTDSGSAPTFCSDDEDVAPLSAKFADIYPLSNYDDTEVVANMNGIHSELNGGGENMALKDESPQISSTSSSSSEADDEEADGESSGEPPGAPKEDGVLGSRSPRTEESKADSPPPSYPTQQAEQAPNTCECHVCKQEASGLTPSAMTAGALPPGHQFLSPEKPTHPALHLYPHIHGHVPLHTVPHLPRPLIHPTLYATPPFTHSKALPPAPVQNHTNKHQVFNASLQDHIYPSCFGNTPEWNSSKFISLWGSEVMNDKNWNPGTFLPDTISGSEILGPTLSETRPEALPPPSSNETPAVSDSKEKKNAAKKKCLYNFQDAFMEANKVVMATSSATSSVSCTATTVQSSNSQFRVSSKRPPSVGDVFHGISKEDHRHSAPAAPRNSPTGLAPSQRSRLLRCHLLRSHLPPHLTLQILQPHHSPKQQPQLLGLWTHARVSVLHPYPRPQMAPLAPLQVSAVTLTAKGTAARMVSTTHSRMMGTRVQMRTAALSTAPAPRPPPTRRRPPAAPTSRNYAEMREKLRLRLTKRKEEQPKKMDQISERESVVDHRRVEDLLQFINSSETKPVSSTRAAKRARHKQRKLEEKARLEAEARAREHLHLQEEQRRREEEEDEEEEEDRFKEEFQRLQELQKLRAVKKKKKERPSKDCPKLDMLTRNFQAATESVPNSGNIHNGSLEQTEEPETSSHSPSRHMNHSEPRPGLGADGDAADPVDTRDSKFLLPKEVNGKQHEPLSFFFDIMQHHKEGNGKQKLRQTSKASSEPARRPTEPPKATEGQSKPRAQTESKAKVVDLMSITEQKREERKVNSNNNNKKQLNHIKDEKSNPTPMEPTSPGEHQQNSKLVLAESPQPKGKNKKNKKKKGDRVNNSIDDVFLPKDIDLDSVDMDETEREVEYFKRFCLDSARQTRQRLSINWSNFSLKKATFAAH

SEQ ID NO: 776629 - protein, 1078 aa, Homo sapiens
MTMKTKQRMLTEDWELFKQRRFIEEQLTNKKAVTGENNFTDTMRHMLSSRLSMPDCPNCNYRRRCACDDCSLSHILTCGIMDPPVTDDIHIHQLPLQVDPAPDYLAERSPPSVSSASSGSGSSSPITIQQHPRLILTDSGSAPTFCSDDEDVAPLSAKFADIYPLSNYDDTEVVANMNGIHSELNGGGENMALKDESPQISSTSSSSSEADDEEADGESSGEPPGAPKEDGVLGSRSPRTEESKADSPPPSYPTQQAEQAPNTCECHVCKQEASGLTPSAMTAGALPPGHQFLSPEKPTHPALHLYPHIHGHVPLHTVPHLPRPLIHPTLYATPPFTHSKALPPAPVQNHTNKHQVFNASLQDHIYPSCFGNTPEWNSSKFISLWGSEVMNDKNWNPGTFLPDTISGSEILGPTLSETRPEALPPPSSNETPAVSDSKEKKNAAKKKCLYNFQDAFMEANKVVMATSSATSSVSCTATTVQSSNSQFRVSSKRPPSVGDVFHGISKEDHRHSAPAAPRNSPTGLAPLPALSPAALSPAALSPASTPHLANLAAPSFPKTATTTPGFVDTRKSFCPAPLPPATDGSISAPPSVCSDPDCEGHRCENGVYDPQQDDGDESADEDSCSEHSSSTSTSTNQKEGKYCDCCYCEFFGHGGPPAAPTSRNYAEMREKLRLRLTKRKEEQPKKMDQISERESVVDHRRVEDLLQFINSSETKPVSSTRAAKRARHKQRKLEEKARLEAEARAREHLHLQEEQRRREEEEDEEEEEDRFKEEFQRLQELQKLRAVKKKKKERPSKDCPKLDMLTRNFQAATESVPNSGNIHNGSLEQTEEPETSSHSPSRHMNHSEPRPGLGADGDAADPVDTRDSKFLLPKEVNGKQHEPLSFFFDIMQHHKEGNGKQKLRQTSKASSEPARRPTEPPKATEGQSKPRAQTESKAKVVDLMSITEQKREERKVNSNNNNKKQLNHIKDEKSNPTPMEPTSPGEHQQNSKLVLAESPQPKGKNKKNKKKKGDRVNNSIDDVFLPKDIDLDSVDMDETEREVEYFKRFCLDSARQTRQRLSINWSNFSLKKATFAAH

SEQ ID NO: 776630 - protein, 1067 aa, Homo sapiens
MTMKTKQRMLTEDWELFKQRRFIEEQLTNKKAVTGENNFTDTMRHMLSSRLSMPDCPNCNYRRRCACDDCSLSHILTCGIMDPPVTDDIHIHQLPLQVDPAPDYLAERSPPSVSSASSGSGSSSPITIQQHPRLILTDSGSAPTFCSDDEDVAPLSAKFADIYPLSNYDDTEVVANMNGIHSELNGGGENMALKDESPQISSTSSSSSEADDEEADGESSGEPPGAPKEDGVLGSRSPRTEESKADSPPPSYPTQQAEQAPNTCECHVCKQEASGLTPSAMTAGALPPGHQFLSPEKPTHPALHLYPHIHGHVPLHTVPHLPRPLIHPTLYATPPFTHSKALPPAPVQNHTNKHQVFNASLQDHIYPSCFGNTPEWNSSKFISLWGSEVMNDKNWNPGTFLPDTISGSEILGPTLSETRPEALPPPSSNETPAVSDSKEKKNAAKKKCLYNFQDAFMEANKVVMATSSATSSVSCTATTVQSSNSQFRVSSKRPPSVGDVFHGISKEDHRHSAPAAPRNSPTGLAPLPALSPAALSPAALSPASTPHLANLAAPSFPKTATTTPGFVDTRKSFCPAPLPPATDGSISAPPSVCSDPDCEGHRCENGVYDPQQDDGDESADEDSCSEHSSSTSTSTNQKEGKYCDCCYCEFFGHGGPPAAPTSRNYAEMREKLRLRLTKRKEEQPKKMDQISERESVVDHRRVEDLLQFINSSETKPVSSTRAAKRARHKQRKLEEKARLEAEARAREHLHLQEEQRRREEEEDEEEEEDRFKEEFQRLQELQKLRAVKKKKKERPSKDCPKLDMLTRNFQAATESVPNSGNIHNGSLEQTEEPETSSHSPSRHMNHSEPRPGLGADGDAADPVDTRDSKFLLPKEVNGKQHEPLSFFFDIMQHHKEGNGKQKLRQTSKASSEPARRPTEPPKATEGQSKPRAQTESKAKVVDLMSITEQKREERKVNSNNNNKKQLNHIKDEKSNPTPMEPTSPGEHQQNSKLVLAESPQPKGKNKKNKKKKGDRVNNSIDDVFLPKDIDLDSVDMDETEREVEYFKRTPSAHPFLLPSPFPFSSAA

SEQ ID NO: 776631 - protein, 1025 aa, Homo sapiens
MTLPNCNYWRRCACDDCSLSHILTCGIMDPPVTDDIHIHQLPLQVDPAPDYLAERSPPSVSSASSGSGSSSPITIQQHPRLILTDSGSAPTFCSDDEDVAPLSAKFADIYPLSNYDDTEVVANMNGIHSELNGGGENMALKDESPQISSTSSSSSEADDEEADGESSGEPPGAPKEDGVLGSRSPRTEESKADSPPPSYPTQQAEQAPNTCECHVCKQEASGLTPSAMTAGALPPGHQFLSPEKPTHPALHLYPHIHGHVPLHTVPHLPRPLIHPTLYATPPFTHSKALPPAPVQNHTNKHQVFNASLQDHIYPSCFGNTPEWNSSKFISLWGSEVMNDKNWNPGTFLPDTISGSEILGPTLSETRPEALPPPSSNETPAVSDSKEKKNAAKKKCLYNFQDAFMEANKVVMATSSATSSVSCTATTVQSSNSQFRVSSKRPPSVGDVFHGISKEDHRHSAPAAPRNSPTGLAPLPALSPAALSPAALSPASTPHLANLAAPSFPKTATTTPGFVDTRKSFCPAPLPPATDGSISAPPSVCSDPDCEGHRCENGVYDPQQDDGDESADEDSCSEHSSSTSTSTNQKEGKYCDCCYCEFFGHGGPPAAPTSRNYAEMREKLRLRLTKRKEEQPKKMDQISERESVVDHRRVEDLLQFINSSETKPVSSTRAAKRARHKQRKLEEKARLEAEARAREHLHLQEEQRRREEEEDEEEEEDRFKEEFQRLQELQKLRAVKKKKKERPSKDCPKLDMLTRNFQAATESVPNSGNIHNGSLEQTEEPETSSHSPSRHMNHSEPRPGLGADGDAADPVDTRDSKFLLPKEVNGKQHEPLSFFFDIMQHHKEGNGKQKLRQTSKASSEPARRPTEPPKATEGQSKPRAQTESKAKVVDLMSITEQKREERKVNSNNNNKKQLNHIKDEKSNPTPMEPTSPGEHQQNSKLVLAESPQPKGKNKKNKKKKGDRVNNSIDDVFLPKDIDLDSVDMDETEREVEYFKRFCLDSARQTRQRLSINWSNFSLKKATFAAH

SEQ ID NO: 776632 - protein, 291 aa, Homo sapiens
MKVRLLRQLSAAAKVKAPSGLQGPPQAHQFISLLLEEYGALCQAARSISTFLGTLENEHLKKFQVTWELHNKHLFENLVFSEPLLQSNLPALVSQIRLGTTTHDTCSEDTYSTLLQRYQRSEEELRRVAEEWLECQKRIDAYVDEQMTMKTKQRMLTEDWELFKQRRFIEEQLTNKKAVTGENNFTDTMRHMLSSRLSMPDCPNCNYRRRCACDDCSLSHILTCGIMDPPVTDDIHIHQLPLQVDPAPDYLAERSPPSVSSASSGSGSSSPITIQQHPRLILTDSGSAPTL

SEQ ID NO: 776633 - protein, 101 aa, Homo sapiens
MLLRFNTTNSSYRKATVNIALFLDKTYPWPGSCGVVHAMALGHVGEMEEGRGPGLRVPKASGYSLVFPTHSVATRGSVALSPGVAHPCGFFTLGKLAGFYA

SEQ ID NO: 776634 - protein, 1265 aa, Homo sapiens
MKVRLLRQLSAAAKVKAPSGLQGPPQAHQFISLLLEEYGALCQAARSISTFLGTLENEHLKKFQVTWELHNKHLFENLVFSEPLLQSNLPALVSQIRLGTTTHDTCSEDTYSTLLQRYQRSEEELRRVAEEWLECQKRIDAYVDEQMTMKTKQRMLTEDWELFKQRRFIEEQLTNKKAVTGENNFTDTMRHMLSSRLSMPDCPNCNYRRRCACDDCSLSHILTCGIMDPPVTDDIHIHQLPLQVDPAPDYLAERSPPSVSSASSGSGSSSPITIQQHPRLILTDSGSAPTFCSDDEDVAPLSAKFADIYPLSNYDDTEVVANMNGIHSELNGGGENMALKDESPQISSTSSSSSEADDEEADGESSGEPPGAPKEDGVLGSRSPRTEESKADSPPPSYPTQQAEQAPNTCECHVCKQEASGLTPSAMTAGALPPGHQFLSPEKPTHPALHLYPHIHGHVPLHTVPHLPRPLIHPTLYATPPFTHSKALPPAPVQNHTNKHQVFNASLQDHIYPSCFGNTPEWNSSKFISLWGSEVMNDKNWNPGTFLPDTISGSEILGPTLSETRPEALPPPSSNETPAVSDSKEKKNAAKKKCLYNFQDAFMEANKVVMATSSATSSVSCTATTVQSSNSQFRVSSKRPPSVGDVFHGISKEDHRHSAPAAPRNSPTGLAPLPALSPAALSPAALSPASTPHLANLAAPSFPKTATTTPGFVDTRKSFCPAPLPPATDGSISAPPSVCSDPDCEGHRCENGVYDPQQDDGDESADEDSCSEHSSSTSTSTNQKEGKYCDCCYCEFFGHGGPPAAPTSRNYAEMREKLRLRLTKRKEEQPKKMDQISERESVVDHRRVEDLLQFINSSETKPVSSTRAAKRARHKQRKLEEKARLEAEARAREHLHLQEEQRRREEEEDEEEEEDRFKEEFQRLQELQKLRAVKKKKKERPSKDCPKLDMLTRNFQAATESVPNSGNIHNGSLEQTEEPETSSHSPSRHMNHSEPRPGLGADGDAADPVDTRDSKFLLPKEVNGKQHEPLSFFFDIMQHHKEGNGKQKLRQTSKASSEPARRPTEPPKATEGQSKPRAQTESKAKVVDLMSITEQKREERKVNSNNNNKKQLNHIKDEKSNPTPMEPTSPGEHQQNSKLVLAESPQPKGKNKKNKKKKGDRVNNSIDGVSLLLPSLGYNGAILAHCNLRLPGSSDCAASASQVVGITDDVFLPKDIDLDSVDMDETEREVEYFKRFCLDSARQTRQRLSINWSNFSLKKATFAAH

SEQ ID NO: 776635 - protein, 1078 aa, Homo sapiens; identical to SEQ ID NO: 776629

SEQ ID NO: 776636 - protein, 1078 aa, Homo sapiens; identical to SEQ ID NO: 776629

SEQ ID NO: 776637 - protein, 1084 aa, Homo sapiens
MTMKTKQRMLTEDWELFKQRRFIEEQLTNKKAVTGENNFTDTMRHMLSSRLSMPDCPNCNYRRRCACDDCSLSHILTCGIMDPPVTDDIHIHQLPLQVDPAPDYLAERSPPSVSSASSGSGSSSPITIQQHPRLILTDSGSAPTFCSDDEDVAPLSAKFADIYPLSNYDDTEVVANMNGIHSELNGGGENMALKDESPQISSTSSSSSEADDEEADGESSGEPPGAPKEDGVLGSRSPRTEESKADSPPPSYPTQQAEQAPNTCECHVCKQEASGLTPSAMTAGALPPGHQFLSPEKPTHPALHLYPHIHGHVPLHTVPHLPRPLIHPTLYATPPFTHSKALPPAPVQNHTNKHQVFNASLQDHIYPSCFGNTPEWNSSKFISLWGSEVMNDKNWNPGTFLPDTISGSEILGPTLSETRPEALPPPSSNETPAVSDSKEKKNAAKKKCLYNFQDAFMEANKVVMATSSATSSVSCTATTVQSSNSQFRVSSKRPPSVGDVFHGISKEDHRHSAPAAPRNSPTGLAPLPALSPAALSPAALSPASTPHLANLAAPSFPKTATTTPGFVDTRKSFCPAPLPPATDGSISAPPSVCSDPDCEGHRCENGVYDPQQDDGDESADEDSCSEHSSSTSTSTNQKEGKYCDCCYCEFFGHGGPPAAPTSRNYAEMREKLRLRLTKRKEEQPKKMDQISERESVVDHRRVEDLLQFINSSETKPVSSTRAAKRARHKQRKLEEKARLEAEARAREHLHLQEEQRRREEEEDEEEEEDRFKEEFQRLQELQKLRAVKKKKKERPSKDCPKLDMLTRNFQAATESVPNSGNIHNGSLEQTEEPETSSHSPSRHMNHSEPRPGLGADGDAADPVDTRDSKFLLPKEVNGKQHEPLSFFFDIMQHHKEGNGKQKLRQTSKASSEPARRPTEPPKATEGQSKPRAQTESKAKVVDLMSITEQKREERKVNSNNNNKKQLNHIKDEKSNPTPMEPTSPGEHQQNSKLVLAESPQPKGKNKKNKKKKGDRVNNSIDDVFLPKDIDLDSVDMDEIIENSRDLLQDVYNICCPLFLGFSRPLQELELRVGVTLGYFLGVTN

SEQ ID NO: 776638 - protein, 33 aa, Homo sapiens
MRFCSDPDCEGHRCENGVYDPQQDDGDESADED

SEQ ID NO: 776639 - protein, 117 aa, Homo sapiens
WKAGDASPLVLLQPRGTLFPYHSCPVPTYSLPVSLEESECLGSQRQRALLSQRGLKIMCRASAWQLGFRHSNRSAKKADSAEYSFSQHSLGCHPQFQELHPTQLPTPCKTAPLSQHL

SEQ ID NO: 776640 - protein, 103 aa, Homo sapiens
DEVSLLPRMENSGVISAHCYLHLLGLSDSPASASRVAGITDVYHHTRLILVFLVETGFRHVGQAGLELLISGNLPASASQCAEITGMNHHAWPIVILKFNFNW

SEQ ID NO: 776641 - protein, 189 aa, Homo sapiens
MTDSVIYSMLELPTATQAQNDYGPQQKSSSSRPSCSCLVAIALGLLTAVLLSVLLYQWILCQGSNYSTCASCPSCPDRWMKYGNHCYYFSVEEKDWNSSLEFCLARDSHLLVITDNQEMSLLQVFLSEAFCWIGLRNNSGWRWEDGSPLNFSRISSNSFVQTCGAINKNGLQASSCEVPLHWVCKKVRL

SEQ ID NO: 776642 - protein, 197 aa, Homo sapiens
MTDSVIYSMLELPTATQAQNDYGPQQKSSSSRPSCSCLVAIALGLLTAVLLSVLLYQWILCQGSNYSTCASCPSCPDRWMKYGNHCYYFSVEEKDWNSSLEFCLARDSHLLVITDNQEMSLLQVFLSEAFCWIGLRNNSGWRWEDGSPLNFSRISSNSFVQTCGAINKNGLQASSCEVPLHWVCETGVHQGLFFCCK

SEQ ID NO: 776643 - protein, 189 aa, Homo sapiens; identical to SEQ ID NO: 776641

SEQ ID NO: 776644 - protein, 193 aa, Homo sapiens
MTDSVIYSMLELPTATQAQNDYGPQQKSSSSRPSCSCLVAIALGLLTAVLLSVLLYQWILCQGSNYSTCASCPSCPDRWMKYGNHCYYFSVEEKDWNSSLEFCLARDSHLLVITDNQEMSLLQVFLSEAFCWIGLRNNSGWRWEDGSPLNFSRISSNSFVQTCGAINKNGLQASSCEVPLHWVCCPFADQALF

SEQ ID NO: 776645 - protein, 176 aa, Homo sapiens
ATEEGARPPGSVEDAGQPWGTFWPRPVSTGDLDRALPADTGLQKASADAELLGLLCQGVDIPLHVPDPKYRQDLVSQGGREVYPYPSPLHAVALQSPLFVLTKETPQRGGPSFPRESPRGPAGLNTIQTGPVLEAGPARARAYIDRLLHLWGRETPAKGSEGEQGPLRHAASPSPQ

SEQ ID NO: 776646 - protein, 38 aa, Homo sapiens
MTDPRGCKRLPPGLNSGHLGMATPSPGISVGSAKILVA

SEQ ID NO: 776647 - protein, 79 aa, Homo sapiens
MRSLFCPCMTELARGLIAKDRSLLKLPPRGRCGVKLGQVLEKERLHHLALVKCSLRLAWEPLRPSTGKIQRLLSAQASL

SEQ ID NO: 776648 - protein, 220 aa, Homo sapiens
QHPGVKVARLTRDDQLGPRELKKYRLITKQGILLVRFNASALLAGLGARLAALRTSGTFSPLPTEAVSEAGGDVARLLLSPSVQRDVLPGGTIIQDWQPYRPSESNLRLLAAKGLEWRVDSRARPRVLTLCTRPFPIPHGGDGTWRYLNIDAFGSDGAQVQSQLLWHLQRQAPRLVGLNVMCQLFLEPQLWSQLADFCQVGLGLELVKGYTEQYLLEADI

SEQ ID NO: 776649 - protein, 111 aa, Homo sapiens
AKALDSGAFFSFVVLSPSFPLPSCPHHFTLLKVIMNTRSEIPFLAPSTLGFFEMESHCVTQAVARICPLQPPSPWLKQFSCLSLLSSWDYRCKPRHLANFSVFSRDGVSPC

SEQ ID NO: 776650 - protein, 84 aa, Homo sapiens
MSGVMRFPSTQHPARRAAHRRRGHGQSNGGQARAGAAAAGTAPYHSPVLFTKQELLESISVNKLSWTFYQSLYLFLDDSLRTLI

SEQ ID NO: 776651 - protein, 351 aa, Homo sapiens
YSLPEGRHGRLDSPTFHLTLHYPTEHVQFWVGSPSTPAGWVREGDTVQLLCRGDGSPSPEYTLFRLQDEQEEVLNVNLEGNLTLEGVTRGQSGTYGCRVEDYDAADDVQLSKTLELRVAYLDPLELSEGKVLSLPLNSSAVVNCSVHGLPTPALRWTKDSTPLGDGPMLSLSSITFDSNGTYVCEASLPTVPVLSRTQNFTLLVQGSPELKTAEIEPKADGSWREGDEVTLICSARGIQTQTQLEPNWGAARRANPPDGRGWVSSSLTLKVTSALSRDGISCEASKPHGNKAPCLPLRQREAPDSQAGVAVMAVAASGGLLLLGGAASNWVNAKGPLCRGGKGARRGPGGI

SEQ ID NO: 776652 - protein, 116 aa, Homo sapiens
MHLNISTVVMIGSSKVSMAPVPKPDSLLEVIRGKNAILSWLWPNHTSFSSPSAVDMYLGQQAKWKLGVPSCFGAALLSVWHVYSVGCSLQCILCVLWKRKHSGKKVVKLHLQHALF

SEQ ID NO: 776653 - protein, 694 aa, Homo sapiens
IRTHTSSWQRSAQDGSWGARADLGGWEPGDRMAPKRVVQLSLKMPTHAVCVVGVEAHVDIHSDVPKGANSFRVSGSSGVEVFMVYNRTRVKEPIGKARWPLDTDADMVVSVGTASKELKDFKVRVSYFGEQEDQALGRSVLYLTGVDISLEVDTGRTGKVKRSQGDKKTWRWGPEGYGAILLVNCDRDNHRSAEPDLTHSWLMSLADLQDMSPMLLSCNGPDKLFDSHKLVLNVPFSDSKRVRVFCARGGNSLSDYKQVLGPQCLSYEVERQPGEQEIKFYVEGLTFPDADFLGLVSLSVSLVDPGTLPEVTLFTDTVGFRMAPWIMTPNTQPPEELYVCRVMDTHGSNEKFLEDMSYLTLKANCKLTICPQVENRNDRWIQDEMEFGYIEAPHKSFPVVFDSPRNRGLKDFPYKRILGPDFGYVTREIPLPGPSSLDSFGNLDVSPPVTVGGTEYPLGRILIGSSFPKSGGRQMARAVRNFLKAQQVQAPVELYSDWLSVGHVDEFLTFVPTSDQKGFRLLLASPSACLKLFQEKKEEGYGEAAQFDGLKHQAKRSINEMLADRHLQRDNLHAQKCIDWNRNVLKRELGLAESDIVDIPQLFFLKNFYAEAFFPDMVNMVVLGKYLGIPKPYGPIINGRCCLEEKVQSLLEPLGLHCIFIDDYLSYHELQGEIHCGTNVRRKPFPFKWWNMVP

SEQ ID NO: 776654 - protein, 121 aa, Homo sapiens
LLGPAGGIEPLPSGTHSLMEETEPCPQRAPSLMRETRPHAGAMTYFHRSKSEPLILRSLVKCIDWNRNVLKRELGLAESDIVDIPQLFFLKNFYAEAFFPDMVNMVVLGKYLGIPKPYGPH

SEQ ID NO: 776655 - protein, 33 aa, Homo sapiens
SSHQNGSHLGLSAENCLQPASQPAGEAAAYSQA

SEQ ID NO: 776656 - protein, 52 aa, Homo sapiens
EDVCPLTPGPGKALGQQHHGSLLAAAFKEATNTSHRCPPNLTLLWLACVCTA

SEQ ID NO: 776657 - protein, 102 aa, Homo sapiens
TPSFPWYPHHCHFCCITDIGLQTGVVVTESVSDTPSLLTLQGNLAGRWLESGMKPKGRADRDHLNASTPRDSHRILDTIQKSHPEGDNNITVTHELKRHSLQ

SEQ ID NO: 776658 - protein, 161 aa, Homo sapiens
GGQARGSPWGEQRSVGPQKRLWGSEPPPGAAFQVQQGQSSGGRHLPSWFNTWTPDPGKGTEPGEASGHCTMKLWGAAGASGLRAGQAQRGDHVLRGRSVPGWTSQCTRRNMQRLSQPREAAERVRGGRRREGACAVCSLEGGSMCRVFTEKEESMRCVFSD

SEQ ID NO: 776659 - protein, 118 aa, Homo sapiens
MRCSVATQNEPWTHTARRMNMQTSGHVKGARPRGATLCDSGWSLCAQDPAASSSSWLQGVLVSEERQAGVPRGRLEGLRNHFHLLSPPCLHCLGKKARSQRAQRGSEEARVPWRDAAS

SEQ ID NO: 776660 - protein, 150 aa, Homo sapiens
GGQARGSPWGEQRSVGPQKRLWGSEPPPGAAFQVQQGQSSGGRHLPSWFNTWTPDPGKGTEPGEASGHCTMKLWGAAGASGLRAGQAQRGDHVLRGRSVPGWTSQCTRRNMQRLSQPREAAERVRGGRRRSSRIPGGSARPFRRQVPGQY

SEQ ID NO: 776661 - protein, 217 aa, Homo sapiens
MRCSVATQNEPWTHTARRMNMQTSGHVKGARPRGATLCDSGWSLCAQDPAASSSSWLQGVLVSEERQAGVPRGRLEGLRNHFHLLSPPCLHCLGLYPPVSLLHGKEMERHVNHHCWGSSMGPQGTHGFPRRKLCHWTAGLRLLHRPLPALSPGLRESGKGGVQLHCEWTKATDLHTCQWLKWSIKRHVPFATGKKARSQRAQRGSEEARVPWRDAAS

SEQ ID NO: 776662 - protein, 141 aa, Homo sapiens
ERSNRENICSAVNQSNVGLGESAAAAVAAALAASSELGVGGGGGGGGKIKRVEGAVSLGAGQKIFFRVSSSRPPVSQPRHLRPLAPQPRQECGLIRVQCLLKETSSALCNAPKPLLRQEGEDHADLTSFGSHQFYAPLEPA

SEQ ID NO: 776663 - protein, 51 aa, Homo sapiens
MSTNTCLLPELPSLQQVAQEGPYKVLPILTTKDVYRRGPSGRLKTQHGARA

SEQ ID NO: 776664 - protein, 73 aa, Homo sapiens
CLPPTAQKKIYLRCTDKETTAQAKCQKSLIASDGARMRLHILLHTLCCLPSRGLSSAIISSHITTKGIQNLAS

SEQ ID NO: 776665 - protein, 230 aa, Homo sapiens
YSRYHDCDPWTAKKVSAPDQLMPYLVLDILQDYPGLPGLFVACAYSGTLSTVSSSINALAAVTVEDLIKPYFRSLSERSLSWISQGMSVVYGALCIGMAALASLMGALLQAALSVFGMVGGPLMGLFALGILVPFANSIGALVGLMAGFAISLWVGIGAQIYPPLPERTLPLHLDIQGCNSTYNETNLITTTEMPFTTSVFQIYNVQRTPLMDNWYSLSYLYFSTVGTLV

SEQ ID NO: 776666 - protein, 923 aa, Homo sapiens
HLNKNQLRNNIRQQVLKSGMLESGIDRIISQVVDPKINHTFRPQVEKAVHEFLATLNHKEEGSGNTAPDDEKPDTSLITQGVPTPGPSANVANDAMSILETITSLNQEASAARASTETSNAKTSERASKKLPSQPTTDTSTDKERTSEDMADKEKSTADSGGEGLETAPKSEEFSDLPCPVEEIKNYTKEHNNLILLNKDVQQESSEQKNKSTDKGEKKPDSNEKGERKKEKKEKTEKKFDHSKKSEDTQKVKDEKQAKEKEVESLKLPSEKNSNKAKTVEGTKEDFSLIDSDVDGLTDITVSSVHTSDLSSFEEDTEEEVVTSDSMEEGEITSDDEEKNKQNKTKTQTSDSSEGKTKSVRHAYVHKPYLYSKYYSDSDDELTVEQRRQSIAKEKEERLLRRQINREKLEEKRKQKAEKTKSSKTKGQGRSSVDLEESSTKSLEPKAARIKEVLKERKVLEKKVALSKKRKKDSRNVEENSKKKQQYEEDSKETLKTSEHCEKEKISSSKELKHVHAKSEPSKPARRLSESLHVVDENKNESKLEREHKRRTSTPVIMEGVQEETDTRDVKRQVERSEICTEEPQKQKSTLKNEKHLKKDDSETPHLKSLLKKEVKSSKEKPEREKTPSEDKLSVKHKYKGDCMHKTGDETELHSSEKGLKVEENIQKQSQQTKLSSDDKTERKSKHRNERKLSVLGKDGKPVSEYIIKTDENVRKENNKKERRLSAEKTKAEHKSRRSSDSKIQKDSLGSKQHGITLQRRSESYSEDKCDMDSTNMDSNLKPEEVVHKEKRRTKSLLEEKLVLKSKSKTQGKQVKVVETELQEGATKQATTPKPDKEKNTEENDSEKQRKSKVEDKPFEETGVEPVLETASSSAHSTQKDSSHRAKLPLAKEKYKSDKDSTSTRLERKLSDGHKSRSLKHSS

SEQ ID NO: 776667 - protein, 603 aa, Homo sapiens
MLIHRHTPLSINFLTDEEKNKQNKTKTQTSDSSEGKTKSVRHAYVHKPYLYSKYYSDSDDELTVEQRRQSIAKEKEERLLRRQINREKLEEKRKQKAEKTKSSKTKGQGRSSVDLEESSTKSLEPKAARIKEVLKERKVLEKKVALSKKRKKDSRNVEENSKKKQQYEEDSKETLKTSEHCEKEKISSSKELKHVHAKSEPSKPARRLSESLHVVDENKNESKLEREHKRRTSTPVIMEGVQEETDTRDVKRQVERSEICTEEPQKQKSTLKNEKHLKKDDSETPHLKSLLKKEVKSSKEKPEREKTPSEDKLSVKHKYKGDCMHKTGDETELHSSEKGLKVEENIQKQSQQTKLSSDDKTERKSKHRNERKLSVLGKDGKPVSEYIIKTDENVRKENNKKERRLSAEKTKAEHKSRRSSDSKIQKDSLGSKQHGITLQRRSESYSEDKCDMDSTNMDSNLKPEEVVHKEKRRTKSLLEEKLVLKSKSKTQGKQVKVVETELQEGATKQATTPKPDKEKNTEENDSEKQRKSKVEDKPFEETGVEPVLETASSSAHSTQKDSSHRAKLPLAKEKYKSDKDSTSTRLERKLSDGHKSRSLKHSS

SEQ ID NO: 776668 - protein, 366 aa, Homo sapiens
MEGVQEETDTRDVKRQVERSEICTEEPQKQKSTLKNEKHLKKDDSETPHLKSLLKKEVKSSKEKPEREKTPSEDKLSVKHKYKGDCMHKTGDETELHSSEKGLKVEENIQKQSQQTKLSSDDKTERKSKHRNERKLSVLGKDGKPVSEYIIKTDENVRKENNKKERRLSAEKTKAEHKSRRSSDSKIQKDSLGSKQHGITLQRRSESYSEDKCDMDSTNMDSNLKPEEVVHKEKRRTKSLLEEKLVLKSKSKTQGKQVKVVETELQEGATKQATTPKPDKEKNTEENDSEKQRKSKVEDKPFEETGVEPVLETASSSAHSTQKDSSHRAKLPLAKEKYKSDKDSTSTRLERKLSDGHKSRSLKHSS

SEQ ID NO: 776669 - protein, 270 aa, Homo sapiens
MARFALTVVRHGETRFNKEKIIQGQGVDEPLSETGFKQAAAAGIFLNNVKFTHAFSSDLMRTKQTMHGILERSKFCKDMTVKYDSRLRERKYGVVEGKALSELRAMAKAAREECPVFTPPGGETLDQVKMRGIDFFEFLCQLILKEADQKEQFSQGSPSNCLETSLAEIFPLGKNHSSKVNSDSGIPGLAASVLVVSHGAYMRSLFDYFLTDLKCSLPATLSRSELMSVTPNTGMSLFIINFEEGREVKPTVQCICMNLQDHLNGLTETR

SEQ ID NO: 776670 - protein, 270 aa, Homo sapiens; identical to SEQ ID NO: 776669

SEQ ID NO: 776671 - protein, 300 aa, Homo sapiens
QRVLFPPQARVHLRPLARTVQLRQLLAGHVPSRSWSKSVPRGETRFNKEKIIQGQGVDEPLSETGFKQAAAAGIFLNNVKFTHAFSSDLMRTKQTMHGILERSKFCKDMTVKYDSRLRERKYGVVEGKALSELRAMAKAAREECPVFTPPGGETLDQVKMRGIDFFEFLCQLILKEADQKEQFSQGSPSNCLETSLAEIFPLGKNHSSKVNSDSGIPGLAASVLVVSHGAYMRSLFDYFLTDLKCSLPATLSRSELMSVTPNTGMSLFIINFEEGREVKPTVQCICMNLQDHLNGLTETR

SEQ ID NO: 776672 - protein, 74 aa, Homo sapiens
AILGAFVTSPHVPSLVPTLSSFDSLPHYSEEFRGHVFCAWYMLVCNEIDTYLSHQKPAFCCHFQKFRKAICFNH

SEQ ID NO: 776673 - protein, 270 aa, Homo sapiens
MRAAVAASVGLSEGPAGSRSGRLFRPPSPAPAAPGARLLRLPGSGAVQAASPERAGWTEALRAAVAELRAGAVVAVPTDTLYGLACAASCSAALRAVYRLKGRSEAKPLAVCLGRVADVYRYCRVRVPEGLLKDLLPGPVTLVMERSEELNKDLNPFTPLVGIRIPDHAFMQDLAQMFEGPLALTSANLSSQASSLNVEEFQDLWPQLSLVIDGGQIGDGQSPECRLGSTVVDLSVPGKFGIIRPGCALESTTAILQQKYGLLPSHASYL

SEQ ID NO: 776674 - protein, 440 aa, Homo sapiens
LFRVQPPALGRERSQGILLGDGQGSAAPSPASFGKPPLAETAGWGGAPGLAETFPPQPAPAPRPAAVTSPRSCDGVQELPLPLLHRVQQLSGALLPAAVGGGLPPSPSPAFPRSTPAASRSPSILLGVVVPLSCPAQRRGRVSWTGSWLGASLPPGSGPGRMSPARRCRGMRAAVAASVGLSEGPAGSRSGRLFRPPSPAPAAPGARLLRLPGSGAVQAASPERAGWTEALRAAVAELRAGAVVAVPTDTLYGLACAASCSAALRAVYRLKGRSEAKPLAVCLGRVADVYRYCRVRVPEGLLKDLLPGPVTLVMERSEELNKDLNPFTPLVGIRIPDHAFMQDLAQMFEGPLALTSANLSSQASSLNVEEFQDLWPQLSLVIDGGQIGDGQSPECRLGSTVVDLSVPGKFGIIRPGCALESTTAILQQKYGLLPSHASYL

SEQ ID NO: 776675 - protein, 270 aa, Homo sapiens; identical to SEQ ID NO: 776673

SEQ ID NO: 776676 - protein, 270 aa, Homo sapiens; identical to SEQ ID NO: 776673

SEQ ID NO: 776677 - protein, 270 aa, Homo sapiens; identical to SEQ ID NO: 776673

SEQ ID NO: 776678 - protein, 270 aa, Homo sapiens; identical to SEQ ID NO: 776673

SEQ ID NO: 776679 - protein, 270 aa, Homo sapiens; identical to SEQ ID NO: 776673

SEQ ID NO: 776680 - protein, 89 aa, Homo sapiens
LFTLWVRTAFMSCNTQTAKVCGFTPEVSETMNPPAGRNWTHLKKQTPDTPSLRAVTLTAKVRDFILEVSETKNPQEGINSRHTTTVPVH

SEQ ID NO: 776681 - protein, 319 aa, Homo sapiens
EGGSSRARVSTSRRLGVCSLFLLPGSTEGNGDLSEEKMPLLTLYLLLFWLSGYSIATQITGPTTVNGLERGSLTVQCVYRSGWETYLKWWCRGAIWRDCKILVKTSGSEQEVKRDRVSIKDNQKNRTFTVTMEDLMKTDADTYWCGIEKTGNDLGVTVQVTIDPAPVTQEETSSSPTLTGHHLDNRHKLLKLSVLLPLIFTILLLLLVAASLLAWRMMKYQQKAAGMSPEQVLQPLEGDLCYADLTLQLAGTSPQKATTKLSSAQVDQVEVEYVTMASLPKEDISYASLTLGAEDQEPTYCNMGHLSSHLPGRGPEEPT

SEQ ID NO: 776682 - protein, 247 aa, Homo sapiens
MWLPQLDLMRVISAKSQGYSIATQITGPTTVNGLERGSLTVQCVYRSGWETYLKWWCRGAIWRDCKILVKTSGSEQEVKRDRVSIKDNQKNRTFTVTMEDLMKTDADTYWCGIEKTGNDLGVTVQVTIDPAPVTQEETSSSPTLTGHHLDNSSRVSPEQVLQPLEGDLCYADLTLQLAGTSPQKATTKLSSAQVDQVEVEYVTMASLPKEDISYASLTLGAEDQEPTYCNMGHLSSHLPGRGPEEPT

SEQ ID NO: 776683 - protein, 41 aa, Homo sapiens
MAQSQRPSAAGSARGPGGALELAGEPQEVLAFAACPAPPSF

SEQ ID NO: 776684 - protein, 106 aa, Homo sapiens [sequence omitted]

SEQ ID NO: 776685 - protein, 90 aa, Homo sapiens
LACIYEALILHDDEVTVTEDKINALIKAAGVNIEPFVTWLVCKGLVNVNIGSLICSVEAGGAAPAEEKKVEAKKEESEDGDDDMRFGLFH

SEQ ID NO: 776686 - protein, 165 aa, Homo sapiens
CGRGWWGGRKLLVELQHPSVSGPWEGEGKEPGLSCGVKGSHFSPPTATSVLTAHGSPESRGLVGLGIHNAGYFHPDVLCHHRPGHSVLHYLSALVAWSCGRSLLENSSEGRMELNGRVPCLLTHRWIFASAVISAPGLSSPTRGLSSTEAVLLPSRPLSEPSRHG

SEQ ID NO: 776687 - protein, 172 aa, Homo sapiens
EKPYKCEECGKAFSIFSTLTKHKIIHTEEKSHRCEECGKAYKESSHVTTHKRIHTGEKPYKCEECGKTFSVFSILTKHKIIHTEEKPYKCEECGKAFKRSSTLTKHRIIHTEEKPYKCEECGKAFNQSSTLSIHKIIHTGEKPYKCEECGKAFKRSSTLTIHKMIHTGEKPY

SEQ ID NO: 776688 - protein, 114 aa, Homo sapiens
LSSIGLFLSYILYNKLVKCKKSVFLSPLRSSSELSNLRRRSWETPNLQSRWTKVQVVWGPGTYNRALKSVESEANSEKLVSKLNGIVGHSTGVGEPENTSSEGNKSISLQNMLL

SEQ ID NO: 776689 - protein, 67 aa, Homo sapiens
KYRESPAEFSIWTREAGAGGLSIAVEGPSKAEITFDDHKNGSCGVSYIAPGSLAFVFGASQEDIFLV

SEQ ID NO: 776690 - protein, 302 aa, Homo sapiens
PGLLRCGLEGWARGRRRSRQLETMVDHLANTEINSQRIAAVESCFGASGQPLALPGRVLLGEGVLTKECRKKAKPRIFFLFNDILVYGSIVLNKRKYRSQHIIPLEEVTLELLPETLQAKNRWMIKTAKKSFVVSAASATERQEWISHIEECVRRQLRATGRPPSTEHAAPWIPDKATDICMRCTQTRFSALTRRHHCRKCGFVVCAECSRQRFLLPRLSPKPVRVCSLCYRELAAQQRQEEAEEQGAGSPGQPAHLARPICGASSGDDDDSDEDKEGSRDGDWPSSVEFYASGVAWSAFHS

SEQ ID NO: 776691 - protein, 378 aa, Homo sapiens
PTVPRPGCGSRGRRMRRVSHHHPRTSELSPAARSWRLLGRRGAVPLTPAQEEAWEGRSWAACGVNLQGAWGERSGVRASEAESPGKRADVSWWSRQLETMVDHLANTEINSQRIAAVESCFGASGQPLALPGRVLLGEGVLTKECRKKAKPRIFFLFNDILVYGSIVLNKRKYRSQHIIPLEEVTLELLPETLQAKNRWMIKTAKKSFVVSAASATERQEWISHIEECVRRQLRATGRPPSTEHAAPWIPDKATDICMRCTQTRFSALTRRHHCRKCGFVVCAECSRQRFLLPRLSPKPVRVCSLCYRELAAQQRQEEAEEQGAGSPGQPAHLARPICGASSGDDDDSDEDKEGSRDGDWPSSVEFYASGVAWSAFHS

SEQ ID NO: 776692 - protein, 279 aa, Homo sapiens
MVDHLANTEINSQRIAAVESCFGASGQPLALPGRVLLGEGVLTKECRKKAKPRIFFLFNDILVYGSIVLNKRKYRSQHIIPLEEVTLELLPETLQAKNRWMIKTAKKSFVVSAASATERQEWISHIEECVRRQLRATGRPPSTEHAAPWIPDKATDICMRCTQTRFSALTRRHHCRKCGFVVCAECSRQRFLLPRLSPKPVRVCSLCYRELAAQQRQEEAEEQGAGSPGQPAHLARPICGASSGDDDDSDEDKEGSRDGDWPSSVEFYASGVAWSAFHS

SEQ ID NO: 776693 - protein, 898 aa, Homo sapiens
MSVTEEDLCHHMKVVVRVRPENTKEKAAGFHKVVHVVDKHILVFDPKQEEVSFFHGKKTTNQNVIKKQNKDLKFVFDAVFDETSTQSEVFEHTTKPILRSFLNGYNCTVLAYGATGAGKTHTMLGSADEPGVMYLTMLHLYKCMDEIKEEKICSTAVSYLEVYNEQIRDLLVNSGPLAVREDTQKGVVVHGLTLHQPKSSEEILHLLDNGNKNRTQHPTDMNATSSRSHAVFQIYLRQQDKTASINQNVRIAKMSLIDLAGSERASTSGAKGTRFVEGTNINRSLLALGNVINALADSKRKNQHIPYRNSKLTRLLKDSLGGNCQTIMIAAVSPSSVFYDDTYNTLKYANRAKDIKSSLKSNVLNVNNHITQYVKICNEQKAEILLLKEKLKAYEEQKAFTNENDQAKLMISNPQEKEIERFQEILNCLFQNREEIRQEYLKLEMLLKENELKSFYQQQCHKQIEMMCSEDKVEKATGKRDHRLAMLKTRRSYLEKRREEELKQFDENTNWLHRVEKEMGLLSQNGHIPKELKKDLHCHHLHLQNKDLKAQIRHMMDLACLQEQQHRQTEAVLNALLPTLRKQYCTLKEAGLSNAAFESDFKEIEHLVERKKVVVWADQTAEQPKQNDLPGISVLMTFPQLGPVQPIPCCSSSGGTNLVKIPTEKRTRRKLMPSPLKGQHTLKSPPSQSVQLNDSLSKELQPIVYTPEDCRKAFQNPSTVTLMKPSSFTTSFQAISSNINSDNCLKMLCEVAIPHNRRKECGQEDLDSTFTICEDIKSSKCKLPEQESLPNDNKDILQRLDPSSFSTKHSMPVPSMVPSYMAMTTAAKRKRKLTSSTSNSSLTADVNSGFAKRVRQDNSSEKHLQENKPTMEHKRNICKINPSMVRKFGRNISKGNLR

SEQ ID NO: 776694 - protein, 898 aa, Homo sapiens; identical to SEQ ID NO: 776693

SEQ ID NO: 776695 - protein, 743 aa, Homo sapiens
MDIIAQVYNEQIRDLLVNSGPLAVREDTQKGVVVHGLTLHQPKSSEEILHLLDNGNKNRTQHPTDMNATSSRSHAVFQIYLRQQDKTASINQNVRIAKMSLIDLAGSERASTSGAKGTRFVEGTNINRSLLALGNVINALADSKRKNQHIPYRNSKLTRLLKDSLGGNCQTIMIAAVSPSSVFYDDTYNTLKYANRAKDIKSSLKSNVLNVNNHITQYVKICNEQKAEILLLKEKLKAYEEQKAFTNENDQAKLMISNPQEKEIERFQEILNCLFQNREEIRQEYLKLEMLLKENELKSFYQQQCHKQIEMMCSEDKVEKATGKRDHRLAMLKTRRSYLEKRREEELKQFDENTNWLHRVEKEMGLLSQNGHIPKELKKDLHCHHLHLQNKDLKAQIRHMMDLACLQEQQHRQTEAVLNALLPTLRKQYCTLKEAGLSNAAFESDFKEIEHLVERKKVVVWADQTAEQPKQNDLPGISVLMTFPQLGPVQPIPCCSSSGGTNLVKIPTEKRTRRKLMPSPLKGQHTLKSPPSQSVQLNDSLSKELQPIVYTPEDCRKAFQNPSTVTLMKPSSFTTSFQAISSNINSDNCLKMLCEVAIPHNRRKECGQEDLDSTFTICEDIKSSKCKLPEQESLPNDNKDILQRLDPSSFSTKHSMPVPSMVPSYMAMTTAAKRKRKLTSSTSNSSLTADVNSGFAKRVRQDNSSEKHLQENKPTMEHKRNICKINPSMVRKFGRNISKGNLR

SEQ ID NO: 776696 - protein, 898 aa, Homo sapiens; identical to SEQ ID NO: 776693

SEQ ID NO: 776697 - protein, 562 aa, Homo sapiens
MSVTEEDLCHHMKVVVRVRPENTKEKAAGFHKVVHVVDKHILVFDPKQEEVSFFHGKKTTNQNVIKKQNKDLKFVFDAVFDETSTQSEVFEHTTKPILRSFLNGYNCTVLAYGATGAGKTHTMLGSADEPGVMYLTMLHLYKCMDEIKEEKICSTAVSYLEVYNEQIRDLLVNSGPLAVREDTQKGVVVHGLTLHQPKSSEEILHLLDNGNKNRTQHPTDMNATSSRSHAVFQIYLRQQDKTASINQNVRIAKMSLIDLAGSERASTSGAKGTRFVEGTNINRSLLALGNVINALADSKRKNQHIPYRNSKLTRLLKDSLGGNCQTIMIAAVSPSSVFYDDTYNTLKYANRAKDIKSSLKSNVLNVNNHITQYVKICNEQKAEILLLKEKLKAYEEQKAFTNENDQAKLMISNPQEKEIERFQEILNCLFQNREEIRQEYLKLEMLLKENELKSFYQQQCHKQIEMMCSEDKVEKKESLLLLPKLECSGTTSAHCNLCLPDSSNSPASASQLAGITSVHHYAQLIFVFLVEMMFHNVGHASLELLTSGDPSASASQSAGITG

SEQ ID NO: 776698 - protein, 194 aa, Homo sapiens
SSPSPPASPPAPPVNPHRRAPPELERWGPCVARGAELGVTSQASCPAGARGWALGKPVRPPRLRCQCLTFWSDPPPWCLPAKGDRRLHFHRLPRRGAQLRDVHHGWAPRGERRPTPAVPARNGEGFRGVRRRTLGPPAAVYRASHLLSVFPLSRSKNTKLGTPGCPPTPAPWPYPHLHPHPRIAIFRGGLGRGC

SEQ ID NO: 776699 - protein, 54 aa, Homo sapiens
YAGFSQVCWVLLGVLGPPGCAGSFLSVLGPSRVCWVLSGVLGPPGCAGSSWVCW

SEQ ID NO: 776700 - protein, 108 aa, Homo sapiens
MRRMCSSRTGAGTKCLFFHQHERLPSASLLPSPLLSHSVQWRSTIHTAVGGEIVGFGVNTPAVQSQLCGPGWESQFTSLSLSCPICRMGPTAGTGMTLSSCLLYPKCP

SEQ ID NO: 776701 - protein, 106 aa, Homo sapiens
SESSPSSSEDEEEVVAREEEEEEEEEEMVAEESMASAGPEDFEQDGEEAALAPGAPAVDSLGMEEEVDIETEAVALRSGPPCWTSPPCLWVLKSQRTPGSRLRNQA

SEQ ID NO: 776702 - protein, 137 aa, Homo sapiens
NLGRILRPGKCLGVAGVALPGGIWDVRKEDVLDQTKASSRQGGRAGSERAGQAWRHPEHSRLQGLVLAPGKGIFVLFVSLSTLADWHPCLQPEGPHVGSIEPVLPALGAAGLNPQPGTFYAYRVPGPRPTPPEWERS

SEQ ID NO: 776703 - protein, 91 aa, Homo sapiens
EAEEEITGLEESKIQEKEWKEQGSKDLGGFMIKSKGEGHDLARRRDIHFILEPKIERQNTIYSLKEFRGEEKGSTKKNTSNGSSFLRKVAN

SEQ ID NO: 776704 - protein, 160 aa, Homo sapiens
RGWGSSRWLWCPWGWEHEWARMMVRQRRRPRGSARLRGGGPRGPGSGRHRGPWKRQGWGRGDACLEHGDPSPAPTCRPGPRAAGRVAGGPGCPGGGPGPGPRPGARSGVRVARPSRGGTDRRREEGKPPGLKILSLRSHSEVHAAFMSCNTHREDLQLHS

SEQ ID NO: 776705 - protein, 109 aa, Homo sapiens
PRLGEQPLALVPLGVGARVGKDDGEAEEAAPRERPAERRGAEGPGERASPRALEAAGLGERRRVSGAWGPQPSSHLQTWAAGCRPSGRGAWLPRRRAGAGAAAGGAERS

SEQ ID NO: 776706 - protein, 109 aa, Homo sapiens; identical to SEQ ID NO: 776705

SEQ ID NO: 776707 - protein, 109 aa, Homo sapiens; identical to SEQ ID NO: 776705

SEQ ID NO: 776708 - protein, 30 aa, Homo sapiens
MSPSYSWQLTSQLVHCDITARSTNINDTKE

SEQ ID NO: 776709 - protein, 110 aa, Homo sapiens
MRKNFGVRAELCEGLLGWGISSYGPHAIYLLLERGDFEWVGMDRCSSRKPCWLMGTTSVYYCDSLCKLPMWPRTPLLPGHFLPPHCTGLNHSACCCCTMLGCGRIGKGFC

SEQ ID NO: 776710 - protein, 87 aa, Homo sapiens
AEVKVLADTQSSRSSVQCGFPWAEVKVLADTQSSRSSVQCGFPWAEVKVLADTQSSRSSVQCGFPWAEVKVLADTQSSRSSVQCGFP

SEQ ID NO: 776711 - protein, 45 aa, Homo sapiens
MTLRSVLSHVQIAARMTGNEALSDSPFLWVTRDHYSLNTLNGSQV

SEQ ID NO: 776712 - protein, 55 aa, Homo sapiens
EETEARAVVHPGVLVPSSVNKGDWKPQEARKDRLSSPCVMVQSLVWALGGFGGAG

SEQ ID NO: 776713 - protein, 52 aa, Homo sapiens
WGQAQATHPDLRSSGIHHADPQCQNLPAWALKGSWASKGRGTTRVVPASTHR

SEQ ID NO: 776714 - protein, 263 aa, Homo sapiens
PCCRPFASFTAADPFKFYMRECVSIHVGQAGVQIGNVCWELYCLEHGIQPDGQMPSDKTIGGGDDSFNTFSETGAGKHVPRAVFVDLGNQQVLGVSFGDVRHYMRRRLFTTRATLSSHGADAGWSTNKYARGHYTIGKEIIDLVLDRIRKLANQCTGFQGFLVFHSFGGGTGSGFTSLLIERLLVDYGKKSKLEFSNYPAPQVSTAVVEPYNSILTTHTTLEHSDCAFMVDNEAICDICCRNLNIERPTYTNLNHLISQIVSS

SEQ ID NO: 776715 - protein, 77 aa, Homo sapiens
VRASLCHASHWVAGASFSEGTHSHPSKSSLSFWPKLARNRDLGWVLETPQCLAPHSTGTAGPTWAALLGKQEQQKLR

SEQ ID NO: 776716 - protein, 267 aa, Homo sapiens
MARFLTLCTWLLLLGPGLLATVRAECSQDCATCSYRLVRPADINFLACVMECEGKLPSLKIWETCKELLQLSKPELPQDGTSTLRENSKPEESHLLAKRYGGFMKRYGGFMKKMDELYPMEPEEEANGSEILAKRYGGFMKKDAEEDDSLANSSDLLKELLETGDNRERSHHQDGSDNEEEVSKRYGGFMRGLKRSPQLEDEAKELQKRYGGFMRRVGRPEWWMDYQKRYGGFLKRFAEALPSDEEGESYSKEVPEMEKRYGGFMRF

SEQ ID NO: 776717 - protein, 73 aa, Homo sapiens
DANQGCAPAPGITGRRTPSSRGPQQNVQKHPRIDQFIHSTNEYLMEEAPDGGKSQCNASKWRHGVLMEKQQDL

SEQ ID NO: 776718 - protein, 267 aa, Homo sapiens; identical to SEQ ID NO: 776716

SEQ ID NO: 776719 - protein, 218 aa, Homo sapiens [sequence omitted]

SEQ ID NO: 776720 - protein, 159 aa, Homo sapiens
GLKFHIGINRYELYSRHNPAIEALLHDLSSQRITSVADFTGTSCMSDPLSGWWGVEDEFSLNEICCLCGPDSPRKRHTRTVPNPEEERALQSRARQPGRVERRGLHWEGLRTFHRVCRAAYLPGGSVLAGRGMREPCTPARAFGRSSTQVRKSPVPLSV

SEQ ID NO: 776721 - protein, 48 aa, Homo sapiens
KNSAPFNRQKHKEFSDIKLSGKNTHEAEVLLSPKKVMAREEMEKLNSK

SEQ ID NO: 776722 - protein, 39 aa, Homo sapiens
ISGRKGRGMGTGLTATRQKELSSRDGNIIHQSVMMAACL

SEQ ID NO: 776723 - protein, 53 aa, Homo sapiens
EIKEMVHEQKAPPQSLSFPLQPNPPAVPDSNAQPPNCLRTQQLMSLHAGGRSQ

SEQ ID NO: 776724 - protein, 92 aa, Homo sapiens
MATPPSGVLLQLDSSSEEQTHSVTAQQGQQREPPNQLLPPDPSTAGTQDALNQPPLLDSSTVGTQDTLNQLSLPDSSKVRTQDTLNQPLLTD

SEQ ID NO: 776725 - protein, 596 aa, Homo sapiens
MGSVSSLISGHSFHSKHCRASQYKLRKSSHLKKLNRYSDGLLRFGFSQDSGHGKSSSKMGKSEDFFYIKVSQKARGSHHPDYTALSSGDLGGQAGVDFDPSTPPKLMPFSNQLEMGSEKGAVRPTAFKPVLPRSGAILHSSPESASHQLHPAPPDKPKEQELKPGLCSGALSDSGRNSMSSLPTHSTSSSYQLDPLVTPVGPTSRFGGSAHNITQGIVLQDSNMMSLKALSFSDGGSKLGHSNKADKGPSCVRSPISTDECSIQELEQKLLEREGALQKLQRSFEEKELASSLAYEERPRRCRDELEGPEPKGGNKLKQASQKSQRAQQVLHLQVLQLQQEKRQLRQELESLMKEQDLLETKLRSYEREKTSFGPALEETQWEVCQKSGEISLLKQQLKESQTEVNAKASEILGLKAQLKDTRGKLEGLELRTQDLEGALRTKGLELEVCENELQRKKNEAELLREKVNLLEQELQELRAQAALARDMGPPTFPEDVPALQRELERLRAELREERQGHDQMSSGFQHERLVWKEEKEKVIQYQKQLQQSYVAMYQRNQRLEKALQQLARGDSAGEPLEVDLEGADIPYEDIIATEI

SEQ ID NO: 776726 - protein, 560 aa, Homo sapiens
MGSVSSLISGHSFHSKHCRASQYKLRKSSHLKKLNRYSDGLLRFGFSQDSGHGKSSSKMGKSEDFFYIKVSQKARGSHHPDYTALSSGDLGGQAGVDFDPSTPPKLMPFSNQLEMGSEKGAVRPTAFKPVLPRSGAILHSSPESASHQLHPAPPDKPKEQELKPGLCSGALSDSGRNSMSSLPTHSTSSSYQLDPLVTPVGPTSRFGGSAHNITQGIVLQDSNMMSLKALSFSDGGSKLGHSNKADKGPSCVRSPISTDECSIQELEQKLLEREGALQKLQRSFEEKELASSLAYEERPRRCRDELEGPEPKGGNKLKQASQKSQRAQQVLHLQVLQLQQEKRQLRQELESLMKEQDLLETKLRSYEREKTSFGPALEETQWEVCQKSGEISLLKQQLKESQTEVNAKASEILGLKAQLKDTRGKLEGLELRTQDLEGALRTKGLELEVCENELQRKKNEAELLREKVKRLRAELREERQGHDQMSSGFQHERLVWKEEKEKVIQYQKQLQQSYVAMYQRNQRLEKALQQLARGDSAGEPLEVDLEGADIPYEDIIATEI

SEQ ID NO: 776727 - protein, 487 aa, Homo sapiens
MGSVSSLISGHSFHSKHCRASQYKLRKSSHLKKLNRYSDGLLRFGFSQDSGHGKSSSKMGKSEDFFYIKVSQKARGSHHPDYTALSSGDLGGQAGVDFDPSTPPKLMPFSNQLEMGSEKGAVRPTAFKPVLPRSGAILHSSPESASHQLHPAPPDKPKEQELKPGLCSGALSDSGRNSMSSLPTHSTSSSYQLDPLVTPVGPTSRFGGSAHNITQGIVLQDSNMMSLKALSFSDGGSKLGHSNKADKGPSCVRSPISTDECSIQELEQKLLEREGALQKLQRSFEEKELASSLAYEERPRRCRDELEGPEPKGGNKLKQASQKSQRAQQVLHLQVLQLQQEKRQLRQELESLMKEQDLLETKLRSYEREKTSFGPALEETQWEVCQKSGEISLLKQQLKESQTEVNAKASEILGLKAQLKDTRGKLEGLELRTQDLEGALRTKGLELEVCENELQPELRGHVPAEPAPGEGPAAAGTWGQRRGALGG

SEQ ID NO: 776728 - protein, 573 aa, Homo sapiens
MGSVSSLISGHSFHSKHCRASQYKLRKSSHLKKLNRYSDGLLRFGFSQDSGHGKSSSKMGKSEDFFYIKVSQKARGSHHPDYTALSSGDLGGQAGVDFDPSTPPKLMPFSNQLEMGSEKGAVRPTAFKPVLPRSGAILHSSPESASHQLHPAPPDKPKEQELKPGLCSGALSDSGRNSMSSLPTHSTSSSYQLDPLVTPVGPTSRFGGSAHNITQGIVLQDSNMMSLKALSFSDGGSKLGHSNKADKGPSCVRSPISTDECSIQELEQKLLEREGALQKLQRSFEEKELASSLAYEERPRRCRDELEGPEPKGGNKLKQASQKSQRAQQVLHLQVLQLQQEKRQLRQELESLMKEQDLLETKLRSYEREKTSFGPALEETQWEVCQKSGEISLLKQQLKESQTEVNAKASEILGLKAQLKDTRGKLEGLELRTQDLEGALRTKGLELEVCENELQRKKNEAELLREKVNLLEQELQELRAQAALARDMGPPTFPEDVPALQRELERLVWKEEKEKVIQYQKQLQQSYVAMYQRNQRLEKALQQLARGDSAGEPLEVDLEGADIPYEDIIATEI

SEQ ID NO: 776729 - protein, 573 aa, Homo sapiens; identical to SEQ ID NO: 776728

SEQ ID NO: 776730 - protein, 573 aa, Homo sapiens; identical to SEQ ID NO: 776728

SEQ ID NO: 776731 - protein, 442 aa, Homo sapiens
MGSVSSLISGHSFHSKHCRASQYKLRKSSHLKKLNRYSDGLLRFGFSQDSGHGKSSSKMGKSEDFFYIKVSQKARGSHHPDYTALSSGDLGGQAGVDFDPSTPPKLMPFSNQLEMGSEKGAVRPTAFKPVLPRSGAILHSSPESASHQLHPAPPDKPKEQELKPGLCSGALSDSGRNSMSSLPTHSTSSSYQLDPLVTPVGPTSRFGGSAHNITQGIVLQDSNMMSLKALSFSDGGSKLGHSNKADKGPSCVRSPISTDECSIQELEQKLLEREGALQKLQRSFEEKELASSLAYEERPRRCRDELEGPEPKGGNKLKSYEREKTSFGPALEETQWEVRPHRAHGFGWSAVWRQYPPLLLVPANSVQTQTAQASGANVLALSPKEGAPCKPCWGIDLHLSFLLSPPSPSWLLDFSFPSEPLNHEAGSQMTKAQPGCGLTSLP

SEQ ID NO: 776732 - protein, 573 aa, Homo sapiens; identical to SEQ ID NO: 776728

SEQ ID NO: 776733 - protein, 520 aa, Homo sapiens
MGSVSSLISGHSFHSKHCRASQYKLRKSSHLKKLNRYSDGLLRFGFSQDSGHGKSSSKMGKSEDFFYIKVSQKARGSHHPDYTALSSGDLGGQAGVDFDPSTPPKLMPFSNQLEMGSEKGAVRPTAFKPVLPRSGAILHSSPESASHQLHPAPPDKPKEQELKPGLCSGALSDSGRNSMSSLPTHSTSSSYQLDPLVTPVGPTSRFGGSAHNITQGIVLQDSNMMSLKALSFSDGGSKLGHSNKADKGPSCVRSPISTDECSIQELEQKLLEREGALQKLQRSFEEKELASSLAYEERPRRCRDELEGPEPKGGNKLKQASQKSQRAQQVLHLQVLQLQQEKRQLRQELESLMKEQDLLETKLRSYEREKTSFGPALEETQWEVCQKSGEISLLKQQLKESQTEVNAKASEILGLKAQLKDTRGKLEGLELRTQDLEGALRTKGLELEVCENELQRKKNEAELLREKVRAARVEGGEGEGDSVPETAAAELRGHVPAEPAPGEGPAAAGTWGQRRGALGG

SEQ ID NO: 776734 - protein, 205 aa, Homo sapiens
MGSVSSLISGHSFHSKHCRASQYKLRKSSHLKKLNRYSDGLLRFGFSQDSGHGKSSSKMGKSEDFFYIKVSQKARGSHHPDYTALSSGDLGGQAGVDFDPSTPPKLMPFSNQLEMGSEKGAVRPTAFKPVLPRSGAILHSSPESASHQLHPAPPDKPKEQELKPGLCSGALSDSGRNSMSSLPTHTPGSPWRLTWKGLTSPTRTS

SEQ ID NO: 776735 - protein, 133 aa, Homo sapiens
MGSVSSLISGHSFHSKHCRASQYKLRKSSHLKKLNRYSDGLLRFGFSQDSGHGKPDQMSSGFQHERLVWKEEKEKVIQYQKQLQQSYVAMYQRNQRLEKALQQLARGDSAGEPLEVDLEGADIPYEDIIATEI

SEQ ID NO: 776736 - protein, 573 aa, Homo sapiens; identical to SEQ ID NO: 776728

SEQ ID NO: 776737 - protein, 131 aa, Homo sapiens
SNRLSMPPPPSPKVGGSLQGDTVCRDLGFRTRLEDEALQILDRPLDDPLATTPPRRGGASQGALPESPWSPVQRGSSPSGTHAPTTSPLPFLLLPVTIQVLGSMAHPHCCPCSSSSQPFAPPVSTQPVSFF

SEQ ID NO: 776738 - protein, 109 aa, Homo sapiens
APGLVRGLAALGPSPNESAAPLRLRIQRKSLLLPLKGWSLSKRFLPFLHRPDRRVLVCALPRADWDSPPTRSLFLKSLSFPHLPRKLSTFGLSAPPKLPRIPGPLTVLP

SEQ ID NO: 776739 - protein, 104 aa, Homo sapiens
PPACWLTPDTAALCFLPPGQLVPGSCSGGSCSGVSPEGSGGETEIPMLSLTMPRPRANLQMKTQPRPVRWLTSVIPALWEAETRGSQGQEFKTSLAKIVKPRLY

SEQ ID NO: 776740 - protein, 232 aa, Homo sapiens
ASGCRGRPKAGSRTCERRDGAGGRAEGSRGIREMGGSPAGRGPRASPGGTRRHPPAPDASRDPALPWGKVRSGLVPAPWTGLRLCFSCLSLLLSLLLLSLYASLSSSGSFILSLFFLSPFLSLLLSFASPPGLSFLPCVCLPLPTACSGSPSVSLLCPFILFPLSLSHNLLVSLSLSRGFRSRSSWLPCLLLSAPISLLVPLSVQAPCFRLCLAVLEKSLWKLSAVVRVLLL

SEQ ID NO: 776741 - protein, 220 aa, Homo sapiens
GKRFRLGTKAADGGGGGGGGWVGPRRAAAAEVEAEGGGGGGGGKMAAPVLLRVSVPRWERVARYAVCAAGILLSIYAYHVEREKERDPEHRALCDLGPWVKCSAALASRWGRGFGLLGSIFGKDGVLNQPNSVFGLIFYILQLLLGMTASAVAALILMTSSIMSVVGSLYLAYILYFVLKEFCIICIVTYVLNFLLLIINYKRLVYLNEAWKRQLQPKQD

SEQ ID NO: 776742 - protein, 101 aa, Homo sapiens
SLRLFSYRHDSKRCGGFDPHDVLHHVGRGVPVPGLHSHHLHRHVRAELPSSHYQLQTTSLLERAATQAGLTPDRLHPNSLKPLSIQFILQQIIIIHNRHFP

SEQ ID NO: 776743 - protein, 220 aa, Homo sapiens; identical to SEQ ID NO: 776741

SEQ ID NO: 776744 - protein, 219 aa, Homo sapiens
GKRFRLGTKAADGGGGGGGGWVGPRRAAAAEVEAEGGGGGGGGKMAAPVLLRVSVPRWERVARYAVCAAGILLSIYAYHVEREKERDPEHRALCDLGPWVKCSAALASRWGRGFGLLGSIFGKDGVLNQPNSVFGLIFYILQLLLGMTASAVAALILMTSSIMSVVGSLYLAYILYFVLKEFCQAKSIMMEKTSPSPIAPEWEPVFLLIVSFCTNHSDV

SEQ ID NO: 776745 - protein, 220 aa, Homo sapiens; identical to SEQ ID NO: 776741

SEQ ID NO: 776746 - protein, 117 aa, Homo sapiens
GKRFRLGTKAADGGGGGGGGWVGPRRAAAAEVEAEGGGGGGGGKMAAPVLLRVSVPRWERVARYAVCAAGILLSIYAYHVEREKERDPEHRALCDLGPWVKCSAALASSKFNTQQLP

SEQ ID NO: 776747 - protein, 117 aa, Homo sapiens; identical to SEQ ID NO: 776746

SEQ ID NO: 776748 - protein, 67 aa, Homo sapiens
SLGLPHVLSPSRNQALPALPTACVDTAPQMPSASLTFPETLSERLGQNLSLEFCCPQIHPPTLEAGR

SEQ ID NO: 776749 - protein, 64 aa, Homo sapiens
MCPVGARVLCVSSCMHKHAHPFLFLCTHKPMYSAVIISTRASVPMPLHMCIPGMCTQRCASTPV

SEQ ID NO: 776750 - protein, 211 aa, Homo sapiens
AGSLRVQAGLSSAGPALGNSGLAALMASPSKAVIVPGNGGGDVTTHGWYGWVKKELEKIPGFQCLAKNMPDPITARESIWLPFMETELHCDEKTIIIGHSSGAIAAMRYAETHRVYAIVLVSAYTSDLGDENERASGYFTRPWQWEKIKANCPYIVQFGSTDDPFLPWKEQQEVADRLETKLHKFTDCGHFQNTEFHELITVVKSLLKVPA

SEQ ID NO: 776751 - protein, 128 aa, Homo sapiens
METELHCDEKTIIIGHSSGAIAAMRYAETHRVYAIVLVSAYTSDLGDENERASGYFTRPWQWEKIKANCPYIVQFGSTDDPFLPWKEQQEVADRLETKLHKFTDCGHFQNTEFHELITVVKSLLKVPA

SEQ ID NO: 776752 - protein, 211 aa, Homo sapiens; identical to SEQ ID NO: 776750

SEQ ID NO: 776753 - protein, 211 aa, Homo sapiens; identical to SEQ ID NO: 776750

SEQ ID NO: 776754 - protein, 93 aa, Homo sapiens
AGSLRVQAGLSSAGPALGNSGLAALMASPSKAVIVPGNGGGDVTTHGWYGWVKKELEKIPGFQCLAKNMPDPMSHHARPLILLYPPDYLNLLH

SEQ ID NO: 776755 - protein, 78 aa, Homo sapiens
LRVQAGLSSAGPALGNSGLAALMASPSKAVIVPGNGGGDVTTHGWYGWVKKELEKVSAQRRCSVKSAWREGRRERTEG

SEQ ID NO: 776756 - protein, 116 aa, Homo sapiens
MHTHLWFWTTDVDVPGTTWTGAIADRPEDLLGLIDLKASLGSGSYRDLVAALSHRAKTDGARNTPFLQHRSRNRYLRTLFTPQLVSLTHMGARPSARQRIQVSRLQIRAGCSGSCL

SEQ ID NO: 776757 - protein, 47 aa, Homo sapiens
MSSAREASNCDAGGMVVTGGRLGVIFLEEPGMVAHTYNPGTLGSRGG

SEQ ID NO: 776758 - protein, 113 aa, Homo sapiens
RRQQEAQNPSWVSCLESQGVAMLKFAVPLLPMGIRIRSRTSIGKGGQFVTEETRTDPEQRRQRRAGLMKRDKGPDPSSAWLVGLGVWFSLRDHRDKPGRPKRSRVQIPDEPTL

SEQ ID NO: 776759 - protein, 104 aa, Homo sapiens [sequence omitted]

SEQ ID NO: 776760 - protein, 105 aa, Homo sapiens
FLVLIIFIVAHFRQIRNSREPPVLHTTQYEKQSYKCYGKYFLKTSMDLKRGLHWRVHLLCQRWKPFAALGLPPNTTHPAGWPGLTWSPSSTLELDNETGPTVRSK

SEQ ID NO: 776761 - protein, 77 aa, Homo sapiens
MKPYLGSSGEGSKEEGNTDAFIVVSVPELVLSFSHKMSHQDALKLFNPKRIPGSHPYSVSHGQLHRKCGSEGTQPHC

SEQ ID NO: 776762 - protein, 506 aa, Homo sapiens
MTGEKIRSLRRDHKPSKEEGDLLEPGDEEAAAALGGTFTRSRIGKGGKACHKIFSNHHHRLQLKAAPASSNPPGAPALPLHNSSVTANSQSPALLAGTNPVAVVADGGSCPAHYPVHECVFKGDVRRLSSLIRTHNIGQKDNHGNTPLHLAVMLGNKVTALLRKLKQQSRESVEEKRPRLLKALKELGDFYLELHWDFQSWVPLLSRILPSDACKIYKQGINIRLDTTLIDFTDMKCQRGDLSFIFNGDAAPSESFVVLDNEQKVYQRIHHEESEMETEEEVDILMSSDIYSATLSTKSISFTRAQTGWLFREDKTERVGNFLADFYLVNGLVLESRKRREHLSEEDILRNKAIMESLSKGGNIMEQNFEPIRRQSLTPPPQNTITWEEYISAENGKAPHLGRELVCKESKKTFKATIAMSQEFPLGIELLLNVLEVVAPFKHFNKLREFVQMKLPPGFPVKLDIPVFPTITATVTFQEFRYDEFDGSIFTIPDDYKEDPSRFPDL

SEQ ID NO: 776763 - protein, 295 aa, Homo sapiens
MTGEKIRSLRRDHKPSKEEGDLLEPGDEEAAAALGGTFTRSRIGKGGKACHKIFSNHHHRLQLKAAPASSNPPGAPALPLHNSSVTANSQSPALLAGTNPVAVVADGGSCPAHYPVHECVFKGDVRRLSSLIRTHNIGQKDNHGNTPLHLAVMLGNKECAHLLLAHNAPVKVKNAQGWSPLAEAISYGDRQMITALLRKLKQQSRESVEEKRPRLLKALKELGDFYLELHWDFQSWVPLLSRILPSDACKIYKQGINIRLDTTLIDFTDMKCQRGDLSFIFNGAVHRALRESSRV

SEQ ID NO: 776764 - protein, 155 aa, Homo sapiens
RKQCFKTAKWILRYHSFLLLNPRGDLSFIFNGDAAPSESFVVLDNEQKVYQRIHHEESEMETEEEVDILMSSDIYSATLSTKSISFTRAQTGWLFREDKTERVGNFLADFYLVNGLVLESRKRREHLSEEDILRNKAIMESLSKGGNIMEQNFEV

SEQ ID NO: 776765 - protein, 541 aa, Homo sapiens
MTGEKIRSLRRDHKPSKEEGDLLEPGDEEAAAALGGTFTRSRIGKGGKACHKIFSNHHHRLQLKAAPASSNPPGAPALPLHNSSVTANSQSPALLAGTNPVAVVADGGSCPAHYPVHECVFKGDVRRLSSLIRTHNIGQKDNHGNTPLHLAVMLGNKECAHLLLAHNAPVKVKNAQGWSPLAEAISYGDRQMITALLRKLKQQSRESVEEKRPRLLKALKELGDFYLELHWDFQSWVPLLSRILPSDACKIYKQGINIRLDTTLIDFTDMKCQRGDLSFIFNGDAAPSESFVVLDNEQKVYQRIHHEESEMETEEEVDILMSSDIYSATLSTKSISFTRAQTGWLFREDKTERVGNFLADFYLVNGLVLESRKRREHLSEEDILRNKAIMESLSKGGNIMEQNFEPIRRQSLTPPPQNTITWEEYISAENGKAPHLGRELVCKESKKTFKATIAMSQEFPLGIELLLNVLEVVAPFKHFNKLREFVQMKLPPGFPVKLDIPVFPTITATVTFQEFRYDEFDGSIFTIPDDYKEDPSRFPDL

SEQ ID NO: 776766 - protein, 541 aa, Homo sapiens; identical to SEQ ID NO: 776765

SEQ ID NO: 776767 - protein, 484 aa, Homo sapiens
MTGEKIRSLRRDHKPSKEEGDLLEPGDEEAAAALGGTFTRSRIGKGGKACHKIFSNHHHRLQLKAAPASSNPPGAPALPLHNSSVTANSQSPALLAGTNPVAVVADGGSCPAHYPVHECVFKGDVRRLSSLIRTHNIGQKDNHGNTPLHLAVMLGNKECAHLLLAHNAPVKVKNAQGWSPLAEAISYGDRQMITALLRKLKQQSRESVEEKRPRLLKALKELGDFYLELHWDFQSWVPLLSRILPSDACKIYKQGINIRLDTTLIDFTDMKCQRGDLSFIFNGDAAPSESFVVLDNEQKVYQRIHHEESEMETEEEVDILMSSDIYSATLSTKSISFTRAQTGWLFREDKTERVGNFLADFYLVNGLVLESRKRREHLSEEDILRNKAIMESLSKGGNIMEQNFEPIRRQSLTPPPQNTITWEEYISAENGKAPHLGRELVCKESKKTFKATIAMSQEFPLGIELYTCVSHNHSHCDFSGVSIR

SEQ ID NO: 776768 - protein, 503 aa, Homo sapiens
MTGEKIRSLRRDHKPSKEEGDLLEPGDEEAAAALGGTFTRSRIGKGGKACHKIFSNHHHRLQLKAAPASSNPPGAPALPLHNSSVTANSQSPALLAGTNPVAVVADGGSCPAHYPVHECVFKGDVRRLSSLIRTHNIGQKDNHGNTPLHLAVMLGNKECAHLLLAHNAPVKVKNAQGWSPLAEAISYGDRQMITALLRKLKQQSRESVEEKRPRLLKALKELGDFYLELHWDFQSWVPLLSRILPSDACKIYKQGINIRLDTTLIDFTDMKCQRGDLSFIFNGDAAPSESFVVLDNEQKVYQRIHHEESEMETEEEVDILMSSDIYSATLSTKSISFTRAQTGWLFREDKTERVGNFLADFYLVNGLVLESRKRREHLSEEDILRNKAIMESLSKGGNIMEQNFEPIRRQSLTPPPQNTITWEEYISAENGKAPHLGRELVCKESKKTFKATIAMSQEFPLGIELLLNVLEVVAPFKHFNKLREFVQMKLPPGFPVKLGVSIR

SEQ ID NO: 776769 - protein, 503 aa, Homo sapiens; identical to SEQ ID NO: 776768

SEQ ID NO: 776770 - protein, 471 aa, Homo sapiens
MTGEKIRSLRRDHKPSKEEGDLLEPGDEEAAAALGGTFTRSRIGKGGKACHKIFSNHHHRLQLKAAPASSNPPGAPALPLHNSSVTANSQSPALLAGTNPVAVVADGGSCPAHYPVHECVFKGDVRRLSSLIRTHNIGQKDNHGNTPLHLAVMLGNKECAHLLLAHNAPVKVKNAQGWSPLAEAISYGDRQMITALLRKLKQQSRESVEEKRPRLLKALKELGDFYLELHWDFQSWVPLLSRILPSDACKIYKQGINIRLDTTLIDFTDMKCQRGDLSFIFNGDAAPSESFVVLDNEQKVYQRIHHEESEMETEEEVDILMSSDIYSATLSTKSISFTRAQTGWLFREDKTERVGNFLADFYLVNGLVLESRKRREHLSEEDILRNKAIMESLSKGGNIMEQNFEPIRRQSLTPPPQNTITWEEYISAENGKAPHLGRELVCKESKKTFKATIAMSQEFPLGIELLWTVWK

SEQ ID NO: 776771 - protein, 406 aa, Homo sapiens [sequence omitted]

SEQ ID NO: 776772 - protein, 388 aa, Homo sapiens
MTGEKIRSLRRDHKPSKEEGDLLEPGDEEAAAALGGTFTRSRIGKGGKACHKIFSNHHHRLQLKAAPASSNPPGAPALPLHNSSVTANSQSPALLAGTNPVAVVADGGSCPAHYPVHECVFKGDVRRLSSLIRTHNIGQKDNHGNTPLHLAVMLGNKECAHLLLAHNAPVKVKNAQGWSPLAEAISYGDRQMITALLRKLKQQSRESVEEKRPRLLKALKELGDFYLELHWDFQSWVPLLSRILPSDACKIYKQGINIRLDTTLIDFTDMKCQRGDLSFIFNGDAAPSESFVVLDNEQKVYQRIHHEESEMETEEEVDILMSSDIYSATLSTKSISFTRAQTGWLFREDKTERVGNFLADFYLVNGLVLESRESLSKGGNIMEQNFEV

SEQ ID NO: 776773 - protein, 151 aa, Homo sapiens
PVPTTGILFSNRPCWWTLRNFALGALKKFGLGTRTVEARVLEEAACLLDEFQATIASAWPGERKGLVWESPLHCQDGATGRYLGGRKPVSPWGWLGAGPRVMTTVLFLPPGAPFDPVRLLDNAVSNVICSCLREPLSLWGPGVPEAPEPLQ

SEQ ID NO: 776774 - protein, 132 aa, Homo sapiens
AGGPRGRAAWGSPSSGCSQTWRCSGSTSERRRGPVRQGGLPGPEHLKKTAMKPHTQVPGAEAKGSWGQERLISLRVEQQRAQDRTACPAAGGGQGPTLAGAHRVQRTRSSPLLQQEEGSGGTPLLGLEAGID

SEQ ID NO: 776775 - protein, 335 aa, Homo sapiens
GGTVRNVGIMAHHLPAAMESHQDFRSIKAKFQASQPEPSDLPKKPPKPEFGKLKKFSQPELSEHPKKAPLPEFGAVSLKPPPPEVTDLPKKPPPPEVTDLPKKPPPPEVTDLPKKPPPPEVTDLPKKPSKLELSDLSKKFPQLGATPFPRKPLQPEVGEAPLKASLPEPGAPARKPLQPDELSHPARPPSEPKSGAFPRKLWQPEAGEATPRSPQPELSTFPKKPAQPEFNVYPKKPPQPQVGGLPKKSVPQPEFSEAAQTPLWKPQSSEPKRDSSAFPKKASQPPLSDFPKKPPQPELGDLTRTSSEPEVSVLPKRPRPAEFKALSKKPPQPEL

SEQ ID NO: 776776 - protein, 126 aa, Homo sapiens
LTLWLQSVQDRAWYTLDAQQLRLFSFPSVVPARRSPGLTGESSWLPRKPAQNNNWEHKLLENTRPWKKITLLKCQSGDKKWSKILAQRWCGGICLPRPLTWGRCSVQGRHLCFRTRPALEKSRWGT

SEQ ID NO: 776777 - protein, 93 aa, Homo sapiens
GCGEGKGAHAVPGESRCGSHAGWTSPQRCWDPGTLSRLESSRLKGENGGSLQKNQKTKNVCWRKTRSAVGILYHQARDGIGLCASECVHICQF

SEQ ID NO: 776778 - protein, 151 aa, Homo sapiens
WPWQFLPFLGAFLFWAPPFRKRAPEHVEGVAAEPEAGTLSGSGFFPGPLPAVRVLCPLHPECVLNPEGGVRAHPALLCVCVCVCVCVCVCVFLRQGLALLPRLECIGTISARCSLCLPGSSNSPASASQVAGTTDGCPHTPLIFIFLVETG

SEQ ID NO: 776779 - protein, 99 aa, Homo sapiens
ETKVSSLEGMGAAGAGGGAATVLVTEPRVLQVKGKASTLHSNPGKHLLQRDASRFLLSLWVSFVATSLQHPFFPEFLSGRSMHLRGLRSSDAQVLQEIH

SEQ ID NO: 776780 - protein, 193 aa, Homo sapiens
GKARSRGGVEPAGPGGGSPEPYHPTLGIYARCIRNPGVQHFQRDTLCGPYAESFGEIASGFWQATAIFLAVGIFILCMVALVSVFTMCVQSIMKKSIFNVCGLLQGIAGLFLILGLILYPAGWGCQKAIDYCGHYASAYKPGDCSLGWAFYTAIGGTVLTFICAVFSAQAEIATSSDKVQEEIEEGKNLICLL

SEQ ID NO: 776781 - protein, 79 aa, Homo sapiens
RPAPLSPHWTVQVGGISDTNQIFGLSETEPGSFLYYAPFDGILGLAYPSISSSGATPVFDNIWNQGLVSQDLFSVYLSA

SEQ ID NO: 776782 - protein, 388 aa, Homo sapiens
MKWLLLLGLVALSECIMYKVPLIRKKSLRRTLSERGLLKDFLKKHNLNPARKYFPQWEAPTLVDEQPLENYLDMEYFGTIGIGTPAQDFTVVFDTGSSNLWVPSVYCSSLACTNHNRFNPEDSSTYQSTSETVSITYGTGSMTGILGYDTVQVGGISDTNQIFGLSETEPGSFLYYAPFDGILGLAYPSISSSGATPVFDNIWNQGLVSQDLFSVYLSADDQSGSVVIFGGIDSSYYTGSLNWVPVTVEGYWQITVDSITMNGEAIACAEGCQAIVDTGTSLLTGPTSPIANIQSDIGASENSDGDMVVSCSAISSLPDIVFTINGVQYPVPPSAYILQSEGSCISGFQGMNLPTESGELWILGDVFIRQYFTVFDRANNQVGLAPVA

SEQ ID NO: 776783 - protein, 330 aa, Homo sapiens
DLSTRCKNSPGELLDMEYFGTIGIGTPAQDFTVVFDTGSSNLWVPSVYCSSLACTNHNRFNPEDSSTYQSTSETVSITYGTGSMTGILGYDTVQVGGISDTNQIFGLSETEPGSFLYYAPFDGILGLAYPSISSSGATPVFDNIWNQGLVSQDLFSVYLSADDQSGSVVIFGGIDSSYYTGSLNWVPVTVEGYWQITVDSITMNGEAIACAEGCQAIVDTGTSLLTGPTSPIANIQSDIGASENSDGDMVVSCSAISSLPDIVFTINGVQYPVPPSAYILQSEGSCISGFQGMNLPTESGELWILGDVFIRQYFTVFDRANNQVGLAPVA

SEQ ID NO: 776784 - protein, 296 aa, Homo sapiens
VSWLSRGHCVVSEDACHAAGTVGDGDCLAGGLVEWKTPQGMKRLWLVQARLEQQTEGHPQVGGISDTNQIFGLSETEPGSFLYYAPFDGILGLAYPSISSSGATPVFDNIWNQGLVSQDLFSVYLSADDQSGSVVIFGGIDSSYYTGSLNWVPVTVEGYWQITVDSITMNGEAIACAEGCQAIVDTGTSLLTGPTSPIANIQSDIGASENSDGDMVVSCSAISSLPDIVFTINGVQYPVPPSAYILQSEGSCISGFQGMNLPTESGELWILGDVFIRQYFTVFDRANNQVGLAPVA

SEQ ID NO: 776785 - protein, 266 aa, Homo sapiens
MNQGGSGPEAGIQSSVNMTRGEHHLGFPTQVGGISDTNQIFGLSETEPGSFLYYAPFDGILGLAYPSISSSGATPVFDNIWNQGLVSQDLFSVYLSADDQSGSVVIFGGIDSSYYTGSLNWVPVTVEGYWQITVDSITMNGEAIACAEGCQAIVDTGTSLLTGPTSPIANIQSDIGASENSDGDMVVSCSAISSLPDIVFTINGVQYPVPPSAYILQSEGSCISGFQGMNLPTESGELWILGDVFIRQYFTVFDRANNQVGLAPVA

SEQ ID NO: 776786 - protein, 38 aa, Homo sapiens
HNLNPARKYFPQWEAPTLVDEQPLENYLDVSVRASGGA

SEQ ID NO: 776787 - protein, 68 aa, Homo sapiens
VAVVYHIPRKAAGAKMNPPFDGILGLAYPSISSSGATPVFDNIWNQGLVSQDLFSVYLSARDWGPAHA

SEQ ID NO: 776788 - protein, 349 aa, Homo sapiens
MKWLLLLGLVALSECIMYKVPLIRKKSLRRTLSERGLLKDFLKKHNLNPARKYFPQWEAPTLVDEQPLENYLDMEYFGTIGIGTPAQDFTVVFDTGSSNLWVPSVYCSSLACTNHNRFNPEDSSTYQSTSETVSITYGTGSMTGILGYDTVQVGGISDTNQIFGLSETEPGSFLYYAPFDGILGLAYPSISSSGATPVFDNIWNQGLVSQDLFSVYLSADDQSGSVVIFGGIDSSYYTGSLNWVPVTVEGYWQITVDSITMNGEAIACAEGCQAIVDTGTSLLTGPTSPIANIQSDIGASENSDGDMVVSCSAISSLPDIVFTINGVQYPVPPSAYILQRGYQLESYMY

SEQ ID NO: 776789 - protein, 282 aa, Homo sapiens
TYTNSSSNHNRFNPEDSSTYQSTSETVSITYGTGSMTGILGYDTVQVGGISDTNQIFGLSETEPGSFLYYAPFDGILGLAYPSISSSGATPVFDNIWNQGLVSQDLFSVYLSADDQSGSVVIFGGIDSSYYTGSLNWVPVTVEGYWQITVDSITMNGEAIACAEGCQAIVDTGTSLLTGPTSPIANIQSDIGASENSDGDMVVSCSAISSLPDIVFTINGVQYPVPPSAYILQSEGSCISGFQGMNLPTESGELWILGDVFIRQYFTVFDRANNQVGLAPVA

SEQ ID NO: 776790 - protein, 282 aa, Homo sapiens
RLLMAEQLTTMSPSEFSLAPMTLWMLAMGLVGPGSMTGILGYDTVQVGGISDTNQIFGLSETEPGSFLYYAPFDGILGLAYPSISSSGATPVFDNIWNQGLVSQDLFSVYLSADDQSGSVVIFGGIDSSYYTGSLNWVPVTVEGYWQITVDSITMNGEAIACAEGCQAIVDTGTSLLTGPTSPIANIQSDIGASENSDGDMVVSCSAISSLPDIVFTINGVQYPVPPSAYILQSEGSCISGFQGMNLPTESGELWILGDVFIRQYFTVFDRANNQVGLAPVA

SEQ ID NO: 776791 - protein, 684 aa, Homo sapiens
MQSREDVPRSRRLASPRGGRRPKRISKPSVSAFFTGPEELKDTAHSAALLAQLKSFYDARLLCDVTIEVVTPGSGPGTGRLFSCNRNVLAAACPYFKSMFTGGMYESQQASVTMHDVDAESFEVLVDYCYTGRVSLSEANVQRLYAASDMLQLEYVREACASFLARRLDLTNCTAILKFADAFDHHKLRSQAQSYIAHNFKQLSRMGSIREETLADLTLAQLLAVLRLDSLDIESERTVCHVAVQWLEAAAKERGPSAAEVFKCVRWMHFTEEDQDYLEGLLTKPIVKKYCLDVIEGALQMRYGDLLYKSLVPVPNSSSSSSSSNSLVSAAENPPQRLGMCAKEMVIFFGHPRDPFLCYDPYSGDIYTMPSPLTSFAHTKTVTSSAVCVSPDHDIYLAAQPRKDLWVYKPAQNSWQQLADRLLCREGMDVAYLNGYIYILGGRDPITGVKLKEVECYSVQRNQWALVAPVPHSFYSFELIVVQNYLYAVNSKRMLCYDPSHNMWLNCASLKRSDFQEACVFNDEIYCICDIPVMKVYNPARGEWRRISNIPLDSETHNYQIVNHDQKLLLITSTTPQWKKNRVTVYEYDTREDQWINIGTMLGLLQFDSGFICLCARVYPSCLEPGQSFITEEDDARSESSTEWDLDGFSELDSESGSSSSFSDDEVWVQVAPQRNAQDQQGSL

SEQ ID NO: 776792 - protein, 684 aa, Homo sapiens; identical to SEQ ID NO: 776791

SEQ ID NO: 776793 - protein, 171 aa, Homo sapiens
PPPPPPPPAPRPRAWRGSRRRSRPGSRPQTRRSCSGDLDGSGDPGGLGDWLLEVEFGQGPTGCSHVESFKVGKNWQKNLRLIYQRFVWSGTPETRKRKAKSCICHVCSTHMNRLHSCLSCVFFGCFTEKHIHKHAETKQHHLAVDLYHGVIYCFMCKDYVYDKDIEQIAKE

SEQ ID NO: 776794 - protein, 164 aa, Homo sapiens
LGNLGRSCLHTHTATHTCTQVLGKPSKILSRHTHTHTHTPHTPHTHNHTHTTSPLSPIPRATQQLYCVSLKSETQRSNADGAATAYMQMSLLITQVALSYNIIFTPLLLHRGYHFHAVSLKCPTRGVTYCSGYVHLVLTIFHSSPSYERRIDELVDDIYYFPIY

SEQ ID NO: 776795 - protein, 69 aa, Homo sapiens
DIKFSPFLLSIYYVLALKSSWIHKKKAAFSSKSPLWPHLSLNDSGPSISTSPGNRTGDNDSKPQIKPHV

SEQ ID NO: 776796 - protein, 174 aa, Homo sapiens
HKSYRPLTVLTFRLNYLLSELKPMSYHLLNMIFHAVVSVIFLKVCKLFLDNKSSVIASLLFAVHPIHTEAVTGVVGRAELLSSIFFLAAFLSYTRSKGPDNSIIWTPIALTVFLVAVATLCKEQGITVVGICCVYEVFIAQGYTLPLLCTTAGQFLRGKGSIPFSMLQTLVKLI

SEQ ID NO: 776797 - protein, 106 aa, Homo sapiens
MKRPSPGLPLSPFPSPLHSWSTSWKNTSWGAAFPSKRWGLHSQPAIRKLNRSSPRSRVSTGRARVDQLCSSGTNPPYMPGLEAFGFVDAKSGWSRLLHPDSPASPF

SEQ ID NO: 776798 - protein, 106 aa, Homo sapiens; identical to SEQ ID NO: 776797

SEQ ID NO: 776799 - protein, 106 aa, Homo sapiens; identical to SEQ ID NO: 776797

SEQ ID NO: 776800 - protein, 85 aa, Homo sapiens
KRAEDCMGTVHGLSLEVMYITSTSNSIHILLAETLKERLGNVVQLHVEGESEQALVTTQPSLLRYPRRQIEEPVHAFNMLAPRPP

SEQ ID NO: 776801 - protein, 140 aa, Homo sapiens
AGVEGVGVWDIESTPESKLSLLGKSGAAPPPPAPGAPKAPGCGNSSVFRRPGLMGTVKVRLVWKVGRIPEEWRSRGAGGGGWGPRSGGVSTPALGVLALRWRLRTAVRWMTGEALMGLKLAGRKPKSGEGEGDGAGEKGD

SEQ ID NO: 776802 - protein, 36 aa, Homo sapiens
QQDWLACVTRESSWPKVEKNHQMWGYEPKAANGITN

SEQ ID NO: 776803 - protein, 230 aa, Homo sapiens
MKAEVTLDGVWPTDKTSRRLIKSPDRLADINYEGRLEAVSRKQGAQFKEYRPETGSWVFKVSHFSKYGLQDSDEEEEEHPSKTSDKEVEDCSFASCKPDYALARWLFNGKAAPPPQSQSPEVEQLGRVVELDSDMVDITQEPVLDTMLEESMPEDQEPVSASTHIASSLGINPHVLQIMKASLLTDEEDVDMALDQRFSRLPSKADTSQEICSPRLPISASHSSKTRSLG

SEQ ID NO: 776804 - protein, 917 aa, Homo sapiens
PEVDRGAELLGCSSWSFRGSCASGGGGVMFSAGAESLLHQAREIQDEELKKFCSRICKLLQAEDLGPDTLDSLQRLFLIISATKYSRRLEKTCVDLLQATLGLPACPEQLQVLCAAILREMSPSDSLSLAWDHTQNSRQLSLVASVLLAQGDRNEEVRAVGQGVLRALESRQPEGPSLRHLLPVMAKVVVLSPGTLQEDQATLLSKRLVDWLRYASLQQGLPHSGGFFSTPRARQPGPVTEVDGAVATDFFTVLSSGHRFTDDQWLNVQAFSMLRAWLLHSGPEGPGTLDTDDRSEQEGSTLSVISATSSAGRLLPPRERLREVAFEYCQRLIEQSNRRALRKGDSDLQKACLVEAVLVLDVLCRQDPSFLYRSLSCLKALHGRVRGDPASVRVLLPLAHFFLSHGEAAAVDSEAVYQHLFTRIPVEQFHSPMLAFEFIQFCRDNLHLFSGHLSTLRLSFPNLFKFLAWNSPPLTSEFVALLPALVDAGTALEMLHALLDLPCLTAVLDLQLRSAPAASERPLWDTSLRAPSCLEAFRDPQFQGLFQYLLRPKASGATERLAPLHQLLQPMAGCARVAQCAQAVPTLLQAFFSAVTQVADGSLINQLALLLLGRSDSLYPAPGYAAGVHRPDDMQAHPGSTLSLGLRPALVPAFSPVRTVSLRLAVFCVPLSEGAAYTYHSDASRVSPGPWPGWGWGHRSAQSRRRPGFLGSVLSSQFLALCTLKPSLVVELARDLLEFLGSVNGLCSRASLVTSVVWAIGEYLSVTYDRRCTVEQINKFFEALEALLFEVTQCRPSAALPRCPPQVVTVLMTTLTKLASRSQDLIPRASLLLSKMRTLAHSPATSSTHSEEGAEAIRTRATELLTLLKMPSVAQFVLTPSTEVCSPRYHRDANTALPLALRTVSRLVEREAGLMPG

SEQ ID NO: 776805 - protein, 387 aa, Homo sapiens
MQAHPGSTLSLGLRPALVPAFSPVRTVSLRLAVFCVPLSEGAAYTYHSDASRVSPGPWPGWGWGHRSAQSRRRPGFLGSVLSSQFLALCTLKPSLVVELARDLLEFLGSVNGLCSRASLVTSVVRRALASHSRFLTQEAWVGAESLSPGLGVGHRRVPVGDLRSEVHRGADQQVLRSPGGSAIRGHPVPPLCCPAQVSPPGGHRADDHADEAGLPEPRSDPQVPGQGGSEAFWLLGKRGGFLRSSHPGVVKWSQQRRSWVGPAELKPLCWAFRPGPSTQTPVLGGEHLQLTEGPSFPRASLLLSKMRTLAHSPATSSTHSEEGAEAIRTRATELLTLLKMPSVAQFVLTPSTEVCSPRYHRDANTALPLALRTVSRLVEREAGLMPG

SEQ ID NO: 776806 - protein, 218 aa, Homo sapiens
PEVDRGAELLGCSSWSFRGSCASGGGGVMFSAGAESLLHQAREIQDEELKKFCSRICKLLQAEDLGPDTLDSLQRLFLIISATKYSRRVTETRRSEPWARACYERWRAGSLRDPASDTSSPSWPRPGHPAQQAAGRLAALRQPPARAPTLRRLLLHAQGPAAGPRHRGGRGGSHRLLHGALQRPPLHRRPVAERAGLLYAAGVAAAQRPRGPGHPGHR

SEQ ID NO: 776807 - protein, 835 aa, Homo sapiens
PEVDRGAELLGCSSWSFRGSCASGGGGVMFSAGAESLLHQAREIQDEELKKFCSRICKLLQAEDLGPDTLDSLQRLFLIISATKYSRRLEKTCVDLLQATLGLPACPEQLQVLCAAILREMSPSDSLSLAWDHTQNSRQLSLVASVLLAQGDRNEEVRAVGQGVLRALESRQPEGPSLRHLLPVMAKVVVLSPGTLQEDQATLLSKRLVDWLRYASLQQGLPHSGGFFSTPRARQPGPVTEVDGAVATDFFTVLSSGHRFTDDQWLNVQAFSMLRAWLLHSGPEGPGTLDTDDRSEQEGSTLSVISATSSAGRLLPPRERLREVAFEYCQRLIEQSNRRALRKGDSDLQKACLVEAVLVLDVLCRQDPSFLYRSLSCLKALHGRVRGDPASVRVLLPLAHFFLSHGEAAAVDSEAVYQHLFTRIPVEQFHSPMLAFEFIQFCRDNLHLFSGHLSTLRLSFPNLFKFLAWNSPPLTSEFVALLPALVDAGTALEMLHALLDLPCLTAVLDLQLRSAPAASERPLWDTSLRAPSCLEAFRDPQFQGLFQYLLRPKASGATERLAPLHQLLQPMAGCARVAQCAQAVPTLLQAFFSAVTQVADGSLINQLALLLLGRSDSLYPAPGYAAGVHSVLSSQFLALCTLKPSLVVELARDLLEFLGSVNGLCSRASLVTSVVWAIGEYLSVTYDRRCTVEQINKFFEALEALLFEVTQCRPSAALPRCPPQVVTVLMTTLTKLASRSQDLIPRASLLLSKMRTLAHSPATSSTHSEEGAEAIRTRATELLTLLKMPSVAQFVLTPSTEVCSPRYHRDANTALPLALRTVSRLVEREAGLMPG

SEQ ID NO: 776808 - protein, 651 aa, Homo sapiens
MAKVVVLSPGTLQEDQATLLSKRLVDWLRYASLQQGLPHSGGFFSTPRARQPGPVTEVDGAVATDFFTVLSSGHRFTDDQWLNVQAFSMLRAWLLHSGPEGPGTLDTDDRSEQEGSTLSVISATSSAGRLLPPRERLREVAFEYCQRLIEQSNRRALRKGDSDLQKACLVEAVLVLDVLCRQDPSFLYRSLSCLKALHGRVRGDPASVRVLLPLAHFFLSHGEAAAVDSEAVYQHLFTRIPVEQFHSPMLAFEFIQFCRDNLHLFSGHLSTLRLSFPNLFKFLAWNSPPLTSEFVALLPALVDAGTALEMLHALLDLPCLTAVLDLQLRSAPAASERPLWDTSLRAPSCLEAFRDPQFQGLFQYLLRPKASGATERLAPLHQLLQPMAGCARVAQCAQAVPTLLQAFFSAVTQVADGSLINQLALLLLGRSDSLYPAPGYAAGVHSVLSSQFLALCTLKPSLVVELARDLLEFLGSVNGLCSRASLVTSVVWAIGEYLSVTYDRRCTVEQINKFFEALEALLFEVTQCRPSAALPRCPPQVVTVLMTTLTKLASRSQDLIPRASLLLSKMRTLAHSPATSSTHSEEGAEAIRTRATELLTLLKMPSVAQFVLTPSTEVCSPRYHRDANTALPLALRTVSRLVEREAGLMPG

SEQ ID NO: 776809 - protein, 911 aa, Homo sapiens
PEVDRGAELLGCSSWSFRGSCASGGGGVMFSAGAESLLHQAREIQDEELKKFCSRICKLLQAEDLGPDTLDSLQRLFLIISATKYSRRLEKTCVDLLQATLGLPACPEQLQVLCAAILREMSPSDSLSLAWDHTQNSRQLSLVASVLLAQGDRNEEVRAVGQGVLRALESRQPEGPSLRHLLPVMAKVVVLSPGTLQEGTRGPSQEAVGVCLPRSFPEGPWWVGSVGGRWGTRGGPRVWDAAGFCFLRKVGQHPNNPGICEDSTSPPHATPPTADQATLLSKRLVDWLRYASLQQGLPHSGGFFSTPRARQPGPVTEVDGAVATDFFTVLSSGHRFTDDQWLNVQAFSMLRAWLLHSGPEGPGTLDTDDRSEQEGSTLSVISATSSAGRLLPPRERLREVAFEYCQRLIEQSNRRALRKGDSDLQKACLVEAVLVLDVLCRQDPSFLYRSLSCLKALHGRVRGDPASVRVLLPLAHFFLSHGEAAAVDSEAVYQHLFTRIPVEQFHSPMLAFEFIQFCRDNLHLFSGHLSTLRLSFPNLFKFLAWNSPPLTSEFVALLPALVDAGTALEMLHALLDLPCLTAVLDLQLRSAPAASERPLWDTSLRAPSCLEAFRDPQFQGLFQYLLRPKASGATERLAPLHQLLQPMAGCARVAQCAQAVPTLLQAFFSAVTQVADGSLINQLALLLLGRSDSLYPAPGYAAGVHSVLSSQFLALCTLKPSLVVELARDLLEFLGSVNGLCSRASLVTSVVWAIGEYLSVTYDRRCTVEQINKFFEALEALLFEVTQCRPSAALPRCPPQVVTVLMTTLTKLASRSQDLIPRASLLLSKMRTLAHSPATSSTHSEEGAEAIRTRATELLTLLKMPSVAQFVLTPSTEVCSPRYHRDANTALPLALRTVSRLVEREAGLMPG

SEQ ID NO: 776810 - protein, 824 aa, Homo sapiens
PEVDRGAELLGCSSWSFRGSCASGGGGVMFSAGAESLLHQAREIQDEELKKFCSRICKLLQAEDLGPDTLDSLQRLFLIISATKYSRRLEKTCVDLLQATLGLPACPEQLQVLCAAILREMSPSDSLSLAWDHTQNSRQLSLVASVLLAQGDRNEEVRAVGQGVLRALESRQPEGPSLRHLLPVMAKTRPPCSASGWSTGCATPASSKGSHTPAASSPRPGPGSRAPSPRWTGLVATDFFTVLSSGHRFTDDQWLNVQAFSMLRAWLLHSGPEGPGTLDTDDRSEQEGSTLSVISATSSAGRLLPPRERLREVAFEYCQRLIEQSNRRALRKGDSDLQKACLVEAVLVLDVLCRQDPSFLYRSLSCLKALHGRVRGDPASVRVLLPLAHFFLSHGEAAAVDSEAVYQHLFTRIPVEQFHSPMLAFEFIQFCRDNLHLFSGHLSTLRLSFPNLFKFLAWNSPPLTSEFVALLPALVDAGTALEMLHALLDLPCLTAVLDLQLRSAPAASERPLWDTSLRAPSCLEAFRDPQFQGLFQYLLRPKASGATERLAPLHQLLQPMAGCARVAQCAQAVPTLLQAFFSAVTQVADGSLINQLALLLLGRSDSLYPAPGYAAGVHSVLSSQFLALCTLKPSLVVELARDLLEFLGSVNGLCSRASLVTSVVWAIGEYLSVTYDRRCTVEQINKFFEALEALLFEVTQCRPSAALPRCPPQVVTVLMTTLTKLASRSQDLIPRASLLLSKMRTLAHSPATSSTHSEEGAEAIRTRATELLTLLKMPSVAQFVLTPSTEVCSPRYHRDANTALPLALRTVSRLVEREAGLMPG

SEQ ID NO: 776811 - protein, 559 aa, Homo sapiens
MRAYWLARPGWRLDTDDRSEQEGSTLSVISATSSAGRLLPPRERLREVAFEYCQRLIEQSNRRALRKGDSDLQKACLVEAVLVLDVLCRQDPSFLYRSLSCLKALHGRVRGDPASVRVLLPLAHFFLSHGEAAAVDSEAVYQHLFTRIPVEQFHSPMLAFEFIQFCRDNLHLFSGHLSTLRLSFPNLFKFLAWNSPPLTSEFVALLPALVDAGTALEMLHALLDLPCLTAVLDLQLRSAPAASERPLWDTSLRAPSCLEAFRDPQFQGLFQYLLRPKASGATERLAPLHQLLQPMAGCARVAQCAQAVPTLLQAFFSAVTQVADGSLINQLALLLLGRSDSLYPAPGYAAGVHSVLSSQFLALCTLKPSLVVELARDLLEFLGSVNGLCSRASLVTSVVWAIGEYLSVTYDRRCTVEQINKFFEALEALLFEVTQCRPSAALPRCPPQVVTVLMTTLTKLASRSQDLIPRASLLLSKMRTLAHSPATSSTHSEEGAEAIRTRATELLTLLKMPSVAQFVLTPSTEVCSPRYHRDANTALPLALRTVSRLVEREAGLMPG

SEQ ID NO: 776812 - protein, 835 aa, Homo sapiens; identical to SEQ ID NO: 776807

SEQ ID NO: 776813 - protein, 685 aa, Homo sapiens
PEVDRGAELLGCSSWSFRGSCASGGGGVMFSAGAESLLHQAREIQDEELKKFCSRICKLLQAEDLGPDTLDSLQRLFLIISATKYSRRLEKTCVDLLQATLGLPACPEQLQVLCAAILREMSPSDSLSLAWDHTQNSRQLSLVASVLLAQGDRNEEVRAVGQGVLRALESRQPEGPSLRHLLPVMAKVVVLSPGTLQEDQATLLSKRLVDWLRYASLQQGLPHSGGFFSTPRARQPGPVTEVDGAVATDFFTVLSSGHRFTDDQWLNVQAFSMLRAWLLHSGPEGPGTLDTDDRSEQEGSTLSVISATSSAGRLLPPRERLREVAFEYCQRLIEQSNRRALRKGDSDLQKACLVEAVLVLDVLCRQDPSFLYRSLSCLKALHGRVRGDPASVRVLLPLAHFFLSHGEAAAVDSEAVYQHLFTRIPVEQFHSPMLAFEFIQFCRDNLHLFSGHLSTLRLSFPNLFKFLAWNSPPLTSEFVALLPALVDAGTALEMLHALLDLPCLTAVLDLQLRSAPAASERPLWDTSLRAPSCLEAFRDPQFQGLFQYLLRPKASGATERLAPLHQLLQPMAGCARVAQCAQAVPTLLQAFFSAVTQVADGSLINQLALLLLGRSDSLYPAPGYAAGVHSVLSSQFLALCTLKPSLVVELARDLLEFLGSVNGLCSRASLVTSVVRRALASHSRS

SEQ ID NO: 776814 - protein, 262 aa, Homo sapiens
PEVDRGAELLGCSSWSFRGSCASGGGGVMFSAGAESLLHQAREIQDEELKKFCSRICKLLQAEDLGPDTLDSLQRLFLIISATKYSRRLEKTCVDLLQATLGLPACPEQLQVLCAAILREMSPSDSLSLAWDHTQNSRQLSLVASVLLAQGDRNEEVRAVGQGVLRALESRQPEGPSLRHLLPVMAKVVVLSPGTLQEDQATLLSKRLVDWLRYASLQQGLPHSGGFFSTPRARQPGPVTEVDGAVATDFFTVEREAGLMPG

SEQ ID NO: 776815 - protein, 128 aa, Homo sapiens
MCHSVCDSRAVRVPGRGRPSAASPASQREDASEPLVSWRAGLRLRAPNQSQKHGQGEVKTCALAGPGLAGEAAAVDSEAVYQHLFTRIPVEQFHSPMLAFEFIQFCRDNLHLFSGHLSTLRLSFPNLF

SEQ ID NO: 776816 - protein, 396 aa, Homo sapiens
AASPGPTPERRRAARRAARRGPAGSVFWARGAGRAGCAERQWWDTTQGLARRRPSRGGRRRSHWAVEERRRPVGRAGPRGAAMPGFTCCVPGCYNNSHRDKALHFYTFPKDAELRRLWLKNVSRAGVSGCFSTFQPTTGHRLCSVHFQGGRKTYTVRVPTIFPLRGVNERKVARRPAGAAAARRRQQQQQQQQQQQQQQQQQQQQQQQQQQQQQSSPSASTAQTAQLQPNLVSASAAVLLTLQATVDSSQAPGSVQPAPITPTGEDVKPIDLTVQVEFAAAEGAAAAAAASELQAATAGLEAAECPMGPQLVVVGEEGFPDTGSDHSYSLSSGTTEEELLRKLNEQRDILALMEVKMKEMKGSIRHLRLTEAKLREELREKDRLLAMAVIRKKHGM

SEQ ID NO: 776817 - protein, 84 aa, Homo sapiens
LASTRLGSNRPRVEQVANAAFTCVSLRPSCAKNCVRRIGCLPWLSSARSTECELVPRQPAGLPDPIQPGDRRPLLNSSILLGTG

SEQ ID NO: 776818 - protein, 353 aa, Homo sapiens
AASPGPTPERRRAARRAARRGPAGSVFWARGAGRAGCAERQWWDTTQGLARRRPSRGGRRRSHWAVEERRRPVGRAGPRGAAMPGFTCCVPGCYNNSHRDKALHFYTFPKDAELRRLWLKNVSRAGVSGCFSTFQPTTGHRLCSQQQQQQQQQQQQQQQQQQQQQQQQQQQSSPSASTAQTAQLQPNLVSASAAVLLTLQATVDSSQAPGSVQPAPITPTGEDVKPIDLTVQVEFAAAEGAAAAAAASELQAATAGLEAAECPMGPQLVVVGEEGFPDTGSDHSYSLSSGTTEEELLRKLNEQRDILALMEVKMKEMKGSIRHLRLTEAKLREELREKDRLLAMAVIRKKHGM

SEQ ID NO: 776819 - protein, 396 aa, Homo sapiens; identical to SEQ ID NO: 776816

SEQ ID NO: 776820 - protein, 396 aa, Homo sapiens; identical to SEQ ID NO: 776816

SEQ ID NO: 776821 - protein, 292 aa, Homo sapiens
AASPGPTPERRRAARRAARRGPAGSVFWARGAGRAGCAERQWWDTTQGLARRRPSRGGRRRSHWAVEERRRPVGRAGPRGAAMPGFTCCVPGCYNNSHRDKALHFYTFPKDAELRRLWLKNVSRAGVSGCFSTFQPTTGHRLCSVHFQGGRKTYTVRVPTIFPLRGVNERKVARRPAGAAAARRRQQQQQQQQQQQQQQQQQQQQQQQQQQQQQSSPSASTAQTAQLQPNLVSASAAVLLTLQAILALMEVKMKEMKGSIRHLRLTEAKLREELREKDRLLAMAVIRKKHGM

SEQ ID NO: 776822 - protein, 379 aa, Homo sapiens
AASPGPTPERRRAARRAARRGPAGSVFWARGAGRAGCAERQWWDTTQGLARRRPSRGGRRRSHWAVEERRRPVGRAGPRGAAMPGFTCCVPGCYNNSHRDKALHFYTFPKDAELRRLWLKNVSRAGVSGCFSTFQPTTGHRLCSVHFQGGRKTYTVRVPTIFPLRGVNERKVARRPAGAAAARRRQQQQQQQQQQQQQQQQQQQQQQQQQQQQQSSPSASTAQTAQLQPNLVSASAAVLLTLQATVDSSQAPGSVQPAPITPTGEDVKPIDLTVQVEFAAAEGAAAAAAASELQAATAGLEAAECPMGPQLVVVGEEGFPDTGSDHSYSLSSGTTEEELLRKLNEQRDILALMEVKMKEMKGSIRRGMSRDYRFGKTIP

SEQ ID NO: 776823 - protein, 415 aa, Homo sapiens
AASPGPTPERRRAARRAARRGPAGSVFWARGAGRAGCAERQWWDTTQGLARRRPSRGGRRRSHWAVEERRRPVGRAGPRGAAMPGFTCCVPGCYNNSHRDKALHFYTFPKDAELRRLWLKNVSRAGVSGCFSTFQPTTGHRLCSVHFQGGRKTYTVRVPTIFPLRGVNERKVARRPAGAAAARRRQQQQQQQQQQQQQQQQQQQQQQQQQQQQQSSPSASTAQTAQLQPNLVSASAAVLLTLQATVDSSQAPGSVQPAPITPTGEDVKPIDLTVQVEFAAAEGAAAAAAASELQAATAGLEAAECPMGPQLVVVGEEGFPDTGSDHSYSLSSGTTEEELLRKLNEQRDILALMEVKMKEMKGSIRHLRLTEAKLREELRESQDRVGRGVLVGSGWERLCEGGWGCFGFPNKETGV

SEQ ID NO: 776824 - protein, 246 aa, Homo sapiens
AASPGPTPERRRAARRAARRGPAGSVFWARGAGRAGCAERQWWDTTQGLARRRPSRGGRRRSHWAVEERRRPVGRAGPRGAAMPGFTCCVPGCYNNSHRDKALHFYTFPKDAELRRLWLKNVSRAGVSGCFSTFQPTTGHRLCSVHFQGGRKTYTVRVPTIFPLRGVNERKVARRPAGAAAARRRQQQQQQQQQQQQQQQQQQQQQQQQQQQQQSSPSASTAQTAQLQPNLVSASAAVLLTLQANH

SEQ ID NO: 776825 - protein, 314 aa, Homo sapiens
MPGFTCCVPGCYNNSHRDKALHFYTFPKDAELRRLWLKNVSRAGVSGCFSTFQPTTGHRLCSVHFQGGRKTYTVRVPTIFPLRGVNERKVARRPAGAAAARRRQQQQQQQQQQQQQQQQQQQQQQQQQQQQQSSPSASTAQTAQLQPNLVSASAAVLLTLQATVDSSQAPGSVQPAPITPTGEDVKPIDLTVQVEFAAAEGAAAAAAASELQAATAGLEAAECPMGPQLVVVGEEGFPDTGSDHSYSLSSGTTEEELLRKLNEQRDILALMEVKMKEMKGSIRHLRLTEAKLREELREKDRLLAMAVIRKKHGM

SEQ ID NO: 776826 - protein, 396 aa, Homo sapiens; identical to SEQ ID NO: 776816

SEQ ID NO: 776827 - protein, 373 aa, Homo sapiens
AASPGPTPERRRAARRAARRGPAGSVFWARGAGRAGCAERQWWDTTQGLARRRPSRGGRRRSHWAVEERRRPVGRAGPRGAAMPGFTCCVPGCYNNSHRDKALHFYTFPKDAELRRLWLKNVSRAGVSGCFSTFQPTTGHRLCSVHFQGGRKTYTVRVPTIFPLRGVNERKVARRPAGAAAARRRQQQQQQQQQQQQQQQQQQQQQQQQQQQQQSSPSASTAQTAQLQPNLVSASAAVLLTLQATVDSSQAPGSVQPAPITPTGEDVKPIDLTVQVEFAAAEGAAAAAAASELQAATAGLEAAECPMGPQLVVVGEEGFPDTGSDHSYSLSSGTTEEELLRKLNEQRDILALMEVKMKEMKGSIRRQAARRTA

SEQ ID NO: 776828 - protein, 396 aa, Homo sapiens; identical to SEQ ID NO: 776816

SEQ ID NO: 776829 - protein, 369 aa, Homo sapiens
AASPGPTPERRRAARRAARRGPAGSVFWARGAGRAGCAERQWWDTTQGLARRRPSRGGRRRSHWAVEERRRPVGRAGPRGAAMPGFTCCVPGCYNNSHRDKALHFYTFPKDAELRRLWLKNVSRAGVSGCFSTFQPTTGHRLCSVHFQGGRKTYTVRVPTIFPLRGVNERKVARRPAGAAAARRRQQQQQQQQQQQQQQQQQQQQQQQQQQQQQSSPSASTAQTAQLQPNLVSASAAVLLTLQATVDSSQAPGSVQPAPITPTGEDVKPIDLTVQVEFAAAEGAAAAAAASELQAATAGLEAAECPMGPQLVVVGEEGFPDTGSDHSYSLSSGTTEEELLRKLNEQRDILALMEVKMKEMKGSIRPSAS

SEQ ID NO: 776830 - protein, 224 aa, Homo sapiens
MNLGGKRTPTITPGCVGSTHTTVGVQQQSPPHQDNRTHPDPRQREKKKETRTKTARRQKRAATPHQGRVTKHGHRAPWGTTLAVTTSAGPAMTRAQHNLLYPPRGAPSQQNNTIQMKTEPLMRPQAKGPSGDARVETNARGMNTPTNSVPRRGGVPRRTPTRRGAHRHKNSIERGRGSMAMERMNDSSMTDKPPRAAPRGTTAADSHGQHHQAQLTPRRPHDHS

SEQ ID NO: 776831 - protein, 78 aa, Homo sapiens
VSALWCRYLSSRPPLDQASEPVGCQGRTVPHRRHGSPHAIHQVSPGSIQVTGLEGPQQPSWTCSLWGSSFSGTNSRTQ

SEQ ID NO: 776832 - protein, 725 aa, Homo sapiens
SSYHSSTCFSIFQCGAVCAQPCPPGTFGQNCSQDCPCHHGGQCDHVTGQCHCTAGYMGDRCQEECPFGSFGFQCSQRCDCHNGGQCSPTTGACECEPGYKGPRCQERLCPEGLHGPGCTLPCPCDADNTISCHPVTGACTCQPGWSGHHCNESCPVGYYGDGCQLPCTCQNGADCHSITGGCTCAPGFMGEVCAVSCAAGTYGPNCSSICSCNNGGTCSPVDGSCTCKEGWQGLDCTLPCPSGTWGLNCNESCTCANGAACSPIDGSCSCTPGWLGDTCELPCPDGTFGLNCSEHCDCSHADGCDPVTGHCCCLAGWTGIRCDSTCPPGRWGPNCSVSCSCENGGSCSPEDGSCECAPGFRGPLCQRICPPGFYGHGCAQPCPLCVHSSRPCHHISGICECLPGFSGALCNQVCAGGYFGQDCAQLCSCANNGTCSPIDGSCQCFPGWIGKDCSQACPPGFWGPACFHACSCHNGASCSAEDGACHCTPGWTGLFCTQRCPAAFFGKDCGRVCQCQNGASCDHISGKCTCRTGFTGQHCEQRCAPGTFGYGCQQLCECMNNSTCDHVTGTCYCSPGFKGIRCDQAALMMEELNPYTKISPALGAERHSVGAVTGIMLLLFLIVVLLGLFAWHRRRQKEKGRDLAPRVSYTPAMRMTSTDYSLSASTTPWWPVMEHLARPFSQRPRTQLSNKSLDRDTAGWTPYSYVNVLLDQCPGGQVPARGLLH

SEQ ID NO: 776833 - protein, 880 aa, Homo sapiens
SSYHSSTCFSIFQCGAVCAQPCPPGTFGQNCSQDCPCHHGGQCDHVTGQCHCTAGYMGDRCQEECPFGSFGFQCSQRCDCHNGGQCSPTTGACECEPGYKGPRCQERLCPEGLHGPGCTLPCPCDADNTISCHPVTGACTCQPGWSGHHCNESCPVGYYGDGCQLPCTCQNGADCHSITGGCTCAPGFMGEVCAVSCAAGTYGPNCSSICSCNNGGTCSPVDGSCTCKEGWQGLDCTLPCPSGTWGLNCNESCTCANGAACSPIDGSCSCTPGWLGDTCELPCPDGTFGLNCSEHCDCSHADGCDPVTGHCCCLAGWTGIRCDSTCPPGRWGPNCSVSCSCENGGSCSPEDGSCECAPGFRGPLCQRICPPGFYGHGCAQPCPLCVHSSRPCHHISGICECLPGFSGALCNQVCAGGYFGQDCAQLCSCANNGTCSPIDGSCQCFPGWIGKDCSQACPPGFWGPACFHACSCHNGASCSAEDGACHCTPGWTGLFCTQRCPAAFFGKDCGRVCQCQNGASCDHISGKCTCRTGFTGQHCEQRCAPGTFGYGCQQLCECMNNSTCDHVTGTCYCSPGFKGIRCDQAALMMEELNPYTKISPALGAERHSVGAVTGIMLLLFLIVVLLGLFAWHRRRQKEKGRDLAPRVSYTPAMRMTSTDYSLSASTTPWWPVMEHLARPFSQRPRTQLSNKSLDRDTAGWTPYSYVNVLLISALEARYPPEDFYIELRHLSRPAEPHSPGACGMDRRQNTYIMDKGFKDYMKESVCSSSTCSLNSSENPYATIKDPPILTCKLPESSYVEMKSPVHMGSPYTDVPSLSTSNKNIYEVEPTVSVVQEGCGHNSSYIQNAYDLPRNSHIPGHYDLLPVRQSPANGPSQDKQS

SEQ ID NO: 776834 - protein, 330 aa, Homo sapiens
TLSGIMLLLFLIVVLLGLFACDSTHRVPLCTQCWADLGVGIQLLHHEGSLVTPDSFEARAAVTGIMLLLFLIVVLLGLFAWHRRRQKEKGRDLAPRVSYTPAMRMTSTDYSLSASTTPWWPVMEHLARPFSQRPRTQLSNKSLDRDTAGWTPYSYVNVLLISALEARYPPEDFYIELRHLSRPAEPHSPGACGMDRRQNTYIMDKGFKDYMKESVCSSSTCSLNSSENPYATIKDPPILTCKLPESSYVEMKSPVHMGSPYTDVPSLSTSNKNIYEVEPTVSVVQEGCGHNSSYIQNAYDLPRNSHIPGHYDLLPVRQSPANGPSQDKQS

SEQ ID NO: 776835 - protein, 152 aa, Homo sapiens
SRRGQTGPELRGACGMDRRQNTYIMDKGFKDYMKESVCSSSTCSLNSSENPYATIKDPPILTCKLPESSYVEMKSPVHMGSPYTDVPSLSTSNKNIYEVEPTVSVVQEGCGHNSSYIQNAYDLPRNSHIPGHYDLLPVRQSPANGPSQDKQS

SEQ ID NO: 776836 - protein, 1021 aa, Homo sapiens
PLPAARLPAARGPLLLPGALARLGLRRTGPRDWPADPWAGRGSSYAVTVQESYAHPFDQIYYTRCTDILNWFKAPGTALCTEECVHGRCVSPDTCHCEPGWGGPDCSSGCDSDHWGPHCSNRCQCQNGALCNPITGACVCAAGFRGWRCEELCAPGTHGKGCQLPCQCRHGASCDPRAGECLCAPGYTGVYCEELCPPGSHGAHCELRCPCQNGGTCHHITGECACPPGWTGAVCAQPCPPGTFGQNCSQDCPCHHGGQCDHVTGQCHCTAGYMGDRCQEECPFGSFGFQCSQRCDCHNGGQCSPTTGACECEPGYKGPRCQERLCPEGLHGPGCTLPCPCDADNTISCHPVTGACTCQPGWSGHHCNESCPVGYYGDGCQLPCTCQNGADCHSITGGCTCAPGFMGEVCAVSCAAGTYGPNCSSICSCNNGGTCSPVDGSCTCKEGWQGLDCTLPCPSGTWGLNCNESCTCANGAACSPIDGSCSCTPGWLGDTCELPCPDGTFGLNCSEHCDCSHADGCDPVTGHCCCLAGWTGIRCDSTCPPGRWGPNCSVSCSCENGGSCSPEDGSCECAPGFRGPLCQRICPPGFYGHGCAQPCPLCVHSSRPCHHISGICECLPGFSGALCNQVCAGGYFGQDCAQLCSCANNGTCSPIDGSCQCFPGWIGKDCSQACPPGFWGPACFHACSCHNGASCSAEDGACHCTPGWTGLFCTQRCPAAFFGKDCGRVCQCQNGASCDHISGKCTCRTGFTGQHCEQRCAPGTFGYGCQQLCECMNNSTCDHVTGTCYCSPGFKGIRCDQAALMMEELNPYTKISPALGAERHSVGAVTGIMLLLFLIVVLLGLFAWHRRRQKEKGRDLAPRVSYTPAMRMTSTDYSLSGACGMDRRQNTYIMDKGFKDYMKESVCSSSTCSLNSSENPYATIKDPPILTCKLPESSYVEMKSPVHMGSPYTDVPSLSTSNKNIYEVEPTVSVVQEGCGHNSSYIQNAYDLPRNSHIPGHYDLLPVRQSPANGPSQDKQS

SEQ ID NO: 776837 - protein, 669 aa, Homo sapiens
MGDRCQEECPFGSFGFQCSQRCDCHNGGQCSPTTGACECEPGYKGPRCQERLCPEGLHGPGCTLPCPCDADNTISCHPVTGACTCQPGWSGHHCNESCPVGYYGDGCQLPCTCQNGADCHSITGGCTCAPGFMGEVCAVSCAAGTYGPNCSSICSCNNGGTCSPVDGSCTCKEGWQGLDCTLPCPSGTWGLNCNESCTCANGAACSPIDGSCSCTPGWLGDTCELPCPDGTFGLNCSEHCDCSHADGCDPVTGHCCCLAGWTGIRCDSTCPPGRWGPNCSVSCSCENGGSCSPEDGSCECAPGFRGPLCQRICPPGFYGHGCAQPCPLCVHSSRPCHHISGICECLPGFSGALCNQVCAGGYFGQDCAQLCSCANNGTCSPIDGSCQCFPGWIGKDCSQACPPGFWGPACFHACSCHNGASCSAEDGACHCTPGWTGLFCTQRCPAAFFGKDCGRVCQCQNGASCDHISGKCTCRTGFTGQHCEQRCAPGTFGYGCQQLCECMNNSTCDHVTGTCYCSPGFKGIRCDQAALMMEELNPYTKISPALGAERHSVGAVTGIMLLLFLIVVLLGLFAWHRRRQKEKGRDLAPRVSYTPAMRMTSTDYSLSASTTPWWPVMEHLARPFSQRPRTQLSNKSLDRDTAGWTPYSYVNVLLDQCPGGQVPARGLLH

SEQ ID NO: 776838 - protein, 725 aa, Homo sapiens; identical to SEQ ID NO: 776832

SEQ ID NO: 776839 - protein, 725 aa, Homo sapiens; identical to SEQ ID NO: 776832

SEQ ID NO: 776840 - protein, 92 aa, Homo sapiens
RYLEEQEDSKMVDLFVGQMKSYLKCQACGYHSMTFKVFFFCDLSLTIPKKGFAGGKVSLRDCLSLFTKEEELELENASVCDPHGQKTHGAKS

SEQ ID NO: 776841 - protein, 68 aa, Homo sapiens
LHHLPAGRERGEEGEHAYDTLSLESSDSMETSISTGGKLGQPTLVFSWTDPKFRTSPFFNSSFPMICS

SEQ ID NO: 776842 - protein, 147 aa, Homo sapiens
MAGNSILLAAVSILSACQQSYFALQVGKARLKYKVTPPAVTGSPEFERVFRAQQNCVEFYPIFIITLWMAGWYFNQVFATCLGLVYIYGRHLYFWGYSEAAKKRITGFRLSLGILALLTLLGALGIANSFLDEYLDLNIAKKLRRQF

SEQ ID NO: 776843 - protein, 112 aa, Homo sapiens
TSSTPPRASNPKTPHPLSQNCVEFYPIFIITLWMAGWYFNQVFATCLGLVYIYGRHLYFWGYSEAAKKRITGFRLSLGILALLTLLGALGIANSFLDEYLDLNIAKKLRRQF

SEQ ID NO: 776844 - protein, 147 aa, Homo sapiens; identical to SEQ ID NO: 776842

SEQ ID NO: 776845 - protein, 147 aa, Homo sapiens; identical to SEQ ID NO: 776842

SEQ ID NO: 776846 - protein, 112 aa, Homo sapiens
  misc_feature (17)..(17): Xaa can be any naturally occurring amino acid
PTIFFFPTPYIPNTPPXSQNCVEFYPIFIITLWMAGWYFNQVFATCLGLVYIYGRHLYFWGYSEAAKKRITGFRLSLGILALLTLLGALGIANSFLDEYLDLNIAKKLRRQF

SEQ ID NO: 776847 - protein, 487 aa, Homo sapiens
MRRGERRDAGGPRPESPVPAGRASLEEPPDGPSAGQATGPGEGRRSTESEVYDDGTNTFFWRAHTLTVLFILTCTLGYVTLLEETPQDTAYNTKRGIVASILVFLCFGVTQAKDGPFSRPHPAYWRFWLCVSVVYELFLIFILFQTVQDGRQFLKYVDPKLGVPLPERDYGGNCLIYDPDNETDPFHNIWDKLDGFVPAHFLGWYLKTLMIRDWWMCMIISVMFEFLEYSLEHQLPNFSECWWDHWIMDVLVCNGLGIYCGMKTLEWLSLKTYKWQGLWNIPTYKGKMKRIAFQFTPYSWVRFEWKPASSLRRWLAVCGIILVFLLAELNTFYLKFVLWMPPEHYLVLLRLVFFVNVGGVAMREIYDFMDDPKPHKKLGPQAWLVAAITATELLIVVKYDPHTLTLSLPFYISQCWTLGSVLALTWTVWRFFLRDITLRYKETRWQKWQNKDDQGSTVGNGDQHPLGLDEDLLGPGVAEGEGAPTPN

SEQ ID NO: 776848 - protein, 116 aa, Homo sapiens
MRRGERRDAGGPRPESPVPAGRASLEEPPDGPSAGQATGPGEGRRSTESEVYDDGTNTFFWRAHTLTVLFILTCTLGYVTLLEETPQDTAYNTKRFVSTGRQARPWVCPLPEFHGF

SEQ ID NO: 776849 - protein, 431 aa, Homo sapiens
MSDLRRAHTLTVLFILTCTLGYVTLLEETPQDTAYNTKRGIVASILVFLCFGVTQAKDGPFSRPHPAYWRFWLCVSVVYELFLIFILFQTVQDGRQFLKYVDPKLGVPLPERDYGGNCLIYDPDNETDPFHNIWDKLDGFVPAHFLGWYLKTLMIRDWWMCMIISVMFEFLEYSLEHQLPNFSECWWDHWIMDVLVCNGLGIYCGMKTLEWLSLKTYKWQGLWNIPTYKGKMKRIAFQFTPYSWVRFEWKPASSLRRWLAVCGIILVFLLAELNTFYLKFVLWMPPEHYLVLLRLVFFVNVGGVAMREIYDFMDDPKPHKKLGPQAWLVAAITATELLIVVKYDPHTLTLSLPFYISQCWTLGSVLALTWTVWRFFLRDITLRYKETRWQKWQNKDDQGSTVGNGDQHPLGLDEDLLGPGVAEGEGAPTPN

SEQ ID NO: 776850 - protein, 219 aa, Homo sapiens
QGSVGCLPQAAGSVVPRGKMKRIAFQFTPYSWVRFEWKPASSLRRWLAVCGIILVFLLAELNTFYLKFVLWMPPEHYLVLLRLVFFVNVGGVAMREIYDFMDDPKPHKKLGPQAWLVAAITATELLIVVKYDPHTLTLSLPFYISQCWTLGSVLALTWTVWRFFLRDITLRYKETRWQKWQNKDDQGSTVGNGDQHPLGLDEDLLGPGVAEGEGAPTPN

SEQ ID NO: 776851 - protein, 487 aa, Homo sapiens; identical to SEQ ID NO: 776847

SEQ ID NO: 776852 - protein, 524 aa, Homo sapiens
MRRGERRDAGGPRPESPVPAGRASLEEPPDGPSAGQATGPGEGRRSTESEVYDDGTNTFFCCDPGLALCQMLLCEKDQAVDLKAGFVRGGFGIFLTARRAHTLTVLFILTCTLGYVTLLEETPQDTAYNTKRGIVASILVFLCFGVTQAKDGPFSRPHPAYWRFWLCVSVVYELFLIFILFQTVQDGRQFLKYVDPKLGVPLPERDYGGNCLIYDPDNETDPFHNIWDKLDGFVPAHFLGWYLKTLMIRDWWMCMIISVMFEFLEYSLEHQLPNFSECWWDHWIMDVLVCNGLGIYCGMKTLEWLSLKTYKWQGLWNIPTYKGKMKRIAFQFTPYSWVRFEWKPASSLRRWLAVCGIILVFLLAELNTFYLKFVLWMPPEHYLVLLRLVFFVNVGGVAMREIYDFMDDPKPHKKLGPQAWLVAAITATELLIVVKYDPHTLTLSLPFYISQCWTLGSVLALTWTVWRFFLRDITLRYKETRWQKWQNKDDQGSTVGNGDQHPLGLDEDLLGPGVAEGEGAPTPN

SEQ ID NO: 776853 - protein, 487 aa, Homo sapiens; identical to SEQ ID NO: 776847

SEQ ID NO: 776854 - protein, 84 aa, Homo sapiens
GSLRVEAGLQPASLAGRVRHHPGGKAGLPRDGAAGGGPELVLTLSSPEFLLAELNTFYLKFVLWMPPEHYLVLLRLVFFVNVGG

SEQ ID NO: 776855 - protein, 306 aa, Homo sapiens
DYFRRNGAVTHIKIQNTGDYYDLYGGEKFATLAELVQYYMEHHGQLKEKNGDVIELKYPLNCADPTSERWFHGHLSGKEAEKLLTEKGKHGSFLVRESQSHPGDFVLSVRTGDDKGESNDGKSKVTHVMIRCQELKYDVGGGERFDSLTDLVEHYKKNPMVETLGTVLQLKQPLNTTRINAAEIESRVRELSKLAETTDKVKQGFWEEFETLQQRSANFSTAKEVKARKHKRKKTGINAGGRNRGNEGHGKGPGQFLSQGRLRPKERLIRTGTVKPHEQRKTPTVHIQKRTTHSTPKTRENHIYMH

SEQ ID NO: 776856 - protein, 77 aa, Homo sapiens
VTRDGSCVRAGGCVGLQEKMAVSTGVKVPRNFRLLEELEEGQKGVGDGTVSWGLEDDEDMTLTRWTGMIMWATKDKL

SEQ ID NO: 776857 - protein, 73 aa, Homo sapiens
RIQRPLNSENGLQEKMAVSTGVKVPRNFRLLEELEEGQKGVGDGTVSWGLEDDEDMTLTRWTGMIMWATKDKL

SEQ ID NO: 776858 - protein, 81 aa, Homo sapiens
VTRDGSCVRAGGCVGLQEKMAVSTGVKVPRNFRLLEELEEGQKGVGDGTVSWGLEDDEDMTLTRWTGMIMWATKAGIIEEG

SEQ ID NO: 776859 - protein, 77 aa, Homo sapiens; identical to SEQ ID NO: 776856

SEQ ID NO: 776860 - protein, 110 aa, Homo sapiens
SDARRFVRACGRLRRAAGEDGGLHRLVCNGVILAHRNLHLPGSSDSPASASRVAGIPGVKVPRNFRLLEELEEGQKGVGDGTVSWGLEDDEDMTLTRWTGMIMWATKDKL

SEQ ID NO: 776861 - protein, 81 aa, Homo sapiens; identical to SEQ ID NO: 776858

SEQ ID NO: 776862 - protein, 95 aa, Homo sapiens
RCYTMRWGRKDREDSPRETWSYVCNLRAIVRDHVVGSVANLDLVKAVPVELAGVVRVELESLVVAYWGHRVVDLSEEEIRSELLISDYSPREDKL

SEQ ID NO: 776863 - protein, 81 aa, Homo sapiens
AEDTDGGPGTQRNNSNLMVIAWLLELSLKAIDRWLGYWIQEAGRRVEIQDVLNKFPRGGLRRESLAASMTNYENRIYSLKG

SEQ ID NO: 776864 - protein, 107 aa, Homo sapiens
MFKCLCISHTIPPSGEKIPPFLTVTHTNSQAWVKTFDPGDHSWSHAHSSSLTLIIWLPPPFYGFPGGQPRRTAHTQWAGQPIFFSSLAKGALGPILKHLNLGGYSGK

SEQ ID NO: 776865 - protein, 86 aa, Homo sapiens
  misc_feature (26)..(26): Xaa can be any naturally occurring amino acid
GSIRGGAQNTGGYGEDGHFLLFLMQXRWVIDLDSIGLTYSAVKAGTATVLSIAEPLLESIVRVWNDSRQVVTIASESRGTSKAATR

SEQ ID NO: 776866 - protein, 77 aa, Homo sapiens; identical to SEQ ID NO: 776856

SEQ ID NO: 776867 - protein, 112 aa, Homo sapiens
VTRDGSCVRAGGCVGLQEKMAVSTGVKVPRNFRLLEELEEGQKGVGDGTVSWGLEDDEDMTLTRWTGMIMWATKGGCPEHTSVSKSGKNSYSINTCGTSRAKTSNDVQQNTL

SEQ ID NO: 776868 - protein, 77 aa, Homo sapiens; identical to SEQ ID NO: 776856

SEQ ID NO: 776869 - protein, 127 aa, Homo sapiens
TIPCWHAIPDMSGAHVVISLYPRRILVMTSCLQELLSTENARVDLDSHELLRDGVLVVHNWIYQAVSSMPSRRYRIARPRSRVLAKVAKVHIALTRVVLQELRRLMMSNRTHYEASTGHQKDKHTTN

SEQ ID NO: 776870 - protein, 77 aa, Homo sapiens
QWYQRRVAITAGGVGLQEKMAVSTGVKVPRNFRLLEELEEGQKGVGDGTVSWGLEDDEDMTLTRWTGMIMWATKDKL

SEQ ID NO: 776871 - protein, 77 aa, Homo sapiens; identical to SEQ ID NO: 776856

SEQ ID NO: 776872 - protein, 77 aa, Homo sapiens; identical to SEQ ID NO: 776856

SEQ ID NO: 776873 - protein, 77 aa, Homo sapiens; identical to SEQ ID NO: 776870

SEQ ID NO: 776874 - protein, 77 aa, Homo sapiens; identical to SEQ ID NO: 776870

SEQ ID NO: 776875 - protein, 77 aa, Homo sapiens; identical to SEQ ID NO: 776870

SEQ ID NO: 776876 - protein, 240 aa, Homo sapiens
QTARCHSGLVSSVQAIMASTAGYIVSTSCKHIIDDQHWLSSAYTQFAVPYFIYDIYAMFLCHWHKHQVKGHGGDDGAARAPGSTWAIARGYLHKEFLMVLHHAAMVLVCFPLSVVWRQGKGDFFLGCMLMAEVSTPFVCLGKILIQYKQQHTLLHKVNGALMLLSFLCCRVLLFPYLYWAYGRHAGLPLLAVPLAIPAHVNLGAALLLAPQLYWFFLICRGACRLFWPRSRPPPACQAQD

SEQ ID NO: 776877 - protein, 76 aa, Homo sapiens
MLTPMVAGGVVFPGLFLLSKNTLQRLPQLRWEEADAVIVSARLVSSVQAIMASTAGYIAAARHAAHQQQTQPCSTN

SEQ ID NO: 776878 - protein, 274 aa, Homo sapiens
MTLLFAVGCVFFPLCFTALRWGLQNHTNLQMERQEAVLVASKLVSSVQAIMASTAGYIVSTSCKHIIDDQHWLSSAYTQFAVPYFIYDIYAMFLCHWHKHQVKGHGGDDGAARAPGSTWAIARGYLHKEFLMVLHHAAMVLVCFPLSVVWRQGKGDFFLGCMLMAEVSTPFVCLGKILIQYKQQHTLLHKVNGALMLLSFLCCRVLLFPYLYWAYGRHAGLPLLAVPLAIPAHVNLGAALLLAPQLYWFFLICRGACRLFWPRSRPPPACQAQD

SEQ ID NO: 776879 - protein, 274 aa, Homo sapiens
MLTPMVAGGVVFPGLFLLSKNTLQRLPQLRWEEADAVIVSARLVSSVQAIMASTAGYIVSTSCKHIIDDQHWLSSAYTQFAVPYFIYDIYAMFLCHWHKHQVKGHGGDDGAARAPGSTWAIARGYLHKEFLMVLHHAAMVLVCFPLSVVWRQGKGDFFLGCMLMAEVSTPFVCLGKILIQYKQQHTLLHKVNGALMLLSFLCCRVLLFPYLYWAYGRHAGLPLLAVPLAIPAHVNLGAALLLAPQLYWFFLICRGACRLFWPRSRPPPACQAQD

SEQ ID NO: 776880 - protein, 274 aa, Homo sapiens; identical to SEQ ID NO: 776879

SEQ ID NO: 776881 - protein, 360 aa, Homo sapiens
MTLLFAVGCVFFPLCFTALRWGLQNHTNLQMERQEAVLVASKLVSSVQAIMASTAGYIVSTSCKHIIDDQHWLSSAYTQFAVPYFIYDIYAMFLCHWHKHQVKGHGGDDGAARAPGSTWAIARGYLHKEFLMVLHHAAMVLVCFPLSVVWRQGKGDFFLGCMLMAEVSTPFVCLGKILIQVSEHGRVQEPNGEVTGRGGTFKVAAKGSSPFVIPPSPRAFGAPGACVLAKCLVWEELPARVAGRQGEGQGGPSPSAAVATVSVSPQYKQQHTLLHKVNGALMLLSFLCCRVLLFPYLYWAYGRHAGLPLLAVPLAIPAHVNLGAALLLAPQLYWFFLICRGACRLFWPRSRPPPACQAQD

SEQ ID NO: 776882 - protein, 132 aa, Homo sapiens
SDPNHWCPLSSLLPHPVSLPNRHWLSSAYTQFAVPYFIYDIYAMFLCHWHKHQVKGHGGDDGAARAPGSTWAIARGYLHKEFLMVLHHAAMVLVCFPLSVVSPGELGGRGAGGLLLGPAGAGRSLGSPGSAY

SEQ ID NO: 776883 - protein, 320 aa, Homo sapiens
LEELHVLPPGRREPLRSLRILHSARALFVGLRDGVLRVPLERCAAYRSQGACLGARDPYCGWDGKQQRCSTLEDSSNMSLWTQNITACPVRNVTRDGGFGPWSPWQPCEHLDGDNSGSCLCRARSCDSPRPRCGGLDCLGPAIHIANCSRNGAWTPWSSWALCSTSCGIGFQVRQRSCSNPAPRHGGRICVGKSREERFCNENTPCPVPIFWASWGSWSKCSSNCGGGMQSRRRACENGNSCLGCGVEFKTCNPEGCPEVRRNTPWTPWLPVNVTQGGARQEQRFRFTCRAPLADPHGLQFGRRRTETRTCPADGSGSCD

SEQ ID NO: 776884 - protein, 34 aa, Homo sapiens
MRRPEWTNSKQAKIITFKLMNFVRQGKNTPLREL

SEQ ID NO: 776885 - protein, 118 aa, Homo sapiens
MDCRGFGKTKFALCRLGVGAPLLRAYTTEPKKLALEISPFYKLLWLTQLLARGTPPILGRERWGVGMANWLLVPQEIFQLPYCTVTFFGSGPCGVLNWGGPLNLLGRFNTFLMRGCTI

SEQ ID NO: 776886 - protein, 122 aa, Homo sapiens
HQITGEWNPSLVAPTSSSALSDTPIVVSKTYRNIPLGKEPVRLLPGPALCSHCPSLHLSPAAPGAVGLLRCFGFLCILLCIVECIVLLRLCNRAPQAGGVHCRRYLLRVLEAENSRSRCGKG

SEQ ID NO: 776887 - protein, 128 aa, Homo sapiens
MAGNHCELLPLARGRLGAGLGWLLVPPLKRGAQRPGPAPQQQVQVGPALQRRHLLPHHWADAAVSGPEILPVPLEPGRPRPGLGQDGVLFLLPKLEYNGTILAHHNLCHLGSSESPPSVSCNASYLGG

SEQ ID NO: 776888 - protein, 120 aa, Homo sapiens
MAGNHCELLPLARGRLGAGLGWLLVPPLKRGAQRPGPAPQQQVQVGPALQRRHLLPHHWADAAVSGPEILPVPLEPGRPRPGLGQDGVLFLLPKLEYNGTILAHHNLCHLGSSESPPSVS

SEQ ID NO: 776889 - protein, 129 aa, Homo sapiens
MSLPVTSACNLDNNQAVPQSPWAHVLRTSQDYVTGHGPHIWLRINLFEYLTEFGFFINSAITSELGFQGWSGKILSLGAGNRGCRGTLRPVWQERFPGQPWSSMRFGKQTGRLALNGGRCSDWISGFWG

SEQ ID NO: 776890 - protein, 139 aa, Homo sapiens
HPLPVLCASPNPCSVHPRPMLSASSPPLLSASPPQALCIPAPCSVHPLSMLCASSPCSVHPLSVLCASSPHALCILSPCSCILPVLRASSLRALCILSPCSVHLPMLCASLMLCASSPPCSVPLPVLCASSLCSVHPLP

SEQ ID NO: 776891 - protein, 218 aa, Homo sapiens
SALADLESIRQCGVALCIVLGFSILSASIGSSVVRDRVIGAKRLQHISGLGYRMYWFTNFLYDMLFYLVSVCLCVAVIVAFQLTAFTFRKNLAATALLLSLFGYATLPWMYLMSRIFSSSDVAFISYVSLNFIFGLCTMLITIMPRLLAIISKAKNLQNIYDVLKWVFTIFPQFCLGQGLVELCYNQIKYDLTHNFGIDSYVSPFEMNFLGWILPACR

SEQ ID NO: 776892 - protein, 187 aa, Homo sapiens
SALADLESIRQCGVALCIVLGFSILSASIGSSVLFYLVSVCLCVAVIVAFQLTAFTFRKNLAATALLLSLFGYATLPWMYLMSRIFSSSDVAFISYVSLNFIFGLCTMLITIMPRLLAIISKAKNLQNIYDVLKWVFTIFPQFCLGQGLVELCYNQIKYDLTHNFGIDSYVSPFEMNFLGWILPACR

SEQ ID NO: 776893 - protein, 256 aa, Homo sapiens
MQPAKEVTKASDGSLLGDLGHTPLSKKEGIKWQRPRLSRQALMRCCLVKWILSSTAPQGSDSSDSELELSTVRHQPEGLDQLQAQTKFTKKELQSLYRGFKNECPTGLVDEDTFKLIYAQFFPQGDATTYAHFLFNAFDADGNGAIHFEDFVVGLSILLRGTVHEKLKWAFNLYDINKDGYITKEEMLAIMKSIYDMMGRHTYPILREDAPAEHVERFFEKMDRNQDGVVTIEEFLEACQKDENIMSSMQLFENVI

SEQ ID NO: 776894 - protein, 256 aa, Homo sapiens; identical to SEQ ID NO: 776893

SEQ ID NO: 776895 - protein, 256 aa, Homo sapiens; identical to SEQ ID NO: 776893

SEQ ID NO: 776896 - protein, 167 aa, Homo sapiens
MQPAKEVTKASDGSLLGDLGHTPLSKKEGIKWQRPRLSRQALMRCCLVKWILSSTAPQGSDSSDSELELSTVRHQPEGLDQLQAQTKFTKKELQSLYRGFKNMPPPMHTSSSTPLMRTGTGPSTLRTLWLASPSCCGAQSTRSSSGPLISTTLTRMATSPKRRCWPS

SEQ ID NO: 776897 - protein, 324 aa, Homo sapiens
PPRLEVCRLTRKVALGLGRRVRSPRPASGLTRSPPPPPSTGPRPSQPSSPACRGHVSRRRPREAVRAAGAPVPPRQRVGEGCARAPGPQAARLAMGIQGMELCAMAVVVLLFIAVLKQFGILEPISMEDSSDSELELSTVRHQPEGLDQLQAQTKFTKKELQSLYRGFKNECPTGLVDEDTFKLIYAQFFPQGDATTYAHFLFNAFDADGNGAIHFEDFVVGLSILLRGTVHEKLKWAFNLYDINKDGYITKEEMLAIMKSIYDMMGRHTYPILREDAPAEHVERFFEKMDRNQDGVVTIEEFLEACQKDENIMSSMQLFENVI

SEQ ID NO: 776898 - protein, 124 aa, Homo sapiens
MILDCAPQQDGEAIHFEDFVVGLSILLRGTVHEKLKWAFNLYDINKDGYITKEEMLAIMKSIYDMMGRHTYPILREDAPAEHVERFFEKMDRNQDGVVTIEEFLEACQKDENIMSSMQLFENVI

SEQ ID NO: 776899 - protein, 158 aa, Homo sapiens
MQPAKEVTKASDGSLLGDLGHTPLSKKEGIKWQRPRLSRQALMRCCLVKWILSSTAPQGSDSSDSELELSTVRHQPEGLDQLQAQTKFTKKELQSLYRGFKNECPTGLVDEDTFKLIYAQFFPQGDATTYAHFLFNAFDADGNGAIHFETGWSAVAPP

SEQ ID NO: 776900 - protein, 96 aa, Homo sapiens
PVPVPCGCHADPQAVFADVVFDFTRLELRLRHFATQGCHDSRPHVPWVAHTLGEREGPGPLPQPNLNPEPPRGERPGMWGWEAPWDQSTSTFGETK

SEQ ID NO: 776901 - protein, 56 aa, Homo sapiens
MRSQSVRRDGNKSLHPKVSPQQAFLSLVDWVFVSQVSDIRRPNTTRGILSVYQGQM

SEQ ID NO: 776902 - protein, 48 aa, Homo sapiens
NGLLRSDLNKLANKEKRNFTKEMSERRPWNETQQGTERKLTQMERKPN

SEQ ID NO: 776903 - protein, 1029 aa, Homo sapiens
MQVTGGVHVDVDSMKEGFVLTVGSPHVGPLTQQAFRPSPQVLSEQPQLSDSSLAWGAQAAEAVEMAAQTSQGPTCAGLASQHHQAGPASQRHQAGPCECPLPDTHLVERLGLGRLLCCTTSHSQEGPRSQRKPVAQWLSGGLHGWQAWAGCWRGIRTGATLLTAPLSELKSLWVGGTSHPCHSWLALECLSPHTPLQPGLWELCLLRYKRLCLFLDLLVLVWASHLPCCEPPRAGTAACHVSLSGTKWTLEAYVEGVRARIGHWACWEPTQAGSPAGGALLLPAPVTPAGSAPTQSPHFCSPGTPCVPTCPCPCPGPAWLLPPSSEEASAGSRPPWTRGQLPPLTWAHPEPSPLNPGEMAFLKAQRACLPQCGSCIRSPPDSDGQEPSVPGGLPNSGPVGGSGQSLVPKGKAVTLGPRWLNPSLPGRAVTSVADKALLLGPLISAEPKLALPVSPEQLAVFTTLQHDSGQARAPLCTSWSPSGHLAGADGHGRVCASMSPQVCELRLPFLLLQCTNGHLMCAGCFIHLLADARLKEEQATCPNCRCEISKSLCCRNLAVEKAVSELPSECGFCLRQFPRSLLERHQKEECQDRVTQCKYKRIGCPWHGPFHELTVHEAACAHPTKTGSELMEILDGMDQSHRKEMQLYNSIFSLLSFEKIGYTGEAPRRLLHATQVWVGGLAARSLGAAGSGHWALTAPDSRALDKLPVDRWTPRSRRQAGDWVEGGAEADPRCTPVWLSQQPRPPVLATLASPPLQGGISLWGSRASRQSRSNQKVGRSQGAWELGACPSDPGARRAPCRVRSYLQAVTAPAMGLSRLARSHSGRGLHNKLRVPDSNCRTGSGHPQTPRLDACAGTLDLVALWAAATAFERVWGAGARPESGPEDSEKHLLMLGPLEEAPSLYSQPAPGGQLRAPGVAQAGWSWAASPALLPGLCPAGCGPEQAREAEGLGSLRQPQPVVSSSLSCPGDTGASWSLGRLGHCGCGRGQVRSPIRAGKTGHLGTHASTEGLAGHRLWAAQEDCAGRAAC

SEQ ID NO: 776904 - protein, 371 aa, Homo sapiens
AAAGQAAAAALGEAAGPGLPDEAGLAGARQLQLQEAAGDPDAPPKKRLRAAEAAEAAAAAAAAGSGKLEERLYSVLCCTVCLDLPKASVYQCTNGHLMCAGCFIHLLADARLKEEQATCPNCRCEISKSLCCRNLAVEKAVSELPSECGFCLRQFPRSLLERHQKEECQDRVTQCKYKRIGCPWHGPFHELTVHEAACAHPTKTGSELMEILDGMDQSHRKEMQLYNSIFSLLSFEKIGYTEVQFRPYRTDDFITRLYYETPRFTVLNQTWVLKARVNDSERNPNLSCKRTLSFQLLLKSKVTAPLECSFLLLKGPYDDVRISPVIYHFVFTNESNETDYVPLPIIDSVECNKLLAAKNINLRLFLFQIQK

SEQ ID NO: 776905 - protein, 371 aa, Homo sapiens; identical to SEQ ID NO: 776904

SEQ ID NO: 776906 - protein, 274 aa, Homo sapiens
MCAGCFIHLLADARLKEEQATCPNCRCEISKSLCCRNLAVEKAVSELPSECGFCLRQFPRSLLERHQKEECQDRVTQCKYKRIGCPWHGPFHELTVHEAACAHPTKTGSELMEILDGMDQSHRKEMQLYNSIFSLLSFEKIGYTEVQFRPYRTDDFITRLYYETPRFTVLNQTWVLKARVNDSERNPNLSCKRTLSFQLLLKSKVTAPLECSFLLLKGPYDDVRISPVIYHFVFTNESNETDYVPLPIIDSVECNKLLAAKNINLRLFLFQIQK

SEQ ID NO: 776907 - protein, 287 aa, Homo sapiens
PGCEIRTCTNGHLMCAGCFIHLLADARLKEEQATCPNCRCEISKSLCCRNLAVEKAVSELPSECGFCLRQFPRSLLERHQKEECQDRVTQCKYKRIGCPWHGPFHELTVHEAACAHPTKTGSELMEILDGMDQSHRKEMQLYNSIFSLLSFEKIGYTEVQFRPYRTDDFITRLYYETPRFTVLNQTWVLKARVNDSERNPNLSCKRTLSFQLLLKSKVTAPLECSFLLLKGPYDDVRISPVIYHFVFTNESNETDYVPLPIIDSVECNKLLAAKNINLRLFLFQIQK

SEQ ID NO: 776908 - protein, 371 aa, Homo sapiens; identical to SEQ ID NO: 776904

SEQ ID NO: 776909 - protein, 607 aa, Homo sapiens
AAAGQAAAAALGEAAGPGLPDEAGLAGARQLQLQEAAGDPDAPPKKRLRAAEAAEAAAAAAAAGSGKLEERLYSVLCCTVCLDLPKASVYQCTNGHLMCAGCFIHLLADARLKEEQATCPNCRCEISKSLCCRNLAVEKAVSELPSECGFCLRQFPRSLLERHQKEECQDRVTQCKYKRIGCPWHGPFHELTVHEAACAHPTKTGSELMEILDGMDQSHRKEMQLYNSIFSLLSFEKIGYTGEAPRRLLHATQVWVGGLAARSLGAAGSGHWALTAPDSRALDKLPVDRWTPRSRRQAGDWVEGGAEADPRCTPVWLSQQPRPPVLATLASPPLQGGISLWGSRASRQSRSNQKVGRSQGAWELGACPSDPGARRAPCRVRSYLQAVTAPAMGLSRLARSHSGRGLHNKLRVPDSNCRTGSGHPQTPRLDACAGTLDLVALWAAATAFERVGEPGARPESGPEDSEKHLLMLGPLEEAPSLYSQPAPGGQLRAPGVAQAGWSWAASPALLPGLCPAGCGPEQAREAEGLGSLRQPQPVVSSSLSCPGDTGASWSLGRLGHCGCGRGQVRSPIRAGKTGHLGTHASTEGLAGHRLWAAQEDCAGRAAC

SEQ ID NO: 776910 - protein, 371 aa, Homo sapiens; identical to SEQ ID NO: 776904

SEQ ID NO: 776911 - protein, 285 aa, Homo sapiens
MRRAGCTNGHLMCAGCFIHLLADARLKEEQATCPNCRCEISKSLCCRNLAVEKAVSELPSECGFCLRQFPRSLLERHQKEECQDRVTQCKYKRIGCPWHGPFHELTVHEAACAHPTKTGSELMEILDGMDQSHRKEMQLYNSIFSLLSFEKIGYTEVQFRPYRTDDFITRLYYETPRFTVLNQTWVLKARVNDSERNPNLSCKRTLSFQLLLKSKVTAPLECSFLLLKGPYDDVRISPVIYHFVFTNESNETDYVPLPIIDSVECNKLLAAKNINLRLFLFQIQK

SEQ ID NO: 776912 - protein, 371 aa, Homo sapiens; identical to SEQ ID NO: 776904

SEQ ID NO: 776913 - protein, 107 aa, Homo sapiens
EITYNSLQIKLRLSNRPVFMLSEGRMVSDINNAWGCLEQQEEDCSFLLLKGPYDDVRISPVIYHFVFTNESNETDYVPLPIIDSVECNKLLAAKNINLRLFLFQIQK

SEQ ID NO: 776914 - protein, 107 aa, Homo sapiens
MAWHLRCIKTFMAFHYFPLEASFKTSHICALSIFPGISLKCVCFTTAKLTLPEFPECSFSFVHCATDWNTFFQKPPVHTSLQCQGPNHLHVSQFLPLWESYSSPQTE

SEQ ID NO: 776915 - protein, 43 aa, Homo sapiens
MDACQALFQGMQQKLDPHKSCEAGSAYCPRFLDDTAKAQTSWE

SEQ ID NO: 776916 - protein, 193 aa, Homo sapiens
MAGVWDRWLFARGMADSELQLVEQRIRSFPDFPTPGVVFRDISPVLKDPASFRAAIGLLARHLKATHGGRIDYIAGLDSRGFLFGPSLAQELGLGCVLIRKRGKLPGPTLWASYSLEYGKAELEIQKDALEPGQRVVVVDDLLATGGTMNAACELLGRLQAEVLECVSLVELTSLKGREKLAPVPFFSLLQYE

SEQ ID NO: 776917 - protein, 115 aa, Homo sapiens
TRPVLGSRDISPVLKDPASFRAAIGLLARHLKATHGGRIDYIAGLDSRGFLFGPSLAQELGLGCVLIRKRGKLPGPTLWASYSLEYGKAELEIQKDALEPGQRVVVVDDLLATGV

SEQ ID NO: 776918 - protein, 193 aa, Homo sapiens; identical to SEQ ID NO: 776916

SEQ ID NO: 776919 - protein, 77 aa, Homo sapiens
HAFPSPTQGLAWSTCSLQPRPTGDLTLPSPGTMNAACELLGRLQAEVLECVSLVELTSLKGREKLAPVPFFSLLQYE

SEQ ID NO: 776920 - protein, 86 aa, Homo sapiens
LAPGDSHAAESLLSLTLTGLDSRGFLFGPSLAQELGLGCVLIRKRGKLPGPTLWASYSLEYGKKVRGLGWPEEGQGQATVATLPQF

SEQ ID NO: 776921 - protein, 142 aa, Homo sapiens
MAGVWDRWLFARGMADSELQLVEQRIRSFPDFPTPGVVFRDISPVLKDPASFRAAIGLLARHLKATHGGRIDYIAGLDSRGFLFGPSLAQELGLGCVLIRKRGKLPGPTLWASYSLEYGKLTSLKGREKLAPVPFFSLLQYE

SEQ ID NO: 776922 - protein, 147 aa, Homo sapiens
MAGVWDRWLFARGMADSELQLVEQRIRSFPDFPTPGVVFRDISPVLKDPASFRAAIGLLARHLKATHGGRIDYIAGLDSRGFLFGPSLAQELGLGCVLIRKRGKLPGPTLWASYSLEYGKAELEIQKDALEPGQRVVVVDDLLATGV

SEQ ID NO: 776923 - protein, 51 aa, Homo sapiens
IEYSLDSRAVFSIVTGQRGWTSCWLAAGLGEEDPLPCRGFAPLPPSQMQSS

SEQ ID NO: 776924 - protein, 107 aa, Homo sapiens
TPLSPLPDGVPKAELGLCFLPGPPRPPENSPHLSALKAPGDLCLALLCPMIPPPWNSLPDPRLFNSHLSSRDPLEHHLHQEALPGPVSGLTASLGSIRILIPLHYTL

SEQ ID NO: 776925 - protein, 176 aa, Homo sapiens
PRGSEAGGPGRGDPASHTFWKTQGEAGAAFGGKGGTGEPTGHGSSHRIPRPEAGSPHDPPVAPAQSGEMRSCPERALGRQSLRRDRTGLPESQLPAQPHPAAERTEGRAAPGELGSQTPESQRTGPGPATARSGWFHQLLLRSRDVRPRTLSISGFRVSRRPPLGLLTSQRGGDGD

SEQ ID NO: 776926 - protein, 30 aa, Homo sapiens
MGSEGACWPHAGGSDSCPLYPCRTVSVSAH

SEQ ID NO: 776927 - protein, 966 aa, Homo sapiens
EVGLAPSRPAAGMGQLCWLPLLAPLLLLRPPGVQSAGPIRAFVVPHSHMDVGWVYTVQESMRAYAANVYTSVVEELARGQQRRFIAVEQEFFRLWWDGVASDQQKYQVRQLLEEGRLEFVIGGQVMHDEAVTHLDDQILQLTEGHGFLYETFGIRPQFSWHVDPFGASATTPTLFALAGFNAHLGSRIDYDLKAAMQEARGLQFVWRGSPSLSERQEIFTHIMDQYSYCTPSHIPFSNRSGFYWNGVAVFPKPPPDGVYPNMSEPVTPANINLYAEALVANVKQRAAWFRTPHVLWPWGCDKQFFNASVQFANMDPLLDHINSHAAELGVSVQYATLGDYFRALHALNVTWRVRDHHDFLPYSTEPFQAWTGFYTSRSSLKGLARRASALLYAGESMFTRYLWPAPRGHLDPTWALQQLQQLRWAVSEVQHHDAITGTESPKVRDMYATHLASGMLGMRKLMASIVLDELQPQAPMAASSDAGPAGHFASVYNPLAWTVTTIVTLTVGFPGVRVTDEAGHPVPSQIQNSTETPSAYDLLILTTIPGLSYRHYNIRPTAGAQEGTQEPAATVASTLQFGRRLRRRTSHAGRYLVPVANDCYIVLLDQDTNLMHSIWERQSNRTVRVTQEFLEYHVNGDVKQGPISDNYLFTPGKAAVPAWEAVEMEIVAGQLVTEIRQYFYRNMTAQNYTYAIRSRLTHVPQGHDGELLCHRIEQEYQAGPLELNREAVLRTSTNLNSQQVIYSDNNGYQMQRRPYVSYVNNSIARNYYPMVQSAFMEDGKSRLVLLSERAHGISSQGNGQVEVMLHRRLWNNFDWDLGYNLTLNDTSVVHPVLWLLLGSWSLTTALRQRSALALQHRPVVLFGDLAGTAPKLPGPQQQEAVTLPPNLHLQILSIPGWRYSSNHTEHSQNLRKGHRGEAQADLRRVLLRLYHLYEVGEDPVLSQPVTVNLEVNFPTPIQTISQGSKP

SEQ ID NO: 776928 - protein, 1021 aa, Homo sapiens
GSGPGTFPACRRMGQLCWLPLLAPLLLLRPPGVQSAGPIRAFVVPHSHMDVGWVYTVQESMRAYAANVYTSVVEELARGQQRRFIAVEQEFFRLWWDGVASDQQKYQVRQLLEEGRLEFVIGGQVMHDEAVTHLDDQILQLTEGHGFLYETFGIRPQFSWHVDPFGASATTPTLFALAGFNAHLGSRIDYDLKAAMQEARGLQFVWRGSPSLSERQEIFTHIMDQYSYCTPSHIPFSNRSGFYWNGVAVFPKPPPDGVYPNMSEPVTPANINLYAEALVANVKQRAAWFRTPHVLWPWGCDKQFFNASVQFANMDPLLDHINSHAAELGVSVQYATLGDYFRALHALNVTWRVRDHHDFLPYSTEPFQAWTGFYTSRSSLKGLARRASALLYAGESMFTRYLWPAPRGHLDPTWALQQLQQLRWAVSEVQHHDAITGTESPKVRDMYATHLASGMLGMRKLMASIVLDELQPQAPMAASSDAGPAGHFASVYNPLAWTVTTIVTLTVGFPGVRVTDEAGHPVPSQIQNSTETPSAYDLLILTTIPGLSYRHYNIRPTAGAQEGTQEPAATVASTLQFGRRLRRRTSHAGRYLVPVANDCYIVLLDQDTNLMHSIWERQSNRTVRVTQEFLEYHVNGDVKQGPISDNYLFTPGKAAVPAWEAVEMEIVAGQLVTEIRQYFYRNMTAQNYTYAIRSRLTHVPQGHDGELLCHRIEQEYQAGPLELNREAVLRTSTNLNSQQVIYSDNNGYQMQRRPYVSYVNNSIARNYYPMVQSAFMEDGKSRLVLLSERAHGISSQGNGQVEVMLHRRLWNNFDWDLGYNLTLNDTSVVHPVLWLLLGSWSLTTALRQRSALALQHRPVVLFGDLAGTAPKLPGPQQQEAVTLPPNLHLQILSIPGWRYSSNHTEHSQNLRKGHRGEAQADLRRVLLRLYHLYEVGEDPVLSQPVTVNLEAVLQALGSVVAVEERSLTGTWDLSMLHRWSWRTGPGRHRGDTTSPSRPPGGPIITVHPKEIRTFFIHFQQQ

SEQ ID NO: 776929 - protein, 367 aa, Homo sapiens
VSHLMLAWLAGPQIGPDELQGLENWGQDPGSLPMPQRPGTRGPISDNYLFTPGKAAVPAWEAVEMEIVAGQLVTEIRQYFYRNMTAQNYTYAIRSRLTHVPQGHDGELLCHRIEQEYQAGPLELNREAVLRTSTNLNSQQVIYSDNNGYQMQRRPYVSYVNNSIARNYYPMVQSAFMEDGKSRLVLLSERAHGISSQGNGQVEVMLHRRLWNNFDWDLGYNLTLNDTSVVHPVLWLLLGSWSLTTALRQRSALALQHRPVVLFGDLAGTAPKLPGPQQQEAVTLPPNLHLQILSIPGWRYSSNHTEHSQNLRKGHRGEAQADLRRVLLRLYHLYEVGEDPVLSQPVTVNLEVNFPTPIQTISQGSKP

SEQ ID NO: 776930 - protein, 138 aa, Homo sapiens [sequence omitted]

SEQ ID NO: 776931 - protein, 966 aa, Homo sapiens; identical to SEQ ID NO: 776927

SEQ ID NO: 776932 - protein, 169 aa, Homo sapiens
EVGLAPSRPAAGMGQLCWLPLLAPLLLLRPPGVQSAGPIRAFVVPHSHMDVGWVYTVQESMRAYAANVYTSVVEELARGQQRRFIAVEQEFFRLWWDGVASDQQKYQVRQLLEEGRLEFVIGGQVMHDEAVTHLDDQILQLTGLATLPCTQGPSGPPVGLGHGIRTPRF

SEQ ID NO: 776933 - protein, 1025 aa, Homo sapiens
EVGLAPSRPAAGMGQLCWLPLLAPLLLLRPPGVQSAGPIRAFVVPHSHMDVGWVYTVQESMRAYAANVYTSVVEELARGQQRRFIAVEQEFFRLWWDGVASDQQKYQVRQLLEEGRLEFVIGGQVMHDEAVTHLDDQILQLTEGHGFLYETFGIRPQFSWHVDPFGASATTPTLFALAGFNAHLGSRIDYDLKAAMQEARGLQFVWRGSPSLSERQEIFTHIMDQYSYCTPSHIPFSNRSGFYWNGVAVFPKPPPDGVYPNMSEPVTPANINLYAEALVANVKQRAAWFRTPHVLWPWGCDKQFFNASVQFANMDPLLDHINSHAAELGVSVQYATLGDYFRALHALNVTWRVRDHHDFLPYSTEPFQAWTGFYTSRSSLKGLARRASALLYAGESMFTRYLWPAPRGHLDPTWALQQLQQLRWAVSEVQHHDAITGTESPKVRDMYATHLASGMLGMRKLMASIVLDELQPQAPMAASSDAGPAGHFASVYNPLAWTVTTIVTLTVGFPGVRVTDEAGHPVPSQIQNSTETPSAYDLLILTTIPGLSYRHYNIRPTAGAQEGTQEPAATVASTLQFGRRLRRRTSHAGRYLVPVANDCYIVLLDQDTNLMHSIWERQSNRTVRVTQEFLEYHVNGDVKQGPISDNYLFTPGKAAVPAWEAVEMEIVAGQLVTEIRQYFYSFRAVVDTWSDEEMNCSGVCMLAAFACAVSRWLGAKFRAGRETHRPWGPQSTCSSMIRAENMTAQNYTYAIRSRLTHVPQGHDGELLCHRIEQEYQAGPLELNREAVLRTSTNLNSQQVIYSDNNGYQMQRRPYVSYVNNSIARNYYPMVQSAFMEDGKSRLVLLSERAHGISSQGNGQVEVMLHRRLWNNFDWDLGYNLTLNDTSVVHPVLWLLLGSWSLTTALRQRSALALQHRPVVLFGDLAGTAPKLPGPQQQEAVTLPPNLHLQILSIPGWRYSSNHTEHSQNLRKGHRGEAQADLRRVLLRLYHLYEVGEDPVLSQPVTVNLEVNFPTPIQTISQGSKP

SEQ ID NO: 776934 - protein, 138 aa, Homo sapiens [sequence omitted]

SEQ ID NO: 776935 - protein, 966 aa, Homo sapiens
GSGPGTFPACRRMGQLCWLPLLAPLLLLRPPGVQSAGPIRAFVVPHSHMDVGWVYTVQESMRAYAANVYTSVVEELARGQQRRFIAVEQEFFRLWWDGVASDQQKYQVRQLLEEGRLEFVIGGQVMHDEAVTHLDDQILQLTEGHGFLYETFGIRPQFSWHVDPFGASATTPTLFALAGFNAHLGSRIDYDLKAAMQEARGLQFVWRGSPSLSERQEIFTHIMDQYSYCTPSHIPFSNRSGFYWNGVAVFPKPPPDGVYPNMSEPVTPANINLYAEALVANVKQRAAWFRTPHVLWPWGCDKQFFNASVQFANMDPLLDHINSHAAELGVSVQYATLGDYFRALHALNVTWRVRDHHDFLPYSTEPFQAWTGFYTSRSSLKGLARRASALLYAGESMFTRYLWPAPRGHLDPTWALQQLQQLRWAVSEVQHHDAITGTESPKVRDMYATHLASGMLGMRKLMASIVLDELQPQAPMAASSDAGPAGHFASVYNPLAWTVTTIVTLTVGFPGVRVTDEAGHPVPSQIQNSTETPSAYDLLILTTIPGLSYRHYNIRPTAGAQEGTQEPAATVASTLQFGRRLRRRTSHAGRYLVPVANDCYIVLLDQDTNLMHSIWERQSNRTVRVTQEFLEYHVNGDVKQGPISDNYLFTPGKAAVPAWEAVEMEIVAGQLVTEIRQYFYRNMTAQNYTYAIRSRLTHVPQGHDGELLCHRIEQEYQAGPLELNREAVLRTSTNLNSQQVIYSDNNGYQMQRRPYVSYVNNSIARNYYPMVQSAFMEDGKSRLVLLSERAHGISSQGNGQVEVMLHRRLWNNFDWDLGYNLTLNDTSVVHPVLWLLLGSWSLTTALRQRSALALQHRPVVLFGDLAGTAPKLPGPQQQEAVTLPPNLHLQILSIPGWRYSSNHTEHSQNLRKGHRGEAQADLRRVLLRLYHLYEVGEDPVLSQPVTVNLEVNFPTPIQTISQGSKP

SEQ ID NO: 776936 - protein, 86 aa, Homo sapiens
TWVSCWTAQSQHDKSPFLHWFRLQTTAWVSQFHLLGVPSADGSRFLSAGSVRLLVCDPFWDSMESKATLAVGGVSGLLDELSHMAS

SEQ ID NO: 776937 - protein, 284 aa, Homo sapiens
GWALPRSLHLGESWNVDQSSDPIAATAMRGARGAWDFLCVLLLLLRVQTGSSQPSVSPGEPSPPSIHPGKSDLIVRVGDEIRLLCTDPGFVKWTFEILDETNENKQNEWITEKAEATNTGKYTCTNKHGLSNSIYVFVRDPAKLFLVDRSLYGKEDNDTLVRCPLTDPEVTNYSLKGCQGKPLPKDLRFIPDPKAGIMIKSVKRAYHRLCLHCSVDQEGKSVLSEKFILKVRPAFKAVPVVSVSKASYLLREGEEFTVTCTIKDVSSSVYSTWKRENSQTKLQN

SEQ ID NO: 776938 - protein, 153 aa, Homo sapiens
GWALPRSLHLGESWNVDQSSDPIAATAMRGARGAWDFLCVLLLLLRVQTGSSQPSVSPGEPSPPSIHPGKSDLIVRVGDEIRLLCTDPGFVKWTFEILDETNENKQNEWITEKAEATNTGKYTCTNKHGLSNSIYVFVRGKCLAFCSAVLSRI

SEQ ID NO: 776939 - protein, 49 aa, Homo sapiens
MLNNAQPDQYEAPDKDFMLVSLDLLSGLAEGLGGNIEQLVAQSNILTLM

SEQ ID NO: 776940 - protein, 73 aa, Homo sapiens
PAPVSPDDDGNDNGCHVPTACLHPALCSGLCSHYYYPLHKPERVISPSRVIFLFGKSLSSLLEITKLKVREIQ

SEQ ID NO: 776941 - protein, 47 aa, Homo sapiens
GSFWMLRWEGAGPALGPLVPFRPVTSCPFQAMTVLRRPSSLGNSVLA

SEQ ID NO: 776942 - protein, 633 aa, Homo sapiens
MPINKSEKPESCDNVKVVVRCRPLNEREKSMCYKQAVSVDEMRGTITVHKTDSSNEPPKTFTFDTVFGPESKQLDVYNLTARPIIDSVLEGYNGTIFAYGQTGTGKTFTMEGVRAIPELRGIIPNSFAHIFGHIAKAEGDTRFLVRVSYLEIYNEEVRDLLGKDQTQRLEVKERPDVGVYIKDLSAYVVNNADDMDRIMTLGHKNRSVGATNMNEHSSRSHAIFTITIECSEKGIDGNMHVRMGKLHLVDLAGSERQAKTGATGQRLKEATKINLSLSTLGNVISALVDGKSTHVPYRNSKLTRLLQDSLGGNSKTMMCANIGPADYNYDETISTLRYANRAKNIKNKARINEDPKDALLRQFQKEIEELKKKLEEGEEISGSDISGSEEDDDEEGEVGEDGEKRKKRRIQIGKKKVSPDKMIEMQAKIDEERKALETKLDMEEEERNKARAELEKREKDLLKAQQEHQSLLEKLSALEKKVIVGGVDLLAKAEEQEKLLEESNMELEERRKRAEQLRRELEEKEQERLDIEEKYTSLQEEAQGKTKKLKKVWTMLMAAKSEMADLQQEHQREIEGLLENIRQLSRELRLQMLIIDNFIPRDYQEMIENYVHWNEDIGEWQLVSITFILSRNN

SEQ ID NO: 776943 - protein, 527 aa, Homo sapiens
SGRPGRYAGSAYVVNNADDMDRIMTLGHKNRSVGATNMNEHSSRSHAIFTITIECSEKGIDGNMHVRMGKLHLVDLAGSERQAKTGATGQRLKEATKINLSLSTLGNVISALVDGKSTHVPYRNSKLTRLLQDSLGGNSKTMMCANIGPADYNYDETISTLRYANRAKNIKNKARINEDPKDALLRQFQKEIEELKKKLEEGEEISGSDISGSEEDDDEEGEVGEDGEKRKKRRIQIGKKKVSPDKMIEMQAKIDEERKALETKLDMEEEERNKARAELEKREKDLLKAQQEHQSLLEKLSALEKKVIVGGVDLLAKAEEQEKLLEESNMELEERRKRAEQLRRELEEKEQERLDIEEKYTSLQEEAQGKTKKLKKVWTMLMAAKSEMADLQQEHQREIEGLLENIRQLSRELRLQMLIIDNFIPRDYQEMIENYVHWNEDIGEWQLKCVAYTGNNMRKQTPVPDKKEKDPFEVDLSHVYLAYTEESLRQSLMKLERPRTSKGKARPKTGRRKRSAKPETVIDSLLQ

SEQ ID NO: 776944 - protein, 296 aa, Homo sapiens
SITSISLLGHLLHLYLVTANPISWNQFNEQRRLYWSQLKDILMEQMSYREIEVMLLRILQEHQSLLEKLSALEKKVIVGGVDLLAKAEEQEKLLEESNMELEERRKRAEQLRRELEEKEQERLDIEEKYTSLQEEAQGKTKKLKKVWTMLMAAKSEMADLQQEHQREIEGLLENIRQLSRELRLQMLIIDNFIPRDYQEMIENYVHWNEDIGEWQLKCVAYTGNNMRKQTPVPDKKEKDPFEVDLSHVYLAYTEESLRQSLMKLERPRTSKGKARPKTGRRKRSAKPETVIDSLLQ

SEQ ID NO: 776945 - protein, 702 aa, Homo sapiens
MPINKSEKPESCDNVKVVVRCRPLNEREKSMCYKQAVSVDEMRGTITVHKTDSSNEPPKTFTFDTVFGPESKQLDVYNLTARPIIDSVLEGYNGTIFAYGQTGTGKTFTMEGVRAIPELRGIIPNSFAHIFGHIAKAEGDTRFLVRVSYLEIYNEEVRDLLGKDQTQRLEVKERPDVGVYIKDLSAYVVNNADDMDRIMTLGHKNRSVGATNMNEHSSRSHAIFTITIECSEKGIDGNMHVRMGKLHLVDLAGSERQAKTGATGQRLKEATKINLSLSTLGNVISALVDGKSTHVPYRNSKLTRLLQDSLGGNSKTMMCANIGPADYNYDETISTLRYANRAKNIKNKARINEDPKDALLRQFQKEIEELKKKLEEGEEISGSDISGSEEDDDEEGEVGEDGEKRKKRRIQIGKKKVSPDKMIEMQAKIDEERKALETKLDMEEEERNKARAELEKREKDLLKAQQEHQSLLEKLSALEKKVIVGGVDLLAKAEEQEKLLEESNMELEERRKRAEQLRRELEEKEQERLDIEEKYTSLQEEAQGKTKKLKKVWTMLMAAKSEMADLQQEHQREIEGLLENIRQLSRELRLQMLIIDNFIPRDYQEMIENYVHWNEDIGEWQLKCVAYTGNNMRKQTPVPDKKEKDPFEVDLSHVYLAYTEESLRQSLMKLERPRTSKGKARPKTGRRKRSAKPETVIDSLLQ

SEQ ID NO: 776946 - protein, 158 aa, Homo sapiens
TAKMEEVEGSSQPGQPAPRFRTPWLGREKEERRSKLSGGGGLPGAKRNQGVPGGFGSPPRGRGTARACPCCCWPVAVGLWPTAIFPLNSLQGLGRACHTSALHMSFRGGLWAPPAAAGSAPSSGEKCPLAGRRGGFPPRVGMSQLPHHSPRVPLHAVG

SEQ ID NO: 776947 - protein, 108 aa, Homo sapiens
RSATDYEKCGIEVGGVETLPCHHSCPVDPRASSSCQRQNWRETKIQRQVKSKTGKEGNQSQLPTEMLPVMPTHAQHFDSSTSLFYRQNTEAKRGEKKCPTFDGPGQGD

SEQ ID NO: 776948 - protein, 264 aa, Homo sapiens
EKEETARPGGSHTCKGRGRGGGAGGNSQAWWLTPVKEKEEEETARHSGSSLQRRRRKQPVAVAHACRGGGGDSQAQWLMPVKEEEEEQEEEETARKGGSCRKGGEGRGGGGGNSRKDANSALLSNYEVFQLLTDLKEQRKESGKNKHSSGQQNLNTITYETLKYISKTPCRHQSPEIVREFLTALKSHKLTKAEKLQLVNQQAVTAVEIQLMVEESEERSRRNQIEALLTTVTGILLRAEAEQKTIPPACGNDERTSKKHSGPG

SEQ ID NO: 776949 - protein, 38 aa, Homo sapiens
PSNPFPGACLFQALQWPEVWVGPQWGLGPLRLSKPLPL

SEQ ID NO: 776950 - protein, 89 aa, Homo sapiens
WSPYPRETTKRTFRSPQKPKLRNWACPRASSCEAPWSPPRAPILLLELISSVIYLPPASGGTVSNCPTRNLHTHIQHSACKLPAHLDLE

SEQ ID NO: 776951 - protein, 106 aa, Homo sapiens
NIYFYFREISIVVYIFCYYFHWRKSPQVGHGIVERKCKKIFPLMTKDNPPLHLGVWSTKAAEKEGRQFLLRAKKLLGKKEIKTLTHFGMGLGTPSVCYEQLALVDQ

SEQ ID NO: 776952 - protein, 77 aa, Homo sapiens
LSSSTMIRLGTEEGEESIRFLLLQHSAICPMLPDATVLKVWSLSLAWEHQLPVGTLEMQVLRPHTRLTESETRGGGV

SEQ ID NO: 776953 - protein, 425 aa, Homo sapiens
MDKNIGEQLNKAYEAFRQACMDRDSAVKELQQKTENYEQRIREQQEQLSLQQTIIDKLKSQLLLVNSTQDNNYGCVPLLEDSETRKNNLTLDQPQDKVISGIAREKLPKVRRQEVSSPRKETSARSLGSPLLHERGNIEKTFWDLKEEFHKICMLAKAQKDHLSKLNIPDTATETQCSVPIQCTDKTDKQEALFKPQAKDDINRGAPSITSVTPRGLCRDEEDTSFESLSKFNVKFPPMDNDSTFLHSTPERPGILSPATSEAVCQEKFNMEFRDNPGNFVKTEETLFEIQGIDPIASAIQNLKTTDKTKPSNLVNTCIRTTLDRAACLPPGDHNALYVNSFPLLDPSDAPFPSLDSPGKAIRGPQQPIWKPFPNQDSDSVVLSGTDSELHIPRVCEFCQAVFPPSITSRGDFLRHLNSHFNGET

SEQ ID NO: 776954 - protein, 425 aa, Homo sapiens; identical to SEQ ID NO: 776953

SEQ ID NO: 776955 - protein, 425 aa, Homo sapiens; identical to SEQ ID NO: 776953

SEQ ID NO: 776956 - protein, 443 aa, Homo sapiens
MDKNIGEQLNKAYEAFRQACMDRDSAVKELQQKTENYEQRIREQQEQLSLQQTIIDKLKSQLLLVNSTQDNNYGCVPLLEDSETRKNNLTLDQPQDKVISGIAREKLPKVRRQEVSSPRKETSARSLGSPLLHERGNIEKTFWDLKEEFHKICMLAKAQKDHLSKLNIPDTATETQCSVPIQCTDKTDKQEALFKPQAKDDINRGAPSITSVTPRGLCRDEEDTSFESLSKFNVKFPPMDNDSTFLHSTPERPGILSPATSEAVCQEKFNMEFRDNPGNFVKTEETLFEIQGIDPIASAIQNLKTTDKTKPSNLVNTCIRTTLDRAACLPPGDHNALYVNSFPLLDPSDAPFPSLDSPGKAIRGPQQMAPCIVHLLSILQQGKQLPIWKPFPNQDSDSVVLSGTDSELHIPRVCEFCQAVFPPSITSRGDFLRHLNSHFNGET

SEQ ID NO: 776957 - protein, 264 aa, Homo sapiens [sequence omitted]

SEQ ID NO: 776958 - protein, 425 aa, Homo sapiens; identical to SEQ ID NO: 776953

SEQ ID NO: 776959 - protein, 395 aa, Homo sapiens
MDKNIGEQLNKAYEAFRQACMDRDSAVKELQQKTENYEQRIREQQEQLSLQQTIIDKLKSQLLLVNSTQDNNYGCVPLLEDSETRKNNLTLDQPQDKVISGIAREKLPKVRRQEVSSPRKETSARSLGSPLLHERGNIEKTFWDLKEEFHKICMLAKAQKDHLSKLNIPDTATETQCSVPIQCTDKTDKQEALFKPQAKDDINRGAPSITSVTPRGLCRDEEDTSFESLSKFNVKFPPMDNDSTFLHSTPERPGILSPATSEAVCQEKFNMEFRDNPGNFVKTEETLFEIQGIDPIASAIQNLKTTDKTKPSNLVNTCIRTTLDRAACLPPGDHNALYVNSFPLLDPSDAPFPSLDSPGKAIRGPQQPIWKPFPNQDSDSVVLSGTDSGGVTQVV

SEQ ID NO: 776960 - protein, 119 aa, Homo sapiens
MDKNIGEQLNKAYEAFRQACMDRDSAVKELQQKTENYEQRIREQQEQLSLQQTIIDKLKSQLLLVNSTQDNNYGCVPLLEDSETRKNNLTLDQPQDKVISGIAREKLPKVDIASAESSI

SEQ ID NO: 776961 - protein, 87 aa, Homo sapiens
EGRADSRGAAGREAEEQRRQPICSLGRDFVREKPRESFPRSGLLVGWFPGPRCQHSIVGLCPNGFKGGTRPGCFAREMGVEGPAVSR

SEQ ID NO: 776962 - protein, 372 aa, Homo sapiens [sequence omitted]

SEQ ID NO: 776963 - protein, 119 aa, Homo sapiens; identical to SEQ ID NO: 776960

SEQ ID NO: 776964 - protein, 68 aa, Homo sapiens
LEWKNKKWYKNRNENEEEKCKGLVKAAKSMNKWRTQRKGLATRVGKSLGRLAHENLSVIKVSKYDKLN

SEQ ID NO: 776965 - protein, 81 aa, Homo sapiens
LASTRFSCGGQGPECPGLHTFLLWSHSGFNCLLCAEMLGRKEDLLHHWKHQHNCEDPSKLWAILNTVSNQGVIELSSEAEK

SEQ ID NO: 776966 - protein, 427 aa, Homo sapiens
KYIINKCRDGKERVKNDPQEFRDQKLGTLKKYRSIMPKPIMVIPTLASLASPTTLQSQMLGGLGQDVLLNNSLTPKYLGCKQDNSSSPKPSSVFRNGFSGIKKPWHRCHVCNHHFQFKQHLRDHMNTHTNRRPYSCRICRKSYVRPGSLSTHMKLHHGENRLKKLMCCEFCAKVFGHIRVYFGHLKEVHRVVISTEPAPSELQPGDIPKNRDMSVRGMEGSLERENKSNLEEDFLLNQADEVKLQIKCGRCQITAQSFAEIKFHLLDVHGEEIEGRLQEGTFPGSKGTQEELVQHASPDWKRHPERGKPEKVHSSSEESHACPRLKRQLHLHQNGVEMLMENEGPQSGTNKPRETCQGPECPGLHTFLLWSHSGFNCLLCAEMLGRKEDLLHHWKHQHNCEDPSKLWAILNTVSNQGVIELSSEAEK

SEQ ID NO: 776967 - protein, 84 aa, Homo sapiens
MQEIHEKVLNEVVGAMMYHTFSLTREDLENFKALRVIVQVGSGYDNVAIKAAGELEIAVCSIPSAAVEETADSTTGHILNLYWG

SEQ ID NO: 776968 - protein, 138 aa, Homo sapiens
EQVFRSEKNPARLASWSRIHITGIPDPRGCPLWSCPCHPESLPWCPVSGYSLVRVLSVSQRGCRDTCQFHTAIWSTCRGPGSPDLAALLRCLFSKLRSQFAPHGPGPTVLVLWVLTLSRAPELSLLALRSFIRNTSLE

SEQ ID NO: 776969 - protein, 95 aa, Homo sapiens
RGKKVIFLKQVGIGLLPVTGSLVLSRVPLRGTHQKSAIATSTKIALSNMKSSNIILMLTLRSSSCGSPAIRKVGFSTPKKRHMKLQSSVRLIRKL

SEQ ID NO: 776970 - protein, 117 aa, Homo sapiens
RICILFRLPFGALPTKSPAMQRFLNTCSLPGTSLALLVGETRARSCVCQLSIHSRPHTGLPSQRAITYSHPSRVVHGRTDKCFNKKCAVWGPYLKYWDQPLHGQCAALITDDPCYRM

SEQ ID NO: 776971 - protein, 31 aa, Homo sapiens
MRPCSLRVNLRQNALPHSVHAKGFSPVWNFW

SEQ ID NO: 776972 - protein, 67 aa, Homo sapiens
CGPHIYMAFAYPPVKPARARLPPQQELLSTPARPYSPAPAPGCSWLSTSSEKPSLIPHTGPGLPGTP

SEQ ID NO: 776973 - protein, 258 aa, Homo sapiens
MTPPKLRASLSPSLLLLLSGCLLAAARREKGAASNVAEPVPGPTGGSSGRFLSPEQHACSWQLLLPAPEAAAGSELALRCQSPDGARHQCAYRGHPERCAAYAARRAHFWKQVLGGLRKKRRPCHDPAPLQARLCAGKKGHGAELRLVPRASPPARPTVAGFAGESKPRARNRGRTRERASGPAAGTPPPQSAPPKENPSERKTNEGKRKAALVPNEERPMGTGPDPDGLDGNAELTETYCAEKWHSLCNFFVNFWNG

SEQ ID NO: 776974 - protein, 258 aa, Homo sapiens; identical to SEQ ID NO: 776973

SEQ ID NO: 776975 - protein, 78 aa, Homo sapiens
FIRSVAGSEPGLRINTMGECGVLCSKIASKLIIGGCTYLVKETQSENSPARTAPDQGLVCLISAASSGVQNLLTTPLG

SEQ ID NO: 776976 - protein, 103 aa, Homo sapiens
QTQGKRLCCFLGEAARPHCEGTCCCCSHVTFVSDLRCRLDLGNGVSCVMPSRSICTTGSARPRTEGLMEDTLQLHPAAGGAWGRLHEGLQRKGMCVVCGLPAG

SEQ ID NO: 776977 - protein, 149 aa, Homo sapiens
MRFPTLPNQLPWNVFHFLGHCLQRSKPPSTQWAEYGSMQRSGPGAVESALHKAPEGLRSRAFLLGPQSSHLKNGSKLSSAMPSVGVMSHQMESRSVTQAEVQWQDLSSLQPPPPSFKRFLCLSLWSSWDYRCPPPHLADFCIFSRDGVS

SEQ ID NO: 776978 - protein, 121 aa, Homo sapiens
MSKLSFRARALDAAKPLPIYRGKDMPDLNDCVSINRAVPQMPTGMEKEEESEHHLQRAISAQQVFREKKESMVIPVPEAESNVNYYNRLYKGEFKQPKQFIHIQLKLHLKLLLFRIEVLFF

SEQ ID NO: 776979 - protein, 807 aa, Homo sapiens
MSKLSFRARALDAAKPLPIYRGKDMPDLNDCVSINRAVPQMPTGMEKEEESEHHLQRAISAQQVFREKKESMVIPVPEAESNVNYYNRLYKGEFKQPKQFIHIQPFNLDNEQPDYDMDSEDETLLNRLNRKMEIKPLQFEIMIDRLEKASSNQLVTLQEAKLLLNEDDYLIKAVYDYWVRKRKNCRGPSLIPQIKQEKRDGSTNNDPYVAFRRRTEKMQTRKNRKNDEASYEKMLKLRREFSRAITILEMIKRREKTKRELLHLTLEVVEKRYHLGDYGGEILNEVKISRSEKELYATPATLHNGNHHKVQECKTKHPHHLSLKEEASDVVRQKKKYPKKPKAEALITSQQPTPETLPVINKSDIKQYDFHSSDEDEFPQVLSPVSEPEEENDPDGPCAFRRRAGCQYYAPRLDQANHSCENSELADLDKLRYRHCLTTLTVPRRCIGFARRRIGRGGRVIMDRISTEHDPVLKQIDPEMLNSFSSSSQTIDFSSNFSRTNASSKHCENRLSLSEILSNIRSCRLQCFQPRLLNLQDSDSEECTSRKPGQTVNNKRVSAASVALLNTSKNGISVTGGITEEQFQTHQQQLVQMQRQQLAQLQQKQQSQHSSQQTHPKAQGSSTSDCMSKTLDSASAHFAASAVVSAPVPSRSEVAKEQNTGHNNINGVVQPSGTSKTLYSTNMALSSSPGISAVQLVRTVGHTTTNHLIPALCTSSPQTLPMNNSCLTNAVHLNNVSVVSPVNVHINTRTSAPSPTALKLATVAASMDRVPKVTPSSAISSIARENHEPERLGLNGIAETTVAMEVT

SEQ ID NO: 776980 - protein, 807 aa, Homo sapiens; identical to SEQ ID NO: 776979

SEQ ID NO: 776981 - protein, 807 aa, Homo sapiens; identical to SEQ ID NO: 776979

SEQ ID NO: 776982 - protein, 423 aa, Homo sapiens
MSKLSFRARALDAAKPLPIYRGKDMPDLNDCVSINRAVPQMPTGMEKEEESEHHLQRAISAQQVFREKKESMVIPVPEAESNVNYYNRLYKGEFKQPKQFIHIQPFNLDNEQPDYDMDSEDETLLNRLNRKMEIKPLQFEIMIDRLEKASSNQLVTLQEAKLLLNEDDYLIKAVYDYWVRKRKNCRGPSLIPQIKQEKRDGSTNNDPYVAFRRRTEKMQTRKNRKNDEASYEKMLKLRREFSRAITILEMIKRREKTKRELLHLTLEVVEKRYHLGDYGGEILNEVKISRSEKELYATPATLHNGNHHKVQECKTKHPHHLSLKEEASDVVRQKKKYPKKPKAEALITSQQPTPETLPVINKSDIKQYDFHSSDEDEFPQVIVPKIHYRKKKQLMRLRKQAEKNVEKKIDKYTEVLKTHGLLV

SEQ ID NO: 776983 - protein, 807 aa, Homo sapiens; identical to SEQ ID NO: 776979

SEQ ID NO: 776984 - protein, 807 aa, Homo sapiens; identical to SEQ ID NO: 776979

SEQ ID NO: 776985 - protein, 807 aa, Homo sapiens; identical to SEQ ID NO: 776979

SEQ ID NO: 776986 - protein, 177 aa, Homo sapiens
MSKLSFRARALDAAKPLPIYRGKDMPDLNDCVSINRAVPQMPTGMEKEEESEHHLQRAISAQQVFREKKESMVIPVPEAESNVNYYNRLYKGEFKQPKQFIHIQRIWGHYQPETTLKFLLVCFVHLFLDHSISFNLGCRSAQGSVLRKIFCFSFLPKGKLRNTKFFAFPFCMANLFL

SEQ ID NO: 776987 - protein, 108 aa, Homo sapiens
MEDGKRERWPTLMERLCSDGFAFPQYPIKPYHLKRIHRAVLHGNLEKLKYLLLTYYDANKRDRKERTALHLACATGQPEMVHLLVSRRCELNLCDREDRTPLIKVYSS

SEQ ID NO: 776988 - protein, 170 aa, Homo sapiens
MEDGKRERWPTLMERLCSDGFAFPQYPIKPYHLKRIHRAVLHGNLEKLKYLLLTYYDANKRDRKERTALHLACATGQPEMVHLLVSRRCELNLCDREDRTPLIKAVQLRQEACATLLLQNGANPNITDFFGRTALHYAVYNEDTSMIEKLLSHGTNIEECSKCLLRNNQP

SEQ ID NO: 776989 - protein, 377 aa, Homo sapiens
ELQCRLQVVRWLQLWQPRIPSSRLAPISADPGGDAVAKWGCGPSGGTRRRSTTQPHPWAAEGPARGTPSVGSLWKRRARGRQLNRPWGRARLGSREPRPPAAPPQQPPPALGARELLGRFLCLGPVGQGRLRCACSLVLTLLLGVSAERREALRSLCGGPWTDCFARCCSSEAAIPEGELKYGCRLQFAADDYGRRKRERWPTLMERLCSDGFAFPQYPIKPYHLKRIHRAVLHGNLEKLKYLLLTYYDANKRDRKERTALHLACATGQPEMVHLLVSRRCELNLCDREDRTPLIKAVQLRQEACATLLLQNGANPNITDFFGRTALHYAVYNEDTSMIEKLLSHGTNIEECSKISPHTCCYSWRKRYSHSSSAAQY

SEQ ID NO: 776990 - protein, 103 aa, Homo sapiens
TRFTRFSCLVLPSTWDYRHESPHLANFCIFSTRWGFAYTGQAGLKLLTSSNPSTLASQSAGITGMSHWYPALSPFFHFPSFPTIIQMSAPEQGPCLFCSLLYL

SEQ ID NO: 776991 - protein, 69 aa, Homo sapiens
AVWDALNLFYFIGDSDGIPLLKATIPKNQYRSFMSQGSPELLITISMNYLFNKLTEDSAWQMIINSLTM

SEQ ID NO: 776992 - protein, 136 aa, Homo sapiens
RWEMAHGKEQRPIYLLPTPAKPCPYRVPFAQNILQTPFRNQDGGWGNWFTVPSTFTACQIISGRHGFGFCLGPYRSRTRTILAGLQLPQAETMKASRSRLLHHQDLPDTMSYVPPHNSFPSPLTQISTVASLHAIL

SEQ ID NO: 776993 - protein, 124 aa, Homo sapiens
MTLGGRWLPLAGVCPSAECMIIPTLPLMGGLNRRYRRVCGTDKAHSRSTIDIGCVMIIMVSIVFKPQWLDFHKLKFTSQSTRTKFQNGFFSPRARHPQKLTKSGYGKTVQIYFQKTHPKLRVYT

SEQ ID NO: 776994 - protein, 104 aa, Homo sapiens
MAANSSGQGFQNKNRVAILAELDKEKRKLLMQNQSSTNHPGASIALSRPSLNKDFRDHAEQQHIAAQQKAALQHAHAHSSGYFITQDSAFGNLILPVLPRLDPE

SEQ ID NO: 776995 - protein, 104 aa, Homo sapiens; identical to SEQ ID NO: 776994

SEQ ID NO: 776996 - protein, 104 aa, Homo sapiens; identical to SEQ ID NO: 776994

SEQ ID NO: 776997 - protein, 104 aa, Homo sapiens; identical to SEQ ID NO: 776994

SEQ ID NO: 776998 - protein, 114 aa, Homo sapiens
VKKRHQPHVLPSKSPTNPGFQNKNRVAILAELDKEKRKLLMQNQSSTNHPGASIALSRPSLNKDFRDHAEQQHIAAQQKAALQHAHAHSSGYFITQDSAFGNLILPVLPRLDPE

SEQ ID NO: 776999 - protein, 81 aa, Homo sapiens
CGKSFNRSSTFTKHKVIHTGVKPYKCEECGKAFFWSSTLTKHKRIHTGEQPYKWEKFGKAFNRSSHLTTDKITHWREILQV

SEQ ID NO: 777000 - protein, 31 aa, Homo sapiens
MAWQIRLFEKEGMWQAQEESHPKGIEKGSGV

SEQ ID NO: 777001 - protein, 154 aa, Homo sapiens
CVWKDHILCRIVARAHNGPVFAMYTTLRDGLIVTGGKERPSKEGGAVKLWDQELRRCRAFRLETGQATDCVRSVCRGKGKILVGTRNAEIIEVGEKNAACNILVNGHVDGPIWGLATHPSRDFFLSAAEDGTVRLWDIADKVSTDNFFKRGYNF

SEQ ID NO: 777002 - protein, 154 aa, Homo sapiens; identical to SEQ ID NO: 777001

SEQ ID NO: 777003 - protein, 113 aa, Homo sapiens
MFLENELCLRTGLNKITEASLWHLIISQTTKEGSPSAMSIPGNRPLPREMPPVSQGYILGSDCILQSRKIVPAQGLMPVIPALWEAKVGRLLEPRSSRPARATWQNPVTTENT

SEQ ID NO: 777004 - protein, 482 aa, Homo sapiens
KVEEEAMAPGLPTACSQEPVTFADVAVVFTPEEWVFLDSTQRSLYRDVMLENYRNLASVADQLCKPNALSYLEERGEQWTTDRGVLSDTCAEPQCQPQEAIPSQDTFTEILSIDVKGEQPQPGEKLYKYNELEKPFNSIEPLFQYQRIHAGEASCECQEIRNSFFQSAHLIVPEKIRSGDKSYACNKCEKSFRYSSDLIRHEKTHTAEKCFDCQECGQAFKYSSNLRRHMRTHTGEKPFECSQCGKTFTRNFNLILHQRNHTGEKPYECKDCGKAFNQPSSLRSHVRTHTGEKPFECSQCGKAFREHSSLKTHLRTHTREKPYECNQCGKPFRTSTHLNVHKRIHTGEKLYECATCGQVLSRLSTLKSHMRTHTGEKPYVCQECGRAFSEPSSLRKHARTHSGKKPYACQECGRAFGQSSHLIVHVRTHSAGRPYQCNQCEKAFRHSSSLTVHKRTHVGRETIRNGSLPLSMSHPYCGPLAN

SEQ ID NO: 777005 - protein, 98 aa, Homo sapiens
KVEEEAMAPGLPTACSQEPVTFADVAVVFTPEEWVFLDSTQRSLYRDVMLENYRNLASVADQLCKPNALSYLEERGEQWTTDRGVLSDTCAGEPRQIR

SEQ ID NO: 777006 - protein, 232 aa, Homo sapiens
LSPHWPLPSLHTGEKPYECKDCGKAFNQPSSLRSHVRTHTGEKPFECSQCGKAFREHSSLKTHLRTHTREKPYECNQCGKPFRTSTHLNVHKRIHTGEKLYECATCGQVLSRLSTLKSHMRTHTGEKPYVCQECGRAFSEPSSLRKHARTHSGKKPYACQECGRAFGQSSHLIVHVRTHSAGRPYQCNQCEKAFRHSSSLTVHKRTHVGRETIRNGSLPLSMSHPYCGPLAN

SEQ ID NO: 777007 - protein, 219 aa, Homo sapiens
MSCAARVGIVAWHVGTVSAGYAGKTPIDIFYNLVSSCPGNSVRALQDSGVVSVTSDVAYLHEMSASEDPMWETTVMLDPVAVTLASMGTPPCKPSCVSQLGQRAEPKATERGILRATGVAWESQLKPEELPSMQDLLEEASSRDMQMGPGLFLRMQLVPSIEERETPLTREDRPALQEPPWSLGCTGLKAAMQIQRVVIPVPTLGHRNPWVARDSGNNS

SEQ ID NO: 777008 - protein, 482 aa, Homo sapiens; identical to SEQ ID NO: 777004

SEQ ID NO: 777009 - protein, 199 aa, Homo sapiens
RHGGSVSGWLAGRTPTETSNPGSSVMESVTFEDVAVEFIQEWALLDSARRSLCKYRMLDQCRTLASRGTPPCKPSCVSQLGQRAEPKATERGILRATGVAWESQLKPEELPSMQDLLEEASSRDMQMGPGLFLRMQLVPSIEERETPLTREDRPALQEPPWSLGCTGLKAAMQIQRVVIPVPTLGHRNPWVARDSGNNS

SEQ ID NO: 777010 - protein, 173 aa, Homo sapiens
RHGGSVSGWLAGRTPTETSNPGSSVMESVTFEDVAVEFIQEWALLDSARRSLCKYRMLDQCRTLASRGTPPCKPSCVSQLGQRAEPKATERGILRATGVAWESQLKPEELPSMQDLLEEASSRDMQMGPGLFLRMQLVPSIEERETPLTREDRPALQEPPWSLGCTLPLLSLL

SEQ ID NO: 777011 - protein, 89 aa, Homo sapiens
SAICFLPGPWLMHQELEEMEWCSEPLPFRVQSNQMGIMLNVGETKESLALGLFSENLPPAKQNGGGDDDGDDGSGHFFAYPLWPCCEEL

SEQ ID NO: 777012 - protein, 114 aa, Homo sapiens
GRLLLLNSRPLDRPRHGLCLRARPASYSALILHDDEVTVTEDKINALIKAAGVNVEPFVAWLCFAKAPGPNRQHVGSLILQCRGPVDPCFTKTSLGAATQQGRSCPLHWLLAPA

SEQ ID NO: 777013 - protein, 114 aa, Homo sapiens
MASVSELACIYSALILHDDEVTVTEDKINALIKAAGVNVEPFWPGLFAKALANVNIGSLICNVGAGGPAPAAGAAPAGGPAPSTAAAPAEEKKVEAKKEESEESDDDMGFGLFD

SEQ ID NO: 777014 - protein, 114 aa, Homo sapiens; identical to SEQ ID NO: 777013

SEQ ID NO: 777015 - protein, 114 aa, Homo sapiens; identical to SEQ ID NO: 777013

SEQ ID NO: 777016 - protein, 114 aa, Homo sapiens; identical to SEQ ID NO: 777013

SEQ ID NO: 777017 - protein, 104 aa, Homo sapiens
MLGLSFGQYDYMVTDRAAGALSVTRKVTVTEDKINALIKAAGVNVEPFVAWLCCAKAPGPNRQHVGSLILQCRGPVDPCFTKTSLGAATQQGRSCPLHWLLAPA

SEQ ID NO: 777018 - protein, 114 aa, Homo sapiens; identical to SEQ ID NO: 777013

SEQ ID NO: 777019 - protein, 114 aa, Homo sapiens; identical to SEQ ID NO: 777013

SEQ ID NO: 777020 - protein, 108 aa, Homo sapiens
  misc_feature (8)..(8): Xaa can be any naturally occurring amino acid
PALTTGVXHDDEVTVTEDKINALIKAAGVNVEPFVAWLCFAKAPGPNRQHVGSLILQCRGPVDPCFTKTSLGAATQQGRSCPLHWLLAPAEEIESGSNKKSRVGPLDH

SEQ ID NO: 777021 - protein, 114 aa, Homo sapiens; identical to SEQ ID NO: 777013

SEQ ID NO: 777022 - protein, 100 aa, Homo sapiens
WEMLSPQPVQRNMIPDPEMEEETEFLELGTRISRPNGLLSEDVGMDIPFEEGVLSPRAADMRPEPPNSLDLNDTHPRRPRWSSAAAKVLGPSEEAKAALG

SEQ ID NO: 777023 - protein, 114 aa, Homo sapiens; identical to SEQ ID NO: 777013

SEQ ID NO: 777024 - protein, 100 aa, Homo sapiens; identical to SEQ ID NO: 777022

SEQ ID NO: 777025 - protein, 100 aa, Homo sapiens; identical to SEQ ID NO: 777022

SEQ ID NO: 777026 - protein, 100 aa, Homo sapiens; identical to SEQ ID NO: 777022

SEQ ID NO: 777027 - protein, 100 aa, Homo sapiens; identical to SEQ ID NO: 777022

SEQ ID NO: 777028 - protein, 100 aa, Homo sapiens; identical to SEQ ID NO: 777022

SEQ ID NO: 777029 - protein, 100 aa, Homo sapiens; identical to SEQ ID NO: 777022

SEQ ID NO: 777030 - protein, 100 aa, Homo sapiens; identical to SEQ ID NO: 777022

SEQ ID NO: 777031 - protein, 100 aa, Homo sapiens; identical to SEQ ID NO: 777022

SEQ ID NO: 777032 - protein, 100 aa, Homo sapiens; identical to SEQ ID NO: 777022

SEQ ID NO: 777033 - protein, 100 aa, Homo sapiens; identical to SEQ ID NO: 777022

SEQ ID NO: 777034 - protein, 100 aa, Homo sapiens; identical to SEQ ID NO: 777022

SEQ ID NO: 777035 - protein, 100 aa, Homo sapiens; identical to SEQ ID NO: 777022

SEQ ID NO: 777036 - protein, 100 aa, Homo sapiens; identical to SEQ ID NO: 777022

SEQ ID NO: 777037 - protein, 114 aa, Homo sapiens; identical to SEQ ID NO: 777013

SEQ ID NO: 777038 - protein, 100 aa, Homo sapiens; identical to SEQ ID NO: 777022

SEQ ID NO: 777039 - protein, 100 aa, Homo sapiens; identical to SEQ ID NO: 777022

SEQ ID NO: 777040 - protein, 100 aa, Homo sapiens; identical to SEQ ID NO: 777022

SEQ ID NO: 777041 - protein, 100 aa, Homo sapiens; identical to SEQ ID NO: 777022

SEQ ID NO: 777042 - protein, 100 aa, Homo sapiens; identical to SEQ ID NO: 777022

SEQ ID NO: 777043 - protein, 100 aa, Homo sapiens; identical to SEQ ID NO: 777022

SEQ ID NO: 777044 - protein, 112 aa, Homo sapiens
ASKLGVNRRRRPRHGLCLRARPASYSALILHDDEVTVTEDKINALIKAAGVNVEPFVAWLCFAKAPGPNRQHVGSLILQCRGPVDPCFTKTSLGAATQQGRSCPLHWLLAPA

SEQ ID NO: 777045 - protein, 45 aa, Homo sapiens
  misc_feature (44)..(44): Xaa can be any naturally occurring amino acid
MESDDAWRIISSLLSLCDATRRARNAQQQSSRLTETRETRFSFXP

SEQ ID NO: 777046 - protein, 100 aa, Homo sapiens; identical to SEQ ID NO: 777022

SEQ ID NO: 777047 - protein, 89 aa, Homo sapiens
IRGRVDTVREDDRREEDKINALIKAAGVNVEPFVAWLCFAKAPGPNRQHVGSLILQCRGPVDPCFTKTSLGAATQQGRSCPLHWLLAPA

SEQ ID NO: 777048 - protein, 97 aa, Homo sapiens
LGNITSEFTSNSFCTTMEVDRSPEDKINALIKAAGVNVEPFVAWLCFAKAPGPNRQHVGSLILQCRGPVDPCFTKTSLGAATQQGRSCPLHWLLAPA

SEQ ID NO: 777049 - protein, 100 aa, Homo sapiens; identical to SEQ ID NO: 777022

SEQ ID NO: 777050 - protein, 100 aa, Homo sapiens; identical to SEQ ID NO: 777022

SEQ ID NO: 777051 - protein, 100 aa, Homo sapiens; identical to SEQ ID NO: 777022

SEQ ID NO: 777052 - protein, 66 aa, Homo sapiens
  misc_feature (5)..(5): Xaa can be any naturally occurring amino acid
  misc_feature (7)..(7): Xaa can be any naturally occurring amino acid
  misc_feature (19)..(19): Xaa can be any naturally occurring amino acid
KRWSXPXVRPPLEVVVPRXAGIRHDLHPATSTAFPAAPALTLARAMASVSELALHPTRPSFCTTMR

SEQ ID NO: 777053 - protein, 100 aa, Homo sapiens; identical to SEQ ID NO: 777022

SEQ ID NO: 777054 - protein, 348 aa, Homo sapiens
MVRGQVFDVGPRYTNLSYIGEGAYGMVCSAYDNVNKVRVAIKKISPFEHQTYCQRTLREIKILLRFRHENIIGINDIIRAPTIEQMKDVYIVQDLMETDLYKLLKTQHLSNDHICYFLYQILRGLKYIHSANVLHRDLKPSNLLLNTTCDLKICDFGLARVADPDHDHTGFLTEYVATRWYRAPEIMLNSKGYTKSIDIWSVGCILAEMLSNRPIFPGKHYLDQLNHILGILGSPSQEDLNCIINLKARNYLLSLPHKNKVPWNRLFPNADSKALDLLDKMLTFNPHKRIEVEQALAHPYLEQYYDPSDEPIAEAPFKFDMELDDLPKEKLKELIFEETARFQPGYRS

SEQ ID NO: 777055 - protein, 114 aa, Homo sapiens; identical to SEQ ID NO: 777013

SEQ ID NO: 777056 - protein, 114 aa, Homo sapiens; identical to SEQ ID NO: 777013

SEQ ID NO: 777057 - protein, 114 aa, Homo sapiens; identical to SEQ ID NO: 777013

SEQ ID NO: 777058 - protein, 114 aa, Homo sapiens; identical to SEQ ID NO: 777013

SEQ ID NO: 777059 - protein, 114 aa, Homo sapiens; identical to SEQ ID NO: 777013

SEQ ID NO: 777060 - protein, 114 aa, Homo sapiens; identical to SEQ ID NO: 777013

SEQ ID NO: 777061 - protein, 114 aa, Homo sapiens; identical to SEQ ID NO: 777013

SEQ ID NO: 777062 - protein, 147 aa, Homo sapiens
CYSFLQSELEESAIPCLSNLKSSQGPKGHKRLQGQVRASSLHHHSSSITIATPGVNNGARKGFPTKPPLLALRPRRMASNRQRSLRGPSHPSHMEEPFLQVGGGPSLPPTFLYPTGLQAVPYSGPGFLLGSRLPGPYIFCCLPLFIL

SEQ ID NO: 777063 - protein, 684 aa, Homo sapiens
RFCLEVLIVNNSFWGSRLSSNTSHKSYRPLTVLTFRINYYLSGGFHPVGFHVVNILLHSGISVLMVDVFSVLFGGLQYTSKGRRLHLAPRASLLAALLFAVHPVHTECVAGVVGRADLLCALFFLLSFLGYCKAFRESNKEGAHSSTFWVLLSIFLGAVAMLCKEQGITVLGLNAVFDILVIGKFNVLEIVQKVLHKDKSLENLGMLRNGGLLFRMTLLTSGGAGMLYVRWRIMGTGPPAFTEVDNPASFADSMLVRAVNYNYYYSLNAWLLLCPWWLCFDWSMGCIPLIKSISDWRVIALAALWFCLIGLICQALCSEDGHKRRILTLGLGFLVIPFLPASNLFFRVGFVVAERVLYLPSVGYCVLLTFGFGALSKHTKKKKLIAAVVLGILFINTLRCVLRSGEWRSEEQLFRSALSVCPLNAKVHYNIGKNLADKGNQTAAIRYYREAVRLNPKYVHAMNNLGNILKERNELQEAEELLSLAVQIQPDFAAAWMNLGIVQNSLKRFEAAEQSYRTAIKHRRKYPDCYYNLGRLYADLNRHVDALNAWRNATVLKPEHSLAWNNMIILLDNTGNLAQAEAVGREALELIPNDHSLMFSLANVLGKSQKYKESEALFLKAIKANPNAASYHGNLAVLYHRWGHLDLAKKHYEISLQLDPTASGTKENYGLLRRKLELMQKKAV

SEQ ID NO: 777064 - protein, 760 aa, Homo sapiens
MIPNQHNAGAGSHQPAVFRMAVLDTDLDHILPSSVLPPFWAKLVVGSVAIVCFARSYDGDFVFDDSEAIVNNKDLQAETPLGDLWHHDFWGSRLSSNTSHKSYRPLTVLTFRINYYLSGGFHPVGFHVVNILLHSGISVLMVDVFSVLFGGLQYTSKGRRLHLAPRASLLAALLFAVHPVHTECVAGVVGRADLLCALFFLLSFLGYCKAFRESNKEGAHSSTFWVLLSIFLGAVAMLCKEQGITVLGLNAVFDILVIGKFNVLEIVQKVLHKDKSLENLGMLRNGGLLFRMTLLTSGGAGMLYVRWRIMGTGPPAFTEVDNPASFADSMLVRAVNYNYYYSLNAWLLLCPWWLCFDWSMGCIPLIKSISDWRVIALAALWFCLIGLICQALCSEDGHKRRILTLGLGFLVIPFLPASNLFFRVGFVVAERVLYLPSVGYCVLLTFGFGALSKHTKKKKLIAAVVLGILFINTLRCVLRSGEWRSEEQLFRSALSVCPLNAKVHYNIGKNLADKGNQTAAIRYYREAVRLNPKYVHAMNNLGNILKERNELQEAEELLSLAVQIQPDFAAAWMNLGIVQNSLKRFEAAEQSYRTAIKHRRKYPDCYYNLGRLYADLNRHVDALNAWRNATVLKPEHSLAWNNMIILLDNTGNLAQAEAVGREALELIPNDHSLMFSLANVLGKSQKYKESEALFLKAIKANPNAASYHGNLAVLYHRWGHLDLAKKHYEISLQLDPTASGTKENYGLLRRKLELMQKKAV

SEQ ID NO: 777065 - protein, 818 aa, Homo sapiens
PRLVLGGARARGELREARRGGGRVRGGPPLPLPGPGGCLEPPEFPHPGGRCGRGSGSLQIPNQHNAGAGSHQPAVFRMAVLDTDLDHILPSSVLPPFWAKLVVGSVAIVCFARSYDGDFVFDDSEAIVNNKDLQAETPLGDLWHHDFWGSRLSSNTSHKSYRPLTVLTFRINYYLSGGFHPVGFHVVNILLHSGISVLMVDVFSVLFGGLQYTSKGRRLHLAPRASLLAALLFAVHPVHTECVAGVVGRADLLCALFFLLSFLGYCKAFRESNKEGAHSSTFWVLLSIFLGAVAMLCKEQGITVLGLNAVFDILVIGKFNVLEIVQKVLHKDKSLENLGMLRNGGLLFRMTLLTSGGAGMLYVRWRIMGTGPPAFTEVDNPASFADSMLVRAVNYNYYYSLNAWLLLCPWWLCFDWSMGCIPLIKSISDWRVIALAALWFCLIGLICQALCSEDGHKRRILTLGLGFLVIPFLPASNLFFRVGFVVAERVLYLPSVGYCVLLTFGFGALSKHTKKKKLIAAVVLGILFINTLRCVLRSGEWRSEEQLFRSALSVCPLNAKVHYNIGKNLADKGNQTAAIRYYREAVRLNPKYVHAMNNLGNILKERNELQEAEELLSLAVQIQPDFAAAWMNLGIVQNSLKRFEAAEQSYRTAIKHRRKYPDCYYNLGRLYADLNRHVDALNAWRNATVLKPEHSLAWNNMIILLDNTGNLAQAEAVGREALELIPNDHSLMFSLANVLGKSQKYKESEALFLKAIKANPNAASYHGNLAVLYHRWGHLDLAKKHYEISLQLDPTASGTKENYGLLRRKLELMQKKAV

SEQ ID NO: 777066 - protein, 741 aa, Homo sapiens
MAVLDTDLDHILPSSVLPPFWAKLVVGSVAIVCFARSYDGDFVFDDSEAIVNNKDLQAETPLGDLWHHDFWGSRLSSNTSHKSYRPLTVLTFRINYYLSGGFHPVGFHVVNILLHSGISVLMVDVFSVLFGGLQYTSKGRRLHLAPRASLLAALLFAVHPVHTECVAGVVGRADLLCALFFLLSFLGYCKAFRESNKEGAHSSTFWVLLSIFLGAVAMLCKEQGITVLGLNAVFDILVIGKFNVLEIVQKVLHKDKSLENLGMLRNGGLLFRMTLLTSGGAGMLYVRWRIMGTGPPAFTEVDNPASFADSMLVRAVNYNYYYSLNAWLLLCPWWLCFDWSMGCIPLIKSISDWRVIALAALWFCLIGLICQALCSEDGHKRRILTLGLGFLVIPFLPASNLFFRVGFVVAERVLYLPSVGYCVLLTFGFGALSKHTKKKKLIAAVVLGILFINTLRCVLRSGEWRSEEQLFRSALSVCPLNAKVHYNIGKNLADKGNQTAAIRYYREAVRLNPKYVHAMNNLGNILKERNELQEAEELLSLAVQIQPDFAAAWMNLGIVQNSLKRFEAAEQSYRTAIKHRRKYPDCYYNLGRLYADLNRHVDALNAWRNATVLKPEHSLAWNNMIILLDNTGNLAQAEAVGREALELIPNDHSLMFSLANVLGKSQKYKESEALFLKAIKANPNAASYHGNLAVLYHRWGHLDLAKKHYEISLQLDPTASGTKENYGLLRRKLELMQKKAV

SEQ ID NO: 777067 - protein, 466 aa, Homo sapiens
MIPNQHNAGAGSHQPAVFRMAVLDTDLDHILPSSVLPPFWAKLVVGSVAIVCFARSYDGDFVFDDSEAIVNNKDLQAETPLGDLWHHDFWGSRLSSNTSHKSYRPLTVLTFRINYYLSGGFHPVGFHVVNILLHSGISVLMVDVFSVLFGGLQYTSKGRRLHLAPRASLLAALLFAVHPVHTECVAGVVGRADLLCALFFLLSFLGYCKAFRESNKEGAHSSTFWVLLSIFLGAVAMLCKEQGITVLGLNAVFDILVIGKFNVLEIVQKVLHKDKSLENLGMLRNGGLLFRMTLLTSGGAGMLYVRWRIMGTGPPAFTEVDNPASFADSMLVRAVNYNYYYSLNAWLLLCPWWLCFDWSMGCIPLIKSISDWRVIALAALWFCLIGLICQALCSEDGHKRRILTLGLGFLVIPFLPASNLFFRVGFVVAERVLYLPSVGYCVLLTFGFGALSKHTKKKVSTESGAS

SEQ ID NO: 777068 - protein, 466 aa, Homo sapiens; identical to SEQ ID NO: 777067

SEQ ID NO: 777069 - protein, 403 aa, Homo sapiens
MIPNQHNAGAGSHQPAVFRMAVLDTDLDHILPSSVLPPFWAKLVVGSVAIVCFARSYDGDFVFDDSEAIVNNKDLQAETPLGDLWHHDFWGSRLSSNTSHKSYRPLTVLTFRINYYLSGGFHPVGFHVVNILLHSGISVLMVDVFSVLFGGLQYTSKGRRLHLAPRASLLAALLFAVHPVHTECGLNAVFDILVIGKFNVLEIVQKVLHKDKSLENLGMLRNGGLLFRMTLLTSGGAGMLYVRWRIMGTGPPAFTEVDNPASFADSMLVRAVNYNYYYSLNAWLLLCPWWLCFDWSMGCIPLIKSISDWRVIALAALWFCLIGLICQALCSEDGHKRRILTLGLGFLVIPFLPASNLFFRVGFVVAERVLYLPSVGYCVLLTFGFGALSKHTKKKVSTESGAS

SEQ ID NO: 777070 - protein, 379 aa, Homo sapiens
QSSWYLDEQALVCDGVPQRRILTLGLGFLVIPFLPASNLFFRVGFVVAERVLYLPSVGYCVLLTFGFGALSKHTKKKKLIAAVVLGILFINTLRCVLRSGEWRSEEQLFRSALSVCPLNAKVHYNIGKNLADKGNQTAAIRYYREAVRLNPKYVHAMNNLGNILKERNELQEAEELLSLAVQIQPDFAAAWMNLGIVQNSLKRFEAAEQSYRTAIKHRRKYPDCYYNLGRLYADLNRHVDALNAWRNATVLKPEHSLAWNNMIILLDNTGNLAQAEAVGREALELIPNDHSLMFSLANVLGKSQKYKESEALFLKAIKANPNAASYHGNLAVLYHRWGHLDLAKKHYEISLQLDPTASGTKENYGLLRRKLELMQKKAV

SEQ ID NO: 777071 - protein, 70 aa, Homo sapiens
PRAAGFGTRANPNAASYHGNLAVLYHRWGHLDLAKKHYEISLQLDPTASGTKENYGLLRRKLELMQKKAV

SEQ ID NO: 777072 - protein, 466 aa, Homo sapiens; identical to SEQ ID NO: 777067

SEQ ID NO: 777073 - protein, 500 aa, Homo sapiens
MIPNQHNAGAGSHQPAVFRMAVLDTDLDHILPSSVLPPFWAKLVVGSVAIVCFARSYDGDFVFDDSEAIVNNKDLQAETPLGDLWHHDFWGSRLSSNTSHKSYRPLTVLTFRINYYLSGGFHPVGFHVVNILLHSGISVLMVDVFSVLFGGLQYTSKGRRLHLAPRASLLAALLFAVHPVHTECVAGVVGRADLLCALFFLLSFLGYCKAFRESNKEGAHSSTFWVLLSIFLGAVAMLCKEQGITVLGLNAVFDILVIGKFNVLEIVQKVLHKDKSLENLGMLRNGGLLFRMTLLTSGGAGMLYVRWRIMGTGPPAFTEVDNPASFADSMLVRAVNYNYYYSLNAWLLLCPWWLCFDWSMGCIPLIKSISDWRVIALAALWFCLIGLICQALCSEDGHKRRGHWEMIRWFQKCFNAQLRISLTEIYGGDVATKKWILTLGLGFLVIPFLPASNLFFRVGFVVAERVLYLPSVGYCVLLTFGFGALSKHTKKKVSTESGAS

SEQ ID NO: 777074 - protein, 631 aa, Homo sapiens
MIPNQHNAGAGSHQPAVFRMAVLDTDLDHILPSSVLPPFWAKLVVGSVAIVCFARSYDGDFVFDDSEAIVNNKDLQAETPLGDLWHHDFWGSRLSSNTSHKSYRPLTVLTFRINYYLSGGFHPVGFHVVNILLHSGISVLMVDVFSVLFGGLQYTSKGRRLHLAPRASLLAALLFAVHPVHTECVAGVVGRADLLCALFFLLSFLGYCKAFRESNKEGAHSSTFWVLLSIFLGAVAMLCKEQGITVLGLNAVFDILVIGKFNVLEIVQKVLHKDKSLENLGMLRNGGLLFRMTLLTSGGAGMLYVRWRIMGTGPPAFTEVDNPASFADSMLVRAVNYNYYYSLNAWLLLCPWWLCFDWSMGCIPLIKSISDWRVIALAALWFCLIGLICQALCSEDGHKRRILTLGLGFLVIPFLPASNLFFRVGFVVAERVLYLPSVGYCVLLTFGFGALSKHTKKKKLIAAVVLGILFINTLRCVLRSGEWRSEEQLFRSALSVCPLNAKVHYNIGKNLADKGNQTAAIRYYREAVRLNPKYVHAMNNLGNILKERNELQEAEELLSLAVQIQPDFAAAWMNLGIVQNSLKRFEAAEQSYRTAIKHRRKYPDCYYNLGRLVSAGCPVPVEGKMGYFSYL

SEQ ID NO: 777075 - protein, 626 aa, Homo sapiens
MIPNQHNAGAGSHQPAVFRMAVLDTDLDHILPSSVLPPFWAKLVVGSVAIVCFARSYDGDFVFDDSEAIVNNKDLQAETPLGDLWHHDFWGSRLSSNTSHKSYRPLTVLTFRINYYLSGGFHPVGFHVVNILLHSGISVLMVDVFSVLFGGLQYTSKGRRLHLAPRASLLAALLFAVHPVHTECVAGVVGRADLLCALFFLLSFLGYCKAFRESNKEGAHSSTFWVLLSIFLGAVAMLCKEQGITVLGLNAVFDILVIGKFNVLEIVQKVLHKDKSLENLGMLRNGGLLFRMTLLTSGGAGMLYVRWRIMGTGPPAFTEVDNPASFADSMLVRAVNYNYYYSLNAWLLLCPWWLCFDWSMGCIPLIKSISDWRVIALAALWFCLIGLICQALCSEDGHKRRILTLGLGFLVIPFLPASNLFFRVGFVVAERVLYLPSVGYCVLLTFGFGALSKHTKKKKLIAAVVLGILFINTLRCVLRSGEWRSEEQLFRSALSVCPLNAKVHYNIGKNLADKGNQTAAIRYYREAVRLNPKYVHAMNNLGNILKERNELQEAEELLSLAVQIQPDFAAAWMNLGIVQNSLKRFEAAEQSYRTAIKHRRKYPDCYYNLGRLVSAGCPVPVEGKMG

SEQ ID NO: 777076 - protein, 134 aa, Homo sapiens
EIKILGMEEPSNVTVKHNGVPSQTSPTVTYDSNLKVAIITDINLFLGEAYTVEWSIKIRDEEKIDCYPDENGDSAENCTARGCIWEASNSSGVPFCYFVNDLYSVSDVQYNSHGATADISLKSSVHANAFPSTP

SEQ ID NO: 777077 - protein, 369 aa, Homo sapiens
AEGFALRKDGRGGFWSQLGAQYAFSGAWAEETGTSVASVSTDWLKRAPRELTGSAIRGKAFVVPEKSSQSGAVAAAFCGFPLFPQTRTFSASLRRIVTKMWNSGFESYGSSSYGGAGGYTQSPGGFGSPAPSQAEKKSRARAQHIVPCTISQLLSATLVDEVFRIGNVEISQVTIVGIIRHAEKAPTNIVYKIDDMTAAPMDVRQWVDTDDTSSENTVVPPETYVKVAGHLRSFQNKKSLVAFKIMPLEDMNEFTTHILEVINAHMVLSKANSQPSAGRAPISNPGMSEAGNFGGNSFMPANGLTVAQNQVLNLIKACPRPEGLNFQDLKNQLKHMSVSSIKQAVDFLSNEGHIYSTVDDDHFKSTDAE

SEQ ID NO: 777078 - protein, 369 aa, Homo sapiens; identical to SEQ ID NO: 777077

SEQ ID NO: 777079 - protein, 457 aa, Homo sapiens
AEGFALRKDGRGGFWSQLGAQYAFSGAWAEETGTSVASVSTDWLKRAPRELTGSAIRGKAFVVPEKSSQSGAVAAAFCGFPLFPQTRTFSASLRRIVTKMWNSNDGGAGWRRKRIAGGFSKRASLGSERRVVAGEEGRERSWGVWGSPAGRRRGRLGRLGQCLKGRSLREPAGFSEAWDVAQALILLFKTGGFESYGSSSYGGAGGYTQSPGGFGSPAPSQAEKKSRARAQHIVPCTISQLLSATLVDEVFRIGNVEISQVTIVGIIRHAEKAPTNIVYKIDDMTAAPMDVRQWVDTDDTSSENTVVPPETYVKVAGHLRSFQNKKSLVAFKIMPLEDMNEFTTHILEVINAHMVLSKANSQPSAGRAPISNPGMSEAGNFGGNSFMPANGLTVAQNQVLNLIKACPRPEGLNFQDLKNQLKHMSVSSIKQAVDFLSNEGHIYSTVDDDHFKSTDAE

SEQ ID NO: 777080 - protein, 278 aa, Homo sapiens
MGRGDRNKRSIRGFESYGSSSYGGAGGYTQSPGGFGSPAPSQAEKKSRARAQHIVPCTISQLLSATLVDEVFRIGNVEISQVTIVGIIRHAEKAPTNIVYKIDDMTAAPMDVRQWVDTDDTSSENTVVPPETYVKVAGHLRSFQNKKSLVAFKIMPLEDMNEFTTHILEVINAHMVLSKANSQPSAGRAPISNPGMSEAGNFGGNSFMPANGLTVAQNQVLNLIKACPRPEGLNFQDLKNQLKHMSVSSIKQAVDFLSNEGHIYSTVDDDHFKSTDAE

SEQ ID NO: 777081 - protein, 324 aa, Homo sapiens
AEGFALRKDGRGGFWSQLGAQYAFSGAWAEETGTSVASVSTDWLKRAPRELTGSAIRGKAFVVPEKSSQSGAVAAAFCGFPLFPQTRTFSASLRRIVTKMWNSGFESYGSSSYGGAGGYTQSPGGFGSPAPSQAEKKSRARAQHIVPCTISQLLSATLVDEVFRIGNVEISQVTIVGIIRHAEKAPTNIVYKIDDMTAAPMDVRQWVDTDDTSSENTVVPPETYVKVAGHLRSFQNKKSLVAFKIMPLEDMNEFTTHILEVINAHMVLSKANSQPSAGRAPISNPGMSEAGNFGGNSFMPANGLTVAQNQGNSFMPANGLTVAI

SEQ ID NO: 777082 - protein, 270 aa, Homo sapiens
MWNSGFESYGSSSYGGAGGYTQSPGGFGSPAPSQAEKKSRARAQHIVPCTISQLLSATLVDEVFRIGNVEISQVTIVGIIRHAEKAPTNIVYKIDDMTAAPMDVRQWVDTDDTSSENTVVPPETYVKVAGHLRSFQNKKSLVAFKIMPLEDMNEFTTHILEVINAHMVLSKANSQPSAGRAPISNPGMSEAGNFGGNSFMPANGLTVAQNQVLNLIKACPRPEGLNFQDLKNQLKHMSVSSIKQAVDFLSNEGHIYSTVDDDHFKSTDAE

SEQ ID NO: 777083 - protein, 354 aa, Homo sapiens
AEGFALRKDGRGGFWSQLGAQYAFSGAWAEETGTSVASVSTDWLKRAPRELTGSAIRGKAFVVPEKSSQSGAVAAAFCGFPLFPQTRTFSASLRRIVTKMWNSGFESYGSSSYGGAGGYTQSPGGFGSPAPSQAEKKSRARAQHIVPCTISQLLSATLVDEVFRIGNVEISQVTIVGIIRHAEKAPTNIVYKIDDMTAAPMDVRQWVDTDDTSSENTVVPPETYVKVAGHLRSFQNKKSLVAFKIMPLEDMNEFTTHILEVINAHMVLSKANSQPSAGRAPISNPGMSEAGNFGGNSFMPANGLTVAQNQFQDLKNQLKHMSVSSIKQAVDFLSNEGHIYSTVDDDHFKSTDAE

SEQ ID NO: 777084 - protein, 143 aa, Homo sapiens
KDTKAPGYTNKKSLVAFKIMPLEDMNEFTTHILEVINAHMVLSKANSQPSAGRAPISNPGMSEAGNFGGNSFMPANGLTVAQNQVLNLIKACPRPEGLNFQDLKNQLKHMSVSSIKQAVDFLSNEGHIYSTVDDDHFKSTDAE

SEQ ID NO: 777085 - protein, 181 aa, Homo sapiens
LWKRFHEIGTEMIITKAGRRMFPAMRVKISGLDPHQQYYIAMDIVPVDNKRYRYVYHSSKWMVAGNADSPVPPRVYIHPDSPASGETWMRQVISFDKLKLTNNELDDQGHIILHSMHKYQPRVHVIRKDCGDDLSPIKPVPSGEGVKAFSFPETVFTTVTAYQNQQITRLKIDRNPFAKGF

SEQ ID NO: 777086 - protein, 143 aa, Homo sapiens
PGSSYPPTSTSRVVETTGVHYHARLPFCIFSRDEVSPCCPGWFKRSSSNQPASASQSVGITGMSRCAQPSSAVEILLITCLLQNSCGFSLLNGLSSCLSWLSSLSEVLNERTCKAFRECQGGNGRVFPGLENLYREMDLGKEF

SEQ ID NO: 777087 - protein, 158 aa, Homo sapiens
MVSPPCLRTYSLVRRWEWRSNHTNPRTNKTYVEGDMFLHSRFIGASLDVKCLAFVPSLIAFVWFGFFIWFFGRFLKNEPRMENQDKTYTRMKRKSPSEHSKDMGITRENTQASVEDPLNDPSLVCIRSDFNEIVYKSSHLTRRTRAHPEPITPHRYTG

SEQ ID NO: 777088 - protein, 370 aa, Homo sapiens
MGIRNESFMKLAAVGTWMGDFVTAWMVTDMMLQDKPYPDWGKSARAFWKKGNVRITLFWTVLFTLTSVVVLVITTDWISWDKLNRGFLPSDEVSRAFLASFILVFDLLIVMQDWEFPHFMGDVDVNLPGLHTPHMQFKIPFFQKIFKEEYRIHITGKWFNYGIIFLVLILDLNMWKNQIFYKPHEYGQYIGPGQKIYTVKDSESLKDLNRTKLSWEWRSNHTNPRTNKTYVEGDMFLHSRFIGASLDVKCLAFVPSLIAFVWFGFFIWFFGRFLKNEPRMENQDKTYTRMKRKSPSEHSKDMGITRENTQASVEDPLNDPSLVCIRSDFNEIVYKSSHLTSENLSSQLNESTSATEADQDPTTSKSTPTN

SEQ ID NO: 777089 - protein, 514 aa, Homo sapiens
MGKDFRYYFQHPWSRMIVAYLVIFFNFLIFAEDPVSHSQTEANVIVVGNCFSFVTNKYPRGVGWRILKVLLWLLAILTGLIAGKFLFHQRLFGQLLRLKMFREDHGSWMTMFFSTILFLFIFSHIYNTILLMDGNMGAYIITDYMGIRNESFMKLAAVGTWMGDFVTAWMVTDMMLQDKPYPDWGKSARAFWKKGNVRITLFWTVLFTLTSVVVLVITTDWISWDKLNRGFLPSDEVSRAFLASFILVFDLLIVMQDWEFPHFMGDVDVNLPGLHTPHMQFKIPFFQKIFKEEYRIHITGKWFNYGIIFLVLILDLNMWKNQIFYKPHEYGQYIGPGQKIYTVKDSESLKDLNRTKLSWEWRSNHTNPRTNKTYVEGDMFLHSRFIGASLDVKCLAFVPSLIAFVWFGFFIWFFGRFLKNEPRMENQDKTYTRMKRKSPSEHSKDMGITRENTQASVEDPLNDPSLVCIRSDFNEIVYKSSHLTSENLSSQLNESTSATEADQDPTTSKSTPTN

SEQ ID NO: 777090 - protein, 410 aa, Homo sapiens
MATCHSHRTNSWQISVPSAFVWSVAPIKNVSRRSWVVDDNVLQHNSLSLHIFSHIQHDSSNGWEHGVTDMMLQDKPYPDWGKSARAFWKKGNVRITLFWTVLFTLTSVVVLVITTDWISWDKLNRGFLPSDEVSRAFLASFILVFDLLIVMQDWEFPHFMGDVDVNLPGLHTPHMQFKIPFFQKIFKEEYRIHITGKWFNYGIIFLVLILDLNMWKNQIFYKPHEYGQYIGPGQKIYTVKDSESLKDLNRTKLSWEWRSNHTNPRTNKTYVEGDMFLHSRFIGASLDVKCLAFVPSLIAFVWFGFFIWFFGRFLKNEPRMENQDKTYTRMKRKSPSEHSKDMGITRENTQASVEDPLNDPSLVCIRSDFNEIVYKSSHLTSENLSSQLNESTSATEADQDPTTSKSTPTN

SEQ ID NO: 777091 - protein, 370 aa, Homo sapiens; identical to SEQ ID NO: 777088

SEQ ID NO: 777092 - protein, 110 aa, Homo sapiens
LPTALLIKAKLISAVLQGTLFPSPAAQPPPPLRSASHETSLPVSCHPSGHRRTSDISSGEDSGMLPGYCQANATSFDAWVTVEFVGPLAKRTNSPTSIAEIVSPAASSPT

SEQ ID NO: 777093 - protein, 91 aa, Homo sapiens
LPTALLIKAKLISAVLQGTLFPSPAAQPPPPLRSASHETSLPVSCHPSGHRRTSDIRNCQSCCLQSYMRISISGKEENTDWSYEKQWPRLP

SEQ ID NO: 777094 - protein, 119 aa, Homo sapiens
QPSTQNKFNYPHKKYSGIMSIPYFQHHPVKKLAGLRLSQNNKLALLYVSFCQLDLWIQCNPNQNPAKYFVDPDKLVLKFTWKGKRPRIAGTILKEKKVRRLILPNFKTHYKATVIKIGW

SEQ ID NO: 777095 - protein, 195 aa, Homo sapiens
MEYFGTIGIGTPAQDFTVLFDTGSSNLWVPSVYCSSLACTNHNRFNPEDSSTYQSTSETVSITYGTGSMTGILGYDTVQVGGISDTNQIFGLSETEPGSFLYYAPFDGILGLAYPSISSSGATPVFDNIWNQGLVSQDLFSVYLSADDQSGSVVIFGGIDSSYYTGSLNWVPVTVEGYWQITVDSITSVERGTSR

SEQ ID NO: 777096 - protein, 268 aa, Homo sapiens
MKWLLLLGLVALSECIMYKVPLIRKKSLRRTLSERGLLKDFLKKHNLNPARKYFPQWKAPTLVDEQPLENYLDMEYFGTIGIGTPAQDFTVLFDTGSSNLWVPSVYCSSLACTNHNRFNPEDSSTYQSTSETVSITYGTGSMTGILGYDTVQVGGISDTNQIFGLSETEPGSFLYYAPFDGILGLAYPSISSSGATPVFDNIWNQGLVSQDLFSVYLSADDQSGSVVIFGGIDSSYYTGSLNWVPVTVEGYWQITVDSITSVERGTSR

SEQ ID NO: 777097 - protein, 36 aa, Homo sapiens
MVKGCWGLSESPLMSASSGSFLSCKFSLLSRWIRRP

SEQ ID NO: 777098 - protein, 395 aa, Homo sapiens
MGEGGAAAALVAAAAAAAAAAAAVVAGQRRRRLGRRARCHGPGRAAGRKMSKPRAVEAAAAAAAVAATAPGPEMVERRGPGRPRTDGENVFTGQSKIYSYMSPNKCSGMRFPLQEENSVTHHEVKCQGKPLAGIYRKREEKRNAGNAVRSAMKSEEQKIKDARKGPLVPFPNQKSEAAEPPKTPPSSCDSTNAAIAKQALKKPIKGKQAPRKKAQGKTQQNRKLTDFYPVRRSSRKSKAELQSEERKRIDELIESGKEEGMKIDLIDGKGRGVIATKQFSRGAFVVEYHGDLIEITDAKKREALYAQDPSTGCYMYYFQYLSKTYCVDATRETNRLGRLINHSKRGNCQTKLHDIDGVPHLILIASRDIAAGEEPLYDYGDRSKASIEAHPWLKH

SEQ ID NO: 777099 - protein, 274 aa, Homo sapiens
MARGRKMSKPRAVAATAPGPEMVERRGPGRPRTDGENVFTGQSKIYSYMSPNKCSGMRFPLQEENSVTHHEVKCQGKPLAGIYRKREEKRNAGNAVRSAMKSEEQKIKDARKGPLVPFPNQKSEAAEPPKTPPSSCDSTNAAIAKQALKKPIKGKQAPRKKAQGKTQQNRKLTDFYPVRRSSRKSKAELQSEERKRIDELIESGKEEGMKIDLIDGKGRGVIATKQFSRGAFVVEYHGDLIEITDAKKREALYAQDPSTGCYMYYFQYLSKTYW

SEQ ID NO: 777100 - protein, 136 aa, Homo sapiens
MARGRKMSKPRAVEAAAAAAAVAATAPGPEMVERRGPGRPRTDGENVFTGQSKIYSYMSPNKCSGMRFPLQEENSVTHHEVKCQGKPLAGIYRKREGKLLKWPRSDPSWSGCRSLCLLQECTYVFIQPFQSQIREV

SEQ ID NO: 777101 - protein, 283 aa, Homo sapiens
MARGRKMSKPRAVEAAAAAAAVAATAPGPEMVERRGPGRPRTDGENVFTGQSKIYSYMSPNKCSGMRFPLQEENSVTHHEVKCQGKPLAGIYRKREEKRNAGNAVRSAMKSEEQKIKDARKGPLVPFPNQKSEAAEPPKTPPSSCDSTNAAIAKQALKKPIKGKQAPRKKAQGKTQQNRKLTDFYPVRRSSRKSKAELQSEERKRIDELIESGKEEGMKIDLIDGKGRGVIATKQFSRGAFVVEYHGDLIEITDAKKREALYAQDPSTGCYMYYFQYLSKTYW

SEQ ID NO: 777102 - protein, 208 aa, Homo sapiens
SGRSRSRTRGKPLAGIYRKREEKRNAGNAVRSAMKSEEQKIKDARKGPLVPFPNQKSEAAEPPKTPPSSCDSTNAAIAKQALKKPIKGKQAPRKKAQGKTQQNRKLTDFYPVRRSSRKSKAELQSEERKRIDELIESGKEEGMKIDLIDGKGRGVIATKQFSRGAFVVEYHGDLIEITDAKKREALYAQDPSTGCYMYYFQYLSKTYW

SEQ ID NO: 777103 - protein, 203 aa, Homo sapiens
TGFHRVGWTGLKLLTSEKRNAGNAVRSAMKSEEQKIKDARKGPLVPFPNQKSEAAEPPKTPPSSCDSTNAAIAKQALKKPIKGKQAPRKKAQGKTQQNRKLTDFYPVRRSSRKSKAELQSEERKRIDELIESGKEEGMKIDLIDGKGRGVIATKQFSRGAFVVEYHGDLIEITDAKKREALYAQDPSTGCYMYYFQYLSKTYW

SEQ ID NO: 777104 - protein, 567 aa, Homo sapiens
MPDSPAEVKTQPRSTPPSMPPPPPAASQGATRPPSFTPHTLMNGSSHSPTAINGAPCTPNGFSNGPATSSTASLSTQHLPPACGARQLSKLKRFLTTLQQFGSDISPEIGERVRTLVLGLVNSTLTIEEFHSKLQEATNFPLRPFVIPFLKANLPLLQRELLHCARLAKQTPAQYLAQHEQLLLDASASSPIDSSELLLEVNENGKRRTPDRTKENGSDRDPLHPEHLSKRPCTLNPAQRYSPSNGPPQPTPPPHYRLEDIAMAHHFRDAYRHPDPRELRERHRPLVVPGSRQEEVIDHKLTEREWAEEWKHLNNLLNCIMDMVEKTRRSLTVLRRCQEADREELNHWARRYSDAEDTKKGPAPAAARPRSSSAGPEGPQLDVPREFLPRTLTGYVPEDIWRKAEEAVNEVKRQAMSELQKAVSDAERKAHELITTERAKMERALAEAKRQASEDALTVINQQEDSSESCWNCGRKASETCSGCNAARYCGSFCQHRDWEKHHHVCGQSLQGPTAVVADPVPGPPEAAHSLGPSLPVGAASPSEAGSAGPSRPGSPSPPGPLDTVPR

SEQ ID NO: 777105 - protein, 47 aa, Homo sapiens
MLTQERPRTHTAPSRVQDVPREFLPRTLTGYVPEDIWRKAGEWGCRG

SEQ ID NO: 777106 - protein, 592 aa, Homo sapiens
MPDSPAEVKTQPRSTPPSMPPPPPAASQGATRPPSFTPHTHREDGPATLPHGRFHGCLKWSMVCLLMNGSSHSPTAINGAPCTPNGFSNGPATSSTASLSTQHLPPACGARQLSKLKRFLTTLQQFGSDISPEIGERVRTLVLGLVNSTLTIEEFHSKLQEATNFPLRPFVIPFLKANLPLLQRELLHCARLAKQTPAQYLAQHEQLLLDASASSPIDSSELLLEVNENGKRRTPDRTKENGSDRDPLHPEHLSKRPCTLNPAQRYSPSNGPPQPTPPPHYRLEDIAMAHHFRDAYRHPDPRELRERHRPLVVPGSRQEEVIDHKLTEREWAEEWKHLNNLLNCIMDMVEKTRRSLTVLRRCQEADREELNHWARRYSDAEDTKKGPAPAAARPRSSSAGPEGPQLDVPREFLPRTLTGYVPEDIWRKAEEAVNEVKRQAMSELQKAVSDAERKAHELITTERAKMERALAEAKRQASEDALTVINQQEDSSESCWNCGRKASETCSGCNAARYCGSFCQHRDWEKHHHVCGQSLQGPTAVVADPVPGPPEAAHSLGPSLPVGAASPSEAGSAGPSRPGSPSPPGPLDTVPR

SEQ ID NO: 777107 - protein, 690 aa, Homo sapiens
RAEDTQLVAGRASAFQGQRPNSRTPQLAQPLLFPSRLQEVGKGSPGRGLSWAPGWPLRVALLMPASRLRDRAASSASGSTCGSMSQTHPVLESGLLASAGCSAPRGPRKGGPAPVDRKAKASAMPDSPAEVKTQPRSTPPSMPPPPPAASQGATRPPSFTPHTLMNGSSHSPTAINGAPCTPNGFSNGPATSSTASLSTQHLPPACGARQLSKLKRFLTTLQQFGSDISPEIGERVRTLVLGLVNSTLTIEEFHSKLQEATNFPLRPFVIPFLKANLPLLQRELLHCARLAKQTPAQYLAQHEQLLLDASASSPIDSSELLLEVNENGKRRTPDRTKENGSDRDPLHPEHLSKRPCTLNPAQRYSPSNGPPQPTPPPHYRLEDIAMAHHFRDAYRHPDPRELRERHRPLVVPGSRQEEVIDHKLTEREWAEEWKHLNNLLNCIMDMVEKTRRSLTVLRRCQEADREELNHWARRYSDAEDTKKGPAPAAARPRSSSAGPEGPQLDVPREFLPRTLTGYVPEDIWRKAEEAVNEVKRQAMSELQKAVSDAERKAHELITTERAKMERALAEAKRQASEDALTVINQQEDSSESCWNCGRKASETCSGCNAARYCGSFCQHRDWEKHHHVCGQSLQGPTAVVADPVPGPPEAAHSLGPSLPVGAASPSEAGSAGPSRPGSPSPPGPLDTVPR

SEQ ID NO: 777108 - protein, 690 aa, Homo sapiens; identical to SEQ ID NO: 777107

SEQ ID NO: 777109 - protein, 153 aa, Homo sapiens
RPPRAPQPRRAPEPGAAPEDSAQPPLSRGGGDQAGRSSDSRTESRVCAVRRPPDPPDPPTVSAVSAPRAAAALPRLRPRLPFPDLRRSRAERTGRFQSWCPRQGGANPPSAHPSGLSAAPREQSLTCGGCGETSRGTTRPGAGSLAGSPGAAR

SEQ ID NO: 777110 - protein, 715 aa, Homo sapiens
RAEDTQLVAGRASAFQGQRPNSRTPQLAQPLLFPSRLQEVGKGSPGRGLSWAPGWPLRVALLMPASRLRDRAASSASGSTCGSMSQTHPVLESGLLASAGCSAPRGPRKGGPAPVDRKAKASAMPDSPAEVKTQPRSTPPSMPPPPPAASQGATRPPSFTPHTHREDGPATLPHGRFHGCLKWSMVCLLMNGSSHSPTAINGAPCTPNGFSNGPATSSTASLSTQHLPPACGARQLSKLKRFLTTLQQFGSDISPEIGERVRTLVLGLVNSTLTIEEFHSKLQEATNFPLRPFVIPFLKANLPLLQRELLHCARLAKQTPAQYLAQHEQLLLDASASSPIDSSELLLEVNENGKRRTPDRTKENGSDRDPLHPEHLSKRPCTLNPAQRYSPSNGPPQPTPPPHYRLEDIAMAHHFRDAYRHPDPRELRERHRPLVVPGSRQEEVIDHKLTEREWAEEWKHLNNLLNCIMDMVEKTRRSLTVLRRCQEADREELNHWARRYSDAEDTKKGPAPAAARPRSSSAGPEGPQLDVPREFLPRTLTGYVPEDIWRKAEEAVNEVKRQAMSELQKAVSDAERKAHELITTERAKMERALAEAKRQASEDALTVINQQEDSSESCWNCGRKASETCSGCNAARYCGSFCQHRDWEKHHHVCGQSLQGPTAVVADPVPGPPEAAHSLGPSLPVGAASPSEAGSAGPSRPGSPSPPGPLDTVPR

SEQ ID NO: 777111 - protein, 607 aa, Homo sapiens
RAEDTQLVAGRASAFQGQRPNSRTPQLAQPLLFPSRLQEVGKGSPGRGLSWAPGWPLRVALLMPASRLRDRAASSASGSTCGSMSQTHPVLESGLLASAGCSAPRGPRKGGPAPVDRKAKASAMPDSPAEVKTQPRSTPPSMPPPPPAASQGATRPPSFTPHTHREDGPATLPHGRFHGCLKWSMVCLLMNGSSHSPTAINGAPCTPNGFSNGPATSSTASLSTQHLPPACGARQLSKLKRFLTTLQQFGSDISPEIGERVRTLVLGLVNSTLTIEEFHSKLQEATNFPLRPFVIPFLKANLPLLQRELLHCARLAKQTPAQYLAQLVPGSRQEEVIDHKLTEREWAEEWKHLNNLLNCIMDMVEKTRRSLTVLRRCQEADREELNHWARRYSDAEDTKKGPAPAAARPRSSSAGPEGPQLDVPREFLPRTLTGYVPEDIWRKAEEAVNEVKRQAMSELQKAVSDAERKAHELITTERAKMERALAEAKRQASEDALTVINQQEDSSESCWNCGRKASETCSGCNAARYCGSFCQHRDWEKHHHVCGQSLQGPTAVVADPVPGPPEAAHSLGPSLPVGAASPSEAGSAGPSRPGSPSPPGPLDTVPR

SEQ ID NO: 777112 - protein, 590 aa, Homo sapiens
MENLVSPQLCVSAPVDRKAKASAMPDSPAEVKTQPRSTPPSMPPPPPAASQGATRPPSFTPHTLMNGSSHSPTAINGAPCTPNGFSNGPATSSTASLSTQHLPPACGARQLSKLKRFLTTLQQFGSDISPEIGERVRTLVLGLVNSTLTIEEFHSKLQEATNFPLRPFVIPFLKANLPLLQRELLHCARLAKQTPAQYLAQHEQLLLDASASSPIDSSELLLEVNENGKRRTPDRTKENGSDRDPLHPEHLSKRPCTLNPAQRYSPSNGPPQPTPPPHYRLEDIAMAHHFRDAYRHPDPRELRERHRPLVVPGSRQEEVIDHKLTEREWAEEWKHLNNLLNCIMDMVEKTRRSLTVLRRCQEADREELNHWARRYSDAEDTKKGPAPAAARPRSSSAGPEGPQLDVPREFLPRTLTGYVPEDIWRKAEEAVNEVKRQAMSELQKAVSDAERKAHELITTERAKMERALAEAKRQASEDALTVINQQEDSSESCWNCGRKASETCSGCNAARYCGSFCQHRDWEKHHHVCGQSLQGPTAVVADPVPGPPEAAHSLGPSLPVGAASPSEAGSAGPSRPGSPSPPGPLDTVPR

SEQ ID NO: 777113 - protein, 690 aa, Homo sapiens; identical to SEQ ID NO: 777107

SEQ ID NO: 777114 - protein, 108 aa, Homo sapiens
MEGTQSPSPGGRHEKGPQIPGLLSARLLKGAITIPTQFQQNKNEGSGALGICLGCTPTLTICLPDIPPLLLHLLKEERNSPSSLPSTGNPSCTSPHSTCPGRLHAMPP

SEQ ID NO: 777115 - protein, 321 aa, Homo sapiens
MATGGQQKENTLLHLFAGGCGGTVGAIFTCPLEVIKTRLQSSRLALRTVYYPQVHLGTISGAGMVRPTSVTPGLFQVLKSILEKEGPKSLFRGLGPNLVGVAPSRAVYFACYSKAKEQFNGIFVPNSNIVHIFSAGSAAFITNSLMNPIWMVKTRMQLEQKVRGSKQMNTLQCARYVYQTEGIRGFYRGLTASYAGISETIICFAIYESLKKYLKEAPLASSANGTEKNSTSFFGLMAAAALSKGCASCIAYPHEVIRTRLREEGTKYKSFVQTARLVFREEGYLAFYRGLFAQLIRQIPNTAIVLSTYELIVYLLEDRTQ

SEQ ID NO: 777116 - protein, 321 aa, Homo sapiens; identical to SEQ ID NO: 777115

SEQ ID NO: 777117 - protein, 321 aa, Homo sapiens; identical to SEQ ID NO: 777115

SEQ ID NO: 777118 - protein, 335 aa, Homo sapiens
KIKCFLSKKRAGAAMATGGQQKENTLLHLFAGGCGGTVGAIFTCPLEVIKTRLQSSRLALRTVYYPQVHLGTISGAGMVRPTSVTPGLFQVLKSILEKEGPKSLFRGLGPNLVGVAPSRAVYFACYSKAKEQFNGIFVPNSNIVHIFSAGSAAFITNSLMNPIWMVKTRMQLEQKVRGSKQMNTLQCARYVYQTEGIRGFYRGLTASYAGISETIICFAIYESLKKYLKEAPLASSANGTEKNSTSFFGLMAAAALSKGCASCIAYPHEVIRTRLREEGTKYKSFVQTARLVFREEGYLAFYRGLFAQLIRQIPNTAIVLSTYELIVYLLEDRTQ

SEQ ID NO: 777119 - protein, 321 aa, Homo sapiens; identical to SEQ ID NO: 777115

SEQ ID NO: 777120 - protein, 154 aa, Homo sapiens [sequence omitted]

SEQ ID NO: 777121 - protein, 295 aa, Homo sapiens
MATGGQQKENTLLHLFAGGCGGTVGAIFTCPLEVIKTRLQSSRLALRTVYYPQVHLGTISGAGMVRPTSVTPGLFQVLKAVYFACYSKAKEQFNGIFVPNSNIVHIFSAGSAAFITNSLMNPIWMVKTRMQLEQKVRGSKQMNTLQCARYVYQTEGIRGFYRGLTASYAGISETIICFAIYESLKKYLKEAPLASSANGTEKNSTSFFGLMAAAALSKGCASCIAYPHEVIRTRLREEGTKYKSFVQTARLVFREEGYLAFYRGLFAQLIRQIPNTAIVLSTYELIVYLLEDRTQ

SEQ ID NO: 777122 - protein, 160 aa, Homo sapiens
ELATVHSCPLQCARYVYQTEGIRGFYRGLTASYAGISETIICFAIYESLKKYLKEAPLASSANGTEKNSTSFFGLMAAAALSKGCASCIAYPHEVIRTRLREEGTKYKSFVQTARLVFREEGYLAFYRGLFAQLIRQIPNTAIVLSTYELIVYLLEDRTQ

SEQ ID NO: 777123 - protein, 250 aa, Homo sapiens
KGGTRALLEAIRVHPDVRAVGVEPHFFDRNYEKGLEWYRNVMPKTLDGQITMEKTPSYFVTNEAPKRIHSMAKDIKLIVVVRNPVTRAISDYTQTLSKKPEIPTFEVLAFKNRTLGLIDASWSAIRIGIYALHLENWLQYFPLSQILFVSGERLIVDPAGEMAKVQDFLGLKRVVTEKHFYFNKTKGFPCLKKPEDSSAPRCLGKSKGRTHPRIDPDVIHRLRKFYKPFNLMFYQMTGQDFQWEQEEGDK

SEQ ID NO: 777124 - protein, 209 aa, Homo sapiens
MPKTLDGQITMEKTPSYFVTNEAPKRIHSMAKDIKLIVVVRNPVTRAISDYTQTLSKKPEIPTFEVLAFKNRTLGLIDASWSAIRIGIYALHLENWLQYFPLSQILFVSGERLIVDPAGEMAKVQDFLGLKRVVTEKHFYFNKTKGFPCLKKPEDSSAPRCLGKSKGRTHPRIDPDVIHRLRKFYKPFNLMFYQMTGQDFQWEQEEGDK

SEQ ID NO: 777125 - protein, 554 aa, Homo sapiens
RYEAGVNRPRMQSHAADNENNIASNQSRSPPAVVEEKWKPQAQRNSANNTTTSGLTPNSMIPEKERQNIAERLLRVMCADLGALSVVSGKEFLKLAQTLVDSGARYGAFSVTEILGNFNTLALKHLPRMYNQVKVKVTCALGSNACLGIGVTCHSQSVGPDSCYILTAYQAEGNHIKSYVLGVKGADIRDSGDLVHHWVQNVLSEFVMSEIRTVYVTDCRVSTSAFSKAGMCLRCSACALNSVVQSVLSKRTLQARSMHEVIELLNVCEDLAGSTGLAKETFGSLEETSPPPCWNSVTDSLLLVHERYEQICEFYSRAKKMNLIQSLNKHLLSNLAAILTPVKQAVIELSNESQPTLQLVLPTYVRLEKLFTAKANDAGTVSKLCHLFLEALKENFKVHPAHKVAMILDPQQKLRPVPPYQHEEIIGKVCELINEVKESWAEEADFEPAAKKPRSAAVENPAAQEDDRLGKNEVYDYLQEPLFQATPDLFQYWSCVTQKHTKLAKLAFWLLAVPAVGARSGCVNMCEQALLIKRRRLLSPEDMNKLMFLKSNML

SEQ ID NO: 777126 - protein, 556 aa, Homo sapiens
IQFQFYNNLLEHMQSHAADNENNIASNQSRSPPAVVEEKWKPQAQRNSANNTTTSGLTPNSMIPEKERQNIAERLLRVMCADLGALSVVSGKEFLKLAQTLVDSGARYGAFSVTEILGNFNTLALKHLPRMYNQVKVKVTCALGSNACLGIGVTCHSQSVGPDSCYILTAYQAEGNHIKSYVLGVKGADIRDSGDLVHHWVQNVLSEFVMSEIRTVYVTDCRVSTSAFSKAGMCLRCSACALNSVVQSVLSKRTLQARSMHEVIELLNVCEDLAGSTGLAKETFGSLEETSPPPCWNSVTDSLLLVHERYEQICEFYSRAKKMNLIQSLNKHLLSNLAAILTPVKQAVIELSNESQPTLQLVLPTYVRLEKLFTAKANDAGTVSKLCHLFLEALKENFKVHPAHKVAMILDPQQKLRPVPPYQHEEIIGKVCELINEVKESWAEEADFEPAAKKPRSAAVENPAAQEDDRLGKNEVYDYLQEPLFQATPDLFQYWSCVTQKHTKLAKLAFWLLAVPAVGARSGCVNMCEQALLIKRRRLLSPEDMNKLMFLKSNML

SEQ ID NO: 777127 - protein, 78 aa, Homo sapiens
LCALQGEPGVCKMCLFLFVVYTFPSLALHGLFIFKSANLQPQTSWGPEAVNPSSLPCDPQSASCSHFHSSSAYIFNIL

SEQ ID NO: 777128 - protein, 114 aa, Homo sapiens
MFTSEKGVVEEWLSEFKTLPETSLPNYATNLKDKSSLVSSLYKVIQEPQSELLEPVCHQLFEFYRSGEEQLLQFTLQFLPELIWCYLAVSASRNVHSSGCIEALLLGVYNLVCI

SEQ ID NO: 777129 - protein, 102 aa, Homo sapiens
GRVPGRACQRGWRQWWLSRLGCQSVRGGGRWLTGTRSARKKGSRWCCYSGGSRAASVAVAESLTSRGPAGGAPAAALVEGLEQMWKNVYFRERGCGGMVVRV

SEQ ID NO: 777130 - protein, 240 aa, Homo sapiens
MFTSEKGVVEEWLSEFKTLPETSLPNYATNLKDKSSLVSSLYKVIQEPQSELLEPVCHQLFEFYRSGEEQLLQFTLQFLPELIWCYLAVSASRNVHSSGCIEALLLGVYNLEIVDKQGHTKVLSFTIPSLSKPSVYHEPSSIGSMALTESALSQHGLSKVVYSGPHPQREMLTAQNRFEVLTFLLLCYNAALTYMPSVSLQSLCQICSRICVCGYPRQHVRQYKGISSRIPVSSGFMVQC

SEQ ID NO: 777131 - protein, 101 aa, Homo sapiens
MEGCLRIEEALTLGGACLFAGLAFLWAAFAQHFSAADSPGTEFTPATTTSRLLHVLYVCSCSLVAEKDDFSSPHSHSLLLVSLPEPHFELSEGLRLAFRGS

SEQ ID NO: 777132 - protein, 66 aa, Homo sapiens
MAPLVAEGPLAPAAVAAGSKTEERHLLHHGHRSPPFHSTRDPAHCHCHHSQDKDLIQGQAFSAPCA

SEQ ID NO: 777133 - protein, 54 aa, Homo sapiens
RDVKKGSEPCSPLGDSPPSREQHVERLSVGSCLHGIKEARVAENKKSGWKHRET

SEQ ID NO: 777134 - protein, 177 aa, Homo sapiens
SAHQGSTRELESDYYLGGYDIDSEYPPPHEEEFLSQDQLPPPLPEDFPDQYEALPPSQPVSLASTLSPDCRRRPQFHPSQYLPPHPFPNETDLVGPPASCEFSTFAVSMNQGTEPTGPADSVSLSLHNSRGTSSSDVSANCGFDDSEVAMSDYESVGELSLASLHIPFVETQHQTQV

SEQ ID NO: 777135 - protein, 474 aa, Homo sapiens
MSIQAPPRLLELAGQSLLRDQALSISAMEELPRVLYLPLFMEAFSRRHFQTLTVMVQAWPFTCLPLGSLMKTLHLETLKALLEGLHMLLTQKDRPRRWKLQVLDLRDVDENFWARWPGAWALSCFPETTSKRQTAEDCPRMGEHQPLKVFIDICLKEIPQDECLRYLFQWVYQRRGLVHLCCSKLVNYLTPIKYLRKSLKIIYLNSIQELEIRNMSWPRLIRKLRCYLKEMKNLRKLVFSRCHHYTSDNELQGRLVAKFSSVFLRLEHLQLLKIKLITFFSGHLEQLIRCLQNPLENLELTYGYLLEEDMKCLSQYPSLGYLKHLNLSYVLLFRISLEPLGALLEKIAASLKTLILEGCQIHYSQLSAILPALSRCSQLTTFYFGRNCMSIDALKDLLRHTSGLSKLSLETYPAPEESLNSLVRVNWEIFTPLRAELMCTLREVRQPKRIFIGPTPCPSCGSSPSEELELHLCC

SEQ ID NO: 777136 - protein, 518 aa, Homo sapiens
THSSKKIWIIRRERSAASTPYSVVFLLGIKAKLFLIRDSFPQARLILFCQSTSPSLPLDKDPMPNPRPGKPSAPSLALGPSPGASPSWRAAPKASDLLGARGPGGTFQGRDLRGGAHASSSSLNPMPPSQLQLSTVDAHARTPVLQVHPLESPAMISLTPPTTATGVFSLKARPGLPPGINVASLEWVSREPALLCTFPNPSAPRKDSTLSAVPQSSYPLLANGVCKWPGCEKVFEEPEDFLKHCQADHLLDEKGRAQCLLQREMVQSLEQQLVLEKEKLSAMQAHLAGKMALTKASSVASSDKGSCCIVAAGSQGPVVPAWSGPREAPDSLFAVRRHLWGSHGNSTFPEFLHNMDYFKFHNMRPPFTYATLIRWAILEAPEKQRTLNEIYHWFTRMFAFFRNHPATWKVSSSEVAVTGMASSAIAAQSGQAWVWAHRHIGEERDVGCWWWLLASEVDAHLLPVPGLPQNAIRHNLSLHKCFVRVESEKGAVWTVDELEFRKKRSQRPSRCSNPTPGP

SEQ ID NO: 777137 - protein, 493 aa, Homo sapiens
THSSKKIWIIRRERSAASTPYSVVFLLGIKAKLFLIRDSFPQARLILFCQSTSPSLPLDKDPMPNPRPGKPSAPSLALGPSPGASPSWRAAPKASDLLGARGPGGTFQGRDLRGGAHASSSSLNPMPPSQLQLPTLPLVMVAPSGARLGPLPHLQALLQDRPHFMHQLSTVDAHARTPVLQVHPLESPAMISLTPPTTATGVFSLKARPGLPPGINVASLEWVSREPALLCTFPNPSAPRKDSTLSAVPQSSYPLLANGVCKWPGCEKVFEEPEDFLKHCQADHLLDEKGRAQCLLQREMVQSLEQQLVLEKEKLSAMQAHLAGKMALTKASSVASSDKGSCCIVAAGSQGPVVPAWSGPREAPDSLFAVRRHLWGSHGNSTFPEFLHNMDYFKFHNMRPPFTYATLIRWAILEAPEKQRTLNEIYHWFTRMFAFFRNHPATWKNAIRHNLSLHKCFVRVESEKGAVWTVDELEFRKKRSQRPSRCSNPTPGP

SEQ ID NO: 777138 - protein, 193 aa, Homo sapiens
SLGVHRVYTQQDLLYQNDCVFLHCNLNEQNYHLIHDFTIKQMRQGAFLVNAARGGLVDEKAWAHILKEGRIRGAALDVNESEPFSFARGLLKDAWNLICTPLTACYSQQVSLEMSEAVATEIRQAIISRIPGSLRNCVNKEFFVTSALWSVINQQEIHPELSGATYRYLPGMVGVAPGGLLQPGKTSSLETSQ

SEQ ID NO: 777139 - protein, 62 aa, Homo sapiens
MGHLSHDYPGWHTSLSPNTQYFQVAWREQEDEKDHWVVPASHTQPFQPLRLRANSVICTSLS

SEQ ID NO: 777140 - protein, 89 aa, Homo sapiens
DNAAGMVRDRTKAQARRLHETCSCWDLLRDNAAGDGQKQTQGPSCWDPLRDNAAGMVRDRPKAQARCLHKTCSVTMPLGTVRDRPKAHL

SEQ ID NO: 777141 - protein, 186 aa, Homo sapiens
VAPLQSLSAVTSSDQRRRSKEARTPGTRDTDSVVFEDVAVNFTQEEWALLGPSQKKLYRDVMQETFVNLASIGENWEEKNIEDHKNQGRKLRSHMVERLCERKEGSQFGETISQTPNPKPNKKTFTRVKPYECKKKKKKKKKKKKKKKKKNKKKERGGRAPKRFPPGGRQLKGQPRIFGKKRGPHL

SEQ ID NO: 777142 - protein, 69 aa, Homo sapiens
TSRCAPLWGLLTPEGPQVEEGPQVEVGPVLAAGEVNRTPGHPRVWEMDSVVFEDVAVNFTQIHFLCGSA

SEQ ID NO: 777143 - protein, 170 aa, Homo sapiens
TSRCAPLWGLLTPEGPQVEEGPQVEVGPVLAAGEVNRTPGHPRVWEMDSVVFEDVAVNFTQEEWALLGPSQKKLYRDVMQETFVNLASIGENWEEKNIEDHKNQGRKLRSHMVERLCERKEEMGFCHVAQTGLKLLSSSDPPASASQNTGIIGVSHHAQPKTLNLEEHCK

SEQ ID NO: 777144 - protein, 102 aa, Homo sapiens
NIFVDVVKNISCKSISSLVMCQYHLFNKVLLKCSSKVQLCSRGSEKCAPNMVVGNRAFPLRKELLGLEMKGLGNLPKPSAYSGAERTEFFLCSLVISGWSME

SEQ ID NO: 777145 - protein, 31 aa, Homo sapiens
MLPSTGRSPPPWPAQLSVSHCSPLELTPYTK

SEQ ID NO: 777146 - protein, 141 aa, Homo sapiens
QEPLRRVVGEREEHERPPSEPDFCGDSRRRDSGLDSGLSSAEDSCPHCDQWEHTIEEAPLAPVHPRSCHPVQCRFCLGLFPLHSRCGHLILCSLLSSPSSQFHCALGVLAFSRNPFSVSVPSADTPFRLCLQEPRHLVLSL

SEQ ID NO: 777147 - protein, 42 aa, Homo sapiens
KACVELALLLEPEGYLVEKRSRYRECKQDSRRSWDRTERSEN

SEQ ID NO: 777148 - protein, 118 aa, Homo sapiens
SSLVSGSRTHDVLETLKFTPGSSCPRDKELRTGMSWTVNWSDICPSLHQQTAPRASQVICHRIPCFPRVSERGPQKLSPRWKCRARLLKFCSRIMRTPRKFSAPLHSPKPLHKPPPFV

SEQ ID NO: 777149 - protein, 122 aa, Homo sapiens
LGLQACATITRLIFVFLVEMGFHHVGWAGLKLLTSNDPPVSASKSVGNTGVSHHARPQCHMFNIFCHVVQAGLKFLDSCHPPALASQSAGITGVSYHTRPALEILKFSIVRARFNSLKAPKT

SEQ ID NO: 777150 - protein, 36 aa, Homo sapiens
FSLTRSGTTIRQRMLQTLASIFNYLAFFPPDCQPCN

SEQ ID NO: 777151 - protein, 107 aa, Homo sapiens
YIFFLRLSLALSPSLECSGAISAHCNLADRARLHLKGEKQKTNKQKNTNETKPNQNARDPWQVPASLRLSCSLVKWGHCNCLAGPLQIKECRAIPRSQGLAAAQEEK

SEQ ID NO: 777152 - protein, 72 aa, Homo sapiens
MEYFDTSHVRIRLFSFLSPGVQMALTLGACHSLAQSLSSPSFQAQSLSSPSFQAQSLSSPPFPGSDPLLFLL

SEQ ID NO: 777153 - protein, 226 aa, Homo sapiens
MSDLKCVQDAKGGSFYRDHCPVLGEQNGNRNPGGLQIGDLVNIDLDLEIVQSLQHGHGGWTDGMFETLTTTGTVCGIDEDHDIVVQYPSGNRWTFNPAVLTKANIVRSGDAAQGAEGGTSQFQVGDLVQVCYDLERIKLLQRGHGEWAEAMLPTLGKVGRVQQIYSDSDLKVEVCGTSWTYNPAAVSKVASAGSAISNASGERLSQLLKKLFETQESGDLNEELVK

SEQ ID NO: 777154 - protein, 184 aa, Homo sapiens
MCDTCRQQPIIGIRWKCAECTNYDLCTVCYHGDKHHLRHRFYRITTPGSERVLLESRRKSKKITARGIFAGARVVRGVDWQWEDQDGGNGRRGKVTEIQDWSASSPHSAAYVLWDNGAKNLYRVGFEGMSDLKCVQDAKGGSFYRDHCPVLGEQNGTDPGGCDVVACNFDSTRIVALALVGGGG

SEQ ID NO: 777155 - protein, 100 aa, Homo sapiens
MSWVGQEHQDHFRKFSRESQNMCLLHLCPLATMSQAKKSLGEENPMQLWSVCWAQSWVPHPLPALIPKAAVGHRFPHLTGHLNQRFSTSLVLTCEAGCFF

SEQ ID NO: 777156 - protein, 91 aa, Homo sapiens
STVPRVQTVPRVQTVPRVQTVPRVQTVPRVQTVPKLLAEPDTPHAVCPCSRIILRHLPTAPSIHHTPTLPQSYHFLFEIVFKCGDPPTAVN

SEQ ID NO: 777157 - protein, 116 aa, Homo sapiens
VLALCPQCLSTLSGRPGDYLAQSITCATHLSTPPGGLRLSPPNLPLITAAGTHLHVPPVGLGTGLPSLSQSPSTSAWTAWNPEVSPAIANDITEAISASRGQRTHLATCLTHCCHY

SEQ ID NO: 777158 - protein, 227 aa, Homo sapiens
SGGLEHPFLVNLWYSFQDEEDMFMVVDLLLGGDLRYHLQQNVHFKEETVKLFICELVMALDYLQNQRIIHRDMKPDNILLDEHGHVHITDFNIAAMLPRETQITTMAGTKPYMAPEMFSSRKGAGYSFAVDWWSLGVTAYELLRGRRPYHIRSSTSSKEIVHTFETTVVTYPSAWSQEMVSLLKKLLEPNPDQRFSQLSDVQNFPYMNDINWMQFLQKRLLPRFIPN

SEQ ID NO: 777159 - protein, 47 aa, Homo sapiens
MLTNANVVNLFTKNPRSSKVSCYSLMRIFHCIGISIASTSYIGPRST

SEQ ID NO: 777160 - protein, 65 aa, Homo sapiens
MAQPDGGDRWQIEDYNSVPPSGRRQRRRCLLPVDGSGQAGQGSLESAGPQCFGERGRSQHDVPMC

SEQ ID NO: 777161 - protein, 101 aa, Homo sapiens
VSLASRPSGNRAGATPQGVGLRTAKINRGYRRGVTHRRGAGEGLVGAPGRLRPWLCLWTRRAPRSLGPPRLQLRRLRPETPGRSFSSSRRLLSSEELSAGG

SEQ ID NO: 777162 - protein, 110 aa, Homo sapiens
MAPFQARVSKTNFLKLASSGQWVSGREGGCLYCRLKFNLYLGTVCFIWFWVKGGRCQARLSPFQLLFLKKTKKREKQNNQTPVAQGHAALWAAYMSFLYPTTKRHPWNQR

SEQ ID NO: 777163 - protein, 466 aa, Homo sapiens
MEPWPCSPGGGGGTRARHVIINVGGCRVRLAWAALARCPLARLERLRACRGHDDLLRVCDDYDVSRDEFFFDRSPCAFRAIVALLRAGKLRLLRGPCALAFRDELAYWGIDEARLERCCLRRLRRREEEAAEARAGPTERGAQGSPARALGPRGRLQRGRRRLRDVVDNPHSGLAGKLFACVSVSFVAVTAVGLCLSTMPDIRAEEERGECSPKCRSLFVLETVCVAWFSFEFLLRSLQAESKCAFLRAPLNIIDILALLPFYVSLLLGLAAGPGGTKLLERAGLVLRLLRALRVLYVMRLARHSLGLRSLGLTMRRCAREFGLLLLFLCVAMALFAPLVHLAERELGARRDFSSVPASYWWAVISMTTVGYGDMVPRSLPGQVVALSSILSGILLMAFPVTSIFHTFSRSYSELKEQQQRAASPEPALQEDSTHSATATEDSSQGPDSAGLADDSADALWVRAGR

SEQ ID NO: 777164 - protein, 421 aa, Homo sapiens
MHCSNPKSGVVLATVARGPDACQILTRAPLGQDPPQRTVLGLLTANGQYRRTCGQGITRIRCYSGSENAFPPAGKKALPDCGVQEPPKQGFDIYMDELEQGDRDSCSVREGMAFEDVYEVDTGTLKSDLHFLLDFNTVSPMLVDSSLLSQSEDISSLGTDVINVTEYAEEIYQYLREAEIRHRPKAHYMKKQPDITEGMRTILVDWLVEVGEEYKLRAETLYLAVNFLDRFLSCMSVLRGKLQLVGTAAMLLASKYEEIYPPEVDEFVYITDDTYTKRQLLKMEHLLLKVLAFDLTVPTTNQFLLQYLRRQGVCVRTENLAKYVAELSLLEADPFLKYLPSLIAAAAFCLANYTVNKHFWPETLAAFTGYSLSEIVPCLSELHKAYLDIPHRPQQAIREKYKASKYLCVSLMEPPAVLLLQ

SEQ ID NO: 777165 - protein, 421 aa, Homo sapiens; identical to SEQ ID NO: 777164

SEQ ID NO: 777166 - protein, 278 aa, Homo sapiens
MHCSNPKSGVVLATVARGPDACQILTRAPLGQDPPQRTVLGLLTANGQYRRTCGQGITRIRCYSGSENAFPPAGKKALPDCGVQEPPKQGFDIYMDELEQGDRDSCSVREGMAFEDVYEVDTGTLKSDLHFLLDFNTVSPMLVDSSLLSQSEDISSLGTDVINVTEYAEEIYQYLREAEYVAELSLLEADPFLKYLPSLIAAAAFCLANYTVNKHFWPETLAAFTGYSLSEIVPCLSELHKAYLDIPHRPQQAIREKYKASKYLCVSLMEPPAVLLLQ

SEQ ID NO: 777167 - protein, 421 aa, Homo sapiens; identical to SEQ ID NO: 777164

SEQ ID NO: 777168 - protein, 90 aa, Homo sapiens
MPRLVCSSEILAHCNLCLPGLRDSCASASQIGGTTGVCQHIWLIFVYLVEMRFHHVGQAGLDCLTSGDPPASASQSAGITGVSHCTWPRP

SEQ ID NO: 777169 - protein, 146 aa, Homo sapiens
NGPSVRKLILAPTERLPQMKSVSTRRDPQACPDPPTPAVGPTCVPFLEELLPAASVLCFLLALPCTPRTAPGLTGDTSLWASAANQAAGPSLPSTGGGTRSVGRGPSLLSTGGGTCSVGHGPSLPSTGGGTGCVGPGSSMSEGTAL

SEQ ID NO: 777170 - protein, 95 aa, Homo sapiens
RTLQEDLKRAGEGSAPSPRSYQKPQLGCHAPRATQQFLTTLKAATSAMGGWSRGSLRESASQTLGGAGEAAGKSMGQEVGVPAIISEPSPAPNKH

SEQ ID NO: 777171 - protein, 118 aa, Homo sapiens
SLASAQDISPLLPGHGGGSGGRGLISQAVRLRSACDPDSNSAWGRLWGCPAAGARRNPVLPQQHGTVGPEPCTERFAPDEASCQPRRNPAAHSLPEGEAVNPRCCAAGQSPARARLPP

SEQ ID NO: 777172 - protein, 101 aa, Homo sapiens
YTALYAELRSKQDGKASNSRNDKTEPSLGMMRQGAGVSLRAQCKQRHRRAGWRDVQPERTLPWSRQRVKAGTDEDVSPLKTNKQKKTVSLCHPSWSAMVQS

SEQ ID NO: 777173 - protein, 100 aa, Homo sapiens
RRAGPEGPMSRAAWAVYRGETPGNCELGDSGILQTRLEPAREESGVDDSASELAERAWLLHGLSGRYLTQMRQVHTRGFIWSTFSQEVRMIRELTNFPVD

SEQ ID NO: 777174 - protein, 101 aa, Homo sapiens
DHLSLGIEKEREREKRGREREREREVFFMSLLILLLGRQMHLGDFLQLILQDQQVPVSEDHTPLKKALPLSSLKMVLQQSRVSVYLSSASLCLDCICIPST

SEQ ID NO: 777175 - protein, 104 aa, Homo sapiens
VRGARRVRREGTAVRKGDFLRWLQVGSRRVPRGVWRTCLAVASEGWGIHPPTSTPHRLMVVPSRCWLSPPCFHTIQQGWSPSLALEKVLKAAQGRPHGYGGGSE

SEQ ID NO: 777176 - protein, 160 aa, Homo sapiens
MQPASAKWYDRRDYVFIEFCVEDSKDVNVNFEKSKLTFSCLGGSDNFKHLNEIDLFHCIDPNDSKHKRTDRSILCCLRKGESGQSWPRLTKERAKLNWLSVDFNNWKDWEDDSDEDMSNFDRFSEMMNNMGGDEDVDLPEVDGADDDSQDSDDEKMPDLE

SEQ ID NO: 777177 - protein, 160 aa, Homo sapiens; identical to SEQ ID NO: 777176

SEQ ID NO: 777178 - protein, 160 aa, Homo sapiens; identical to SEQ ID NO: 777176

SEQ ID NO: 777179 - protein, 160 aa, Homo sapiens; identical to SEQ ID NO: 777176

SEQ ID NO: 777180 - protein, 111 aa, Homo sapiens
DAWVADAWVPDRRSRSFRAVHSGARGRARRCRRRLREARRGRDRREKAESPPERSRLPSSSRRQRGPPTSSPVPLPRSQYSIQKREEGSDFVFGKAACFCKVVRSKGLCLH

SEQ ID NO: 777181 - protein, 160 aa, Homo sapiens; identical to SEQ ID NO: 777176

SEQ ID NO: 777182 - protein, 160 aa, Homo sapiens; identical to SEQ ID NO: 777176

SEQ ID NO: 777183 - protein, 160 aa, Homo sapiens; identical to SEQ ID NO: 777176

SEQ ID NO: 777184 - protein, 160 aa, Homo sapiens; identical to SEQ ID NO: 777176

SEQ ID NO: 777185 - protein, 160 aa, Homo sapiens; identical to SEQ ID NO: 777176

SEQ ID NO: 777186 - protein, 113 aa, Homo sapiens
MQPASAKWYDRRDYVFIEFCVEDSKDVNVNFEKSKLTFSCLGGSDNFKHLNEIDLFHCIDPNDSKHKRTDRSILCCLRKGESGQSWPRLTKERAKTGKMIQMKTCLILIVSLR

SEQ ID NO: 777187 - protein, 130 aa, Homo sapiens
MQPASAKWYDRRDYVFIEFCVEDSKDVNVNFEKSKLTFSCLGGSDNFKHLNEIDLFHCIDPNDSKHKRTDRSILCCLRKGESGQSWPRLTKERAKMMNNMGGDEDVDLPEVDGADDDSQDSDDEKMPDLE

SEQ ID NO: 777188 - protein, 165 aa, Homo sapiens
MQPASAKWYDRRDYVFIEFCVEDSKDVNVNFEKSKLTFSCLGGSDNFKHLNEIDLFHCIDPNDSKHKRTDRSILCCLRKGESGQSWPRLTKERAKLNWLSVDFNNWKDWEDDSDEDMSNFDRFSEMMNNMGGDEDVDLPEVDGADDDSQDSDDEKKNNFSARFHN

SEQ ID NO: 777189 - protein, 160 aa, Homo sapiens; identical to SEQ ID NO: 777176

SEQ ID NO: 777190 - protein, 160 aa, Homo sapiens; identical to SEQ ID NO: 777176

SEQ ID NO: 777191 - protein, 160 aa, Homo sapiens; identical to SEQ ID NO: 777176

SEQ ID NO: 777192 - protein, 110 aa, Homo sapiens
MQPASAKWYDRRDYVFIEFCVEDSKDVNVNFEKSKLTFSCLGGSDNFKHLNEIDLFHCIDPNDSKHKRTDRSILCCLRKGESGQSWPRLTKERAKGRFHFPFLKSLIFLF

SEQ ID NO: 777193 - protein, 107 aa, Homo sapiens
DAWVADAWVPDRRSRSFRAVHSGARGRARRCRRRLREARRGRDRREKAESPPERSRLPSSSRRQRGPPTSSPVPLPRSQCSLLLQSGTIEGTMSSLNFVLKTVRMLM

SEQ ID NO: 777194 - protein, 160 aa, Homo sapiens; identical to SEQ ID NO: 777176

SEQ ID NO: 777195 - protein, 160 aa, Homo sapiens; identical to SEQ ID NO: 777176

SEQ ID NO: 777196 - protein, 148 aa, Homo sapiens
MQPASAKWYDRRDYVFIEFCVEDSKDVNVNFEKSKLTFSCLGGSDNFKHLNEIDLFHCIDPNDSKHKRTDRSILCCLRKGESGQSWPRLTKERAKLNWLSVDFNNWKDWEDDSDEDMSNFDRFSEMMNNMGGDEDVDLPEVDGADDSR

SEQ ID NO: 777197 - protein, 139 aa, Homo sapiens
MQPASAKWYDRRDYVFIEFCVEDSKDVNVNFEKSKLTFSCLGGSDNFKHLNEIDLFHCIDPNDSKHKRTDRSILCCLRKGESGQSWPRLTKERAKLNWLSVDFNNWKDWEDDSDEDMSNFDRFSEDSQDSDDEKMPDLE

SEQ ID NO: 777198 - protein, 160 aa, Homo sapiens; identical to SEQ ID NO: 777176

SEQ ID NO: 777199 - protein, 123 aa, Homo sapiens
NKVSYHLNQVPEPCGIMNCHKMWLKVLVVCAVHSGARGRARRCRRRLREARRGRDRREKAESPPERSRLPSSSRRQRGPPTSSPVPLPRSQYSIQKREEGSDFVFGKAACFCKVVRSKGLCLH

SEQ ID NO: 777200 - protein, 236 aa, Homo sapiens
ESSQFGEVFKMMQAEETPKTPLQKSMDRLGKQLTLFSFGIIGLIMLIGWSQGKQLLSMFTIGVSLAVAAIPEGLPIVVMVTLVLGVLRMAKKRVIVKKLPIVETLGCCSVLCSDKTGTLTANEMTVTQLVTSDGLRAEVSGVGYDGQGTVCLLPSKEVIKEFSNVSVGKLVEAGCVANNAVIRKNAVMGQPTEGALMALALKMDLSDIKNSYIRKKEIPFSSEQKWMAVKCSLKTE

SEQ ID NO: 777201 - protein, 568 aa, Homo sapiens
MPSTDLLMLKAFEPYLEILEVYSTKAKNYVNGHCTKYEPWQLIAWSVVWTLLIVWGYEFVFQPESLWSRFKKKCFKLTRKMPIIGRKIQDKLNKTKDDISKNMSFLKVDKEYVKALPSQGLSSSAVLEKLKEYSSMDAFWQEGRASGTVYSGEEKLTELLVKAYGDFAWSNPLHPDIFPGLRKIEAEIVRIACSLFNGGPDSCGCVTSGGTESILMACKAYRDLAFEKGIKTPEIVAPQSAHAAFNKAASYFGMKIVRVPLTKMMEVDVRAMRRAISRNTAMLVCSTPQFPHGVIDPVPEVAKLAVKYKIPLHVDACLGGFLIVFMEKAGYPLEHPFDFRVKGVTSISADTHKYGYAPKGSSLVLYSDKKYRNYQFFVDTDWQGGIYASPTIAGSRPGGISAAAWAALMHFGENGYVEATKQIIKTARFLKSELENIKGIFVFGNPQLSVIALGSRDFDIYRLSNLMTAKGWNLNQLQFPPSIHFCITLLHARKRVAIQFLKDIRESVTQIMKNPKAKTTGMGAIYGMAQTTVDRNMVAELSSVFLDSLYSTDTVTQGSQMNGSPKPH

SEQ ID NO: 777202 - protein, 109 aa, Homo sapiens
YFPKDKECVPCLLRRMFFQHVYLPGGNQFQKSVISSKEAKWQRRSPQGKLISKASFLSSKPFSLVFLGASFQPIEISLDPSQPSIRFEEMAVSLGFFLSFKLILLNQRV

SEQ ID NO: 777203 - protein, 105 aa, Homo sapiens
WFTLGPQQSWADSGWGHCKDFPASLAVDAGCHLRHLPRASPWGLGSCLAWLGGSKTNIPRKMRQKPDHLFGPGFRSHPASLLLHLFLRNTEYQTPSLDGRGPHGL

SEQ ID NO: 777204 - protein, 253 aa, Homo sapiens
GRGISWGCYQGRDCEEGRTLLGQKEHILRRRGPCLPHQALGHQEDPHLQASLAFQGERGPCSSFIMNWHMIISGLIVVVLKVVGMTLFLLYFPQIFNKSNDGFTTTRSYGTVSQIFGSSSPSPNGFITTRSYGTVCPKDWEFYQARCFFLSTSESSWNESRDFCKGKGSTLAIVNTPEKLKFLQDITDAEKYFIGLIYHREEKRWRWINNSVFNGNVTNQNQNFNCATIGLTKTFDAASCDISYRRICEKNAK

SEQ ID NO: 777205 - protein, 104 aa, Homo sapiens
MPAFPLPSTMIVNFLRPPQLCFLYSLWNYESIKPLFFINHPVSGSSLWQREKGLIQPRYSNSSGSFDRVVPLSQDNHSLAHHAEEPLGTVTFLIVWGLSQRVTP

SEQ ID NO: 777206 - protein, 100 aa, Homo sapiens
FPHNCDALSFDIKNAVCRSNIPLNTQLSEMVSHRKDLEKDTKQIRAIFLFEFKMGCKAVETTRNINNPFGPGTANECTVEWWFKKSGKGDESLEDEECSG

SEQ ID NO: 777207 - protein, 56 aa, Homo sapiens
CSPDTWRSPPHPQLEGWLPFGGLQINSHSAVGEAYVSGQAGSMDVASVFVDGGNQL

SEQ ID NO: 777208 - protein, 117 aa, Homo sapiens
FLRWSLTLLPRLECNSTISDHCNLCFSGSSDSRASASQVNGIIGACHHTQLIFLFLVEMGFYRVGQAGLELLTSDDLPASASQSAGIYRREPPCPAPEKHFDEKKTDSENINSGLVT

SEQ ID NO: 777209 - protein, 97 aa, Homo sapiens
PAILSEMEKGMTGRADQEDGNSTRHWELQTPTILSEMEKGMAMADTKCYSTFITGLNGEHDAIKPLDKNTGKFVWPGVGRKVLRHDTKSMIHKRLTN

SEQ ID NO: 777210 - protein, 103 aa, Homo sapiens
EKEEEDASGSVWLTEPRLLTPGPSAGRDLAGALGAFELLSFFISDFQHCIFQVPWWAFLCVLLSICCFLDLSVVFIIFGRFLAITQMSFSTTASSSSCWTVAL

SEQ ID NO: 777211 - protein, 397 aa, Homo sapiens
MFFGGEGSLTYTLGIRGNEPVYTSTQEDCINSCCSTKNISGDKACNLMIFDTRKTARQPNCYLFFCPNEEACPLKPAKGLMSYRIITDFPSLTRNLPSQELPQEDSLLHGQFSQAVTPLAHHHTDYSKPTDISWRDTLSQKFGSSDHLEKLFKMDEASAQLLAYKEKGHSQSSQFSSDQEIAHLLPENVSALPATVAVASPHTTSATPKPATLLPTNASVTPSGTSQPQLATTAPPVTTVTSQPPTTLISTVFTRAAATLQAMATTAVLTTTFQAPTDSKGSLETIPFTEISNLTLNTGNVYNPTALSMSNVESSTMNKTASWEGREASPGSSSQGSVPENQYGLPFEKWLLIGSLLFGVLFLVIGLVLLGRILSESLRRKRYSRLDYLINGIYVDI

SEQ ID NO: 777212 - protein, 431 aa, Homo sapiens
MFFGGEGSLTYTLVIICFLTLRLSASQNCLKKSLEDVVIDIQSSLSKGIRGNEPVYTSTQEDCINSCCSTKNISGDKACNLMIFDTRKTARQPNCYLFFCPNEEACPLKPAKGLMSYRIITDFPSLTRNLPSQELPQEDSLLHGQFSQAVTPLAHHHTDYSKPTDISWRDTLSQKFGSSDHLEKLFKMDEASAQLLAYKEKGHSQSSQFSSDQEIAHLLPENVSALPATVAVASPHTTSATPKPATLLPTNASVTPSGTSQPQLATTAPPVTTVTSQPPTTLISTVFTRAAATLQAMATTAVLTTTFQAPTDSKGSLETIPFTEISNLTLNTGNVYNPTALSMSNVESSTMNKTASWEGREASPGSSSQGSVPENQYGLPFEKWLLIGSLLFGVLFLVIGLVLLGRILSESLRRKRYSRLDYLINGIYVDI

SEQ ID NO: 777213 - protein, 246 aa, Homo sapiens
SGTILKAAQLLAYKEKGHSQSSQFSSDQEIAHLLPENVSALPATVAVASPHTTSATPKPATLLPTNASVTPSGTSQPQLATTAPPVTTVTSQPPTTLISTVFTRAAATLQAMATTAVLTTTFQAPTDSKGSLETIPFTEISNLTLNTGNVYNPTALSMSNVESSTMNKTASWEGREASPGSSSQGSVPENQYGLPFEKWLLIGSLLFGVLFLVIGLVLLGRILSESLRRKRYSRLDYLINGIYVDI

SEQ ID NO: 777214 - protein, 111 aa, Homo sapiens
GRANVAGKQLRVAGQERALPPRQTCRRCDGSRNLLTTKPARPVRELRSIRCGPRRDPRADSPVLPAGATELSSHLDGSRGAGVLSTPERNLIICAAFLKQTKTRGRIILDL

SEQ ID NO: 777215 - protein, 431 aa, Homo sapiens; identical to SEQ ID NO: 777212

SEQ ID NO: 777216 - protein, 365 aa, Homo sapiens
MLMKPFIAGDKACNLMIFDTRKTARQPNCYLFFCPNEEACPLKPAKGLMSYRIITDFPSLTRNLPSQELPQEDSLLHGQFSQAVTPLAHHHTDYSKPTDISWRDTLSQKFGSSDHLEKLFKMDEASAQLLAYKEKGHSQSSQFSSDQEIAHLLPENVSALPATVAVASPHTTSATPKPATLLPTNASVTPSGTSQPQLATTAPPVTTVTSQPPTTLISTVFTRAAATLQAMATTAVLTTTFQAPTDSKGSLETIPFTEISNLTLNTGNVYNPTALSMSNVESSTMNKTASWEGREASPGSSSQGSVPENQYGLPFEKWLLIGSLLFGVLFLVIGLVLLGRILSESLRRKRYSRLDYLINGIYVDI

SEQ ID NO: 777217 - protein, 108 aa, Homo sapiens
DGSRNLLTTKPARPVRELRSIRCGPRRDPRADSPVLPAGATELSSHLDGSRGAGVLSTPGKGVSPIPTPDRPQATSLPAERVGPLLSRGRGSFTHTRASKGPAGANKG

SEQ ID NO: 777218 - protein, 106 aa, Homo sapiens
LEDTRRGFPEKILNESLRQRFPSQALHHIPSAAQCLRASPARKPSPETPPETGSGPGEEASLEGTSSKRAASYLLPSSDTGGRHPPGRFLHPPLLLWVWSHWENKG

SEQ ID NO: 777219 - protein, 62 aa, Homo sapiens
KSKSCVWQMVCLWMEILPPHSQEMEADITFNTGLLGNGVGSEARIYTRKFQIDGWLSLPFWK

SEQ ID NO: 777220 - protein, 181 aa, Homo sapiens
DQWKRALLVAKRTLGGKMAAAGEGTPSSRGPRRDPPRRPPRNGYGVYVYPNSFFRYEGEWKAGRKHGARDSCNLTMAVITKGRCGRTEITGDGRGTWAWSRRHLLWTRCTAKSPSTGYGVQESTKPAECPETGGLPGEWGKGNEDNGGHEMEQRPRTPPGQPRHRTGQITPKRDKTTPPAP

SEQ ID NO: 777221 - protein, 104 aa, Homo sapiens
ETDSRSVTQARVQWCDLSSVQPLPLGFKRFSCLSLPCSWDYRSPPTCPADFSVLVEMRFYHVNQVGVELTSSDLPTLASQSAGITGVSHHAQPGSPFLWPNTIP

SEQ ID NO: 777222 - protein, 369 aa, Homo sapiens
MYGKGKSNSSAVPSDSQAREKLALYVYEYLLHVGAQKSAQTFLSEIRWEKNITLGEPPGFLHSWWCVFWDLYCAAPERRETCEHSSEAKAFHDYSAAAAPSPVLGNIPPGDGMPVGPVPPGFFQPFMSPRYPGGPRPPLRIPNQALGGVPGSQPLLPSGMDPTRQQGHPNMGGPMQRMTPPRGMVPLGPQSDPWLSLQNYGGAMRPPLNALGGPGMPGMNMGPGGGRPWPNPTNANSIPYSSASPGNYVGPPGGGGPPGTPIMPSPADSTNSGDNMYTLMNAVPPGPNRPNFPMGPGSDGPMGGLGGMESHHMNGSLGSGDMDSISKNSPNNMSLSNQPGTPRDDGEMGGNFLNPFQSESYSPSMTMSV

SEQ ID NO: 777223 - protein, 331 aa, Homo sapiens
MYGKGKSNSSAVPSDSQAREKLALYVYEYLLHVGAQKSAQTFLSEIRWEKNITLGEPPGFLHSWWCVFWDLYCAAPERRETCEHSSEAKAFHDYPFMSPRYPGGPRPPLRIPNQALGGVPGSQPLLPSGMDPTRQQGHPNMGGPMQRMTPPRGMVPLGPQNYGGAMRPPLNALGGPGMPGMNMGPGGGRPWPNPTNANSIPYSSASPGNYVGPPGGGGPPGTPIMPSPADSTNSGDNMYTLMNAVPPGPNRPNFPMGPGSDGPMGGLGGMESHHMNGSLGSGDMDSISKNSPNNMSLSNQPGTPRDDGEMGGNFLNPFQSESYSPSMTMSV

SEQ ID NO: 777224 - protein, 341 aa, Homo sapiens
MYGKGKSNSSAVPSDSQAREKLALYVYEYLLHVGAQKSAQTFLSEIRWEKNITLGEPPGFLHSWWCVFWDLYCAAPERRETCEHSSEAKAFHDYSAAAAPSPVLGNIPPGDGMPVGPVPPGFFQALGGVPGSQPLLPSGMDPTRQQGHPNMGGPMQRMTPPRGMVPLGPQNYGGAMRPPLNALGGPGMPGMNMGPGGGRPWPNPTNANSIPYSSASPGNYVGPPGGGGPPGTPIMPSPADSTNSGDNMYTLMNAVPPGPNRPNFPMGPGSDGPMGGLGGMESHHMNGSLGSGDMDSISKNSPNNMSLSNQPGTPRDDGEMGGNFLNPFQSESYSPSMTMSV

SEQ ID NO: 777225 - protein, 311 aa, Homo sapiens
MYGKGKSNSSAVPSDSQAREKLALYVYEYLLHVGAQKSAQTFLSEIRWEKNITLGEPPGFLHSWWCVFWDLYCAAPERRETCEHSSEAKAFHDYALGGVPGSQPLLPSGMDPTRQQGHPNMGGPMQRMTPPRGMVPLGPQNYGGAMRPPLNALGGPGMPGMNMGPGGGRPWPNPTNANSIPYSSASPGNYVGPPGGGGPPGTPIMPSPADSTNSGDNMYTLMNAVPPGPNRPNFPMGPGSDGPMGGLGGMESHHMNGSLGSGDMDSISKNSPNNMSLSNQPGTPRDDGEMGGNFLNPFQSESYSPSMTMSV

SEQ ID NO: 777226 - protein, 313 aa, Homo sapiens
MYGKGKSNSSAVPSDSQAREKLALYVYEYLLHVGAQKSAQTFLSEIRWEKNITLGEPPGFLHSWWCVFWDLYCAAPERRETCEHSSEAPPLRIPNQALGGVPGSQPLLPSGMDPTRQQGHPNMGGPMQRMTPPRGMVPLGPQNYGGAMRPPLNALGGPGMPGMNMGPGGGRPWPNPTNANSIPYSSASPGNYVGPPGGGGPPGTPIMPSPADSTNSGDNMYTLMNAVPPGPNRPNFPMGPGSDGPMGGLGGMESHHMNGSLGSGDMDSISKNSPNNMSLSNQPGTPRDDGEMGGNFLNPFQSESYSPSMTMSV

SEQ ID NO: 777227 - protein, 134 aa, Homo sapiens
MYGKGKSNSSAVPSDSQAREKLALYVYEYLLHVGAQKSAQTFLSEIRWEKNITLGEPPGFLHSWWCVFWDLYCAAPERRETCEHSSEAKAFHDYSAAAAPSPVLGVLQEVEGHQEHPSCLVQQIQPTLVITCIL

SEQ ID NO: 777228 - protein, 107 aa, Homo sapiens
MPSPADSTNSGDNMYTLMNAVPPGPNRPNFPMGPGSDGPMGGLGGMESHHMNGSLGSGDMDSISKNSPNNMSLSNQPGTPRDDGEMGGNFLNPFQSESYSPSMTMSV

SEQ ID NO: 777229 - protein, 134 aa, Homo sapiens; identical to SEQ ID NO: 777227

SEQ ID NO: 777230 - protein, 361 aa, Homo sapiens
MYGKGKSNSSAVPSDSQAREKLALYVYEYLLHVGAQKSAQTFLSEIRWEKNITLGEPPGFLHSWWCVFWDLYCAAPERRETCEHSSEAKAFHDYSAAAAPSPVLGNIPPGDGMPVGPVPPGFFQPFMSPRYPGGPRPPLRIPNQALGGVPGSQPLLPSGMDPTRQQGHPNMGGPMQRMTPPRGMVPLGPQNYGGAMRPPLNALGGPGMPGMNMGPGGGRPWPNPTNANSIPYSSASPGNYVGPPGGGGPPGTPIMPSPADSTNSGDNMYTLMNAVPPGPNRPNFPMGPGSDGPMGGLGGMESHHMNGSLGSGDMDSISKNSPNNMSLSNQPGTPRDDGEMGGNFLNPFQSESYSPSMTMSV

SEQ ID NO: 777231 - protein, 369 aa, Homo sapiens; identical to SEQ ID NO: 777222

SEQ ID NO: 777232 - protein, 357 aa, Homo sapiens
MLVIPSALMYSFVLYWRLALYVYEYLLHVGAQKSAQTFLSEIRWEKNITLGEPPGFLHSWWCVFWDLYCAAPERRETCEHSSEAKAFHDYSAAAAPSPVLGNIPPGDGMPVGPVPPGFFQPFMSPRYPGGPRPPLRIPNQALGGVPGSQPLLPSGMDPTRQQGHPNMGGPMQRMTPPRGMVPLGPQNYGGAMRPPLNALGGPGMPGMNMGPGGGRPWPNPTNANSIPYSSASPGNYVGPPGGGGPPGTPIMPSPADSTNSGDNMYTLMNAVPPGPNRPNFPMGPGSDGPMGGLGGMESHHMNGSLGSGDMDSISKNSPNNMSLSNQPGTPRDDGEMGGNFLNPFQSESYSPSMTMSV

SEQ ID NO: 777233 - protein, 287 aa, Homo sapiens
MRWVLRDVNTHHKHEVFHEYSAAAAPSPVLGNIPPGDGMPVGPVPPGFFQPFMSPRYPGGPRPPLRIPNQALGGVPGSQPLLPSGMDPTRQQGHPNMGGPMQRMTPPRGMVPLGPQNYGGAMRPPLNALGGPGMPGMNMGPGGGRPWPNPTNANSIPYSSASPGNYVGPPGGGGPPGTPIMPSPADSTNSGDNMYTLMNAVPPGPNRPNFPMGPGSDGPMGGLGGMESHHMNGSLGSGDMDSISKNSPNNMSLSNQPGTPRDDGEMGGNFLNPFQSESYSPSMTMSV

SEQ ID NO: 777234 - protein, 361 aa, Homo sapiens; identical to SEQ ID NO: 777230

SEQ ID NO: 777235 - protein, 361 aa, Homo sapiens; identical to SEQ ID NO: 777230

SEQ ID NO: 777236 - protein, 91 aa, Homo sapiens
MYGKGKSNSSAVPSDSQAREKLALYVYEYLLHVGAQKSAQTFLSEIRWEKNITLGEPPGFLHSWWCLLDDLNLLTSWICPPRPPKLLGLQA

SEQ ID NO: 777237 - protein, 88 aa, Homo sapiens
FANGKLLLILQNPALIASCFCNASEQHYLPSLLSFSSMLFSDMTVNPLSVMSLHQITFRDGTHNLSKLLIHKHSSYSRHSGRSGFQPQ

SEQ ID NO: 777238 - protein, 319 aa, Homo sapiens
PGGDRVEPWLEENVFTGQSKIYSYMSPNKCSGMRFPLQEENSVTHHEVKCQGKPLAGIYRKREEKRNAGNAVRSAMKSEEQKIKDARKGPLVPFPNQKSEAAEPPETPPSSCDSNNAAIAKQALKKPIKGKQAPRKKAQGKTQQNRKLTDFYPVRRSSRKSKAELQSEERKRIDELIESGKEEGMKIDLIDGKGRGVIATKQFSRGDFVVEYHGDLIEITDAKKREALYAQDPSTGCYMYYFQYLSKTYCVDATRETNRLGRLINHSKCGNCQTKLHDIDGVPHLILIASRDIAAGEELLYDYGDRSKASIEAHPWLKH

SEQ ID NO: 777239 - protein, 319 aa, Homo sapiens; identical to SEQ ID NO: 777238

SEQ ID NO: 777240 - protein, 319 aa, Homo sapiens; identical to SEQ ID NO: 777238

SEQ ID NO: 777241 - protein, 319 aa, Homo sapiens; identical to SEQ ID NO: 777238

SEQ ID NO: 777242 - protein, 84 aa, Homo sapiens
PGGDRVEPWLEGCCEVSVDNGKRLAQETDHYNPWLCLLSPVEEPGPSPCTPDIQGRGVRKTLPPNGLDGMFPSSCSPNVSTGAH

SEQ ID NO: 777243 - protein, 319 aa, Homo sapiens; identical to SEQ ID NO: 777238

SEQ ID NO: 777244 - protein, 319 aa, Homo sapiens; identical to SEQ ID NO: 777238

SEQ ID NO: 777245 - protein, 319 aa, Homo sapiens; identical to SEQ ID NO: 777238

SEQ ID NO: 777246 - protein, 319 aa, Homo sapiens; identical to SEQ ID NO: 777238

SEQ ID NO: 777247 - protein, 412 aa, Homo sapiens
CVFVCFILQADVISKLNMTDSFAFGSLISAVDPVATIAIFNALHVDPVLNMLVFGESILNDAVSIVLTNTAEGLTRKNMSDVSGWQTFLQALDYFLKMFFGSAALGTLTGLISALVLKHIDLRKTPSLEFGMMIIFAYLPYGLAEGISLSGHHGHPFSGIVMSHYTHHNLSPVTQILMQQTLRTVAFLCETCVFAFLGLSIFSFPHKFEISFVIWCIVLVLFGRAVNIFPLSYLLNFFRDHKITPKMMFIMWFSGLRGAIPYALSLHLDLEPMEKRQLIGTTTIVIVLFTILLLGGSTMPLIRLMDIEDAKAHRRNKKDVNLSKTEKMGNTVESEHLSELTEEEYEAHYIRRQDLKGFVWLDAKYLNPFFTRRLTQEDLHHGRIQMKTLTNKWYEEVRQGPSGSEDDEQELL

SEQ ID NO: 777248 - protein, 420 aa, Homo sapiens
TAISAFVVGGGIYFLGQADVISKLNMTDSFAFGSLISAVDPVATIAIFNALHVDPVLNMLVFGESILNDAVSIVLTNTAEGLTRKNMSDVSGWQTFLQALDYFLKMFFGSAALGTLTGLISALVLKHIDLRKTPSLEFGMMIIFAYLPYGLAEGISLSGHHGHPFSGIVMSHYTHHNLSPVTQILMQQTLRTVAFLCETCVFAFLGLSIFSFPHKFEISFVIWCIVLVLFGRAVNIFPLSYLLNFFRDHKITPKMMFIMWFSGLRGAIPYALSLHLDLEPMEKRQLIGTTTIVIVLFTILLLGGSTMPLIRLMDIEDAKAHRRNKKDVNLSKTEKMGNTVESEHLSELTEEEYEAHYIRRQDLKGFVWLDAKYLNPFFTRRLTQEDLHHGRIQMKTLTNKWYEEVRQGPSGSEDDEQELL

SEQ ID NO: 777249 - protein, 420 aa, Homo sapiens; identical to SEQ ID NO: 777248

SEQ ID NO: 777250 - protein, 420 aa, Homo sapiens; identical to SEQ ID NO: 777248

SEQ ID NO: 777251 - protein, 208 aa, Homo sapiens
TAISAFVVGGGIYFLGQADVISKLNMTDSFAFGSLISAVDPVATIAIFNALHVDPVLNMLVFGESILNDAVSIVLTNTAEGLTRKNMSDVSGWQTFLQALDYFLKMFFGSAALGTLTGLISALVLKHIDLRKTPSLEFGMMIIFAYLPYGLAEGISLSGTIYSCAIPQPLPSCCPRRTGRARGQPPAFESSRCLCSHNSDLSGRAQKS

SEQ ID NO: 777252 - protein, 107 aa, Homo sapiens
SIAAKGEVRLAHGDGLHSAGKLVDQPAQSEDGDSQASAQPEIWAYRVLSAFLLGSSTRCLLPSPANISFLVLRHSLSSSSTWYEHSQESVDEDDFPLLGTFAVYLPG

SEQ ID NO: 777253 - protein, 46 aa, Homo sapiens
MTGTLAASWPWASRGHVPLVKVITSVGQVSRAAKATALPGSINCPL

SEQ ID NO: 777254 - protein, 155 aa, Homo sapiens
KFIPPNYHTPPYLTAEPEVTYHRLRPQDKFLVLATDGLWGTMHRQDVVRIVGEYLTGMHHQQPIAVGGYKVTLGQMHGLLTERRTKMSSVFEDQNAATHLIRHAVGNNEFGTVDHERLSKMLSLPEELARMYRDDITIIVVQFNSHVVGAYQNQE

SEQ ID NO: 777255 - protein, 155 aa, Homo sapiens; identical to SEQ ID NO: 777254

SEQ ID NO: 777256 - protein, 53 aa, Homo sapiens
MGSNETDQRFPILSIISILWETFIRIQIPEPCFRFLNSEFPELSLLNVNCFQA

SEQ ID NO: 777257 - protein, 325 aa, Homo sapiens
MAGKLRKSHIPGVSIWQLVEEIPEGCSTPDFEQKPVTSALPEGKNAVFRAVVCGEPRPEVRWQNSKGDLSDSSKYKISSSPGSKEHVLQINKLTGEDTDLYRCTAVNAYGEAACSVRLTVIEVGFRKNRKRHREPQEDLRKELMDFRKLLKKRGPTVPKKNGWTLKQIMRSWLMTARQEGTNEKICWKVMASATNVAWWAGLERMRRDRGTDGTRKLEDQLPAKKPTRGPQARHASLDSEAETNKRDPKRTRLPGIEKGENQPPRDVNKNNKQQTVANREKASTPHNERVAKTENHTTGRKAPTTNSRPTPRQEEGDHHRKQKEN

SEQ ID NO: 777258 - protein, 102 aa, Homo sapiens
GFQCPVSVASGHKHSWPALACRLAVSQSVQPLSPLPGGSYSPPSAVFCHYPGGRGWSAIQEHLVSSMGKRQHREQDHTKLAGTSKLLSPFPRKPQESFFEFL

SEQ ID NO: 777259 - protein, 56 aa, Homo sapiens
PTGRPPRERGHVCSSLLRAPEGRGFPFPAPLAFAVKSRSPPAARGSLTAQQHPQPG

SEQ ID NO: 777260 - protein, 111 aa, Homo sapiens
YLFKGGANAGATQWLLPWIKSACGDISSLILGHRPLKLSCGRGWKFLFFSANLILLYKMRLVSLPFNLENKFNNNLTFSLPVTKGERLLFAARMNRAEFQRLVGRKLLFIR

SEQ ID NO: 777261 - protein, 1229 aa, Homo sapiens
TIQCGQCLVETIQLSNHLQVPCEWFVQSQKPVDKLEKHMPKYLRQKLRAELKPKTRIFEIQPISGVLDPGEKSNVQVKFMPKEEKFYSQTLVFQIAQSAQKLTLLARGQGLEPRLEFSPSVLDLGPLLLCAPGDEAEVIVKNPCNFPIEFYSLEFDQQYLIEEKILRKLKGYDSYNTLLLPPRNPGEKLPPELYEYFKEIKKSKEEQMRAKYLENLAQENEEEDITSSDQGTSNSTKRTSLSRGISVTSNLEEWHALLVESKTYLEEEEDEESLEKIIFQTDKLQSIDSHSMEEVGEVENNPVSKAIARHLGIDISAEGRLAKNRKGIAIIIHGTPLSGKSANAVSVAKYYNAACLSIDSIVLEAVANSNNIPGIRACELCIRAAIEQSMKEGEELLSDCYRGVVFDGLDTLFARNAAAALLCLLKAIGSREHIYILNMAQDYAAMKAREKAKKEQEERKHKGALEKEKEGLQNMDEEEYDALTEEEKLTFDRGIQQALRERKKREQERLAKEMQEKKLQQELERQKEEDELKRRVKKGKQGPIKEEPPMKKSQAANKQLLCAEFLLCDISLLGTVNRSHHHLSPVSTTPAEGDMIITIILEMRKLECSTVPPLTKVDVKMETIERKISVREQTMSEKEELNKKKRNMGDVSMHGLPLVQDQEDSEGDISKDPDKQLAQKFKTYELTLKDVQNILMYWDRKQGVQLPPAGMEEAPHEPDDQRQVPSGGRRGRKDRERERLEKERLEREEAERERLEKLRALEERSDWEGEGEEDHEEKKEKDLGVPFLNIQTPDFEGLSWKQALESDRLPKGEQAQEEQTSSSKGGKQKMKEKIDQVFESQKDKRHMALNRKVLSGEPAGTISQLSDTDLDNFNGQHSQEKFTRLNHFRWIVPANGEVTLQVHFSSDEFGNFDQTFNFEILGTCCQYQLYCRGICTYPYICQDPKVVFPQRKMDMKTNEVIFKKYVMSTETYYFGPLLCGKSRDKYKSSLFPGNMETLTILNTSLMVVEASFYFQNDVKANTYFLEPNTMVLKPNEKQILNVWAYPTSVGVFEDSIVCCINDNPEPAIFQLSCQGIRPELELEPRQLHFDRLLLHRQESRVVLLRNVTLLPVAWRITSLEHLGDDFTVSLMQGTIPPEAEYGLHLYFQPTKPVNIKKAIRLEVLDAENLLGVVQIENIMVFAEAYDIALDITFPKGAEGGLDFGIVRVTEEAKQPLQLKNRGKYEIAFR

SEQ ID NO: 777262 - protein, 268 aa, Homo sapiens
GAAGPWRGTLREELGTATLGEVLDAENLLGVVQIENIMVFAEAYDIALDITFPKGAEGGLDFGIVRVTEEAKQPLQLKNRGKYEIAFSFSVDSVGISTPNINSMISVQPKKGSLTPTEKPRNVQVFFHAKKEVKIEHQPVLRCQIIEPNISEGGEIIASIPIKFSANAVYSKYNITPSSVINFGALICGTRKSTTFTIENQGVTDFKFALYKLTGESPIHQKKAASHVRHARSRESESFYKTGSSRAAKFSDTIQKEVTTTGQVRVLF

SEQ ID NO: 777263 - protein, 153 aa, Homo sapiens
YGWRNFHPQCLQRCNTPGGFLLHYCLLAVTQGIVVNGLVNISISTVEKRYEMKSSLTGLISSSYDISFCLLSLFVSFFGERGHKPRWLAFAAFMIGLGALVFSLPQFFSGEYKLGSLFEDTCVTTRNSTSCTSSTSSLSNYLYVFILGQLLLG

SEQ ID NO: 777264 - protein, 67 aa, Homo sapiens
NPWVFTKGEVQDHPRTAQLLPCQRGKVRYRGVFGRSPFFCLLLPHPTPSGGNKQASIHELNKKVSLA

SEQ ID NO: 777265 - protein, 288 aa, Homo sapiens [sequence omitted]

SEQ ID NO: 777266 - protein, 244 aa, Homo sapiens
MELLEKMLALTLAKADSPRTALLCSAWLLTASFSAQQHKGSLQVHQTLSVEMDQVLKALSFPKKKAALLSAAILCFLRTALRQSFSSALVALVPSGAQPLPATKDTVLAPLRMSQVRSLVIGLQNLLVQKDPLLSQACVGCLEALLDYLDARSPDIALHVASQPWNRFLLFTLLDAGENSFLRPEILRLMTLLQSMGHLADHSMAQTLQASLEGLPPSTSSGQPPLQDMLCLGGVAVSLSHIRN

SEQ ID NO: 777267 - protein, 229 aa, Homo sapiens
MELLEKMLALTLAKADSPRTALLCSAWLLTASFSAQQHKGSLQVHQTLSVEMDQVLKALSFPKKKAAYSQKDPLLSQACVGCLEALLDYLDARSPDIALHVASQPWNRFLLFTLLDAGENSFLRPEILRLMTLFMRYRSSSVLSHEEVGDVLQGVALADLSTLSNTTLQALHGFFQQLQSMGHLADHSMAQTLQASLEGLPPSTSSGQPPLQDMLCLGGVAVSLSHIRN

SEQ ID NO: 777268 - protein, 298 aa, Homo sapiens
MQLRNVSEQELDSVAMKLLHQVSKLCGKCSPTDVDILQPSFNFLYWSLHQTTPSSQKRAAAVLLSSTGLMELLEKMLALTLAKADSPRTALLCSAWLLTASFSAQQHKGSLQVHQTLSVEMDQVLKALSFPKKKAAYSQKDPLLSQACVGCLEALLDYLDARSPDIALHVASQPWNRFLLFTLLDAGENSFLRPEILRLMTLFMRYRSSSVLSHEEVGDVLQGVALADLSTLSNTTLQALHGFFQQLQSMGHLADHSMAQTLQASLEGLPPSTSSGQPPLQDMLCLGGVAVSLSHIRN

SEQ ID NO: 777269 - protein, 118 aa, Homo sapiens
  misc_feature (116)..(116): Xaa can be any naturally occurring amino acid
ASCLVFPLYLWPFLRKTLSLNGLNCHSLFLPQMFSCLEYWFIFLYLLYFLIVCNVQPNSLLNIAFIHISKAREIFFSIVYHFTCAIPVKQADSGSSEEKQLYNKYPDAVATWVKPXTH

SEQ ID NO: 777270 - protein, 32 aa, Homo sapiens
MGLQACCDPLGKVSPMATCPVPRSCAVRIPGG

SEQ ID NO: 777271 - protein, 72 aa, Homo sapiens
TTVLQRLLQEQLRYGNPSENRSLLAIHQQATGNGPPFPSGSGNPGPQSDVLSPQDHHQQLVAHAARQEPQGQ

SEQ ID NO: 777272 - protein, 149 aa, Homo sapiens
MSFLLPKLTSKKEVDQAIKSTAEKVLVLRFGRDEDPVCLQLDDILSKTSSDLSKMAAIYLVDVDQTAVYTQYFDISYIPSTVFFFNGQHMKVDYGSPDHTKFVGSFKTKQDFIDLIEVIYRGAMRGKLIVQSPIDPKNIPKYDLLYQDI

SEQ ID NO: 777273 - protein, 149 aa, Homo sapiens; identical to SEQ ID NO: 777272

SEQ ID NO: 777274 - protein, 149 aa, Homo sapiens; identical to SEQ ID NO: 777272

SEQ ID NO: 777275 - protein, 131 aa, Homo sapiens
MSFLLPKLTSKKEVDQAIKSTAEKVLVLRFGRDEDPVCLQLDDILSKTSSDLSYFDISYIPSTVFFFNGQHMKVDYGSPDHTKFVGSFKTKQDFIDLIEVIYRGAMRGKLIVQSPIDPKNIPKYDLLYQDI

SEQ ID NO: 777276 - protein, 149 aa, Homo sapiens; identical to SEQ ID NO: 777272

SEQ ID NO: 777277 - protein, 435 aa, Homo sapiens
ERERDRRGEKESKTEDRHSETGREGERETKTETETERKKETDRQTAQAEKESKTEDRHSESRHAERERETETERDRERQRERHARQTEQAGCATSEQRTPHQIAQRASRSARKRGNNEAEQTQEPQNTTDRETRQHTQRPARRATAGAEEEEKSPRSQRGQEKGTQHKHERHDTMRAERRRGREKGAGQEASKRKGKEERRKEEESTGRTRGKRGGAGRRKTRGRDDGEKKREDESRGEEKREKERETSEGAREQRKHERRGERGRGGQASRRGEERSSERTRGQRGNGTAAAGEGRRDERRRAGEKGGSAEDGEWGGTGDRARGGRGSEEEHRGERRRARKTGTHDDNGEERETAVRGGRKGDRENGRRDSGSDEEREQRRGEREEEREKRAEKKRDGGKEGAEGGRREQQGRGRGERGEVGRGDGGREHGGQR

SEQ ID NO: 777278 - protein, 113 aa, Homo sapiens
NNLKQFFSEMLFSSWFVRTTFLQGWARMLCPEQLHLLCQQQPSSLCGKHASPRQHPVDSWPRGLSGSYFGLGRGSANWLLCFSSCEKSFQGSSSDNHHLDLKCKYCHRGLKRD

SEQ ID NO: 777279 - protein, 68 aa, Homo sapiens
PQSPNSAQSKRIVGQIIPAIATTTAAVAGLLGLELYKVVSGPRPRSALPKPLQLRSDRNGTQIQAYVT

SEQ ID NO: 777280 - protein, 113 aa, Homo sapiens
HQPGSHTAHTQNTQLTPGTHSLHPGNTAHTRDTQLTPGTQSSHPGHTAHTQDTLSSHLIQGQLTVEHTAHTRDTAHTQDTLSSHWNTQLTPRTQNSHLGHTQLTPETHTLTPS

SEQ ID NO: 777281 - protein, 177 aa, Homo sapiens
QRIHTGEKLYKCKACSKCFTHSSNLLVHQRIHTGEKPYKCKECGKSFKVSSALTQHERIHTGEKPYKCKECSKAFNCSSSLTKHQRIHTGVKLYKCKACSKSFSHSSCLSVHQITHTGMKPYICKDCGISFNRSSNLRRHQMIHTGEKPYKCKECGKLFNRCSTLTRHKSIHTREFL

SEQ ID NO: 777282 - protein, 103 aa, Homo sapiens
MLSSAFGQDRSLRPEEIEELREAFREFDKDKDGYINCRDLGNCMRTMGYMPTEMELIELSQQINMNLGGHVDFDDFVELMGPKLLAETADMIGVKELRDAFRE

SEQ ID NO: 777283 - protein, 728 aa, Homo sapiens
EAPPLWMVTAPPPGFLLEEFPSQPGRPRSQMVPGQAQPQSPEMLLLPLLLPVLGAGSLNKDPSYSLQVQRQVPVPEGLCVIVSCNLSYPRDGWDESTAAYGYWFKGRTSPKTGAPVATNNQSREVEMSTRDRFQLTGDPGKGSCSLVIRDAQREDEAWYFFRVERGSRVRHSFLSNAFFLKVTALTKKPDVYIPETLEPGQPVTVICVFNWAFKKCPAPSFSWTGAALSPRRTRPSTSHFSVLSFTPSPQDHDTDLTCHVDFSRKGVSAQRTVRLRVAYAPKDLIISISHDNTSALELQGNVIYLEVQKGQFLRLLCAADSQPPATLSWVLQDRVLSSSHPWGPRTLGLELRGVRAGDSGRYTCRAENRLGSQQQALDLSVQYPPENLRVMVSQANRTVLENLGNGTSLPVLEGQSLRLVCVTHSSPPARLSWTRWGQTVGPSQPSDPGVLELPPIQMEHEGEFTCHAQHPLGSQHVSLSLSVHYPPQLLGPSCSWEAEGLHCSCSSQASPAPSLRWWLGEELLEGNSSQGSFEVTPSSAGPWANSSLSLHGGLSSGLRLRCKAWNVHGAQSGSVFQLLPGKLEHGGGLGLGAALGAGVAALLAFCSCLVVFRVKICRKEARKRAAAEQDVPSTLGPISQGHQHECSAGSSQDHPPPGAATYTPGKGEEQELHYASLSFQGLRLWEPADQEAPSTTEYSEIKIHTGQPLRGPGFGLQLEREMSGMVPK

SEQ ID NO: 777284 - protein, 581 aa, Homo sapiens
EAPPLWMVTAPPPGFLLEEFPSQPGRPRSQMVPGQAQPQSPEMLLLPLLLPVLGAGSLNKDPSYSLQVQRQVPVPEGLCVIVSCNLSYPRDGWDESTAAYGYWFKGRTSPKTGAPVATNNQSREVEMSTRDRFQLTGDPGKGSCSLVIRDAQREDEAWYFFRVERGSRVRHSFLSNAFFLKVTALTKKPDVYIPETLEPGQPVTVICVFNWAFKKCPAPSFSWTGAALSPRRTRPSTSHFSVLSFTPSPQDHDTDLTCHVDFSRKGVSAQRTVRLRVAYAPKDLIISISHDNTSALELQGNVIYLEVQKGQFLRLLCAADSQPPATLSWVLQDRVLSSSHPWGPRTLGLELRGVRAGDSGRYTCRAENRLGSQQQALDLSVQYPPENLRVMVSQANRTVLENLGNGTSLPVLEGQSLRLVCVTHSSPPARLSWTRWGQTVGPSQPSDPGVLELPPIQMEHEGEFTCHAQHPLGSQHVSLSLSVHYPPQLLGPSCSWEAEGLHCSCSSQASPAPSLRWWLGEELLEGNSSQGSFEVTPSSAGPWANSSLSLHGGLSSGLRLRCKAWNVHGAQSGSVFQLLPG

SEQ ID NO: 777285 - protein, 116 aa, Homo sapiens
LNWAALCQAHKLRGELLELMQRIELPLSLPAFGSEQNRRDLQKALVSGYFLKVARDTDGTGNYLLLTHKHVAQLSSYCCYRSRRAPARPPPWVLYHNFTISKDNCLSIVSEIQPQM

SEQ ID NO: 777286 - protein, 43 aa, Homo sapiens
MSWGLEMSWQSLEAPRLVNDGTEGIPSLRLYSSCVSKADPALW

SEQ ID NO: 777287 - protein, 224 aa, Homo sapiens
RQTRPLSKASASECPARDVPGQGTPVSTEPRAACSLPQWWRSEEAQDMGPGPPDPTEPPLHVKSEDQPGEEEDDERGADATWDLDLLLTNFSGPEPGGAPQTCALAPSEASGAQYPPPPETLGAYAGGPGLVAGLLGSEDHSGWVRPALRARAPDAFVGPALAPAPAPEPKALALQPVYPGPGAGSSGGYFPRTGLSVPAASGAPYGLLSGYPAMYPAPQYQGH

SEQ ID NO: 777288 - protein, 362 aa, Homo sapiens
MATAETALPSISTLTALGPFPDTQDDFLKWWRSEEAQDMGPGPPDPTEPPLHVKSEDQPGEEEDDERGADATWDLDLLLTNFSGPEPGGAPQTCALAPSEASGAQYPPPPETLGAYAGGPGLVAGLLGSEDHSGWVRPALRARAPDAFVGPALAPAPAPEPKALALQPVYPGPGAGSSGGYFPRTGLSVPAASGAPYGLLSGYPAMYPAPQYQGHFQLFRGLQGPAPGPATSPSFLSCLGPGTVGTGLGGTAEDPGVIAETAPSKRGRRSWARKRQAAHTCAHPGCGKSYTKSSHLKAHLRTHTGEKPYACTWEGCGWRFARSDELTRHYRKHTGQRPFRCQLCPRAFSRSDHLALHMKRHL

SEQ ID NO: 777289 - protein, 69 aa, Homo sapiens
LRGYVLKGRPKCWARNFIGHIKVDPQPLAPFEEAAFVHRGTTSDQSKSLKIYRNYIHWAVWYSTDFFHN

SEQ ID NO: 777290 - protein, 84 aa, Homo sapiens
FALNLKQNKGRNYTFWVAAPCKCIRMQVCEQRHGRQNHRQAAGLLQPPPRCRGAFPAPLRSAAEATPWLSAEEEPPWGTVGSEA

SEQ ID NO: 777291 - protein, 81 aa, Homo sapiens
PMRHLSQVELRCLQLTQASVTLWWLYRSGVFRGSPTPTISLGFAIVGAIGVGLDPITSLDIALVMVTGGSQMPRQIKVGPW

SEQ ID NO: 777292 - protein, 59 aa, Homo sapiens
METSSKGLLTQVTQFWNLLDDLAQSDPEGYEKFIQQQLKEGKQLCAAPEPQLCLQTRIL

SEQ ID NO: 777293 - protein, 118 aa, Homo sapiens
MASWPHLRQQPLWLGSPAGWVHPRPSDGSNQNRWAAVTSTVSSILAATRLGVQALSWTLEVGPHTELCSAPSPPSFIAQTTARDPAPHVPYPALTSSPVQPQHRGLPGGGCGLMLGIS

SEQ ID NO: 777294 - protein, 102 aa, Homo sapiens
VIPALWEAEFTFSPFSQDVPEMTLVTKHLFFPISLPGWCGYLLQVHSVLWWDPYGQGTWSQLNILGQMRMEVNRHSLTLKNLLSNRRAKKQGYNSDLPVSSM

SEQ ID NO: 777295 - protein, 348 aa, Homo sapiens
NDKQRIAVVAFFPENGVSDFQKAQIIGSQRENGWAVGVESDFDFCQTAIKRIFNDSDFTGFLTVEYGTILSSANSINWGRLLPQVVYHASAYLDLVSQGFISFGSPVDVCIPTGNFGNILAAVYAKMMGIPIRKFICASNQNHVLTDFIKTGHYDLRERKLAQTFSPSIDILKSSNLERHLHLMANKDGQLMTELFNRLESQHHFQIEKALVEKLQQDFVADWCSEGECLAAINSTYNTSGYILDPHTAVAKVVADRVQDKTCPVIISSTAHYSKFAPAIMQALKIKEINETSSSQLYLLGSYNALPPLHEALLERTKQQEKMEYQVCAADMNVLKSHVEQLVQNQFI

SEQ ID NO: 777296 - protein, 348 aa, Homo sapiens; identical to SEQ ID NO: 777295

SEQ ID NO: 777297 - protein, 68 aa, Homo sapiens
AECLVQGHATGKRRSLQSQDSASCVSRSPGGMWGLMLAPPLASLTDGHREGRDWGHGNRFGSLSSIPR

SEQ ID NO: 777298 - protein, 141 aa, Homo sapiens
AKWTRELLHLLGEKNQTELDSFLSLAGRTCMDEMTFHILSVPVPQTLGFPIFTLSCLGHPFYWLKSYLCTKSKDSPSFRKSLTVPRRLFPPSSKCPEGWHWIAFAMGFCCRECRPRLLKGRPCIQHAGEMQHLAQALHTQV

SEQ ID NO: 777299 - protein, 68 aa, Homo sapiens
MRYNASVSCAELATQSKNLPETWHALREHQDAAQWPHTPSQLTGTTLSKTLPAASQHLAPGTPAPATP

SEQ ID NO: 777300 - protein, 140 aa, Homo sapiens
MSSYFVNSTFPVTLASGQESFLGHVPLYSSGYADPLRHYPAPYGPGPGQDKGFATSSYYPPAGGGYGRAAPCDYGPAPAFYREKESACALSGADEQPPFHPEPRKSDCAQDKSVFGETEEQKCSTPVYPWMQRMNSCNSE

SEQ ID NO: 777301 - protein, 113 aa, Homo sapiens [sequence omitted]

SEQ ID NO: 777302 - protein, 36 aa, Homo sapiens
MQADTLRSTVTQGQCGEIEEGLEGGGPRSHRGWRQV

SEQ ID NO: 777303 - protein, 281 aa, Homo sapiens
SSLFIYKNSGESYQAPDPGNGSIQRPYQDTVAENKDALEKTQTYLKVHSNLVIPDVELETYIPYSTPTLTPSDTFQTVETLTCLSLERNRLTDYYEPLLKNNSTAYSTRGNRIEISYENLQVTNITRKGSMLPVSCKLPNMGTYQSYLSSSMPAGCVLPVGGNFEILLHYYLLNYAKKCHQSEETMVSMIIANALLGIPKVLYKSKTGKYSFPHTYIRAVHALQTNQPLVSSQTGLESVMGKYQLLTSVLQCLTKILTIDMVITVKRHPQKVHNQDSEDEL

SEQ ID NO: 777304 - protein, 281 aa, Homo sapiens; identical to SEQ ID NO: 777303

SEQ ID NO: 777305 - protein, 217 aa, Homo sapiens
TQAQRRPARAERRQLLCGLRARAPLSANGREARAMEQRLAEFRAARKRAGLAAQPPAASQGAQTPGEKAEAAATLKAAPGWLKRFLVWKPRPASARAQPGLVQEAAQPQGSTSETPWNTAIPLPSCWDQSFLTNITFLKVLLWLVLLGLFVELEFGLAYFVLSLFYWMYVGTRGPEEKKEGEKSAYSVFNPGCEAIQGTLTAEQLERELQLRPLAGR

SEQ ID NO: 777306 - protein, 217 aa, Homo sapiens; identical to SEQ ID NO: 777305

SEQ ID NO: 777307 - protein, 217 aa, Homo sapiens; identical to SEQ ID NO: 777305

SEQ ID NO: 777308 - protein, 178 aa, Homo sapiens
TQAQRRPARAERRQLLCGLRARAPLSANGREARAMEQRLAEFRAARKRAGLAAQPPAASQGAQTPGEKAEAAATLKAAPGWLKRFLVWKPRPASARAQPGLVQMKEYRNSRIFAQWNTLQPSNFRTSPHFQQRGERPVHPQMKGYRNCSIHSQWNTLQLCTYTEIISPGATQLNLFIP

SEQ ID NO: 777309 - protein, 178 aa, Homo sapiens; identical to SEQ ID NO: 777308

SEQ ID NO: 777310 - protein, 195 aa, Homo sapiens
TQAQRRPARAERRQLLCGLRARAPLSANGREARAMEQRLAEFRAARKRAGLAAQPPAASQGAQTPGEKAEAAATLKAAPGWEAAQPQGSTSETPWNTAIPLPSCWDQSFLTNITFLKVLLWLVLLGLFVELEFGLAYFVLSLFYWMYVGTRGPEEKKEGEKSAYSVFNPGCEAIQGTLTAEQLERELQLRPLAGR

SEQ ID NO: 777311 - protein, 217 aa, Homo sapiens; identical to SEQ ID NO: 777305

SEQ ID NO: 777312 - protein, 108 aa, Homo sapiens
TQAQRRPARAERRQLLCGLRARAPLSANGREARAMEQRLAEFRAARKRAGLAAQPPAASQGAQTPGEKAEAAATLKAAPGWLKRFLVWKPRPASARAQPGLVQLKNNV

SEQ ID NO: 777313 - protein, 178 aa, Homo sapiens; identical to SEQ ID NO: 777308

SEQ ID NO: 777314 - protein, 108 aa, Homo sapiens; identical to SEQ ID NO: 777312

SEQ ID NO: 777315 - protein, 123 aa, Homo sapiens
MTVMVVLHGAGGCFKQIIERLKLVPLNQESVEERVAAFRNFSDEIRHNLSEVLLATMNILFTQFKRLKGTSPSSSSRPQRVIEDRDSQLRSQARTLITFAGMIPYRTSGDTNARLVQMEVLMN

SEQ ID NO: 777316 - protein, 78 aa, Homo sapiens
DCCPDGTAALQGGRKGYRLQTTPKSSPHSDYLCWNDTIPNVWGHQCEAGADGGPHELSAMLCGSLGRHTVSTSGTWAH

SEQ ID NO: 777317 - protein, 77 aa, Homo sapiens
FYGRVSFRYKQDKRSTDYTATPKSSPHSDYLCWNDTIPNVWGHQCEAGADGGPHELSAMLCGSLGRHTVSTSGTWAH

SEQ ID NO: 777318 - protein, 73 aa, Homo sapiens
PETLTINHKQKEQKPTTPKSSPHSDYLCWNDTIPNVWGHQCEAGADGGPHELSAMLCGSLGRHTVSTSGTWAH

SEQ ID NO: 777319 - protein, 819 aa, Homo sapiens
MDTEGFGELLQQAEQLAAETEGISELPHVERNLQEIQQAGERLRSRTLTRTSQETADVKASVLLGSRGLDISHISQRLESLSAATTFEPLEPVKDTDIQGFLKNEKDNALLSAIEESRKRTFGMAEEYHRESMLVEWEQVKQRILHTLLASGEDALDFTQESEPSYISDVGPPGRSSLDNIEMAYARQIYIYNEKIVNGHLQPNLVDLCASVAELDDKSISDMWTMVKQMTDVLLTPATDALKNRSSVEVRMEFVRQALAYLEQSYKNYTLVTVFGNLHQAQLGGVPGTYQLVRSFLNIKLPAPLPGLQDGEVEGHPVWALIYYCMRCGDLLAASQVVNRAQHQLGEFKTWFQEYMNSKDRRLSPATENKLRLHYRRALRNNTDPYKRAVYCIIGRCDVTDNQSEVADKTEDYLWLKLNQVCFDDDGTSSPQDRLTLSQFQKQLLEDYGESHFTVNQQPFLYFQVLFLTAQFEAAVAFLFRMERLRCHAVHVALVLFELKLLLKSSGQSAQLLSHEPGDPPCLRRLNFVRLLMLYTRKFESTDPREALQYFYFLRDEKDSQGENMFLRCVSELVIESREFDMILGKLENDGSRKPGVIDKFTSDTKPIINKVASVAENKGLFEEAAKLYDLAKNADKVLELMNKLLSPVVPQISAPQSNKERLKNMALSIAERYRAQGISANKFVDSTFYLLLDLITFFDEYHSGHIDRAFDIIERLKLVPLNQESVEERVAAFRNFSDEIRHNLSEVLLATMNILFTQFKRLKGTSPSSSSRPQRVIEDRDSQLRSQARTLITFAGMIPYRTSGDTNARLVQMEVLMN

SEQ ID NO: 777320 - protein, 494 aa, Homo sapiens
MRCGDLLAASQVVNRAQHQLGEFKTWFQEYMNSKDRRLSPATENKLRLHYRRALRNNTDPYKRAVYCIIGRCDVTDNQSEVADKTEDYLWLKLNQVCFDDDGTSSPQDRLTLSQFQKQLLEDYGESHFTVNQQPFLYFQVLFLTAQFEAAVAFLFRMERLRCHAVHVALVLFELKLLLKSSGQSAQLLSHEPGDPPCLRRLNFVRLLMLYTRKFESTDPREALQYFYFLRDEKDSQGENMFLRCVSELVIESREFDMILGKLENDGSRKPGVIDKFTSDTKPIINKVASVAENKGLFEEAAKLYDLAKNADKVLELMNKLLSPVVPQISAPQSNKERLKNMALSIAERYRAQGISANKFVDSTFYLLLDLITFFDEYHSGHIDRAFDIIERLKLVPLNQESVEERVAAFRNFSDEIRHNLSEVLLATMNILFTQFKRLKGTSPSSSSRPQRVIEDRDSQLRSQARTLITFAGMIPYRTSGDTNARLVQMEVLMN

SEQ ID NO: 777321 - protein, 839 aa, Homo sapiens
LVPVRTVFWMTAVAQGSASPMDTEGFGELLQQAEQLAAETEGISELPHVERNLQEIQQAGERLRSRTLTRTSQETADVKASVLLGSRGLDISHISQRLESLSAATTFEPLEPVKDTDIQGFLKNEKDNALLSAIEESRKRTFGMAEEYHRESMLVEWEQVKQRILHTLLASGEDALDFTQESEPSYISDVGPPGRSSLDNIEMAYARQIYIYNEKIVNGHLQPNLVDLCASVAELDDKSISDMWTMVKQMTDVLLTPATDALKNRSSVEVRMEFVRQALAYLEQSYKNYTLVTVFGNLHQAQLGGVPGTYQLVRSFLNIKLPAPLPGLQDGEVEGHPVWALIYYCMRCGDLLAASQVVNRAQHQLGEFKTWFQEYMNSKDRRLSPATENKLRLHYRRALRNNTDPYKRAVYCIIGRCDVTDNQSEVADKTEDYLWLKLNQVCFDDDGTSSPQDRLTLSQFQKQLLEDYGESHFTVNQQPFLYFQVLFLTAQFEAAVAFLFRMERLRCHAVHVALVLFELKLLLKSSGQSAQLLSHEPGDPPCLRRLNFVRLLMLYTRKFESTDPREALQYFYFLRDEKDSQGENMFLRCVSELVIESREFDMILGKLENDGSRKPGVIDKFTSDTKPIINKVASVAENKGLFEEAAKLYDLAKNADKVLELMNKLLSPVVPQISAPQSNKERLKNMALSIAERYRAQGISANKFVDSTFYLLLDLITFFDEYHSGHIDRAFDIIERLKLVPLNQESVEERVAAFRNFSDEIRHNLSEVLLATMNILFTQFKRLKGTSPSSSSRPQRVIEDRDSQLRSQARTLITFAGMIPYRTSGDTNARLVQMEVLMN

SEQ ID NO: 777322 - protein, 774 aa, Homo sapiens
VRGSREGAQEYGDSASVLLGSRGLDISHISQRLESLSAATTFEPLEPVKDTDIQGFLKNEKDNALLSAIEESRKRTFGMAEEYHRESMLVEWEQVKQRILHTLLASGEDALDFTQESEPSYISDVGPPGRSSLDNIEMAYARQIYIYNEKIVNGHLQPNLVDLCASVAELDDKSISDMWTMVKQMTDVLLTPATDALKNRSSVEVRMEFVRQALAYLEQSYKNYTLVTVFGNLHQAQLGGVPGTYQLVRSFLNIKLPAPLPGLQDGEVEGHPVWALIYYCMRCGDLLAASQVVNRAQHQLGEFKTWFQEYMNSKDRRLSPATENKLRLHYRRALRNNTDPYKRAVYCIIGRCDVTDNQSEVADKTEDYLWLKLNQVCFDDDGTSSPQDRLTLSQFQKQLLEDYGESHFTVNQQPFLYFQVLFLTAQFEAAVAFLFRMERLRCHAVHVALVLFELKLLLKSSGQSAQLLSHEPGDPPCLRRLNFVRLLMLYTRKFESTDPREALQYFYFLRDEKDSQGENMFLRCVSELVIESREFDMILGKLENDGSRKPGVIDKFTSDTKPIINKVASVAENKGLFEEAAKLYDLAKNADKVLELMNKLLSPVVPQISAPQSNKERLKNMALSIAERYRAQGISANKFVDSTFYLLLDLITFFDEYHSGHIDRAFDIIERLKLVPLNQESVEERVAAFRNFSDEIRHNLSEVLLATMNILFTQFKRLKGTSPSSSSRPQRVIEDRDSQLRSQARTLITFAGMIPYRTSGDTNARLVQMEVLMN

SEQ ID NO: 777323 - protein, 730 aa, Homo sapiens
MGDDSIIHALGFLKNEKDNALLSAIEESRKRTFGMAEEYHRESMLVEWEQVKQRILHTLLASGEDALDFTQESEPSYISDVGPPGRSSLDNIEMAYARQIYIYNEKIVNGHLQPNLVDLCASVAELDDKSISDMWTMVKQMTDVLLTPATDALKNRSSVEVRMEFVRQALAYLEQSYKNYTLVTVFGNLHQAQLGGVPGTYQLVRSFLNIKLPAPLPGLQDGEVEGHPVWALIYYCMRCGDLLAASQVVNRAQHQLGEFKTWFQEYMNSKDRRLSPATENKLRLHYRRALRNNTDPYKRAVYCIIGRCDVTDNQSEVADKTEDYLWLKLNQVCFDDDGTSSPQDRLTLSQFQKQLLEDYGESHFTVNQQPFLYFQVLFLTAQFEAAVAFLFRMERLRCHAVHVALVLFELKLLLKSSGQSAQLLSHEPGDPPCLRRLNFVRLLMLYTRKFESTDPREALQYFYFLRDEKDSQGENMFLRCVSELVIESREFDMILGKLENDGSRKPGVIDKFTSDTKPIINKVASVAENKGLFEEAAKLYDLAKNADKVLELMNKLLSPVVPQISAPQSNKERLKNMALSIAERYRAQGISANKFVDSTFYLLLDLITFFDEYHSGHIDRAFDIIERLKLVPLNQESVEERVAAFRNFSDEIRHNLSEVLLATMNILFTQFKRLKGTSPSSSSRPQRVIEDRDSQLRSQARTLITFAGMIPYRTSGDTNARLVQMEVLMN

SEQ ID NO: 777324 - protein, 473 aa, Homo sapiens
YYNLGPSNRTSNDQNGLSPATENKLRLHYRRALRNNTDPYKRAVYCIIGRCDVTDNQSEVADKTEDYLWLKLNQVCFDDDGTSSPQDRLTLSQFQKQLLEDYGESHFTVNQQPFLYFQVLFLTAQFEAAVAFLFRMERLRCHAVHVALVLFELKLLLKSSGQSAQLLSHEPGDPPCLRRLNFVRLLMLYTRKFESTDPREALQYFYFLRDEKDSQGENMFLRCVSELVIESREFDMILGKLENDGSRKPGVIDKFTSDTKPIINKVASVAENKGLFEEAAKLYDLAKNADKVLELMNKLLSPVVPQISAPQSNKERLKNMALSIAERYRAQGISANKFVDSTFYLLLDLITFFDEYHSGHIDRAFDIIERLKLVPLNQESVEERVAAFRNFSDEIRHNLSEVLLATMNILFTQFKRLKGTSPSSSSRPQRVIEDRDSQLRSQARTLITFAGMIPYRTSGDTNARLVQMEVLMN

SEQ ID NO: 777325 - protein, 374 aa, Homo sapiens
ADLEVPGRLSVQQPFLYFQVLFLTAQFEAAVAFLFRMERLRCHAVHVALVLFELKLLLKSSGQSAQLLSHEPGDPPCLRRLNFVRLLMLYTRKFESTDPREALQYFYFLRDEKDSQGENMFLRCVSELVIESREFDMILGKLENDGSRKPGVIDKFTSDTKPIINKVASVAENKGLFEEAAKLYDLAKNADKVLELMNKLLSPVVPQISAPQSNKERLKNMALSIAERYRAQGISANKFVDSTFYLLLDLITFFDEYHSGHIDRAFDIIERLKLVPLNQESVEERVAAFRNFSDEIRHNLSEVLLATMNILFTQFKRLKGTSPSSSSRPQRVIEDRDSQLRSQARTLITFAGMIPYRTSGDTNARLVQMEVLMN

SEQ ID NO: 777326 - protein, 776 aa, Homo sapiens
MDTEGFGELLQQAEQLAAETEGISELPHVERNLQEIQQAGERLRSRTLTRTSQETADVKASVLLGSRGLDISHISQRLESLSAATTFEPLEPVKDTDIQGFLKNEKDNALLSAIEESRKRTFGMAEEYHRESMLVEWEQVKQRILHTLLASGEDALDFTQESEPSYISDVGPPGRSSLDNIEMAYARQIYIYNEKIVNGHLQPNLVDLCASVAELDDKSISDMWTMVKQMTDVLLTPATDALKNRSSVEVRMEFVRQALAYLEQSYKNYTLVTVFGNLHQAQLGGVPGTYQLVRSFLNIKLPAPLPGLQDGEVEGHPVWALIYYCMRCGDLLAASQVVNRAQHQLGEFKTWFQEYMNSKDRRLSPATENKLRLHYRRALRNNTDPYKRAVYCIIGRCDVTDNQSEVADKTEDYLWLKLNQVCFDDDGTSSPQDRLTLSQFQKQLLEDYGESHFTVNQQPFLYFQVLFLTAQFEAAVAFLFRMERLRCHAVHVALVLFELKLLLKSSGQSAQLLSHEPGDPPCLRRLNFVRLLMLYTRKFESTDPREALQYFYFLRDEKDSQGENMFLRCVSELVIESREFDMILGKLENDGSRKPGVIDKFTSDTKPIINKVASVAENKGLFEEAAKLYDLAKNADKVLELMNKLLSPVVPQISAPQSNKERLKNMALSIAERYRAQGISANKFVDSTFYLLLDLITFFDEYHSGHIDRAFDIIERLKLVPLNQESVEERVAAFRNFSDEQLRSQARTLITFAGMIPYRTSGDTNARLVQMEVLMN

SEQ ID NO: 777327 - protein, 778 aa, Homo sapiens
MDTEGFGELLQQAEQLAAETEGISELPHVERNLQEIQQAGERLRSRTLTRTSQETADVKASVLLGSRGLDISHISQRLESLSAATTFEPLEPVKDTDIQGFLKNEKDNALLSAIEESRKRTFGMAEEYHRESMLVEWEQVKQRILHTLLASGEDALDFTQESEPSYISDVGPPGRSSLDNIEMAYARQIYIYNEKIVNGHLQPNLVDLCASVAELDDKSISDMWTMVKQMTDVLLTPATDALKNRSSVEVRMEFVRQALAYLEQSYKNYTLVTVFGNLHQAQLGGVPGTYQLVRSFLNIKLPAPLPGLQDGEVEGHPVWALIYYCMRCGDLLAASQVVNRAQHQLGEFKTWFQEYMNSKDRRLSPATENKLRLHYRRALRNNTDPYKRAVYCIIGRCDVTDNQSEVADKTEDYLWLKLNQVCFDDDGTSSPQDRLTLSQFQKQLLEDYGESHFTVNQQPFLYFQVLFLTAQFEAAVAFLFRMERLRCHAVHVALVLFELKLLLKSSGQSAQLLSHEPGDPPCLRRLNFVRLLMLYTRKFESTDPREALQYFYFLRDEKDSQGENMFLRCVSELVIESREFDMILGKLENDGSRKPGVIDKFTSDTKPIINKVASVAENKGLFEEAAKLYDLAKNADKVLELMNKLLSPVVPQISAPQSNKERLKNMALSIAERYRAQGISANKFVDSTFYLLLDLITFFDEYHSGHIDRAFDIIERLKLVPLNQESVEERVAAFRNFSDEVSSFFLSCGIPFSPLPPKAFSFPVPNSFKNSSYSNYPD

SEQ ID NO: 777328 - protein, 598 aa, Homo sapiens
MDTEGFGELLQQAEQLAAETEGISELPHVERNLQEIQQAGERLRSRTLTRTSQETADVKASVLLGSRGLDISHISQRLESLSAATTFEPLEPVKDTDIQGFLKNEKDNALLSAIEESRKRTFGMAEEYHRESMLVEWEQVKQRILHTLLASGEDALDFTQESEPSYISDVGPPGRSSLDNIEMAYARQIYIYNEKIVNGHLQPNLVDLCASVAELDDKSISDMWTMVKQMTDVLLTPATDALKNRSSVEVRMEFVRQALAYLEQSYKNYTLVTVFGNLHQAQLGGVPGTYQLVRSFLNIKLPAPLPGLQDGEVEGHPVWALIYYCMRCGDLLAASQVVNRAQHQLGEFKTWFQEYMNSKDRRLSPATENKLRLHYRRALRNNTDPYKRAVYCIIGRCDVTDNQSEVADKTEDYLWLKLNQVCFDDDGTSSPQDRLTLSQFQKQLLEDYGESHFTVNQQPFLYFQVLFLTAQFEAAVAFLFRMERLRCHAVHVALVLFELKLLLKSSGQSAQLLSHEPGDPPCLRRLNFVRLLMLYTRKFESTDPREALQYFYFLRDEKDSQGENMFLRCVSELVIESREFDMILGETRRMTERRKPWR

SEQ ID NO: 777329 - protein, 116 aa, Homo sapiens
APGQAEASCCWMKGLGMASMPSCGQISTTDVPRHTTRPSCRVSSVSLYWSSGSRMYSMVPSSTRLRSGSKPFRIPLALVPNSARGRAAREAAAASSSRHLSGGDGCSTRICISNGY

SEQ ID NO: 777330 - protein, 165 aa, Homo sapiens
MDTEGFGELLQQAEQLAAETEGISELPHVERNLQEIQQAGERLRSRTLTRTSQETADVKASVLLGSRGLDISHISQRLESLSAATTFEPLEPVKDTDIQGFLKNEKDNALLSAIEESRKRTFGMAEEYHRESMLVEWEQVKQRILHTLLASGEDALDFTQESEVA

SEQ ID NO: 777331 - protein, 81 aa, Homo sapiens
RLLFRERAVPQTRKDFKLTRLALPTPKSSPHSDYLCWNDTIPNVWGHQCEAGADGGPHELSAMLCGSLGRHTVSTSGTWAH

SEQ ID NO: 777332 - protein, 73 aa, Homo sapiens
MENKETRQERVVKAPTTPKSSPHSDYLCWNDTIPNVWGHQCEAGADGGPHELSAMLCGSLGRHTVSTSGTWAH

SEQ ID NO: 777333 - protein, 819 aa, Homo sapiens; identical to SEQ ID NO: 777319

SEQ ID NO: 777334 - protein, 696 aa, Homo sapiens
MAEEYHRESMLVEWEQVKQRILHTLLASGEDALDFTQESEPSYISDVGPPGRSSLDNIEMAYARQIYIYNEKIVNGHLQPNLVDLCASVAELDDKSISDMWTMVKQMTDVLLTPATDALKNRSSVEVRMEFVRQALAYLEQSYKNYTLVTVFGNLHQAQLGGVPGTYQLVRSFLNIKLPAPLPGLQDGEVEGHPVWALIYYCMRCGDLLAASQVVNRAQHQLGEFKTWFQEYMNSKDRRLSPATENKLRLHYRRALRNNTDPYKRAVYCIIGRCDVTDNQSEVADKTEDYLWLKLNQVCFDDDGTSSPQDRLTLSQFQKQLLEDYGESHFTVNQQPFLYFQVLFLTAQFEAAVAFLFRMERLRCHAVHVALVLFELKLLLKSSGQSAQLLSHEPGDPPCLRRLNFVRLLMLYTRKFESTDPREALQYFYFLRDEKDSQGENMFLRCVSELVIESREFDMILGKLENDGSRKPGVIDKFTSDTKPIINKVASVAENKGLFEEAAKLYDLAKNADKVLELMNKLLSPVVPQISAPQSNKERLKNMALSIAERYRAQGISANKFVDSTFYLLLDLITFFDEYHSGHIDRAFDIIERLKLVPLNQESVEERVAAFRNFSDEIRHNLSEVLLATMNILFTQFKRLKGTSPSSSSRPQRVIEDRDSQLRSQARTLITFAGMIPYRTSGDTNARLVQMEVLMN

SEQ ID NO: 777335 - protein, 696 aa, Homo sapiens; identical to SEQ ID NO: 777334

SEQ ID NO: 777336 - protein, 798 aa, Homo sapiens
MDTEGFGELLQQAEQLAAETEGISELPHVERNLQEIQQAGERLRSRTLTRTSQETADVKASVLLGSRGLDISHISQRLESLSAATTFEPLEPVKDTDIQTFGMAEEYHRESMLVEWEQVKQRILHTLLASGEDALDFTQESEPSYISDVGPPGRSSLDNIEMAYARQIYIYNEKIVNGHLQPNLVDLCASVAELDDKSISDMWTMVKQMTDVLLTPATDALKNRSSVEVRMEFVRQALAYLEQSYKNYTLVTVFGNLHQAQLGGVPGTYQLVRSFLNIKLPAPLPGLQDGEVEGHPVWALIYYCMRCGDLLAASQVVNRAQHQLGEFKTWFQEYMNSKDRRLSPATENKLRLHYRRALRNNTDPYKRAVYCIIGRCDVTDNQSEVADKTEDYLWLKLNQVCFDDDGTSSPQDRLTLSQFQKQLLEDYGESHFTVNQQPFLYFQVLFLTAQFEAAVAFLFRMERLRCHAVHVALVLFELKLLLKSSGQSAQLLSHEPGDPPCLRRLNFVRLLMLYTRKFESTDPREALQYFYFLRDEKDSQGENMFLRCVSELVIESREFDMILGKLENDGSRKPGVIDKFTSDTKPIINKVASVAENKGLFEEAAKLYDLAKNADKVLELMNKLLSPVVPQISAPQSNKERLKNMALSIAERYRAQGISANKFVDSTFYLLLDLITFFDEYHSGHIDRAFDIIERLKLVPLNQESVEERVAAFRNFSDEIRHNLSEVLLATMNILFTQFKRLKGTSPSSSSRPQRVIEDRDSQLRSQARTLITFAGMIPYRTSGDTNARLVQMEVLMN

SEQ ID NO: 777337 - protein, 819 aa, Homo sapiens; identical to SEQ ID NO: 777319

SEQ ID NO: 777338 - protein, 794 aa, Homo sapiens
MDTEGFGELLQQAEQLAAETEGISELPHVERNLQEIQQAGERLRSRTLTRTSQETADVKASVLLGSRGLDISHISQRLESLSAATTFEPLEPVKDTDIQGFLKNEKDNALLSAIEESRKRTFGMAEEYHRESMLVEWEQVKQRILHTLLASGEDALDFTQESEPSYISDVGPPGRSSLDNIEMAYARQIYIYNEKIVNGHLQPNLVDLCASVAELDDKSISDMWTMVKQMTDVLLTPATDALKNRSSVEVRMEFVRQALAYLEQSYKNYTLVTVFGNLHQAQLGGVPGTYQLVRSFLNIKLPAPLPGLQDGEVEGHPVWALIYYCMRCGDLLAASQVVNRAQHQLGEFKTWFQEYMNSKDRRLSPATENKLRLHYRRALRNNTDPYKRAVYCIIGRCDVTDNQSEVADKTEDYLWLKLNQVCFDDDGTSSPQDRLTLSQFQKQLLEDYGESHFTVNQQPFLYFQVLFLTAQFEAAVAFLFRMERLRCHAVHVALVLFELKLLLKSSGQSAQLLSHEPGDPPCLRRLNFVRLLMLYTRKFESTDPREALQYFYFLRDEKDSQGENMFLRCVSELVIESREFDMILGKLENDGSRKPGVIDKFTSDTKPIINKVASVAENKGLFEEAAKLYDLAKNADKVLELMNKLLSPVVPQISAPQSNKERLKNMALSIAERYRAQGISANKFVDSTFYLLLDLITFFDEYHSGHIDRAFDIIERLKLVPLNQESVEERVAAFRNFSDEIRHNLSEVLLATMNILFTQFKRLKGTSPSSSSRPQRVIEDRDSCTPLATEYVIM

SEQ ID NO: 777339 - protein, 719 aa, Homo sapiens [sequence omitted]

SEQ ID NO: 777340 - protein, 79 aa, Homo sapiens
  misc_feature (16)..(16): Xaa can be any naturally occurring amino acid
HTQQHSERVRNQHTKXFQGDEATPKSSPHSDYLCWNDTIPNVWGHQCEAGADGGPHELSAMLCGSLGRHTVSTSGTWAH

SEQ ID NO: 777341 - protein, 114 aa, Homo sapiens
MDTEGFGELLQQAEQLAAETEGISELPHVERNLQEIQQAGERLRSRTLTRTSQETADVKAVVNEKYQYRTFGMAEEYHRESMLVEWEQVKQRILHTLLASGEDALDFTQESEVA

SEQ ID NO: 777342 - protein, 184 aa, Homo sapiens
TSAAEQPPSPLGREPGGPPGSFLTSRRPRLPLTVPFPPTWAEDPGPAYGDASGPEPARDIRCEFCGEFFENRKGLSSHARSHLRQMGVTEWYVNGSPIDTLREILKRRTQSRPGGPPNPPGPSPKALAKMMGGAGPGSSLEARSPSDLHISPLAKKLPPPPGSPLGHSLLLPLPFHCCFLCIAP

SEQ ID NO: 777343 - protein, 968 aa, Homo sapiens
MVAMDLGSPSLPKKSLPVPGALEQVASRLSSKVAAEVPHGSKQELQDLKAQSLTTCEVCGACFETRKGLSSHARSHLRQLGVAESESSGAPIDLLYELVKQKGLPDAHLGLPPGLAKKSSSLKEVVAGAPRPGLLSLAKPLDAPAVNKAIKSPPGFSAKGLGHPPSSPLLKKTPLALAGSPTPKNPEDKSPQLSLSPRPASPKAQWPQSEDEGPLNLTLDSDGGRELDCQLCGAWFETRKGLSSHARAHLRHLGVSDPDAKGSPIDVLHGLIRRDGVQIRLPPRRGALAHPGRPPPTSAALSLLPPPPPAKKAKLKAAGMASPWGKQDLSAAAAAGIFWASDVEPSPLNLSSGPEPARDIRCEFCGEFFENRKGLSSHARSHLRQMGVTEWYVNGSPIDTLREILKRRTQSRPGGPPNPPGPSPKALAKMMGGAGPGSSLEARSPSDLHISPLAKKLPPPPGSPLGHSPTASPPPTARKMFPGLAAPSLPKKLKPEQIRVEIKREMLPGALHGELHPSEGPWGAPREDMTPLNLSSRAEPVRDIRCEFCGEFFENRKGLSSHARSHLRQMGVTEWSVNGSPIDTLREILKKKSKPCLIKKEPPAGDLAPALAEDGPPTVAPGPVQSPLPLSPLAGRPGKPGAGPAQVPRELSLTPITGAKPSATGYLGSVAAKRPLQEDRLLPAEVKAKTYIQTELPFKAKTLHEKTSHSSTEACCELCGLYFENRKALASHARAHLRQFGVTEWCVNGSPIETLSEWIKHRPQKVGAYRSYIQGGRPFTKKFRSAGHGRDSDKRPSLGLAPGGLAVVGRSAGGEPGPEAGRAADGGERPLAASPPGTVKAEEHQRQNINKFERRQARPPDASAARGGEDTNDLQQKLEEVRQPPPRVRPVPSLVPRPPQTSLVKFVGNIYTLKCRFCEVEFQGPLSIQEEWVRHLQRHILEMNFSKADPPPEESQAPQAQTAAAEAP

SEQ ID NO: 777344 - protein, 835 aa, Homo sapiens
MVAMDLGSPSLPKKSLPVPGALEQVASRLSSKVAAEVPHGSKQELQDLKAQSLTTCEVCGACFETRKGLSSHARSHLRQLGVAESESSGAPIDLLYELVKQKGLPDAHLGLPPGLAKKSSSLKEVVAGAPRPGLLSLAKPLDAPAVNKAIKSPPGFSAKGLGHPPSSPLLKKTPLALAGSPTPKNPEDKSPQLSLSPRPASPKAQWPQSEDEGPLNLTSGPEPARDIRCEFCGEFFENRKGLSSHARSHLRQMGVTEWYVNGSPIDTLREILKRRTQSRPGGPPNPPGPSPKALAKMMGGAGPGSSLEARSPSDLHISPLAKKLPPPPGSPLGHSPTASPPPTARKMFPGLAAPSLPKKLKPEQIRVEIKREMLPGALHGELHPSEGPWGAPREDMTPLNLSSRAEPVRDIRCEFCGEFFENRKGLSSHARSHLRQMGVTEWSVNGSPIDTLREILKKKSKPCLIKKEPPAGDLAPALAEDGPPTVAPGPVQSPLPLSPLAGRPGKPGAGPAQVPRELSLTPITGAKPSATGYLGSVAAKRPLQEDRLLPAEVKAKTYIQTELPFKAKTLHEKTSHSSTEACCELCGLYFENRKALASHARAHLRQFGVTEWCVNGSPIETLSEWIKHRPQKVGAYRSYIQGGRPFTKKFRSAGHGRDSDKRPSLGLAPGGLAVVGRSAGGEPGPEAGRAADGGERPLAASPPGTVKAEEHQRQNINKFERRQARPPDASAARGGEDTNDLQQKLEEVRQPPPRVRPVPSLVPRPPQTSLVKFVGNIYTLKCRFCEVEFQGPLSIQEEWVRHLQRHILEMNFSKADPPPEESQAPQAQTAAAEAP

SEQ ID NO: 777345 - protein, 968 aa, Homo sapiens; identical to SEQ ID NO: 777343

SEQ ID NO: 777346 - protein, 968 aa, Homo sapiens; identical to SEQ ID NO: 777343

SEQ ID NO: 777347 - protein, 271 aa, Homo sapiens
MATMSLFTVSMNRLLLILIVWLICRVHRYGESNHSRSAHVETALIDVWCVNGSPIETLSEWIKHRPQKVGAYRSYIQGGRPFTKKFRSAGHGRDSDKRPSLGLAPGGLAVVGRSAGGEPGPEAGRAADGGERPLAASPPGTVKAEEHQRQNINKFERRQARPPDASAARGGEDTNDLQQKLEEVRQPPPRVRPVPSLVPRPPQTSLVKFVGNIYTLKCRFCEVEFQGPLSIQEEWVRHLQRHILEMNFSKADPPPEESQAPQAQTAAAEAP

SEQ ID NO: 777348 - protein, 916 aa, Homo sapiens
MVAMDLGSPSLPKKSLPVPGALEQVASRLSSKVAAEVPHGSKQELQDLKAQSLTTCEVCGACFETRKGLSSHARSHLRQLGVAESESSGAPIDLLYELVKQKGLPDAHLGLPPGLAKKSSSLKEVVAGAPRPGLLSLAKPLDAPAVNKAIKSPPGFSAKGLGHPPSSPLLKKTPLALAGSPTPKNPEDKSPQLSLSPRPASPKAQWPQSEDEGPLNLTLDSDGGRELDCQLCGAWFETRKGLSSHARAHLRHLGVSDPDAKGSPIDVLHGLIRRDGVQIRLPPRRGALAHPGRPPPTSAALSLLPPPPPAKKAKLKAAGMASPWGKQDLSAAAAAGIFWASDVEPSPLNLSSGPEPARDIRCEFCGEFFENRKGLSSHARSHLRQMGVTEWYVNGSPIDTLREILKRRTQSRPGGPPNPPGPSPKALAKMMGGAGPGSSLEARSPSDLHISPLAKKLPPPPGSPLGHSPTASPPPTARKMFPGLAAPSLPKKLKPEQIRVEIKREMLPGALHGELHPSEGPWGAPREDMTPLNLSSRAEPVRDIRCEFCGEFFENRKGLSSHARSHLRQMGVTEWSVNGSPIDTLREILKKKSKPCLIKKEPPAGDLAPALAEDGPPTVAPGPVQSPLPLSPLAGRPGKPGAGPAQVPRELSLTPITGAKPSATGYLGSVAAKRPLQEDRLLPAEVKAKTYIQTELPFKAKTLHEKTSHSSTEACCELCGLYFENRKALASHARAHLRQFGVTEWCVNGSPIETLSEWIKHRPQKVGAYRSYIQGGRPFTKKFRSAGHGRDSDKRPSLGLAPGGLAVVGRSAGGEPGPEAGRAADGGERPLAASPPGTVKAEEHQRQNINKFERRQARPPDASAARGGEDTNDLQQKLEEVRQPPPRVRPVPSLVPRPPQTSLVKFVGNIYTLKCR

SEQ ID NO: 777349 - protein, 97 aa, Homo sapiens
KMTSFDSMCHIQVMQEVGSQGLGQPRPPQTSLVKFVGNIYTLKCRFCEVEFQGPLSIQEEWVRHLQRHILEMNFSKADPPPEESQAPQAQTAAAEAP

SEQ ID NO: 777350 - protein, 184 aa, Homo sapiens; identical to SEQ ID NO: 777342

SEQ ID NO: 777351 - protein, 968 aa, Homo sapiens; identical to SEQ ID NO: 777343

SEQ ID NO: 777352 - protein, 968 aa, Homo sapiens; identical to SEQ ID NO: 777343

SEQ ID NO: 777353 - protein, 897 aa, Homo sapiens
MVAMDLGSPSLPKKSLPVPGALEQVASRLSSKVAAEVPHGSKQELQDLKAQSLTTCEVCGACFETRKGLSSHARSHLRQLGVAESESSGAPIDLLYELVKQKGLPDAHLGLPPGLAKKSSSLKEVVAGAPRPGLLSLAKPLDAPAVNKAIKSPPGFSAKGLGHPPSSPLLKKTPLALAGSPTPKNPEDKSPQLSLSPRPASPKAQWPQSEDEGPLNLTLDSDGGRELDCQLCGAWFETRKGLSSHARAHLRHLGVSDPDAKGSPIDVLHGLIRRDGVQIRLPPRRGALAHPGRPPPTSAALSLLPPPPPAKKAKLKAAGMASPWGKQDLSAAAAAGIFWASDVEPSPLNLSSGPEPARDIRCEFCGEFFENRKGLSSHARSHLRQMGVTEWYVNGSPIDTLREILKRRTQSRPGGPPNPPGPSPKALAKMMGGAGPGSSLEARSPSDLHISPLAKKLPPPPGSPLGHSPTASPPPTARKMFPGLAAPSLPKKLKPEQIRVEIKREMLPGALHGELHPSEGPWGAPREDMTPLNLSSRAEPVRDIRCEFCGEFFENRKGLSSHARSHLRQMGVTEWSVNGSPIDTLREILKKKSKPCLIKKEPPAGDLAPALAEDGPPTVAPGPVQSPLPLSPLAGRPGKPGAGPAQVPRELSLTPITGAKPSATGYLGSVAAKRPLQEDRLLPAEVKAKTYIQTELPFKAKTLHEKTSHSSTEACCELCGLYFENRKALASHARAHLRQFGVTEWCVNGSPIETLSEWIKHRPQKVGAYRSYIQGGRPFTKKFRSAGHGRDSDKRPSLGLAPGGLAVVGRSAGGEPGPEAGRAADGGERPLAASPPGTVKAEEHQRQNINSECLVEEGRERSGHLSGPPSHSPGALLWPLSPFSSCLPIHPSIPHPT

SEQ ID NO: 777354 - protein, 100 aa, Homo sapiens
SGPTQPANGFDLACTEIFFYHASITSIETSEDVTQKPAPYSLNIRRAATRAHNPSWQQQAKTENSCRVGQARAPGVTAGPICPLLSLTWPAQTLEASELE

SEQ ID NO: 777355 - protein, 153 aa, Homo sapiens
MALVFVYGTLKRGQPNHRVLRDGAHGSAAFRARGRTLEPYPLVIAGEHNIPWLLHLPGSGRLVEGEVYAVDERMLRFLDDFESCPALYQRTVLRVQLLEDRAPGAEEPPAPTAVQCFVYSRATFPPEWAQLPHHDSYDSEGPHGLRYNPRENR

SEQ ID NO: 777356 - protein, 153 aa, Homo sapiens; identical to SEQ ID NO: 777355

SEQ ID NO: 777357 - protein, 153 aa, Homo sapiens; identical to SEQ ID NO: 777355

SEQ ID NO: 777358 - protein, 153 aa, Homo sapiens; identical to SEQ ID NO: 777355

SEQ ID NO: 777359 - protein, 256 aa, Homo sapiens
MKITGPVTVKTSGTRFGAWMTDPLASEKNNRVWYMDSYTNNKIVREYKSIADFVSGAESRTYNLPFKWAGTNHVVYNGSLYFNKYQSNIIIKYSFDMGRVLAQRSLEYAGFHNVYPYTWGGFSDIDLMADEIGLWAVYATNQNAGNIVISQLNQDTLEVMKSWSTGYPKRSAGESFMICGTLYVTNSHLTGAKVYYSYSTKTSTYEYTDIPFHNQYFHISMLDYNARDRALYAWNNGHQVLFNVTLFHIIKTEDDT

SEQ ID NO: 777360 - protein, 235 aa, Homo sapiens
MSPPLLKLGAVLSTMAMISNWMSQTLPSLVGLNTTRLSTPDTLTQISPKEGWQVYSSAQDPDGRCICTVVAPEQNLCSRDAKSRQLRQLLEKVQNMSQSIEVLNLRTQRDFQYVLKMETQMKGLKAKFRQIEDDRKTLMTKHFQELKEKMDELLPLIPVLEQYKTDAKLITQFKEEIRNLSAVLTGIQEEIGAYDYEELHQRVLSLETRLRDCMKKLIDLKKRKEEEKRQQKGEA

SEQ ID NO: 777361 - protein, 478 aa, Homo sapiens
MSPPLLKLGAVLSTMAMISNWMSQTLPSLVGLNTTRLSTPDTLTQISPKEGWQVYSSAQDPDGRCICTVVAPEQNLCSRDAKSRQLRQLLEKVQNMSQSIEVLNLRTQRDFQYVLKMETQMKGLKAKFRQIEDDRKTLMTKHFQELKEKMDELLPLIPVLEQYKTDAKLITQFKEEIRNLSAVLTGIQEEIGAYDYEELHQRVLSLETRLRDCMKKLTCGKLMKITGPVTVKTSGTRFGAWMTDPLASEKNNRVWYMDSYTNNKIVREYKSIADFVSGAESRTYNLPFKWAGTNHVVYNGSLYFNKYQSNIIIKYSFDMGRVLAQRSLEYAGFHNVYPYTWGGFSDIDLMADEIGLWAVYATNQNAGNIVISQLNQDTLEVMKSWSTGYPKRSAGESFMICGTLYVTNSHLTGAKVYYSYSTKTSTYEYTDIPFHNQYFHISMLDYNARDRALYAWNNGHQVLFNVTLFHIIKTEDDT

SEQ ID NO: 777362 - protein, 215 aa, Homo sapiens
MQATSNLLNLLLLSLFAGLDPSKTQISPKEGWQVYSSAQDPDGRCICTVVAPEQNLCSRDAKSRQLRQLLEKVQNMSQSIEVLNLRTQRDFQYVLKMETQMKGLKAKFRQIEDDRKTLMTKHFQELKEKMDELLPLIPVLEQYKTDAKLITQFKEEIRNLSAVLTGIQEEIGAYDYEELHQRVLSLETRLRDCMKKLIDLKKRKEEEKRQQKGEA

SEQ ID NO: 777363 - protein, 458 aa, Homo sapiens
MQATSNLLNLLLLSLFAGLDPSKTQISPKEGWQVYSSAQDPDGRCICTVVAPEQNLCSRDAKSRQLRQLLEKVQNMSQSIEVLNLRTQRDFQYVLKMETQMKGLKAKFRQIEDDRKTLMTKHFQELKEKMDELLPLIPVLEQYKTDAKLITQFKEEIRNLSAVLTGIQEEIGAYDYEELHQRVLSLETRLRDCMKKLTCGKLMKITGPVTVKTSGTRFGAWMTDPLASEKNNRVWYMDSYTNNKIVREYKSIADFVSGAESRTYNLPFKWAGTNHVVYNGSLYFNKYQSNIIIKYSFDMGRVLAQRSLEYAGFHNVYPYTWGGFSDIDLMADEIGLWAVYATNQNAGNIVISQLNQDTLEVMKSWSTGYPKRSAGESFMICGTLYVTNSHLTGAKVYYSYSTKTSTYEYTDIPFHNQYFHISMLDYNARDRALYAWNNGHQVLFNVTLFHIIKTEDDT

SEQ ID NO: 777364 - protein, 383 aa, Homo sapiens
MSQSIEVLNLRTQRDFQYVLKMETQMKGLKAKFRQIEDDRKTLMTKHFQELKEKMDELLPLIPVLEQYKTDAKLITQFKEEIRNLSAVLTGIQEEIGAYDYEELHQRVLSLETRLRDCMKKLTCGKLMKITGPVTVKTSGTRFGAWMTDPLASEKNNRVWYMDSYTNNKIVREYKSIADFVSGAESRTYNLPFKWAGTNHVVYNGSLYFNKYQSNIIIKYSFDMGRVLAQRSLEYAGFHNVYPYTWGGFSDIDLMADEIGLWAVYATNQNAGNIVISQLNQDTLEVMKSWSTGYPKRSAGESFMICGTLYVTNSHLTGAKVYYSYSTKTSTYEYTDIPFHNQYFHISMLDYNARDRALYAWNNGHQVLFNVTLFHIIKTEDDT

SEQ ID NO: 777365 - protein, 47 aa, Homo sapiens
APSQILQGTLKAHQMWLQTHLPQTLSSGSRGFSSHPIRICSPRTSFA

SEQ ID NO: 777366 - protein, 262 aa, Homo sapiens
QFESVAQLNNSLKEYGFTEEEEIIMEATCLMDRYQTLLRQLSEIEEEDKLLPTEDQSFNDLAHDVIHWIKEIKESLMVLNSSEGKMPLEERIQKIKEIILLKPEGDARIETIMKQAESSEAPLVQKTLTDISNQWDNTLHLASTYLSHQEKLLLEGEKYLQSKEDLRLMLIELKKKQEAGFALQHGLQEKKAQLKIYKKFLKKAQDLTSLLKELKSQGNYLLECTKNPSFSEEPWLEIKHLHESLLQQLQDSVPNWTVTFEN

SEQ ID NO: 777367 - protein, 194 aa, Homo sapiens
VFTGIFAAEMVLKLIAMDPYEYFQVGWNIFDSLIVTLSLVELFLADVEGLSVLRSFRLLRVFKLAKSWPTLNMLIKIIGNSVGALGNLTLVLAIIVFIFAVVGMQLFGKSYKECVCKINDDCTLPRWHMNDFFHSFLIVFRVLCGEWIETMWDCMEVAGQAMCLIVYMMVMVIGNLVVCNQMFMHFNFSVEIIL

SEQ ID NO: 777368 - protein, 49 aa, Homo sapiens
GTPPNVFPRNQSYSLLHNSGPCSRRTVPNFLHPKAFQRMKTSFKDISRT

SEQ ID NO: 777369 - protein, 114 aa, Homo sapiens
FSTFSAMDFLGLGVLKPHPMIGVCGQGGEAYSAGCSQQRPLAQSFCRSRQGACTSRLPPPMALDNDTLGKTYIYQWAQKISFCFCSGCFCVGKEIPSFFIEAQNQQNCSSTWPF

SEQ ID NO: 777370 - protein, 107 aa, Homo sapiens
LSVPERETVKECVTIHAYEADACTPRPPAPWCGFQALGGLQGDLPGKGWETPKGGDWGKGQPTPGAKNYGMLPGQGPWGPMSKQGCGELELTRPPLGPHLAPGRCSC

SEQ ID NO: 777371 - protein, 34 aa, Homo sapiens
PENQSSSALIFHSDIGHSYSRLTYGSFLVCHSAF

SEQ ID NO: 777372 - protein, 111 aa, Homo sapiens
MGMCWVKVEGKNAENHHIRERDFTALGKEATGKGSCFISFFRRVRPFLLSFVATGHHKTGASLSDGSRTASDVRAARRSRSPQQGPLTTWEFWKSARPALPQALLGLQKNS

SEQ ID NO: 777373 - protein, 113 aa, Homo sapiens
EFFCIRDWSLLCVYMHACMYVSMDIYLFYTLDYNLILVYFIDQTVVALAMEALSVGYCVPLIYPHCCIVVVFEYFLNFWHYKMLMHILYIPCSSARINDFFQGALVSFIGDCY

SEQ ID NO: 777374 - protein, 130 aa, Homo sapiens
MVGPGRQSEHLVERLLNPGWGGVGWRGLLVVLSVLMSQARQGHRKEESDYSKDGQCSRQPERTLQPPGILALERQPARRSSRGGGTLSALTALHAGDISTECSMKGLCSTCQPWVRADAEDTAVGFQLSD

SEQ ID NO: 777375 - protein, 198 aa, Homo sapiens
IGSHNSETPPSNPTFRSTPDTMACCQTSFCGFPSCSTSGTCGSSCCQPSCCETSSCQPRCCETSCCQPSCCQTSFCGFPSFSTGGTCDSSCCQPSCCETSCCQPSCYQTSSCGTGCGIGGGIGYGQEGSSGAVSTRIRWCRPDCRVEGTCLPPCCVVSCTPPSCCQLHHAEASCCRPSYCGQSCCRPVCCCYCSEPTC

SEQ ID NO: 777376 - protein, 86 aa, Homo sapiens
IGSHNSETPPSNPTFRSTPDTMAAARPASVDFLASQPVGLVTLAAASQAAVKLAAASQAATRPAPAELAVALVVALAMARRAAVEL

SEQ ID NO: 777377 - protein, 85 aa, Homo sapiens
MACCQTSFCGFPSCSTSGAVSTRIRWCRPDCRVEGTCLPPCCVVSCTPPSCCQLHHAEASCCRPSYCGQSCCRPVCCCYCSEPTC

SEQ ID NO: 777378 - protein, 136 aa, Homo sapiens
MEQSCEEEKEPEPQKNIQETKQVDDEDAELIFVGVEHVNEDAELIFVGVTSNSKPVVSNILNRVTPGSWSRRKKYDHLRKDTARKLQPKSHETVTSEAVTVLPASQLESRSTDSPIIIEPLSKPDYRNSFPQVVPN

SEQ ID NO: 777379 - protein, 104 aa, Homo sapiens
MSGVPFEYWFLNISSLGCLCGLPELSPCLCSGAILCSSTPDQGAQQPVFTSQGIRHLGCSIHRSGEISPFFLDFFLKVPYLSPLLSSLLNLVKFPKLSQKSGKR

SEQ ID NO: 777380 - protein, 277 aa, Homo sapiens
ASSAPLLPRATPGLRTLAPDLLGGAPRSSHQPGWVSWLGLGAPGVNVQPGVCGDAIRGAAAGRDFKMKLWDVVAVCLVLLHTASAFPLPAGKRPPEAPAEDRSLGRRRAPFALSSDSNMPEDYPDQFDDVMDFIQATIKRLKRSPDKQMAVLPRRERNRQAAAANPENSRGKGRRGQRGKNRGCVLTAIHLNVTDLGLGYETKEELIFRYCSGSCDAAETTYDKILKNLSRNRRLVSDKVGQACCRPIAFDDDLSFLDDNLVYHILRKHSAKRCGCI

SEQ ID NO: 777381 - protein, 228 aa, Homo sapiens
MQSLPNSNGAAAGRDFKMKLWDVVAVCLVLLHTASAFPLPAGKRPPEAPAEDRSLGRRRAPFALSSDSNMPEDYPDQFDDVMDFIQATIKRLKRSPDKQMAVLPRRERNRQAAAANPENSRGKGRRGQRGKNRGCVLTAIHLNVTDLGLGYETKEELIFRYCSGSCDAAETTYDKILKNLSRNRRLVSDKVGQACCRPIAFDDDLSFLDDNLVYHILRKHSAKRCGCI

SEQ ID NO: 777382 - protein, 185 aa, Homo sapiens
MKLWDVVAVCLVLLHTASAFPLPAANMPEDYPDQFDDVMDFIQATIKRLKRSPDKQMAVLPRRERNRQAAAANPENSRGKGRRGQRGKNRGCVLTAIHLNVTDLGLGYETKEELIFRYCSGSCDAAETTYDKILKNLSRNRRLVSDKVGQACCRPIAFDDDLSFLDDNLVYHILRKHSAKRCGCI

SEQ ID NO: 777383 - protein, 185 aa, Homo sapiens; identical to SEQ ID NO: 777382

SEQ ID NO: 777384 - protein, 185 aa, Homo sapiens; identical to SEQ ID NO: 777382

SEQ ID NO: 777385 - protein, 123 aa, Homo sapiens
LEERSHLGNSLLLALPPSQGLPSAHLAQPLNGLVPGPLESSKAFWYCLWVFLSSETGSGELQFGKCIRAEDKVCAVLSGTEAQSRGAKGFGWVPFLSPACSETETNSFSRYQFPLCKNVGQAR

SEQ ID NO: 777386 - protein, 147 aa, Homo sapiens [sequence omitted]

SEQ ID NO: 777387 - protein, 249 aa, Homo sapiens
LFAVAFNLVKSYMSEETRRKVVILGDNWKQELTKFISPDQLPVEFGGTMTDPDGNPKCLTKINYGGEVPKSYYLCKQVRLQYEHTRSVGRGSSLQVENEILFPGCVLRFLRFYNTYSLVHSKRISYTVEVLLPDQTFMEKMEKFYVNLMVPTPSSLISESTMSSQPSLARPCSTSQEQGFYNSRSQPMHHSWPTPQERLGQCPSGGPMVTAKQHRHSIPTMTCCDLKLSKNPRLFSINQYQEISYSSKI

SEQ ID NO: 777388 - protein, 32 aa, Homo sapiens
MGGAAATEAAARTRRGRRDGGSAASAHLFLGK

SEQ ID NO: 777389 - protein, 121 aa, Homo sapiens
SFSFSSSVSPPYPCAELIKAPFWRGRGRRGAAAGSLCRALGLVGRPVLESALFVTAMSGGGVIRGPAGNNDCRIYVGNLPPDIRTKDIEDVFYKYGAIRDIDLKNRRGGPPFAFVEFEDPR

SEQ ID NO: 777390 - protein, 85 aa, Homo sapiens
MSGGGVIRGPAGNNDCRIYVGNLPPDIRTKDIEVKLPMSGGGVIRGPAGNNDCRIYVGNLPPDIRTKDIEDVFYKYGTSWPRREQ

SEQ ID NO: 777391 - protein, 304 aa, Homo sapiens
SFSFSSSVSPPYPCAELIKAPFWRGRGRRGAAAGSLCRALGLVGRPVLESALFVTAMSGGGVIRGPAGNNDCRIYVGNLPPDIRTKDIEDVFYKYGAIRDIDLKNRRGGPPFAFVEFEDPRDAEDAVYGRDGYDYDGYRLRVEFPRSGRGTGRGGGGGGGGGAPRGRYGPPSRRSENRVVVSGLPPSGSWQDLKDHMREAGDVCYADVYRDGTGVVEFVRKEDMTYAVRKLDNTKFRSHEGETAYIRVKVDGPRSPSYGRSRSRSRSRSRSRSRSNSRSRSYSPRRSRGSPRYSPRHSRSRSRT

SEQ ID NO: 777392 - protein, 309 aa, Homo sapiens
SFSFSSSVSPPYPCAELIKAPFWRGRGRRGAAAGSLCRALGLVGRPVLESALFVTAMSGGGVIRGPAGNNDCRIYVGNLPPDIRTKDIEDVFYKYGAIRDIDLKNRRGGPPFAFVEFEDPRDAEDAVYGRDGYDYDGYRLRVEFPRSGRGTGRGGGGGGGGGAPRGRYGPPSRRSENRVVVSGLPPSGSWQDLKDHMREAGDVCYADVYRDGTGVVEFVRKEDMTYAVRKLDNTKFRSHEGETAYIRVKVDGPRSPSYGRSRSRSRSRSRSRSRSNSRSRSYSPRRSRGSPRYSPRHSRSRSHISEEMD

SEQ ID NO: 777393 - protein, 304 aa, Homo sapiens; identical to SEQ ID NO: 777391

SEQ ID NO: 777394 - protein, 304 aa, Homo sapiens; identical to SEQ ID NO: 777391

SEQ ID NO: 777395 - protein, 304 aa, Homo sapiens; identical to SEQ ID NO: 777391

SEQ ID NO: 777396 - protein, 304 aa, Homo sapiens; identical to SEQ ID NO: 777391

SEQ ID NO: 777397 - protein, 304 aa, Homo sapiens; identical to SEQ ID NO: 777391

SEQ ID NO: 777398 - protein, 298 aa, Homo sapiens
SFSFSSSVSPPYPCAELIKAPFWRGRGRRGAAAGSLCRALGLVGRPVLESALFVTAMSGGGVIRGPAGNNDCRIYVGNLPPDIRTKDIEDVFYKYGAIRDIDLKNRRGGPPFAFVEFEDPRDAEDAVYGRDGYDYDGYRLRVEFPRSGRGTGRGGGGGGGGGAPRGRYGPPSRRSENRVVVSGLPPSGSWQDLKDHMREAGDVCYADVYRDGTGVVEFVRKEDMTYAVRKLDNTKFRSHEADRFPDVLPASATDPNCRTSHSSPRPPGSIQWGISSKRNQTNVFQPLHSVASLCVRKG

SEQ ID NO: 777399 - protein, 298 aa, Homo sapiens; identical to SEQ ID NO: 777398

SEQ ID NO: 777400 - protein, 292 aa, Homo sapiens
SFRARAALGAMSCGRPPPDVDGMITLKVDNLTYRTSPDSLRRVFEKYGRVGDVYIPREPHTKAPRGFAFVRFHDRRDAQDAEAAMDGAELDGRELRVQVARYGRRDLPRSRQGEPRGRSRGGGYGRRSRSYGRRSRSPRRRHRSRSRGPSCSRSRSRSRYRGSRYSRSPYSRSPYSRSRYSRSPYSRSRYRESRYGGSHYSSSGYSNSRYSRYHSSRSHSKSGSSTSSRSASTSKSSSARRSKSSSVSRSRSRSRSSSMTRSPPRVSKRKSKSRSRSKRPPKSPEEEGQMSS

SEQ ID NO: 777401 - protein, 78 aa, Homo sapiens
PFYFLRSRRDAEDAVYGRDGYDYDGYRLRVEFPRSGRGTGRGGGGGGGGGAPRGRYGPPSRRSENRVVVSGECTGCVD

SEQ ID NO: 777402 - protein, 304 aa, Homo sapiens; identical to SEQ ID NO: 777391

SEQ ID NO: 777403 - protein, 304 aa, Homo sapiens; identical to SEQ ID NO: 777391

SEQ ID NO: 777404 - protein, 304 aa, Homo sapiens; identical to SEQ ID NO: 777391

SEQ ID NO: 777405 - protein, 304 aa, Homo sapiens; identical to SEQ ID NO: 777391

SEQ ID NO: 777406 - protein, 257 aa, Homo sapiens
SFSFSSSVSPPYPCAELIKAPFWRGRGRRGAAAGSLCRALGLVGRPVLESALFVTAMSGGGVIRGPAGNNDCRIYVGNLPPDIRTKDIEDVFYKYGAIRDIDLKNRRGGPPFAFVEFEDPRDAEDAVYGRDGYDYDGYRLRVEFPRSGRGTGRGGGGGGGGGAPRGRYGPPSRRSENRVVVSGLPPSGSWQDLKDHMREAGDVCYADVYRDGTGVVEFVRKEDMTYAVRKLDNTKFRSHEVGYTRILFFDQNWIQWS

SEQ ID NO: 777407 - protein, 257 aa, Homo sapiens; identical to SEQ ID NO: 777406

SEQ ID NO: 777408 - protein, 291 aa, Homo sapiens
SFSFSSSVSPPYPCAELIKAPFWRGRGRRGAAAGSLCRALGLVGRPVLESALFVTAMSGGGVIRGPAGNNDCRIYVGNLPPDIRTKDIEDVFYKYGAIRDIDLKNRRGGPPFAFVEFEDPRDAEDAVYGRDGYDYDGYRLRVEFPRSGRGTGRGGGGGGGGGAPRGRYGPPSRRSENRVVVSGLPPSGSWQDLKDHMREAGDVCYADVYRDGTGVVEFVRKEDMTYAVRKLDNTKFRSHEADRFPDVLPASATDPNCRTSHSSPRPPGSIQWGISSKRNQTNVFQPLHSGD

SEQ ID NO: 777409 - protein, 298 aa, Homo sapiens; identical to SEQ ID NO: 777398

SEQ ID NO: 777410 - protein, 91 aa, Homo sapiens
  misc_feature (64)..(64): Xaa can be any naturally occurring amino acid
  misc_feature (75)..(75): Xaa can be any naturally occurring amino acid
  misc_feature (86)..(86): Xaa can be any naturally occurring amino acid
LEPLPTLTSGLGAQRGLWGGGQKPPGPQTPWAPSPLLKPQQESLCVSEAPSSKALVGFTQMTIXAKGKHRSYLKXFRDYPPLRMPXIPFLL

SEQ ID NO: 777411 - protein, 53 aa, Homo sapiens
MEHSINPDILRPPLNKPGIGGGYQGLETGSGQRAPCTSWGCLNGKQKLELIVG

SEQ ID NO: 777412 - protein, 45 aa, Homo sapiens
MGSWEDPAMLFLMISERRLFSGSGQMMGEGQEAEFTTVSENTVYQ

SEQ ID NO: 777413 - protein, 1415 aa, Homo sapiens
MRCLRHSVQGSWVCRDWGLPEDFLEEVTATMGWEQWTLSRPRVRRDGGTQMPNLPGNTWLRPSPNPSPYFLPWSSSRSLSLAHLPGWIFNETDSEEVGAGRDPRILVIFLSTLCQGNLNWGQHLGPLTVTDWGRRSCSPLPLGVFWGPVVCWRKQVMRLVQRMWEAVTPGGHEGAVELQALQMTAASCFQEPGVQGHLCRGFLFSLPGVRGQCTTAEAGAQGASVVLIYLWKTSHSSSLQSEFFALSDLNLLRESCHSPLWAIVSLPVKFYYFSFLFLRCSLTLSPRLECNAVISAHCHLRLSSSSDFPASASRVAGIPGARHHAWLIFCIFSRDGILYVGQAGLELLTSGDLPTLASQSAGITGMSHCAWPLPVKFLNGELGARCGFQPGAWGAVLVSGAVQDTFALCHLHGHLEPAQVAKASWGPEPGDSPSGQLDSGGLWLTRSPAGALVQLRFPDSAPASTAVHVCVSCSRPRASVSRVCWGGMGQAVVLQHEEGAMRSSHDLPRLAIKCSSPHIRVGLGLPFTDHICEVPSWVLDIICLEKQLLVDPFYSERTKSHRGLGSSPTSATNWHVTLSILHCSEPRPWPLPGSLPGSLPPLTTSDGRCGGLLPGSQGWVRALEVLSLNQGGHSTGEWNCPASPCVALWVCEGGLAGGLGLALGAVLLPHFIDRETEALGGLTDIPTFKMSSGGLSSGAWEKGPSGFGKQPPAQGETCFFSSCGSIRRIVVSPVPSVNKDLYCEKIFSFFFGTQSHSVAQARVDWRDLRLNANLQGSIDSPASPSHVAGITAACQIFVFLVEPGFHHVGQAGLELLTSTDPPTLASQVLGLQARATAPSLEKMFLEPEETSVPTDPSGPRCAELPCWLGLSAAPGRCFLHLRMGEGWALGERGTWDLRLSSLRQAGLIGAISEKGRLKLSREEAFEGDPGRWRDGLGHQGHTRNMGGPCLSLDEGNGGRATTSVSVTQQHQAPRWAPRTHPLPYLCLHALFPPPRLPAEGAVPGGCLSLGKRGSDPVKMLDRQPPPPQKCVLSGEPFYSHLPAILTGGRFDGYRADPYLSTLLRTPRKLRRPSRLPDSCPGVAVCFFPGPTLRGSELRQNPFFIHFLQNKTTYRKVNKTYNAQPNTLLGSKRSATTIRKKFCQHPSALPSQCHFRPLCPGLCESCVLVFLKSLQHPIMQALQYFPVSVLYPLESYRCKFWQLASLARYYVCEIYSCCCAQYSLCMFIAKNFHCLAVIVVHRFISLSVKLVQCMQPRMPLNVAQHKFVNFLKTLYRFLFAIFFFSSSAIVSGSVFYAGPETVLPVWSMEAKRLDMPAVDGQLVCFYFGVTTHNAASNSFVHVSDARVFFANGAQIFLGFVLRSLTPGFQGMKIFLNIVLVYVPTSSKTEFPCLPILGRHFTFASLVGCIVMALICI

SEQ ID NO: 777414 - protein, 1382 aa, Homo sapiens
MGTVDPKQAKGAEGRWYPDAQVFQAIPGSGPAPIHPLTFCHGVPAGHSPWHTFQAGFLMKQTQGGGAGRDPRILVIFLSTLCQGNLNWGQHLGPLTVTDWGRRSCSPLPLGVFWGPVVCWRKQVMRLVQRMWEAVTPGGHEGAVELQALQMTAASCFQEPGVQGHLCRGFLFSLPGVRGQCTTAEAGAQGASVVLIYLWKTSHSSSLQSEFFALSDLNLLRESCHSPLWAIVSLPVKFYYFSFLFLRCSLTLSPRLECNAVISAHCHLRLSSSSDFPASASRVAGIPGARHHAWLIFCIFSRDGILYVGQAGLELLTSGDLPTLASQSAGITGMSHCAWPLPVKFLNGELGARCGFQPGAWGAVLVSGAVQDTFALCHLHGHLEPAQVAKASWGPEPGDRSLWPTGQLRLVVTRSPAGALVQLRFPDSAPASTAVHVCVSCSRPRASVSRVCWGGMGQAVVLQHEEGAMRSSHDLPRLAIKCSSPHIRVGLGLPFTDHICEVPSWVLDIICLEKQLLVDPFYSERTKSHRGLGSSPTSATNWHVTLSILHCSEPRPWPLPGSLPGSLPPLTTSDGRCGGLLPGSQGWVRALEVLSLNQGGHSTGEWNCPASPCVALWVCEGGLAGGLGLALGAVLLPHFIDRETEALGGLTDIPTFKMSSGGLSSGAWEKGPSGFGKQPPAQGETCFFSSCGSIRRIVVSPVPSVNKDLYCEKIFSFFFGTQSHSVAQARVDWRDLRLNANLQGSIDSPASPSHVAGITAACQIFVFLVEPGFHHVGQAGLELLTSTDPPTLASQVLGLQARATAPSLEKMFLEPEETSVPTDPSGPRCAELPLLVGAQRSPREVLPAPQDGRGWALGERGTWDLRLSSLRQAGLIGAISEKGRLKLSREEAFEGDPGRWRDGLGHQGHTRNMGGPCLSLDEGNGGRATTSVSVTQQHQAPRWAPRTHPLPYLCLHALFPPPRLPAEGAVPGGCLSLGKRGSDPVKMLDRQPPPPQKCVCVVNPFKPSSSHSPGGRFDGYRADPYLSTLLRTPRKLRRPSRLPDSCPGVAVCFFPGPTLRGSELRQNPFFIHFLQNKTTYRKVNKTYNAQPNTLLGSKRSATTIRKKFCQHPSALPSQCHFRPLCPGLCESCVLVFLKSLQHPIMQALQYFPVSVLYPLESYRCKFWQLASLARYYVCEIYSCCCAQYSLCMFIAKNFHCLAVIVVHRFISLSVKLVQCMQPRMPLNVAQHKFVNFLKTLYRFLFAIFFFSSSAIVSGSVFYAGPETVLPVWSMEAKRLDMPAVDGQLVCFYFGVTTHNAASNSFVHVSDARVFFANGAQIFLGFVLRSLTPGFQGMKIFLNIVLVYVPTSSKTEFPCLPILGRHFTFASLVGCIVMALICI

SEQ ID NO: 777415 - protein, 630 aa, Homo sapiens
GRSRRLPGQGRRAWRAPGRPRSWGRREAGARDEAAAAGGRGPGPCRCSQGRRAWIAPGKPAMPAAWTPFMAAEEMHWPVPMKAIGAQNLLTMPGGVAKAGYLHKKGGTQLQLLKWPLRFVIIHKRCVYYFKSSTSASPQGAFSLSGYNRVMRAAEETTSNNVFPFKIIHISKKHRTWFFSASSEEERKSWMALLRREIGHFHEKKDLPLDTSDSSSDTDSFYGAVERPVDISLSPYPTDNEDYEHDDEDDSYLEPDSPEPGRLEDALMHPPAYPPPPVPTPRKPAFSDMPRAHSFTSKGPGPLLPPPPPKHGLPDVGLAAEDSKRDPLCPRRAEPCPRVPATPRRMSDPPLSTMPTAPGLRKPPCFRESASPSPEPWTPGHGACSTSSAAIMATATSRNCDKLKSFHLSPRGPPTSEPPPVPANKPKFLKIAEEDPPREAAMPGLFVPPVAPRPPALKLPVPEAMARPAVLPRPEKPQLPHLQRSPPDGQSFRSFSFEKPRQPSQADTGGDDSDEDYEKVPLPNSVFVNTTESCEVERLFKATSPRGEPQDGLYCIRNSSTKSGKVLVVWDETSNKVRNYRIFEKDSKFYLEGEVLFVSVGSMVEHYHTHVLPSHQSLLLRHPYGYTGPR

SEQ ID NO: 777416 - protein, 630 aa, Homo sapiens; identical to SEQ ID NO: 777415

SEQ ID NO: 777417 - protein, 1460 aa, Homo sapiens
MPCSYSCFIPCISEQLLGTSCMPGPIPDRGLLAWLSSQPSLGTAGYEVLTAQCPGQLGVQGLGAPGRFFGGSNSYDGMGTVDPKQAKGAEGRWYPDAQVFQAIPGSGPAPIHPLTFCHGVPAGHSPWHTFQAGFLMKQTQGGEGLAGTLESSVIFLSTLCQGNLNWGQHLGPLTVTDWGRRSCSPLPLGVFWGPVVCWRKQVMRLVQRMWEAVTPGGHEGAVELQALQMTAASCFQEPGVQGHLCRGFLFSLPGVRGQCTTAEAGAQGASVVLIYLWKTSHSSSLQSEFFALSDLNLLRESCHSPLWAIVSLPVKFYYFSFLFLRCSLTLSPRLECNAVISAHCHLRLSSSSDFPASASRVAGIPGARHHAWLIFCIFSRDGILYVGQAGLELLTSGDLPTLASQSAGITGMSHCAWPLPVKFLNGELGARCGFQPGAWGAVLVSGAVQDTFALCHLHGHLEPAQVAKASWGPEPGDRSLWPTGQLRLVVNPKPSWGLVQLRFPDSAPASTAVHVCVSCSRPRASVSRVCWGGMGQAVVLQHEEGAMRSSHDLPRLAIKCSSPHIRVGLGLPFTDHICEVPSWVLDIICLEKQLLVDPFYSERTKSHRGLGSSPTSATNWHVTLSILHCSEPRPWPLPGSLPGSLPPLTTSDGRCGGLLPGSQGWVRALEVLSLNQGGHSTGEWNCPASPCVALWVCEGGLAGGLGLALGAVLLPHFIDRETEALGGLTDIPTFKMSSGGLSSGAWEKGPSGFGKPPPAQGETCFFSSCGSIRRIVVSPVPSVNKDLYCEKIFSFFFGTQSHSVAQARVDWRDLRLNANLQGSIDSPASPSHVAGITAACQIFVFLVEPGFHHVGQAGLELLTSTDPPTLASQVLGLQARATAPSLEKMFLEPEETSVPTDPSGPRCAELLLLVGAQRSPREVLPAPQDGRGWALGERGTWDLRLSSLRQAGLIGAISEKGRLKLSREEAFEGDPGRWRDGLGHQGHTRNMGGPCLSLDEGNGGRATTSVSVTQQHQAPRWAPRTHPLPYLCLHALFPPPRLPAEGAVPGGCLSLGKRGSDPVKMLDRQPPPPQKCVCVVNPFKPSSSHSPGGRFDGYRADPYLSTLLRTPRKLRRPSRLPDSCPGVAVCFFPGPTLRGSELRQNPFFIHFLQNKTTYRKVNENINAQPNTLLGSKRSATTIRKKFCQHPSALPSQCHFRPLCPGLCESCVLVFLKSLQHPIMQALQYFPVSVLYPLESYRCKFWQLASLARYYVCEIYSCCCAQYSLCMFIAKNFHCLAVIVVHRFISLSVKLVQCMQPRMPLNVAQHKFVNFLKTLYRFLFAIFFFSSSAIVSGSVFYAGPETVLPVWSMEAKRLDMPAVDGQLVCFYFGVTTHNAASNSFVHVSDARVFFANGAQIFLGFVLRSLTPGFQGMKIFLNIVLVYVPTSSKTEFPCLPILGRHFTFASLVGCIVMALICI

SEQ ID NO: 777418 - protein, 1383 aa, Homo sapiens
MGTVDPKQAKGAEGRWYPDAQVFQAIPGSGPAPIHPLTFCHGVPAGHSPWHTFQAGFLMKQTQGGRGWQGPRILVIFLSTLCQGNLNWGQHLGPLTVTDWGRRSCSPLPLGVFWGPVVCWRKQVMRLVQRMWEAVTPGGHEGAVELQALQMTAASCFQEPGVQGHLCRGFLFSLPGVRGQCTTAEAGAQGASVVLIYLWKTSHSSSLQSEFFALSDLNLLRESCHSPLWAIVSLPVKFYYFSFLFLRCSLTLSPRLECNAVISAHCHLRLSSSSDFPASASRVAGIPGARHHAWLIFCIFSRDGILSCWPGWSRTPDLSDLPTLASQSAGITGMSHCAWPLPVKFLNGELGARCGFQPGAWGAVLVSGAVQDTFALCHLHGHLEPAQVAKASWGPEPGDRSLWPTGQLRLVVTRSPAGALVQLRFPDSAPASTAVHVCVSCSRPRASVSRVCWGGMGQAVVLQHEEGAMRSSHDLPRLAIKCSSPHIRVGLGLPFTDHICEVPSWVLDIICLEKQLLVDPFYSERTKSHRGLGSSPTSATNWHVTLSILHCSEPRPWPLPGSLPGSLPPLTTSDGRCGGLLPGSQGWVRALEVLSLNQGGHSTGEWNCPASPCVALWVCEGGLAGGLGLALGAVLLPHFIDRETEALGGLTDIPTFKMSSGGLSSGAWEKGPSGFGKQPPAQGETCFFSSCGSIRRIVVSPVPSVNKDLYCEKIFSFFFGTQSHSVAQARVDWRDLRLNANLQGSIDSPASPSHVAGITAACQIFVFLVEPGFHHVGQAGLELLTSTDPPTLASQVLGLQARATAPSLEKMFLEPEETSVPTDPSGPRCAELPLLVGAQRSPREVLPAPQDGRGWALGERGTWDLRLSSLRQAGLIGAISEKGRLKLSREEAFEGDPGRWRDGLGHQGHTRNMGGPCLSLDEGNGGRATTSVSVTQQHQAPRWAPRTHPLPYLCLHALFPPPRLPAEGAVPGGCLSLGKRGSDPVKMLDRQPPPPQKCVLSGEPFYSHLPAILTGGRFDGYRADPYLSTLLRTPRKLRRPSRLPDSCPGVAVCFFPGPTLRGSELRQNPFFIHFLQNKTTYRKVNENINAQPNTLLGSKRSATTIRKKFCQHPSALPSQCHFRPLCPGLCESCVLVFLKSLQHPIMQALQYFPVSVLYPLESYRCKFWQLASLARYYVCEIYSCCCAQYSLCMFIAKNFHCLAVIVVHRFISLSVKLVQCMQPRMPLNVAQHKFVNFLKTLYRFLFAIFFFSSSAIVSGSVFYAGPETVLPVWSMEAKRLDMPAVDGQLVCFYFGVTTHNAASNSFVHVSDARVFFANGAQIFLGFVLRSLTPGFQGMKIFLNIVLVYVPTSSKTEFPCLPILGRHFTFASLVGCIVMALICI

SEQ ID NO: 777419 - protein, 1309 aa, Homo sapiens
MGTVDPKQAKGAEGRWYPDAQVFQAIPGSGPAPIHPLTFCHGVPAGHSPWHTFQAGFLMKQTQGGRGWQGPRILVIFLSTLCQGNLNWGQHLGPLTVTDWGRRSCSPLPLGVFWGPVVCWRKQVMRLVQRMWEAVTPGGHEGAVELQALQMTAASCFQEPGVQGHLCRGFLFSLPGVRGQCTTAEAGAQGASVVLIYLWKTSHSSSLQSEFFALSDLNLLRESCHSPLWAIVSLPVKFYYFSFLFLRCSLTLSPRLECNAVISAHCHLRLSSSSDFPASASRVAGIPGARHHAWLIFCIFSETGFYHVGQAGLELLTSGDLPTLASQSAGITGMSHCAWPLPVKFLNGELGARCGFQPGAWGAVLVSGAVQDTFALCHLHGHLEPAQVAKASWGPEPGDRSLWPTGQLRLVVTRSPAGALVQLRFPDSAPASTAVHVCVSCSRPRASVSRVCWGGMGQAVVLQHEEGAMRSSHDLPRLAIKCSSPHIRVGLGLPFTDHICEVPSWVLDIICLEKQLLVDPFYSERTKSHRGLGSSPTSATNWHVTLSILHCSEPRPWPLPGSLPGSLPPLTTSDGRCGGLLPGSQGRVRALEVLSLNQGGHSTGEWNCPASPCVALWVCEGGLAGGLGLALGAVLLPHFIDRETEALGGLTDIPTFKMSSGGLSSGAWEKGPSGFGKQPPAQGETCFFSSCGSIRRIVVSPVPSVNKDLYCEKIFSFFFGTQSHSVAQARVDWRDLRLNANLQGSIDSPASPSHVAGITAACQIFVFLVEPGFHHVGQAGLELLTSTDPPTLASQVLGLQARATAPSLEKMFLEPEETSVPTDPSGPRCAELPLLVGAQRSPREVLPAPQDGRGWALGERGTWDLRLSSLRQAGLIGAIFIERQIEAQQEKKLLRVIQALEGWPRTPGSHQEHGRAVLVSRRGEWGKGHNLCFCDPAASSPSLGTSHTPPAFLCLHALFPPPRLPAEGAVPGGCLSLGKRGSDPVKMLDRQPPPPQKCVCVVNPFKPSSSHSPGGRFDGYRADPYLSTLLRTPRKLRRPSRLPDSCPGVAVCFFPGPTLRGSELRQNPFFIHFLQNKTTYRKVNENINAQPNTLLGSKRSATTIRKKFCQHPSALPSQCHFRPLCPGLCESCVLVFLKSLQHPIMQALQYFPVSVLYPLESYRCKFWQLASLARYYVCEIYSCCCAQYSLCMFIAKNFHCLAVIVVHRFISLSVKLVQCMQPRMPLNVAQHKFVNFLKTLYRFLFAIFFFSSSAIVSGSVFYAVTRDSSSGMVHGSQKIGHACCRWTVGLFLVWGNYTQCCQQQFCPCL

SEQ ID NO: 777420 - protein, 89 aa, Homo sapiens
LSLASVLGSCWHKFMALRAAETRGVDLPALSHAQLAPWLARALLGCFCQPHGSPTCSAPETYNSERTESQAWERGGKVRVKAARGGLTR

SEQ ID NO: 777421 - protein, 143 aa, Homo sapiens
SWQFIPTISQEPVICLIVLIISKYWESSMRQSVERDIEFYLTEFFHIFLIKNTLGNATLRLPFIFFSPHPLPWRTINAHSSSCHLSAKVSLVSAQAPLYPSSRTPLPIAHLHLDGSQWGRVGIYRGSEEVLNSLILHSTNMKK

SEQ ID NO: 777422 - protein, 111 aa, Homo sapiens
GNRGSGALANSGFRFKARWTGLQSPAALPLPVLPGPHSTGFISASWNWRGLAGPSVLTRSLSCVGSPGLSSRCQLSSHCHLVSCAVWPGPSKCPGGLSAVLGWVQPHGHHR

SEQ ID NO: 777423 - protein, 75 aa, Homo sapiens
EDRLAEEGGGFLAERDCGCGPAAYPSSSSPEPFLRNQPPQIRKLGFREIKGLGEAENAKGIDSVVDGESLKTVEQ

SEQ ID NO: 777424 - protein, 188 aa, Homo sapiens
MAGRGWGALWVCVAAATLLHAGGLARADCWLIEGDKGFVWLAICSQNQPPYEAIPQQINSTIVDLRLNENRIRSVQYASLSRFGNLTYLNLTKNEIGYIEDGAFSGQFNLQVLQLGYNRLRNLTEGMLRGLGKLEYLYLQANLIEVVMASSFWECPNIVNIDLSMNRIQQLNSGTFAGLAKLSVCELY

SEQ ID NO: 777425 - protein, 51 aa, Homo sapiens
MYLVTVLRNLFSILAVSSDCPLHTPMYFFLSNLCWPDIGFTSAMVPKMIVD

SEQ ID NO: 777426 - protein, 101 aa, Homo sapiens
ICTIVTSLHGRNVIQVKGDKKIPFTAMQKTLTSHKEQVSSFRVRCCGQTPENRPHSWRRKRKANHGAQLFPPTDRTLEAGTTVTGGGPTSGTTLDMQDAGS

SEQ ID NO: 777427 - protein, 83 aa, Homo sapiens
SVRRSRGLLGGWLGVSSLYPDAHVGAPGFREPAKRPLSFLLWYSQTATGRAFRAWAGVGEGSFLNFLSQVYPYPRAPLREQIP

SEQ ID NO: 777428 - protein, 122 aa, Homo sapiens
NHSELHPYTVSWCWSFSMCSPPLMPSPSCLYPKRLPFLAGSWLVQPVGGIPCRKQDRGHRKGWVVLSHPSLLQSCVPVELHPSRPTSDPSLRPQLQLSPVSSFALPSLVCCLKPAHASLSSL

SEQ ID NO: 777429 - protein, 115 aa, Homo sapiens
HLKKMQLHGKGSQDPSTKVHIKALQTVTSFLLLCAIYFLSMIISVCNFGRLEKQPVFMFCQAIIFSYPSTHPFILILGNKKLKQIFLSVLRHVRYWVKDRSLRLHRFTRGALCVF

SEQ ID NO: 777430 - protein, 138 aa, Homo sapiens
FPREIHFHVHRYPIDTLPTSKEDLQLWCHKRWEEKEERLRSFYQGEKNFYFTGQSVIPPCKSELRVLVVKLLSILYWTLFSPAMCLLIYLYSLVKWYFIITIVIFVLQERIFGGLEIIELACYRLLHKQPHLNSKKNE

SEQ ID NO: 777431 - protein, 101 aa, Homo sapiens
AVTSVGEDGEESEPLHNAGEIVKWYSHVRTAWKSFRRLNMELPYDPAIPLLGVYPREMKTYVTQRLVGNVCSCITLNSQKLETSQPRSFPSQIPQEVYREV

SEQ ID NO: 777432 - protein, 148 aa, Homo sapiens
LIKCKLSHFNLQPSGNRSYPSSRNYDCGVNPFSCFLAVLFYNALEETETSLLHPGQEDKGGCMEIQTALLLQAIPTVQLATDFTWFWSNLNLEYARENFYQARWKTPRIGLSHGGIGTMVRVQWMEKASSLKMVMETSTAQGNTNQVP

SEQ ID NO: 777433 - protein, 192 aa, Homo sapiens
LIKCKLSHFNLQPSGNRSYPSSRNYDCGVNPFSCFLAVLFYNALEETETSLLHPGQEDKGGCMEIQTALLLQAIPTVQLATDFTWFWSNLNLEYARENFYQARWELLLGQDKSPHPLPSAWFWVMSPKRISPSVSQNPTSLVPSLLNPRGGKQLLPSTVRTARVCWEPIQLRVPVQQCCQVTNVETYSKNCM

SEQ ID NO: 777434 - protein, 134 aa, Homo sapiens
LIKCKLSHFNLQPSGNRSYPSSRNYDCGVNPFSCFLAVLFYNALEETETSLLHPGQEDKGGCMEIQTALLLQAIPTVQLATDFTWFWSNLNLEYARENFYQARWKTPRIGLSHGGIGNKKIMGKEIREGGKNTP

SEQ ID NO: 777435 - protein, 105 aa, Homo sapiens
SDTRVLSLCPGGAAGASAFLTPGSQPQSLPFAWMFAVATLLTSLLLVFSLSPVDLERYCQDDLSEILFSSVAWSEVLMSYCLCGLSLTGSPSFITFYNLLSTDHL

SEQ ID NO: 777436 - protein, 719 aa, Homo sapiens
GIWPPPPTPFPQAPGSCKSTICRTLGDRGWPEEMKPSWLQCRKVTSAGGLGGPLPGSSPARGAGAALRALVVPGPRGGLGGRGCRALSSGSGSEYKTHFAASVTDPERFWGKAAEQISWYKPWTKTLENKHSPSTRWFVEGMLNICYNAVDRHIENGKGDKIAIIYDSPVTNTKATFTYKEVLEQVSKLAGVLVKHGIKKGDTVVIYMPMIPQAMYTMLACARIGAIHSLIFGGFASKELSSRIDHVKPKVVVTASFGIEPGRRVEYVPLVEEALKIGQHKPDKILIYNRPNMEAVPLAPGRDLDWDEEMAKAQSHDCVPVLSEHPLYILYTSGTTGLPKGVIRPTGGYAVMLHWSMSSIYGLQPGEVWWAASDLGWVVGHSYICYGPLLHGNTTVLYEGKPVGTPDAGAYFRVLAEHGVAALFTAPTAIRAIRQQDPGAALGKQYSLTRFKTLFVAGERCDVETLEWSKNVFRVPVLDHWWQTETGSPITASCVGLGNSKTPPPGQAGKSVPGYNVMILDDNMQKLKARCLGNIVVKLPLPPGAFSGLWKNQEAFKHLYFEKFPGYYDTMDAGYMDEEGYLYVMSRVDDVINVAGHRISAGAIEESILSHGTVADCAVVGKEDPLKGHVPLALCVLRKDINATEEQVLEEIVKHVRQNIGPVAAFRNAVFVKQLPKTRSGKIPRSALSAIVNGKPYKITSTIEDPSIFGHVEEMLKQA

SEQ ID NO: 777437 - protein, 626 aa, Homo sapiens
  misc_feature (33)..(33): Xaa can be any naturally occurring amino acid
MCMCLVRYSSQAVTPEYTERIAEPNALRLKTQXCYQVVAVSTQAQRYVSKAVYRHIFQAAKRVLDSISVYEHGLFQSISKSNFTYRRSSDRRVSKLAGVLVKHGIKKGDTVVIYMPMIPQAMYTMLACARIGAIHSLIFGGFASKELSSRIDHVKPKVVVTASFGIEPGRRVEYVPLVEEALKIGQHKPDKILIYNRPNMEAVPLAPGRDLDWDEEMAKAQSHDCVPVLSEHPLYILYTSGTTGLPKGVIRPTGGYAVMLHWSMSSIYGLQPGEVWWAASDLGWVVGHSYICYGPLLHGNTTVLYEGKPVGTPDAGAYFRVLAEHGVAALFTAPTAIRAIRQQDPGAALGKQYSLTRFKTLFVAGERCDVETLEWSKNVFRVPVLDHWWQTETGSPITASCVGLGNSKTPPPGQAGKSVPGYNVMILDDNMQKLKARCLGNIVVKLPLPPGAFSGLWKNQEAFKHLYFEKFPGYYDTMDAGYMDEEGYLYVMSRVDDVINVAGHRISAGAIEESILSHGTVADCAVVGKEDPLKGHVPLALCVLRKDINATEEQVLEEIVKHVRQNIGPVAAFRNAVFVKQLPKTRSGKIPRSALSAIVNGKPYKITSTIEDPSIFGHVEEMLKQA

SEQ ID NO: 777438 - protein, 650 aa, Homo sapiens
GIWPPPPTPFPQAPGSCKSTICRTLGDRGWPEEMKPSWLQCRKVTSAGGLGGPLPGSSPARGAGAALRALVVPGPRGGLGGRGCRALSSGSGSEYKTHFAASVTDPERFWGKAAEQISWYKPWTKTLENKHSPSTRWFVEGMLNICYNAVDRHIENGKGDKIAIIYDSPVTNTKATFTYKEVLEQVSKLAGVLVKHGIKKGDTVVIYMPMIPQAMYTMLACARIGAIHSLIFGGFASKELSSRIDHVKPKVVVTASFGIEPGRRVEYVPLVEEALKIGQHKPDKILIYNRPNMEAVPLAPGRDLDWDEEMAKAQSHDCVPVLSEHPLYILYTSGTTGLPKGVIRPTGGYAVMLHWSMSSIYGLQPGEVWWAASDLGWVVGHSYICYGPLLHGNTTVLYEGKPVGTPDAGAYFRVLAEHGVAALFTAPTAIRAIRQQDPGAALGKQYSLTRFKTLFVAGERCDVETLEWSKNVFRVPVLDHWWQTETGSPITASCVGLGNSKTPPPGQAGKSVPGYNVMILDDNMQKLKARCLGNIVVKLPLPPGAFSGLWKNQEAFKHLYFEKFPGYYDTMDAGYMDEEGYLYVMSRVDDVINVAGHRISAGAIEESILSHGTVADCAVVGKEDPLKGHVPLALCVLRKDIMHTERLECA

SEQ ID NO: 777439 - protein, 372 aa, Homo sapiens
GIWPPPPTPFPQAPGSCKSTICRTLGDRGWPEEMKPSWLQCRKVTSAGGLGGPLPGSSPARGAGAALRALVVPGPRGGLGGRGCRALSSGSGSEYKTHFAASVTDPERFWGKAAEQISWYKPWTKTLENKHSPSTRWFVEGMLNICYNAVDRHIENGKGDKIAIIYDSPVTNTKATFTYKEVLEQVSKLAGVLVKHGIKKGDTVVIYMPMIPQAMYTMLACARIGAIHSLIFGGFASKELSSRIDHVKPKVVVTASFGIEPGRRVEYVPLVEEALKIGQHKPDKILIYNRPNMEAVPLAPGRDLDWDEEMAKAQSHDCVPVLSEHPLYILYTSGTTGLPKVLTLLEITIYSSRFTLHQECLITDWKCLQTLL

SEQ ID NO: 777440 - protein, 719 aa, Homo sapiens; identical to SEQ ID NO: 777436

SEQ ID NO: 777441 - protein, 736 aa, Homo sapiens
GIWPPPPTPFPQAPGSCKSTICRTLGDRGWPEEMKPSWLQCRKVTSAGGLGGPLPGSSPARGAGAALRALVVPGPRGGLGGRGCRALSSGSGSEYKTHFAASVTDPERFWGKAAEQISWYKPWTKTLENKHSPSTRWFVEGMLNICYNAVDRHIENGKGDKIAIIYDSPVTNTKATFTYKEVLEQVSKLAGVLVKHGIKKGDTVVIYMPMIPQAMYTMLACARIGAIHSLIFGGFASKELSSRIDHVKPKVVVTASFGIEPGRRVEYVPLVEEALKIGQHKPDKILIYNRPNMEAVPLAPGRDLDWDEEMAKAQSHDCVPVLSEHPLYILYTSGTTGLPKGVIRPTGGYAVMLHWSMSSIYGLQPGEVWWAASDLGWVVGHSYICYGPLLHGNTTVLYEGKPVGTPDAGAYFRVLAEHGVAALFTAPTAIRAIRQQDPGAALGKQYSLTRFKTLFVAGERCDVETLEWSKNVFRVPVLDHWWQTGIKHKDLFIFSSLFLISETGSPITASCVGLGNSKTPPPGQAGKSVPGYNVMILDDNMQKLKARCLGNIVVKLPLPPGAFSGLWKNQEAFKHLYFEKFPGYYDTMDAGYMDEEGYLYVMSRVDDVINVAGHRISAGAIEESILSHGTVADCAVVGKEDPLKGHVPLALCVLRKDINATEEQVLEEIVKHVRQNIGPVAAFRNAVFVKQLPKTRSGKIPRSALSAIVNGKPYKITSTIEDPSIFGHVEEMLKQA

SEQ ID NO: 777442 - protein, 488 aa, Homo sapiens
GIWPPPPTPFPQAPGSCKSTICRTLGDRGWPEEMKPSWLQCRKVTSAGGLGGPLPGSSPARGAGAALRALVVPGPRGGLGGRGCRALSSGSGSEYKTHFAASVTDPERFWGKAAEQISWYKPWTKTLENKHSPSTRWFVEGMLNICYNAVDRHIENGKGDKIAIIYDSPVTNTKATFTYKEVLEQVSKLAGVLVKHGIKKGDTVVIYMPMIPQAMYTMLACARIGAIHSLIFGGFASKELSSRIDHVKPKVVVTASFGIEPGRRVEYVPLVEEALKIGQHKPDKILIYNRPNMEAVPLAPGRDLDWDEEMAKAQSHDCVPVLSEHPLYILYTSGTTGLPKGVIRPTGGYAVMLHWSMSSIYGLQPGEVWWAASDLGWVVGHSYICYGPLLHGNTTVLYEGKPVGTPDAGAYFRVLAEHGVAALFTAPTAIRAIRQQDPGAALGKQYSLTRFKTLFVAGERCDVETLEWSKNVFRVPVLDHWWQTGIKH

SEQ ID NO: 777443 - protein, 94 aa, Homo sapiens
TDKTQRTQSPMSGLGTVAMEDRQDTTHTITDVRIGDGCYRQRRDEEGAGLGAGSVTAEWSVDHCNDERASFGHSVDLEHPPKQTTHCQCVQKQR

SEQ ID NO: 777444 - protein, 103 aa, Homo sapiens
ISLPGSSLHSCIVLIVSLYHQVVTGTHPATSQLLLLPTPTWRGGVSTRELPTPDWRGGVSTRELPIPAWRGGVSMRELPIPAWRGGVSTRELLLRRKQLKHTQ

SEQ ID NO: 777445 - protein, 105 aa, Homo sapiens
NAVFAVAVWMASERSLSYYNFSQAGFVPVAHAAVSNTAHLPHSTAVSALPGLSKVVLKSLLRFRMTSCPGLPKSVLVLAQNVPSPGKHLNPRQARTIACPIWSLL

SEQ ID NO: 777446 - protein, 84 aa, Homo sapiens
IGSHDSKVKFHDKPSVSWGIEKPIVAQSKSKSPQTKEADSTRFSLQPSSSPWEATGAPPESKGRRIWSLMSKGRRSRSKHLAQK

SEQ ID NO: 777447 - protein, 1366 aa, Homo sapiens
MENYFQAEAYNLDKVLDEFEQNEDETVSSTLLDTKWNKILDPPSHRLSFNPTLASVNESAVSNESQPQLKVFSLAHSAPLTTEEEDHCANGQDCNLNPEIATMWIDENAVAEDQLIKRNYSWDDQCSAVEVGEKKCGNLACLPDEKNVLVVAVMHNCDKRTLQNDLQDCNNYNSQSLMDAFSCSLDNENRQTDQFSFSINESTEKDMNSEKQMDPLNRPKTEGRSVNHLCPTSSDSLASVCSPSQLKDDGSIGRDPSMSAITSLTVDSVISSQGTDGCPAVKKQENYIPDEDLTGKISSPRTDLGSPNSFSHMSEGILMKKEPAEESTTEESLRSGLPLLLKPDMPNGSGRNNDCERCSDCLVPNEVRADENEGYEHEETLGTTEFLNMTEHFSESQDMTNWKLTKLNEMNDSQVNEEKEKFLQISQPEDTNGDSGGQCVGLADAGLDLKGTCISESEECDFSTVIDTPAANYLSNGCDSYGMQDPGVSFVPKTLPSKEDSVTEEKEIEESKSECYSNIYEQRGNEATEGSGLLLNSTGDLMKKNYLHNFCSQVPSVLGQSSPKVVASLPSISVPFGGARPKQPSNLKLQIPKPLSDHLQNDFPANSGNNTKNKNDILGKAKLGENSATNVCSPSLGNISNVDTNGEHLESYEAEISTRPCLALAPDSPDNDLRAGQFGISARKPFTTLGEVAPVWVPDSQAPNCMKCEARFTFTKRRHHCRACGKVFCASCCSLKCKLLYMDRKEARVCVICHSVLMNVAQPREQRRVWFADGILPNGEVADAAKLTMNGTSSAGTLAVSHDPVKPVTTSPLPAETDICLFSGSITQVGSPVGSAMNLIPEDGLPPILISTGVKGDYAVEEKPSQISVMQQLEDGGPDPLVFVLNANLLSMVKIVNYVNRKCWCFTTKGMHAVGQSEIVILLQCLPDEKCLPKDIFNHFVQLYRDALAGNVVSNLGHSFFSQSFLGSKEHGGFLYVTSTYQSLQDLVLPTPPYLFGILIQKWETPWAKVFPIRLMLRLGAEYRLYPCPLFSVRFRKPLFGETGHTIMNLLADFRNYQYTLPVVQGLVVDMEVRKTSIKIPSNRYNEMMKAMNKSNEHVLAGGACFNEKADSHLVCVQNDDGNYQTQAISIHNQPRKVTGASFFVFSGALKSSSGYLAKSSIVEDGVMVQITAENMDSLRQALREMKDFTITCGKADAEEPQEHIHIQWVDDDKNVSKGVVSPIDGKSMETITNVKIFHGSEYKANGKVIRWTEVFFLENDDQHNCLSDPADHSRLTEHVAKAFCLALCPHLKLLKEDGMTKLGLRVTLDSDQVGYQAGSNGQPLPSQYMNDLDSALVPVIHGGACQLSEGPVVMELIFYILENIV

SEQ ID NO: 777448 - protein, 1226 aa, Homo sapiens
MENYFQAEAYNLDKVLDEFEQNEDETVSSTLLDTKWNKILDPPSHRLSFNPTLASVNESAVSNESQPQLKVFSLAHSAPLTTEEEDHCANGQDCNLNPEIATMWIDENAVAEDQLIKRNYSWDDQCSAVEVGEKKCGNLACLPDEKNVLVVAVMHNCDKRTLQNDLQDCNNYNSQSLMDAFSCSLDNENRQTDQFSFSINESTEKDMNSEKQMDPLNRPKTEGRSVNHLCPTSSDSLASVCSPSQLKDDGSIGRDPSMSAITSLTVDSVISSQGTDGCPAVKKQENYIPDEDLTGKISSPRTDLGSPNSFSHMSEGILMKKEPAEESTTEESLRSGLPLLLKPDMPNGSGRNNDCERCSDCLVPNEVRADENEGYEHEETLGTTEFLNMTEHFSESQDMTNWKLTKLNEMNDSQVNEEKEKFLQISQPEDTNGDSGGQCVGLADAGLDLKGTCISESEECDFSTVIDTPAANYLSNGCDSYGMQDPGVSFVPKTLPSKEDSVTEEKEIEESKSECYSNIYEQRGNEATEGSGLLLNSTGDLMKKNYLHNFCSQVPSVLGQSSPKVVASLPSISVPFGGARPKQPSNLKLQIPKPLSDHLQNDFPANSGNNTKNKNDILGKAKLGENSATNVCSPSLGNISNVDTNGEHLESYEAEISTRPCLALAPDSPDNDLRAGQFGISARKPFTTLGEVAPVWVPDSQAPNCMKCEARFTFTKRRHHCRACGKVFCASCCSLKCKLLYMDRKEARVCVICHSVLMNAQAWENMMSASSQSPNPNNPAEYCSTIPPLQQAQASGALSSPPPTVMVPVGVLKHPGAEVAQPREQRRVWFADGILPNGEVADAAKLTMNGTSSAGTLAVSHDPVKPVTTSPLPAETDICLFSGSITQVGSPVGSAMNLIPEDGLPPILISTGVKGDYAVEEKPSQISVMQQLEDGGPDPLVFVLNANLLSMVKIVNYVNRKCWCFTTKGMHAVGQSEIVILLQCLPDEKCLPKDIFNHFVQLYRDALAGNVVSNLGHSFFSQSFLGSKEHGGFLYVTSTYQSLQDLVLPTPPYLFGILIQKWETPWAKVFPIRLMLRLGAEYRLYPCPLFSVRFRKPLFGETGHTIMNLLADFRNYQYTLPVVQGLVVDMEVRKTSIKIPSNRYNEMMKAMNKSNEHVLAGGACFNEKADSHLVCVQNDDGNYQTQAISIHNQPRKVTGASFFVFSGALKSSSGYLAKSSIVEGKE

SEQ ID NO: 777449 - protein, 1271 aa, Homo sapiens
MENYFQAEAYNLDKVLDEFEQNEDETVSSTLLDTKWNKILDPPSHRLSFNPTLASVNESAVSNESQPQLKVFSLAHSAPLTTEEEDHCANGQDCNLNPEIATMWIDENAVAEDQLIKRNYSWDDQCSAVEVGEKKCGNLACLPDEKNVLVVAVMHNCDKRTLQNDLQDCNNYNSQSLMDAFSCSLDNENRQTDQFSFSINESTEKDMNSEKQMDPLNRPKTEGRSVNHLCPTSSDSLASVCSPSQLKDDGSIGRDPSMSAITSLTVDSVISSQGTDGCPAVKKQENYIPDEDLTGKISSPRTDLGSPNSFSHMSEGILMKKEPAEESTTEESLRSGLPLLLKPDMPNGSGRNNDCERCSDCLVPNEVRADENEGYEHEETLGTTEFLNMTEHFSESQDMTNWKLTKLNEMNDSQVNEEKEKFLQISQPEDTNGDSGGQCVGLADAGLDLKGTCISESEECDFSTVIDTPAANYLSNGCDSYGMQDPGVSFVPKTLPSKEDSVTEEKEIEESKSECYSNIYEQRGNEATEGSGLLLNSTGDLMKKNYLHNFCSQVPSVLGQSSPKVVASLPSISVPFGGARPKQPSNLKLQIPKPLSDHLQNDFPANSGNNTKNKNDILGKAKLGENSATNVCSPSLGNISNVDTNGEHLESYEAEISTRPCLALAPDSPDNDLRAGQFGISARKPFTTLGEVAPVWVPDSQAPNCMKCEARFTFTKRRHHCRACGKVFCASCCSLKCKLLYMDRKEARVCVICHSVLMNAQAWENMMSASSQSPNPNNPAEYCSTIPPLQQAQASGALSSPPPTVMVPVGVLKHPGAEVAQPREQRRVWFADGILPNGEVADAAKLTMNGTSSAGTLAVSHDPVKPVTTSPLPAETDICLFSGSITQVGSPVGSAMNLIPEDGLPPILISTGVKGDYAVEEKPSQISVMQQLEDGGPDPLVFVLNANLLSMVKIVNYVNRKCWCFTTKGMHAVGQSEIVILLQCLPDEKCLPKDIFNHFVQLYRDALAGNVVSNLGHSFFSQSFLGSKEHGGFLYVTSTYQSLQDLVLPTPPYLFGILIQKWETPWAKVFPIRLMLRLGAEYRLYPCPLFSVRFRKPLFGETGHTIMNLLADFRNYQYTLPVVQGLVVDMEVRKTSIKIPSNRYNEMMKAMNKSNEHVLAGGACFNEKADSHLVCVQNDDGNYQTQAISIHNQPRKVTGASFFVFSGALKSSSGYLAKSSIVEDGVMVQITAENMDSLRQALREMKDFTIRRIGNTLAQGVSHFWIRIPNM

SEQ ID NO: 777450 - protein, 657 aa, Homo sapiens
GLTVACGLTVACGLTVAIPPLQQAQASGALSSPPPTVMVPVGVLKHPGAEVAQPREQRRVWFADGILPNGEVADAAKLTMNGTSSAGTLAVSHDPVKPVTTSPLPAETDICLFSGSITQVGSPVGSAMNLIPEDGLPPILISTGVKGDYAVEEKPSQISVMQQLEDGGPDPLVFVLNANLLSMVKIVNYVNRKCWCFTTKGMHAVGQSEIVILLQCLPDEKCLPKDIFNHFVQLYRDALAGNVVSNLGHSFFSQSFLGSKEHGGFLYVTSTYQSLQDLVLPTPPYLFGILIQKWETPWAKVFPIRLMLRLGAEYRLYPCPLFSVRFRKPLFGETGHTIMNLLADFRNYQYTLPVVQGLVVDMEVRKTSIKIPSNRYNEMMKAMNKSNEHVLAGGACFNEKADSHLVCVQNDDGNYQTQAISIHNQPRKVTGASFFVFSGALKSSSGYLAKSSIVEDGVMVQITAENMDSLRQALREMKDFTITCGKADAEEPQEHIHIQWVDDDKNVSKGVVSPIDGKSMETITNVKIFHGSEYKANGKVIRWTEVFFLENDDQHNCLSDPADHSRLTEHVAKAFCLALCPHLKLLKEDGMTKLGLRVTLDSDQVGYQAGSNGQPLPSQYMNDLDSALVPVIHGGACQLSEGPVVMELIFYILENIV

SEQ ID NO: 777451 - protein, 525 aa, Homo sapiens
SRGSSKHSNITGVKGDYAVEEKPSQISVMQQLEDGGPDPLVFVLNANLLSMVKIVNYVNRKCWCFTTKGMHAVGQSEIVILLQCLPDEKCLPKDIFNHFVQLYRDALAGNVVSNLGHSFFSQSFLGSKEHGGFLYVTSTYQSLQDLVLPTPPYLFGILIQKWETPWAKVFPIRLMLRLGAEYRLYPCPLFSVRFRKPLFGETGHTIMNLLADFRNYQYTLPVVQGLVVDMEVRKTSIKIPSNRYNEMMKAMNKSNEHVLAGGACFNEKADSHLVCVQNDDGNYQTQAISIHNQPRKVTGASFFVFSGALKSSSGYLAKSSIVEDGVMVQITAENMDSLRQALREMKDFTITCGKADAEEPQEHIHIQWVDDDKNVSKGVVSPIDGKSMETITNVKIFHGSEYKANGKVIRWTEVFFLENDDQHNCLSDPADHSRLTEHVAKAFCLALCPHLKLLKEDGMTKLGLRVTLDSDQVGYQAGSNGQPLPSQYMNDLDSALVPVIHGGACQLSEGPVVMELIFYILENIV

SEQ ID NO: 777452 - protein, 1425 aa, Homo sapiens
MENYFQAEAYNLDKVLDEFEQNEDETVSSTLLDTKWNKILDPPSHRLSFNPTLASVNESAVSNESQPQLKVFSLAHSAPLTTEEEDHCANGQDCNLNPEIATMWIDENAVAEDQLIKRNYSWDDQCSAVEVGEKKCGNLACLPDEKNVLVVAVMHNCDKRTLQNDLQDCNNYNSQSLMDAFSCSLDNENRQTDQFSFSINESTEKDMNSEKQMDPLNRPKTEGRSVNHLCPTSSDSLASVCSPSQLKDDGSIGRDPSMSAITSLTVDSVISSQGTDGCPAVKKQENYIPDEDLTGKISSPRTDLGSPNSFSHMSEGILMKKEPAEESTTEESLRSGLPLLLKPDMPNGSGRNNDCERCSDCLVPNEVRADENEGYEHEETLGTTEFLNMTEHFSESQDMTNWKLTKLNEMNDSQVNEEKEKFLQISQPEDTNGDSGGQCVGLADAGLDLKGTCISESEECDFSTVIDTPAANYLSNGCDSYGMQDPGVSFVPKTLPSKEDSVTEEKEIEESKSECYSNIYEQRGNEATEGSGLLLNSTGDLMKKNYLHNFCSQVPSVLGQSSPKVVASLPSISVPFGGARPKQPSNLKLQIPKPLSDHLQNDFPANSGNNTKNKNDILGKAKLGENSATNVCSPSLGNISNVDTNGEHLESYEAEISTRPCLALAPDSPDNDLRAGQFGISARKPFTTLGEVAPVWVPDSQAPNCMKCEARFTFTKRRHHCRACGKVFCASCCSLKCKLLYMDRKEARVCVICHSVLMNAQAWENMMSASSQSPNPNNPAEYCSTIPPLQQAQASGALSSPPPTVMVPVGVLKHPGAEVAQPREQRRVWFADGILPNGEVADAAKLTMNGTSSAGTLAVSHDPVKPVTTSPLPAETDICLFSGSITQVGSPVGSAMNLIPEDGLPPILISTGVKGDYAVEEKPSQISVMQQLEDGGPDPLVFVLNANLLSMVKIVNYVNRKCWCFTTKGMHAVGQSEIVILLQCLPDEKCLPKDIFNHFVQLYRDALAGNVVSNLGHSFFSQSFLGSKEHGGFLYVTSTYQSLQDLVLPTPPYLFGILIQKWETPWAKVFPIRLMLRLGAEYRLYPCPLFSVRFRKPLFGETGHTIMNLLADFRNYQYTLPVVQGLVVDMEVRKTSIKIPSNRYNEMMKAMNKSNEHVLAGGACFNEKADSHLVCVQNDDGNYQTQAISIHNQPRKVTGASFFVFSGALKSSSGYLAKSSIVEDGVMVQITAENMDSLRQALREMKDFTITCGKADAEEPQEHIHIQWVDDDKNVSKGVVSPIDGKSMETITNVKIFHGSEYKANGKVIRWTEVFFLENDDQHNCLSDPADHSRLTEHVAKAFCLALCPHLKLLKEDGMTKLGLRVTLDSDQVGYQAGSNGQPLPSQYMNDLDSALVPVIHGGACQLSEGPVVMELIFYILENIV

SEQ ID NO: 777453 - protein, 762 aa, Homo sapiens
MENYFQAEAYNLDKVLDEFEQNEDETVSSTLLDTKWNKILDPPSHRLSFNPTLASVNESAVSNESQPQLKVFSLAHSAPLTTEEEDHCANGQDCNLNPEIATMWIDENAVAEDQLIKRNYSWDDQCSAVEVGEKKCGNLACLPDEKNVLVVAVMHNCDKRTLQNDLQDCNNYNSQSLMDAFSCSLDNENRQTDQFSFSINESTEKDMNSEKQMDPLNRPKTEGRSVNHLCPTSSDSLASVCSPSQLKDDGSIGRDPSMSAITSLTVDSVISSQGTDGCPAVKKQENYIPDEDLTGKISSPRTDLGSPNSFSHMSEGILMKKEPAEESTTEESLRSGLPLLLKPDMPNGSGRNNDCERCSDCLVPNEVRADENEGYEHEETLGTTEFLNMTEHFSESQDMTNWKLTKLNEMNDSQVNEEKEKFLQISQPEDTNGDSGGQCVGLADAGLDLKGTCISESEECDFSTVIDTPAANYLSNGCDSYGMQDPGVSFVPKTLPSKEDSVTEEKEIEESKSECYSNIYEQRGNEATEGSGLLLNSTGDLMKKNYLHNFCSQVPSVLGQSSPKVVASLPSISVPFGGARPKQPSNLKLQIPKPLSDHLQNDFPANSGNNTKNKNDILGKAKLGENSATNVCSPSLGNISNVDTNGEHLESYEAEISTRPCLALAPDSPDNDLRAGQFGISARKPFTTLGEVAPVWVPDSQAPNCMKCEARFTFTKRRHHCRACGKVFCASCCSLKCKLLYMDRKEARVCVICHSVLMNGKY

SEQ ID NO: 777454 - protein, 1407 aa, Homo sapiens
MENYFQAEAYNLDKVLDEFEQNEDETVSSTLLDTKWNKILDPPSHRLSFNPTLASVNESAVSNESQPQLKVFSLAHSAPLTTEEEDHCANGQDCNLNPEIATMWIDENAVAEDQLIKRNYSWDDQCSAVEVGEKKCGNLACLPDEKNVLVVAVMHNCDKRTLQNDLQDCNNYNSQSLMDAFSCSLDNENRQTDQFSFSINESTEKDMNSEKQMDPLNRPKTEGRSVNHLCPTSSDSLASVCSPSQLKDDGSIGRDPSMSAITSLTVDSVISSQGTDGCPAVKKQENYIPDEDLTGKISSPRTDLGSPNSFSHMSEGILMKKEPAEESTTEESLRSGLPLLLKPDMPNGSGRNNDCERCSDCLVPNEVRADENEGYEHEETLGTTEFLNMTEHFSESQDMTNWKLTKLNEMNDSQVNEEKEKFLQISQPEDTNGDSGGQCVGLADAGLDFTPAANYLSNGCDSYGMQDPGVSFVPKTLPSKEDSVTEEKEIEESKSECYSNIYEQRGNEATEGSGLLLNSTGDLMKKNYLHNFCSQVPSVLGQSSPKVVASLPSISVPFGGARPKQPSNLKLQIPKPLSDHLQNDFPANSGNNTKNKNDILGKAKLGENSATNVCSPSLGNISNVDTNGEHLESYEAEISTRPCLALAPDSPDNDLRAGQFGISARKPFTTLGEVAPVWVPDSQAPNCMKCEARFTFTKRRHHCRACGKVFCASCCSLKCKLLYMDRKEARVCVICHSVLMNAQAWENMMSASSQSPNPNNPAEYCSTIPPLQQAQASGALSSPPPTVMVPVGVLKHPGAEVAQPREQRRVWFADGILPNGEVADAAKLTMNGTSSAGTLAVSHDPVKPVTTSPLPAETDICLFSGSITQVGSPVGSAMNLIPEDGLPPILISTGVKGDYAVEEKPSQISVMQQLEDGGPDPLVFVLNANLLSMVKIVNYVNRKCWCFTTKGMHAVGQSEIVILLQCLPDEKCLPKDIFNHFVQLYRDALAGNVVSNLGHSFFSQSFLGSKEHGGFLYVTSTYQSLQDLVLPTPPYLFGILIQKWETPWAKVFPIRLMLRLGAEYRLYPCPLFSVRFRKPLFGETGHTIMNLLADFRNYQYTLPVVQGLVVDMEVRKTSIKIPSNRYNEMMKAMNKSNEHVLAGGACFNEKADSHLVCVQNDDGNYQTQAISIHNQPRKVTGASFFVFSGALKSSSGYLAKSSIVEDGVMVQITAENMDSLRQALREMKDFTITCGKADAEEPQEHIHIQWVDDDKNVSKGVVSPIDGKSMETITNVKIFHGSEYKANGKVIRWTEVFFLENDDQHNCLSDPADHSRLTEHVAKAFCLALCPHLKLLKEDGMTKLGLRVTLDSDQVGYQAGSNGQPLPSQYMNDLDSALVPVIHGGACQLSEGPVVMELIFYILENIV

SEQ ID NO: 777455 - protein, 1072 aa, Homo sapiens
MENYFQAEAYNLDKVLDEFEQNEDETVSSTLLDTKWNKILDPPSHRLSFNPTLASVNESAVSNESQPQLKVFSLAHSAPLTTEEEDHCANGQDCNLNPEIATMWIDENAVAEDQLIKRNYSWDDQCSAVEVGEKKCGNLACLPDEKNVLVVAVMHNCDKRTLQNDLQDCNNYNSQSLMDAFSCSLDNENRQTDQFSFSINESTEKDMNSEKQMDPLNRPKTEGRSVNHLCPTSSDSLASVCSPSQLKDDGSIGRDPSMSAITSLTVDSVISSQGTDGCPAVKKQENYIPDEDLTGKISSPRTDLGSPNSFSHMSEGILMKKEPAEESTTEESLRSGLPLLLKPDMPNGSGRNNDCERCSDCLVPNEVRADENEGYEHEETLGTTEFLNMTEHFSESQDMTNWKLTKLNEMNDSQVNEEKEKFLQISQPEDTNGDSGGQCVGLADAGLDLKGTCISESEECDFSTVIDTPAANYLSNGCDSYGMQDPGVSFVPKTLPSKEDSVTEEKEIEESKSECYSNIYEQRGNEATEGSGLLLNSTGDLMKKNYLHNFCSQVPSVLGQSSPKVVASLPSISVPFGGARPKQPSNLKLQIPKPLSDHLQNDFPANSGNNTKNKNDILGKAKLGENSATNVCSPSLGNISNVDTNGEHLESYEAEISTRPCLALAPDSPDNDLRAGQFGISARKPFTTLGEVAPVWVPDSQAPNCMKCEARFTFTKRRHHCRACGKVFCASCCSLKCKLLYMDRKEARVCVICHSVLMNAQAWENMMSASSQSPNPNNPAEYCSTIPPLQQAQASGALSSPPPTVMVPVGVLKHPGAEVAQPREQRRVWFADGILPNGEVADAAKLTMNGTSSAGTLAVSHDPVKPVTTSPLPAETDICLFSGSITQVGSPVGSAMNLIPEDGLPPILISTGVKGDYAVEEKPSQISVMQQLEDGGPDPLVFVLNANLLSMVKIVNYVNRKCWCFTTKGMHAVGQSEIVILLQCLPDEKCLPKDIFNHFVQLYRDALAGNVVSNLGHSFFSQSFLGSKEHGGFFICDIYLPVTARPSTPNPTLLVWDSYPEMGKVVGGTDVP

SEQ ID NO: 777456 - protein, 559 aa, Homo sapiens
MENYFQAEAYNLDKVLDEFEQNEDETVSSTLLDTKWNKILDPPSHRLSFNPTLASVNESAVSNESQPQLKVFSLAHSAPLTTEEEDHCANGQDCNLNPEIATMWIDENAVAEDQLIKRNYSWDDQCSAVEVGEKKCGNLACLPDEKNVLVVAVMHNCDKRTLQNDLQDCNNYNSQSLMDAFSCSLDNENRQTDQFSFSINESTEKDMNSEKQMDPLNRPKTEGRSVNHLCPTSSDSLASVCSPSQLKDDGSIGRDPSMSAITSLTVDSVISSQGTDGCPAVKKQENYIPDEDLTGKISSPRTDLGSPNSFSHMSEGILMKKEPAEESTTEESLRSGLPLLLKPDMPNGSGRNNDCERCSDCLVPNEVRADENEGYEHEETLGTTEFLNMTEHFSESQDMTNWKLTKLNEMNDSQVNEEKEKFLQISQPEDTNGDSGGQCVGLADAGLDLKGTCISESEECDFSTVIDTPAANYLSNGCDSYGMQDPGVSFVPKTLPSKEDSVTEEKEIEESKSECYSNIYEQRGNEATEGSGLLFFPQGSSKPAIYQCSFWWCKTQATF

SEQ ID NO: 777457 - protein, 713 aa, Homo sapiens
SWVQNGAVSVSAEHHICESTKPLPYTRDKEKGKKFGFSLLWRSLSRKEKPKTEHSSFSAQFPPEEWPVRDEDDLDNIPRDVEHEIIKRINPILTVDNLIKHTVLMQKYEEQKKYNSQGTSTDMLTIGHKYPSKEGVKKRQGLSAKPQGQGHSRRDRHKARNQGSEFQPGSIRLEKHPKLPATQPIPRIKSPNEMVGQKPLGEITTVLGSHLIYKKRISNPFQGLSHRGSTISKGHKIQKTSDLKPSQTGPKEKPFQKPRSLDSSRIFDGKAKEPYAEQPNDKMEAESIYINDPTVKPINDDFRGHLFSHPQQSMLQNDGKCCPFMESMLRYEVYGGENEVIPEVLRKSHSHFDKLGETKQTPHSLPSRGASFSDRTPSACRLVDNTIHQFQNLGLLDYPVGVNPLRQAARQDKDSEELLRKGFVQDAETTSLENEQLSNDDQALYQNEVEDDDGACSSLYLEEDDISENDDLRQMLPGHSQYSFTGGSQGNHLGKQKVIERSLTEYNSTMERVESQVLKRNECYKPTGLHATPGESQEPNLSAESCGLNSGAQFGFNYEEEPSVAKCVQASAPADERIFDYYSARKASFEAEVIQDTIGDTGKKPASWSQSPQNQEMRKHFPQKFQLFNTSHMPVLAQDVQYEHSHLEGTENHSMAGDSGIDSPRTQSLGSNNSVILDGLKRRQNFLQNVEGTKSSQPLTSNSLLPLTPVINV

SEQ ID NO: 777458 - protein, 120 aa, Homo sapiens
PVQMNPITQSQFVPLGEVLCCAISDMNTAQIVVTQESLLERLMKHYPGIAIPSEDILYTTLGTLIKERKIYHTGEGYFIVTPQTYFITNTTTQENKRMLPSDESRLMPASMTYLDTESGI

SEQ ID NO: 777459 - protein, 74 aa, Homo sapiens
NLSKRCGGYTSPLSSLKMELDSILTEILETSHQFVLELLHQLVIRPECENRQTQLDAYSRQRERVSLKYGYDNS

SEQ ID NO: 777460 - protein, 281 aa, Homo sapiens
MAAEEMHWPVPMKAIGAQNLLTMPGGVAKAGYLHKKGGTQLQLLKWPLRFVIIHKRCVYYFKSSTSASPQGAFSLSGYNRVMRAAEETTSNNVFPFKIIHISKKHRTWFFSASSEEERKSWMALLRREIGHFHEKKDLPLDTSDSSSDTDSFYGAVERPVDISLSPYPTDNEDYEHDDEDDSYLEPDSPEPGRLEDALMHPPAYPPPPVPTPRKPAFSDMPRAHSFTSKGPGPLLPPPPPKHGLPDVGLAAEDSKREPLCPRRAEPCPRVPATPRRMSDPL

SEQ ID NO: 777461 - protein, 290 aa, Homo sapiens
MCWVSTISFMAAEEMHWPVPMKAIGAQNLLTMPGGVAKAGYLHKKGGTQLQLLKWPLRFVIIHKRCVYYFKSSTSASPQGAFSLSGYNRVMRAAEETTSNNVFPFKIIHISKKHRTWFFSASSEEERKSWMALLRREIGHFHEKKDLPLDTSDSSSDTDSFYGAVERPVDISLSPYPTDNEDYEHDDEDDSYLEPDSPEPGRLEDALMHPPAYPPPPVPTPRKPAFSDMPRAHSFTSKGPGPLLPPPPPKHGLPDVGLAAEDSKREPLCPRRAEPCPRVPATPRRMSDPL

SEQ ID NO: 777462 - protein, 284 aa, Homo sapiens
MSFMAAEEMHWPVPMKAIGAQNLLTMPGGVAKAGYLHKKGGTQLQLLKWPLRFVIIHKRCVYYFKSSTSASPQGAFSLSGYNRVMRAAEETTSNNVFPFKIIHISKKHRTWFFSASSEEERKSWMALLRREIGHFHEKKDLPLDTSDSSSDTDSFYGAVERPVDISLSPYPTDNEDYEHDDEDDSYLEPDSPEPGRLEDALMHPPAYPPPPVPTPRKPAFSDMPRAHSFTSKGPGPLLPPPPPKHGLPDVGLAAEDSKREPLCPRRAEPCPRVPATPRRMSDPL

SEQ ID NO: 777463 - protein, 413 aa, Homo sapiens
MAAEEMHWPVPMKAIGAQNLLTMPGGVAKAGYLHKKGGTQLQLLKWPLRFVIIHKRCVYYFKSSTSASPQGAFSLSGYNRVMRAAEETTSNNVFPFKIIHISKKHRTWFFSASSEEERKVTGGPEDECKVTGGVGLQAPGWTCLGGSLVLGRWPLSPGQREGVAGTQAAGWVLPQLHPHAQSLVPAPTQGTCCPGRCPCGLRGATQPCCIQPGRLLCPWESQQSRQGSEGGGVRWGPPWWHRAHHSPADLQSWMALLRREIGHFHEKKDLPLDTSDSSSDTDSFYGAVERPVDISLSPYPTDNEDYEHDDEDDSYLEPDSPEPGRLEDALMHPPAYPPPPVPTPRKPAFSDMPRAHSFTSKGPGPLLPPPPPKHGLPDVGLAAEDSKREPLCPRRAEPCPRVPATPRRMSDPL

SEQ ID NO: 777464 - protein, 191 aa, Homo sapiens
MCWVSTISFMAAEEMHWPVPMKAIGAQNLLTMPGGVAKAGYLHKKGGTQLQLLKWPLRFVIIHKRCVYYFKSSTSASPQGAFSLSGYNRVMRAAEETTSNNVFPFKIIHISKKHRTWFFSASSEEERKSWMALLRREIGHFHEKKDLPLDTSDSSSDTDSFYGAVERPVDISLSPYPTDNEGDFYAPSSTA

SEQ ID NO: 777465 - protein, 148 aa, Homo sapiens
MAAEEMHWPVPMKAIGAQNLLTMPGGVAKAGYLHKKGGTQLQLLKWPLRFVIIHKRCVYYFKSSTSASPQGAFSLSGYNRVMRAAEETTSNNVFPFKIIHISKKHRTWFFSASSEEERKGDWPLPRKERPALGHQRLQLGHRQLLRRS

SEQ ID NO: 777466 - protein, 159 aa, Homo sapiens
MVTGPPRVSASTEEGTEAPRELAGAVLQRPLSRGSWLQGPGGMGPGRGLRAEAPAPAVDFQPSCVDWQVLGEWSGRPRLHRRLLDSRLHQQMWASCPKRPPTSLQRGETEARRGLTCLPRTVTRQGAGPGGARRDPHLPAQSPAERGGAGGCQARAGGH

SEQ ID NO: 777467 - protein, 319 aa, Homo sapiens
GRDGAAAAAGPAGGSAWRPSQAAASTQGPRARRALGGFMAAEEMHWPVPMKAIGAQNLLTMPGGVAKAGYLHKKGGTQLQLLKWPLRFVIIHKRCVYYFKSSTSASPQGAFSLSGYNRVMRAAEETTSNNVFPFKIIHISKKHRTWFFSASSEEERKSWMALLRREIGHFHEKKDLPLDTSDSSSDTDSFYGAVERPVDISLSPYPTDNEDYEHDDEDDSYLEPDSPEPGRLEDALMHPPAYPPPPVPTPRKPAFSDMPRAHSFTSKGPGPLLPPPPPKHGLPDVGLAAEDSKREPLCPRRAEPCPRVPATPRRMSDPL

SEQ ID NO: 777468 - protein, 188 aa, Homo sapiens
MCACVCQCIRVCICVSVHVSACACVYLCVSIKGPPRPGAHRPPQRTLHCSDSSSDTDSFYGAVERPVDISLSPYPTDNEDYEHDDEDDSYLEPDSPEPGRLEDALMHPPAYPPPPVPTPRKPAFSDMPRAHSFTSKGPGPLLPPPPPKHGLPDVGLAAEDSKREPLCPRRAEPCPRVPATPRRMSDPL

SEQ ID NO: 777469 - protein, 281 aa, Homo sapiens; identical to SEQ ID NO: 777460

SEQ ID NO: 777470 - protein, 422 aa, Homo sapiens
MCWVSTISFMAAEEMHWPVPMKAIGAQNLLTMPGGVAKAGYLHKKGGTQLQLLKWPLRFVIIHKRCVYYFKSSTSASPQGAFSLSGYNRVMRAAEETTSNNVFPFKIIHISKKHRTWFFSASSEEERKVTGGPEDECKVTGGVGLQAPGWTCLGGSLVLGRWPLSPGQREGVAGTQAAGWVLPQLHPHAQSLVPAPTQGTCCPGRCPCGLRGATQPCCIQPGRLLCPWESQQSRQGSEGGGVRWGPPWWHRAHHSPADLQSWMALLRREIGHFHEKKDLPLDTSDSSSDTDSFYGAVERPVDISLSPYPTDNEDYEHDDEDDSYLEPDSPEPGRLEDALMHPPAYPPPPVPTPRKPAFSDMPRAHSFTSKGPGPLLPPPPPKHGLPDVGLAAEDSKREPLCPRRAEPCPRVPATPRRMSDPL

SEQ ID NO: 777471 - protein, 205 aa, Homo sapiens
MCWVSTISFMAAEEMHWPVPMKAIGAQNLLTMPGGVAKAGYLHKKGGTQLQLLKWPLRFVIIHKRCVYYFKSSTSASPQGAFSLSGYNRVMRAAEETTSNNVFPFKIIHISKKHRTWFFSASSEEERKSWMALLRREIGHFHEKKDLPLDTSDSSSDTDSFYGAVERPVDISLSPYPTDNEDYEHDDEDDSSGAVASNKAAVSFA

SEQ ID NO: 777472 - protein, 223 aa, Homo sapiens
GVGMGVVGKPVGASGHLKPSGLRGVRLQVGVILIVVLKSSLWVRWGPPWWHRAHHSPADLQSWMALLRREIGHFHEKKDLPLDTSDSSSDTDSFYGAVERPVDISLSPYPTDNEDYEHDDEDDSYLEPDSPEPGRLEDALMHPPAYPPPPVPTPRKPAFSDMPRAHSFTSKGPGPLLPPPPPKHGLPDVGLAAEDSKREPLCPRRAEPCPRVPATPRRMSDPL

SEQ ID NO: 777473 - protein, 81 aa, Homo sapiens
RYLASGSIEFQVKVLLTPHPHLVPPGSKEAHSLWFTNGLSWEIGNAPGGIQIASAHPTPNTWATESGQDEALAPRACSPAP

SEQ ID NO: 777474 - protein, 102 aa, Homo sapiens [sequence omitted]

SEQ ID NO: 777475 - protein, 107 aa, Homo sapiens
MATRWLPQLPGLSSPNNIQRQKGGSQKSVIFACLPPVIREEKSFPEAYWHSSVILPSVAKEACNMNLWHFHSLEWEEDKGGERFGAQPDSSVCHGIMPIDLSFPTSN

SEQ ID NO: 777476 - protein, 45 aa, Homo sapiens
GPNVHLKPGVHLGSDVQLKTGCPPGAEESTQGLVLNWGLMTTRGQ

SEQ ID NO: 777477 - protein, 159 aa, Homo sapiens
DIYSLGATLIHMQTGTPPWVKRYPRSAYPSYLYIIHKQAPPLEDIADDCSPGMRELIEASLERNPNHRPRAADLLKHEALNPPREDQPRCQSLDSALLERKRLLSRKELELPENIADSSCTGSTEESEMLKRQRSLYIDLGALAGYFNLVRGPPTLEYG

SEQ ID NO: 777478 - protein, 113 aa, Homo sapiens
GGIGEAVKVPIGCCWACSCSGMFSAVPAPGLFCPHIITAIAPLRCQLFGDPRLEAGQNLKGLWSLRSRLVTSFTENQVCILTKVSQVAPGGITVPALGFVGFVSLRKETVETQ

SEQ ID NO: 777479 - protein, 461 aa, Homo sapiens
FCISVHCRMASSLPWLCIILWLENALGKLEVEGNFYSENVSRILDNLLEGYDNRLRPGFGGAVTEVKTDIYVTSFGPVSDVEMEYTMDVFFRQTWTDERLKFGGPTEILSLNNLMVSKIWTPDTFFRNGKKSIAHNMTTPNKLFRIMQNGTILYTMRLTINADCPMRLVNFPMDGHACPLKFGSYAYPKSEIIYTWKKGPLYSVEVPEESSSLLQYDLIGQTVSSETIKSNTGEYVIMTVYFHLQRKMGYFMIQIYTPCIMTVILSQVSFWINKESVPARTVFGITTVLTMTTLSISARHSLPKVSYATAMDWFIAVCFAFVFSALIEFAAVNYFTNLQTQKAKRKAQFAAPPTVTISKATEPLEAEIVLHPDSKYHLKKRITSLSLPIVSSSEANKVLTRAPILQSTPVTPPPLSPAFGGTSKIDQYSRILFPVAFAGFNLVYWVVYLSKDTMEVSSSVE

SEQ ID NO: 777480 - protein, 106 aa, Homo sapiens
MLFFHLGLIFVFFPQHPDSKYHLKKRITSLSLPIVSSSEANKVLTRAPILQSTPVTPPPLSPAFGGTSKIDQYSRILFPVAFAGFNLVYWVVYLSKDTMEVSSSVE

SEQ ID NO: 777481 - protein, 78 aa, Homo sapiens
HRRARGPAVGTSPPGSELGRCVAPFADTCSVMAIPSCQFPAPTPTYGPHPRGTTNLVPSRGHSNPGLCPASTTSLMAP

SEQ ID NO: 777482 - protein, 381 aa, Homo sapiens
RFPEALPPPHRAALCRRSACLLPRTPPFIRHDKCQPSCSSPSRGRRSLPGPTAARHQDSWNGLSHEAFRLVSRRDYASEAIKGAVVGIDLGTTNSCVAVMEGKQAKVLENAEGARTTPSVVAFTADGERLVGMPAKRQAVTNPNNTFYATKRLIGRRYDDPEVQKDIKNVPFKIVRASNGDAWVEAHGKLYSPSQIGAFVLMKMKETAENYLGHTAKNAVITVPAYFNDSQRQATKDAGQISGLNVLRVINEPTAAALAYGLDKSEDKVIAVYDLGGGTFDISILEIQKGVFEVKSTNGDTFLGGEDFDQALLRHIVKEFKRETGVDLTKDNMALQRVREAAEKAKCELSSSVQTDIQFALSYNGFFWTQAFEYEVDPCSI

SEQ ID NO: 777483 - protein, 282 aa, Homo sapiens
MEGKQAKVLENAEGARTTPSVVAFTADGERLVGMPAKRQAVTNPNNTFYATKRLIGRRYDDPEVQKDIKNVPFKIVRASNGDAWVEAHGKLYSPSQIGAFVLMKMKETAENYLGHTAKNAVITVPAYFNDSQRQATKDAGQISGLNVLRVINEPTAAALAYGLDKSEDKVIAVYDLGGGTFDISILEIQKGVFEVKSTNGDTFLGGEDFDQALLRHIVKEFKRETGVDLTKDNMALQRVREAAEKAKCELSSSVQTDIQFALSYNGFFWTQAFEYEVDPCSI

SEQ ID NO: 777484 - protein, 392 aa, Homo sapiens
  misc_feature (381)..(381): Xaa can be any naturally occurring amino acid
  misc_feature (384)..(384): Xaa can be any naturally occurring amino acid
  misc_feature (390)..(390): Xaa can be any naturally occurring amino acid
RFPEALPPPHRAALCRRSACLLPRTPPFIRHDKCQPSCSSPSRGRRSLPGPTAARHQDSWNGLSHEAFRLVSRRDYASEAIKGAVVGIDLGTTNSCVAVMEGKQAKVLENAEGARTTPSVVAFTADGERLVGMPAKRQAVTNPNNTFYATKRLIGRRYDDPEVQKDIKNVPFKIVRASNGDAWVEAHGKLYSPSQIGAFVLMKMKETAENYLGHTAKNAVITVPAYFNDSQRQATKDAGQISGLNVLRVINEPTAAALAYGLDKSEDKVIAVYDLGGGTFDISILEIQKGVFEVKSTNGDTFLGGEDFDQALLRHIVKEFKRETGVDLTKDNMALQRVREAADLTMDSSGPKHLNMKLTRAPFEGIVPDLIQKRLLVLAKXLCXMQKSAXVT

SEQ ID NO: 777485 - protein, 329 aa, Homo sapiens
RFPEALPPPHRAALCRRSACLLPRTPPFIRHDKCQPSCSSPSRGRRSLPGPTAARHQDSWNGLSHEAFRLVSRRDYASEAIKGAVVGIDLGTTNSCVAVMEGKQAKVLENAEGARTTPSVVAFTADGERLVGMPAKRQAVTNPNNTFYATKRLIGRRYDDPEVQKDIKNVPFKIVRASNGDAWVEAHGKLYSPSQIGAFVLMKMKETAENYLGHTAKNAVITVPAYFNDSQRQATKDAGQISGLNVLRVINEPTAAALAYGLDKSEDKVIAVYDLGGGTFDISILEIQKGVFEVKSTNGDTFLGGEDFDQALLRHIVKEFKREVSYQCG

SEQ ID NO: 777486 - protein, 276 aa, Homo sapiens
AEGATTEGVVLGPSVVAFTADGERLVGMPAKRQAVTNPNNTFYATKRLIGRRYDDPEVQKDIKNVPFKIVRASNGDAWVEAHGKLYSPSQIGAFVLMKMKETAENYLGHTAKNAVITVPAYFNDSQRQATKDAGQISGLNVLRVINEPTAAALAYGLDKSEDKVIAVYDLGGGTFDISILEIQKGVFEVKSTNGDTFLGGEDFDQALLRHIVKEFKRETGVDLTKDNMALQRVREAAEKAKCELSSSVQTDIQFALSYNGFFWTQAFEYEVDPCSI

SEQ ID NO: 777487 - protein, 212 aa, Homo sapiens
MEGKQAKVLENAEGARTTPSVVAFTADGERLVGMPAKRQAVTNPNNTFYATKRLIGRRYDDPEVQKDIKNVPFKIVRASNGDAWVEAHGKLYSPSQIGAFVLMKMKETAENYLGHTATKDAGQISGLNVLRVINEPTAAALAYGLDKSEDKVIAVYDLGGGTFDISILEIQKGVFEVKSTNGDTFLGGEDFDQALLRHIVKEFKREVSYQCG

SEQ ID NO: 777488 - protein, 150 aa, Homo sapiens
RFPEALPPPHRAALCRRSACLLPRTPPFIRHDKCQPSCSSPSRGRRSLPGPTAARHQDSWNGLSHEAFRLVSRRDYASEAIKGAVVGIDLGTTNSCVAVMEGKQAKVLENAEGARTTPSVVAFTADGERLVGMPANETLGSIKCIVWVGD

SEQ ID NO: 777489 - protein, 178 aa, Homo sapiens
SNPDFIPAPNTMTCCQTSFCGYPSCSTSGTCGSSCCQPSCCETSCCQPSCCQTSFCGFPSFSTSGTCSSSCCQPSCCETSCCQPSCCQTSSCGTGCGIGGGIGYGQEGSSGAVSTRIRWCRPDCRVEGTCLPPCCVVSCTPPTCCQLHHAEASCCRPSYCGQSCCRPVCCCYSCEPTC

SEQ ID NO: 777490 - protein, 72 aa, Homo sapiens
CLEEGMSSPSLEIFEQKTETNCQGTCRVLFGDPVRVVWMSKIISEGTQKTHQLQGSIEQQFPRLVHPQNLLF

SEQ ID NO: 777491 - protein, 156 aa, Homo sapiens
MMVLDKEDGVPMLSVQPKGKQKGCAGCNRKIKDRYLLKALDKYWHEDCLKCACCDCRLGEVGSTLYTKANLILCRRDYLRLFGTTGNCAACSKLIPAFEMVMRARDNVYHLDCFACQLCNQRFCVGDKFFLKNNMILCQMDYEEGQLNGTFESQVQ

SEQ ID NO: 777492 - protein, 160 aa, Homo sapiens
AHPALLSVCPSAGVPMLSVQPKGKQKGCAGCNRKIKDRYLLKALDKYWHEDCLKCACCDCRLGEVGSTLYTKANLILCRRDYLRLFGTTGNCAACSKLIPAFEMVMRARDNVYHLDCFACQLCNQRFCVGDKFFLKNNMILCQMDYEEGQLNGTFESQVQ

SEQ ID NO: 777493 - protein, 160 aa, Homo sapiens; identical to SEQ ID NO: 777492

SEQ ID NO: 777494 - protein, 109 aa, Homo sapiens
HDPSSHVSPALTHPQLSHIPGPHMPPVLTRPQLSHIPGPHASLTLTPTQPHPSEHQACQHSSTPSHQPGMTHRARSDSRSSACPGVCVCVCARVHSLQARPFYHTCRFV

SEQ ID NO: 777495 - protein, 74 aa, Homo sapiens
TGSDEVGLPQEGLKALFPSPLDPNFLAPCMTGSSLGRWTRATPPTATCWANWAQPRAQVAGETPSGAGPIPRVR

SEQ ID NO: 777496 - protein, 173 aa, Homo sapiens
MPAKGRYFLNEGEEGPDQDALYEKYQLTSQHGPLLLTLLLVAATACVALIIIAFSQGDPSRHQAILGMAFLVLAVFAALSVLMYVECLLRRWLRALALLTWACLVALGYVLVFDAWTKAACAWEQVPFFLFIVFVVYTLLPFSMRGAVAVGAVSTASHLLVLGSLMGGFTTPS

SEQ ID NO: 777497 - protein, 173 aa, Homo sapiens; identical to SEQ ID NO: 777496

SEQ ID NO: 777498 - protein, 113 aa, Homo sapiens
QSKGHACIPCFKPPRAPHCLENRIQTHYHSSQGPPPAGPHPHGSPHTCTKIKSCDQIKDVYLPRLSPLSVPFPPLSKVQLKCLIFHDALLSHPPYSPTALYMSIRELLGFYLE

SEQ ID NO: 777499 - protein, 63 aa, Homo sapiens
MRYHYMPIQTAKALKILTMSSADKDCEAIETHILLMGMQNGIATLENSVEVLYTVKQTLTRRP

SEQ ID NO: 777500 - protein, 195 aa, Homo sapiens [sequence omitted]

SEQ ID NO: 777501 - protein, 46 aa, Homo sapiens
MEDLLRLTDYQRRLYWCHLRLSSDPMLSEFKSLDIIYEEIGPRGPT

SEQ ID NO: 777502 - protein, 107 aa, Homo sapiens
MVPEPRAEISCGSSCPGELYWSPPRWDCWSGGDPHLHVCGRSWTGHSLGHRDVLPLAALGHTLSRCVCVCVCGWVRICVCLCVCACGVGARVCTCVGKHCVCAYVCG

SEQ ID NO: 777503 - protein, 967 aa, Homo sapiens
MEPQVTLNVTFKNEIQSFLVSDPENTTWADIEAMVKVSFDLNTIQIKYLDEENEEVSINSQGEYEEALKLMAVKQGNQLQMQVHEGHHVVDEAPPPVVGAKRLAARAGKKPLAHYSSLVRVLGSDMKTPEDPAVQSFPLVPCDTDQPQDKPPDWFTSYLETFREQVVNETVEKLEQKLHEKLVLQNPSLGSCPSEVSMPTSEETLFLPENQFSWHIACNNCQRRIVGVRYQCSLCPSYNICEDCEAGPYGHDTNHVLLKLRRPVVGSSEPFCHSKYSTPRLPAALEQVRLQKQVDKNFLKAEKQRLRAEKKQRKAEVKELKKQLKLHRKIHLWNSIHGLQSPKSPLGRPESLLQSNTLMLPLQPCTSVMPMLSAAFVDENLPDGTHLQPGTKFIKHWRMKNTGNVKWSADTKLKFMWGNLTLASTEKKDVLVPCLKAGHVGVVSVEFIAPALEGTYTSHWRLSHKGQQFGPRVWCSIIVDPFPSEESPDNIEKGMISSSKTDDLTCQQEETFLLAKEERQLGEVTEQTEGTAACIPQKAKNVASERELYIPSVDLLTAQDLLSFELLDINIVQELERVPHNTPVDVTPCMSPLPHDSPLIEKPGLGQIEEENEGAGFKALPDSMVSVKRKAENIASVEEAEEDLSGTQFVCETVIRSLTLDAAPDHNPPCRQKSLQMTFALPEGPLGNEKEEIIHIAEEEAVMEEEEDEEDEEEEDELKDEVQSQSSASSEDYIIILPECFDTSRPLGDSMYSSALSQPGLERGAEGKPGVEAGQEPAEAGERLPGGENQPQEHSISDILTTSQTLETVPLIPEVVELPPSLPRSSPCVHHHGSPGVDLPVTIPEVSSVPDQIRGEPRGSSGLVNSRQKSYDHSRHHHGSSIAGGLVKGALSVAASAYKALFAGPPVTAQPIISEDQTAALMAHLFEMGFCDRQLNLRLLKKHNYNILQVVTELLQLNNNDWYSQRY

SEQ ID NO: 777504 - protein, 963 aa, Homo sapiens
MEPQVTLNVTFKNEIQSFLVSDPENTTWADIEAMVKVSFDLNTIQIKYLDEENEEVKYIMALIDSVMAVKQGNQLQMQVHEGHHVVDEAPPPVVGAKRLAARAGKKPLAHYSSLVRVLGSDMKTPEDPAVQSFPLVPCDTDQPQDKPPDWFTSYLETFREQVVNETVEKLEQKLHEKLVLQNPSLGSCPSEVSMPTSEETLFLPENQFSWHIACNNCQRRIVGVRYQCSLCPSYNICEDCEAGPYGHDTNHVLLKLRRPVVGSSEPFCHSKYSTPRLPAALEQVRLQKQVDKNFLKAEKQRLRAEKKQRKAEVKELKKQLKLHRKIHLWNSIHGLQSPKSPLGRPESLLQSNTLMLPLQPCTSVMPMLSAAFVDENLPDGTHLQPGTKFIKHWRMKNTGNVKWSADTKLKFMWGNLTLASTEKKDVLVPCLKAGHVGVVSVEFIAPALEGTYTSHWRLSHKGQQFGPRVWCSIIVDPFPSEESPDNIEKGMISSSKTDDLTCQQEETFLLAKEERQLGEVTEQTEGTAACIPQKAKNVASERELYIPSVDLLTAQDLLSFELLDINIVQELERVPHNTPVDVTPCMSPLPHDSPLIEKPGLGQIEEENEGAGFKALPDSMVSVKRKAENIASVEEAEEDLSGTQFVCETVIRSLTLDAAPDHNPPCRQKSLQMTFALPEGPLGNEKEEIIHIAEEEAVMEEEEDEEDEEEEDELKDEVQSQSSASSEDYIIILPECFDTSRPLGDSMYSSALSQPGLERGAEGKPGVEAGQEPAEAGERLPGGENQPQEHSISDILTTSQTLETVPLIPEVVELPPSLPRSSPCVHHHGSPGVDLPVTIPEVSSVPDQIRGEPRGSSGLVNSRQKSYDHSRHHHGSSIAGGLVKGALSVAASAYKALFAGPPVTAQPIISEDQTAALMAHLFEMGFCDRQLNLRLLKKHNYNILQVVTELLQLNNNDWYSQRY

SEQ ID NO: 777505 - protein, 967 aa, Homo sapiens; identical to SEQ ID NO: 777503

SEQ ID NO: 777506 - protein, 963 aa, Homo sapiens; identical to SEQ ID NO: 777504

SEQ ID NO: 777507 - protein, 897 aa, Homo sapiens
MAVKQGNQLQMQVHEGHHVVDEAPPPVVGAKRLAARAGKKPLAHYSSLVRVLGSDMKTPEDPAVQSFPLVPCDTDQPQDKPPDWFTSYLETFREQVVNETVEKLEQKLHEKLVLQNPSLGSCPSEVSMPTSEETLFLPENQFSWHIACNNCQRRIVGVRYQCSLCPSYNICEDCEAGPYGHDTNHVLLKLRRPVVGSSEPFCHSKYSTPRLPAALEQVRLQKQVDKNFLKAEKQRLRAEKKQRKAEVKELKKQLKLHRKIHLWNSIHGLQSPKSPLGRPESLLQSNTLMLPLQPCTSVMPMLSAAFVDENLPDGTHLQPGTKFIKHWRMKNTGNVKWSADTKLKFMWGNLTLASTEKKDVLVPCLKAGHVGVVSVEFIAPALEGTYTSHWRLSHKGQQFGPRVWCSIIVDPFPSEESPDNIEKGMISSSKTDDLTCQQEETFLLAKEERQLGEVTEQTEGTAACIPQKAKNVASERELYIPSVDLLTAQDLLSFELLDINIVQELERVPHNTPVDVTPCMSPLPHDSPLIEKPGLGQIEEENEGAGFKALPDSMVSVKRKAENIASVEEAEEDLSGTQFVCETVIRSLTLDAAPDHNPPCRQKSLQMTFALPEGPLGNEKEEIIHIAEEEAVMEEEEDEEDEEEEDELKDEVQSQSSASSEDYIIILPECFDTSRPLGDSMYSSALSQPGLERGAEGKPGVEAGQEPAEAGERLPGGENQPQEHSISDILTTSQTLETVPLIPEVVELPPSLPRSSPCVHHHGSPGVDLPVTIPEVSSVPDQIRGEPRGSSGLVNSRQKSYDHSRHHHGSSIAGGLVKGALSVAASAYKALFAGPPVTAQPIISEDQTAALMAHLFEMGFCDRQLNLRLLKKHNYNILQVVTELLQLNNNDWYSQRY

SEQ ID NO: 777508 - protein, 997 aa, Homo sapiens
PTGIAAEPVADGPCIGLRQAPPGGGKLPHSMEPQVTLNVTFKNEIQSFLVSDPENTTWADIEAMVKVSFDLNTIQIKYLDEENEEVSINSQGEYEEALKLMAVKQGNQLQMQVHEGHHVVDEAPPPVVGAKRLAARAGKKPLAHYSSLVRVLGSDMKTPEDPAVQSFPLVPCDTDQPQDKPPDWFTSYLETFREQVVNETVEKLEQKLHEKLVLQNPSLGSCPSEVSMPTSEETLFLPENQFSWHIACNNCQRRIVGVRYQCSLCPSYNICEDCEAGPYGHDTNHVLLKLRRPVVGSSEPFCHSKYSTPRLPAALEQVRLQKQVDKNFLKAEKQRLRAEKKQRKAEVKELKKQLKLHRKIHLWNSIHGLQSPKSPLGRPESLLQSNTLMLPLQPCTSVMPMLSAAFVDENLPDGTHLQPGTKFIKHWRMKNTGNVKWSADTKLKFMWGNLTLASTEKKDVLVPCLKAGHVGVVSVEFIAPALEGTYTSHWRLSHKGQQFGPRVWCSIIVDPFPSEESPDNIEKGMISSSKTDDLTCQQEETFLLAKEERQLGEVTEQTEGTAACIPQKAKNVASERELYIPSVDLLTAQDLLSFELLDINIVQELERVPHNTPVDVTPCMSPLPHDSPLIEKPGLGQIEEENEGAGFKALPDSMVSVKRKAENIASVEEAEEDLSGTQFVCETVIRSLTLDAAPDHNPPCRQKSLQMTFALPEGPLGNEKEEIIHIAEEEAVMEEEEDEEDEEEEDELKDEVQSQSSASSEDYIIILPECFDTSRPLGDSMYSSALSQPGLERGAEGKPGVEAGQEPAEAGERLPGGENQPQEHSISDILTTSQTLETVPLIPEVVELPPSLPRSSPCVHHHGSPGVDLPVTIPEVSSVPDQIRGEPRGSSGLVNSRQKSYDHSRHHHGSSIAGGLVKGALSVAASAYKALFAGPPVTAQPIISEDQTAALMAHLFEMGFCDRQLNLRLLKKHNYNILQVVTELLQLNNNDWYSQRY

SEQ ID NO: 777509 - protein, 478 aa, Homo sapiens
LRGFRVIRTSKTDDLTCQQEETFLLAKEERQLGEVTEQTEGTAACIPQKAKNVASERELYIPSVDLLTAQDLLSFELLDINIVQELERVPHNTPVDVTPCMSPLPHDSPLIEKPGLGQIEEENEGAGFKALPDSMVSVKRKAENIASVEEAEEDLSGTQFVCETVIRSLTLDAAPDHNPPCRQKSLQMTFALPEGPLGNEKEEIIHIAEEEAVMEEEEDEEDEEEEDELKDEVQSQSSASSEDYIIILPECFDTSRPLGDSMYSSALSQPGLERGAEGKPGVEAGQEPAEAGERLPGGENQPQEHSISDILTTSQTLETVPLIPEVVELPPSLPRSSPCVHHHGSPGVDLPVTIPEVSSVPDQIRGEPRGSSGLVNSRQKSYDHSRHHHGSSIAGGLVKGALSVAASAYKALFAGPPVTAQPIISEDQTAALMAHLFEMGFCDRQLNLRLLKKHNYNILQVVTELLQLNNNDWYSQRY

SEQ ID NO: 777510 - protein, 967 aa, Homo sapiens; identical to SEQ ID NO: 777503

SEQ ID NO: 777511 - protein, 839 aa, Homo sapiens
MEPQVTLNVTFKNEIQSFLVSDPENTTWADIEAMVKVSFDLNTIQIKYLDEENEEVSINSQGEYEEALKLMAVKQGNQLQMQVHEGHHVVDEAPPPVVGAKRLAARAGKKPLAHYSSLVRVLGSDMKTPEDPAVQSFPLVPCDTDQPQDKPPDWFTSYLETFREQVVNETVEKLEQKLHEKLVLQNPSLGSCPSEVSMPTSEETLFLPENQFSWHIACNNCQRRIVGVRYQCSLCPSYNICEDCEAGPYGHDTNHVLLKLRRPVVGSSEPFCHSKYSTPRLPAALEQVRLQKQVDKNFLKAEKQRLRAEKKQRKAEVKELKKQLKLHRKIHLWNSIHGLQSPKSPLGRPESLLQSNTLMLPLQPCTSVMPMLSAAFVDENLPDGTHLQPGTKFIKHWRMKNTGNVKWSADTKLKFMWGNLTLASTEKKDVLVPCLKAGHVGVVSVEFIAPALEGTYTSHWRLSHKGQQFGPRVWCSIIVDPFPSEESPDNIEKGMISSSKTDDLTCQQEETFLLAKEERQLGEVTEQTEGTAACIPQKAKNVASERELYIPSVDLLTAQDLLSFELLDINIVQELERVPHNTPVDVTPCMSPLPHDSPLIEKPGLGQIEEENEGAGFKALPDSMVSVKRKAENIASVEEAEEDLSGTQFVCETVIRSLTLDAAPDHNPPCRQKSLQMTFALPEGPLGNEKEEIIHIAEEEAVMEEEEDEEDEEEEDELKDEVQSQSSASSEDYIIILPECFDTSRPLGDSMYSSALSQPGLERGAEGKPGVEAGQEPAEAGERLPGGENQPQEHSISDILTTSQTLETVPLIPEVVELPPSLPRYHSQPLQLGCSSEVK

SEQ ID NO: 777512 - protein, 608 aa, Homo sapiens
MEPQVTLNVTFKNEIQSFLVSDPENTTWADIEAMVKVSFDLNTIQIKYLDEENEEVSINSQGEYEEALKLMAVKQGNQLQMQVHEGHHVVDEAPPPVVGAKRLAARAGKKPLAHYSSLVRVLGSDMKTPEDPAVQSFPLVPCDTDQPQDKPPDWFTSYLETFREQVVNETVEKLEQKLHEKLVLQNPSLGSCPSEVSMPTSEETLFLPENQFSWHIACNNCQRRIVGVRYQCSLCPSYNICEDCEAGPYGHDTNHVLLKLRRPVVGSSEPFCHSKYSTPRLPAALEQVRLQKQVDKNFLKAEKQRLRAEKKQRKAEVKELKKQLKLHRKIHLWNSIHGLQSPKSPLGRPESLLQSNTLMLPLQPCTSVMPMLSAAFVDENLPDGTHLQPGTKFIKHWRMKNTGNVKWSADTKLKFMWGNLTLASTEKKDVLVPCLKAGHVGVVSVEFIAPALEGTYTSHWRLSHKGQQFGPRVWCSIIVDPFPSEESPDNIEKGMISSSKTDDLTCQQEETFLLAKEERQLGEVTEQTEGTAACIPQKAKNVASERELYIPSVDLLTAQDLLSFELLDINIVQELERVPHNTPVGKNVTHFILFVLLIGTKVPQPRHW

SEQ ID NO: 777513 - protein, 129 aa, Homo sapiens
MELREKLRALQLQRWKARKKSAASPHAGQESHTLALEPAFGKISPLSADEETIPKYAGHKNQSATLLGQRSSSNNSAPPKPMSLKIERISSWKTPPQENRDKNLSRRRQDRRATPTGRPTPCAERRGGV

SEQ ID NO: 777514 - protein, 188 aa, Homo sapiens
MEKTAVAAEVLTEDCNTGEMPPLQQQIIRLHQELGRQKSLWADVHGKLRSHIDALREQNMELREKLRALQLQRWKARKKSAASPHAGQESHTLALEPAFGKISPLSADEETIPKYAGHKNQSATLLGQRSSSNNSAPPKPMSLKIERISSWKTPPQENRDKNLSRRRQDRRATPTGRPTPCAERRGGV

SEQ ID NO: 777515 - protein, 129 aa, Homo sapiens; identical to SEQ ID NO: 777513

SEQ ID NO: 777516 - protein, 72 aa, Homo sapiens
RQKSLWADVHGKLRSHIDALREQNMELREKLRALQLQRWKARKKSAASPHAGQESHTLVPKAHLCFCTVCVM

SEQ ID NO: 777517 - protein, 188 aa, Homo sapiens; identical to SEQ ID NO: 777514

SEQ ID NO: 777518 - protein, 167 aa, Homo sapiens
MEKTAVAAEVLTEDCNTGEMPPLQQQIIRLHQELGRQKSLWADVHGKLRSHIDALREQNMELREKLRALQLQRWKARKKSAASPHAGQESHTLALEPAFGKISPLSADEETIPKYAGHKNQSATLLGQRSSSNNSAPPKLLFRTFSQPVCLFLSQLCVTLILRKQIS

SEQ ID NO: 777519 - protein, 139 aa, Homo sapiens
PHQRLHFVDKPYECKECGKAFRVRQQLTFHHRIHTGEKPYECKECGMAFRQTAHLTRHQRLHSGEKLYECKECGEAFICGADLRVHQKMHIGEKPYECKECGKAFRVRGQLTLHQRIHTGEKPYVCKECGKAFRQYAHL

SEQ ID NO: 777520 - protein, 113 aa, Homo sapiens
TMFTYSLRGCDSAGCTELGCLSFSIASRATGNLLRLTLPVFNPPIILSAPLSAPLWALVLKHSFPNTVLPIGLYSAFSACSVPDAMLDTEVKDMSPLFPRSPRSSFFLRNKVT

SEQ ID NO: 777521 - protein, 113 aa, Homo sapiens
MEQNREPKNKAKYSQLIFNKANKNMKWRKDTLFNKWCWDNWQATCRRMKLDPHLSPYTKINSRWIKDLNLTPIKILEDNIRKTLLDIGLGKDFMTKNPKANATKTRINRWDLI

SEQ ID NO: 777522 - protein, 168 aa, Homo sapiens
IIHDEPTYARSSKNAIKVPIVINPNAYDNLAIYKSFLGTSGELSVKEKTTSVISHTYEEIETESKVPDNTTSKTTDCLQTKGFSNSTEHKRGSVAQKVQEFNNCLNRGQSSPQRSYSSSHSSPAKIQRATQEPVAKIEGTQESQMVGSSQHQRESKHSAFSDCGFNPT

SEQ ID NO: 777523 - protein, 111 aa, Homo sapiens
MVNTTEGCRSSLKRFPTDSDGFLPGRCYGRQRFGSDGPVRSCLPGIFHPEVLFLTQHNLEGPTKSYSLGLICNAGEPMNYANRGPRRRCWLVHLHSVLGLGGRMAGQAEET

SEQ ID NO: 777524 - protein, 170 aa, Homo sapiens
RPGFGPGLLQSTELVPPDPQQPQASAEAPFAARGIYSEEMPSVARPRPVGGTTGSQIQHLTQVGIASRIGAQPVEIPPSRGSQYGGPGWPSYGEDEAGRREAVPRTSGREPSAPSGNLPHRGLQGPGLGYPTSSTEDLQPGHSSASLIKAIREELLRLSQKQSTVQNFHS

SEQ ID NO: 777525 - protein, 133 aa, Homo sapiens
ACDVRLQTMYFLTPILVAILCILVVWIFKNADRSMEKKKGEPRTRAEARPWVDEDLKDSSDLHQAEEDADEWQESEENVEHIPFSHNHYPEKEMVKRSQEFYELLNKRRSVRFISNEQVPMEVIDNVIRTAGL

SEQ ID NO: 777526 - protein, 297 aa, Homo sapiens
ACDVRLQTMYFLTPILVAILCILVVWIFKNADRSMEKKKGEPRTRAEARPWVDEDLKDSSDLHQAEEDADEWQESEENVEHIPFSHNHYPEKEMVKRSQEFYELLNKRRSVRFISNEQVPMEVIDNVIRTAGTAPSGAHTEPWTFVVVKDPDVKHKIRKIIEEEEEINYMKRMGHRWVTDLKKLRTNWIKEYLDTAPILILIFKQVHGFAANGKKKVHYYNEISVSIACGILLAALQNAGLVTVTTTPLNCGPRLRVLLGRPAHEKLLMLLPVGYPSKEATVPDLKRKPLDQIMVTV

SEQ ID NO: 777527 - protein, 774 aa, Homo sapiens
FPILCLLRSLSKMGNGSVKPKHSKHPDGHSGNLTTDALRNKVTELERELRRKDAEIQEREYHLKELREQLSKQTVAIAELTEELQNKCIQLNKLQDVVHMQGGSPLQASPDKVPLEVHRKTSGLVSLHSRRGAKAGVSAEPTTRTYDLNKPPEFSFEKARVRKDSSEKKLITDALNKNQFLKRLDPQQIKDMVECMYGRNYQQGSYIIKQGEPGNHIFVLAEGRLEVFQGEKLLSSIPMWTTFGELAILYNCTRTASVKAITNVKTWALDREVFQNIMRRTAQARDEQYRNFLRSVSLLKNLPEDKLTKIIDCLEVEYYDKGDYIIREGEEGSTFFILAKGKVKVTQSTEGHDQPQLIKTLQKGEYFGEKALISDDVRSANIIAEENDVACLVIDRETFNQTVGTFEELQKYLEGYVANLNRDDEKRHAKRSMSNWKLSKALSLEMIQLKEKVARFSSSSPFQNLEIIATLGVGGFGRVELVKVKNENVAFAMKCIRKKHIVDTKQQEHVYSEKRILEELCSPFIVKLYRTFKDNKYVYMLLEACLGGELWSILRDRGSFDEPTSKFCVACVTEAFDYLHRLGIIYRDLKPENLILDAEGYLKLVDFGFAKKIGSGQKTWTFCGTPEYVAPEVILNKGHDFSVDFWSLGILVYELLTGNPPFSGVDQMMTYNLILKGIEKMDFPRKITRRPEDLIRRLCRQNPTERLGNLKNGINDIKKHRWLNGFNWEGLKARSLPSPLQRELKGPIDHSYFDKYPPEKGMPPDELSGWDKDF

SEQ ID NO: 777528 - protein, 655 aa, Homo sapiens
GRNVSRAVSKVSQSRRKAGVPTANIEESQAVEAAMANVPWAEVCEKFQAALALSRVELHKNPEKEPYKSKYSARALLEEVKALLGPAPEDEDERPEAEDSPGAGDHALGLPAEVVEPEGPVAQRAVRLAVIEFHLGVNHIDTEELSAGEEHLVKCLRLLRRYRLSHDCISLCIQAQNNLGILWSEREEIETAQAYLESSEALYNQYMKEVGSPPLDPTERFLPEEEKLTEQERSKRFEKVYTHNLYYLAQVYQHLEMFEKAAHYCHSTLKRQLEHNAYHPIEWAINAATLSQFYINKLCFMEARHCLSAANVIFGQTGKISATEDTPEAEGEVPELYHQRKGEIARCWIKYCLTLMQNAQLSMQDNIGELDLDKQSELRALRKKELDEEESIRKKAVQFGTGELCDAISAVEEKVSYLRPLDFEEARELFLLGQHYVFEAKEFFQIDGYVTDHIEVVQDHSALFKVLAFFETDMERRCKMHKRRIAMLEPLTVDLNPQYYLLVNRQIQFEIAHAYYDMMDLKVAIADRLRDPDSHIVKKINNLNKSALKYYQLFLDSLRDPNKVFPEHIGEDVLRPAMLAKFRVARLYGKIITADPKKELENLATSLEHYKFIVDYCEKHPEAAQEIEVELELSKEMVSLLPTKMERFRTKMALT

SEQ ID NO: 777529 - protein, 399 aa, Homo sapiens [sequence omitted]

SEQ ID NO: 777530 - protein, 655 aa, Homo sapiens; identical to SEQ ID NO: 777528

SEQ ID NO: 777531 - protein, 564 aa, Homo sapiens
GRNVSRAVSKVSQSRRKAGVPTANIEESQAVEAAMANVPWAEVCEKFQAALALSRVELHKNPEKEPYKSKYSARALLEEVKALLGPAPEDEDERPEAEDSPGAGDHALGLPAEVVEPEGPVAQRAVRLAVIEFHLGVNHIDTEELSAGEEHLVKCLRLLRRYRLSHDCISLCIQAQNNLGILWSEREEIETAQAYLESSEALYNQYMKEVGSPPLDPTERFLPEEEKLTEQERSKRFEKVYTHNLYYLAQVYQHLEMFEKAAHYCHSTLKRQLEHNAYHPIEWAINAATLSQFYINKLCFMEARHCLSAANVIFGQTGKISATEDTPEAEGEVPELYHQRKGEIARCWIKYCLTLMQNAQLSMQDNIGELDLDKQSELRALRKKELDEEESIRKKAVQFGTGELCDAISAVEEKVSYLRPLDFEEARELFLLGQHYVFEAKEFFQIDGYVTDHIEVVQDHSALFKVLAFFETDMERRCKMHKRRIAMLEPLTVDLNPQYYLLVNRQIQFEIAHAYYDMMDLKVAIADRLRDPELLETFKFRTKPENFSYRVSTMSLRQHELLTD

SEQ ID NO: 777532 - protein, 334 aa, Homo sapiens
GRNVSRAVSKVSQSRRKAGVPTANIEESQAVEAAMANVPWAEVCEKFQAALALSRVELHKNPEKEPYKSKYSARALLEEVKALLGPAPEDEDERPEAEDSPGAGDHALGLPAEVVEPEGPVAQRAVRLAVIEFHLGVNHIDTEELSAGEEHLVKCLRLLRRYRLSHDCISLCIQAQNNLGILWSEREEIETAQAYLESSEALYNQYMKEVGSPPLDPTERFLPEEEKLTEQERSKRFEKVYTHNLYYLAQVYQHLEMFEKAAHYCHSTLKRQLEHNAYHPIEWAINAATLSQFYINKLCFMEARHCLSAANVIFGQTGKISATEDSKFTFACFT

SEQ ID NO: 777533 - protein, 37 aa, Homo sapiens
MNDWTDEDEISKCRQPRKMSRHQRKDDKSHLRNAYVE

SEQ ID NO: 777534 - protein, 73 aa, Homo sapiens
QSFITIEAITIKNHTSTFRIGLHCCDKECAHIKTMHRLKRVAKLLLRNTLIHVPSNGCEGAPQCTLYTEYYNS

SEQ ID NO: 777535 - protein, 185 aa, Homo sapiens
MVNCPHLSREFCTPRIRGNTCFCCDLYNCGNRVEITGGYYEYIDVSSCQDIIHLYHLLWSATILNIVGLFLGIITAAVLGGFKDMNPTLPALNCSVENTHPTVSYYAHPQVASYNTYYHSPPHLPPYSAYDFQHSGVFPSSPPSGLSDEPQSASPSPSYMWSSSAPPRYSPPYYPPFEKPPPYSP

SEQ ID NO: 777536 - protein, 325 aa, Homo sapiens
MHQSLTQQRSSDMSLPDSMGAFNRRKRNSIYVTVTLLIVSVLILTVGLAATTRTQNVTVGGYYPGVILGFGSFLGIIGSNLIENKRQMLVASIVFISFGVIAAFCCAIVDGVFAARHIDLKPLYANRCHYVPKTSQKEAEEVNCPHLSREFCTPRIRGNTCFCCDLYNCGNRVEITGGYYEYIDVSSCQDIIHLYHLLWSATILNIVGLFLGIITAAVLGGFKDMNPTLPALNCSVENTHPTVSYYAHPQVASYNTYYHSPPHLPPYSAYDFQHSGVFPSSPPSGLSDEPQSASPSPSYMWSSSAPPRYSPPYYPPFEKPPPYSP

SEQ ID NO: 777537 - protein, 349 aa, Homo sapiens
MHQSLTQQRSSDMSLPDSMGAFNRRKRNSIYVTVTLLIVSVLILTVGLAATTRTQNVTVGGYYPGVILGFGSFLGIIGSNLIENKRQMLVASIVFISFGVIAAFCCAIVDGVFAARHIDLKPLYANRCHYVPKTSQKEAEEVISSSTKNSPSTRVMRNLTQAAREVNCPHLSREFCTPRIRGNTCFCCDLYNCGNRVEITGGYYEYIDVSSCQDIIHLYHLLWSATILNIVGLFLGIITAAVLGGFKDMNPTLPALNCSVENTHPTVSYYAHPQVASYNTYYHSPPHLPPYSAYDFQHSGVFPSSPPSGLSDEPQSASPSPSYMWSSSAPPRYSPPYYPPFEKPPPYSP

SEQ ID NO: 777538 - protein, 254 aa, Homo sapiens
SINPKVHSSKPHLRQARRALWTMRSSGLDRVLPQRVQPLLPLLLLGLRVLLMLVEPAAHGACLLRPQVQGLVVPALVEFPEVFFLSLVNNSENTGNGFADDSDLRELGGRTACHFGDAQLGQLHLQVVQLFQQLLLLPAKISSLDLGHCCTGRRRRRAARSEGKSVDSNINLPNDTASTCPEKNENICLQQMCTKIFIADYYFLRQGLTLSLRLECSGAVLAHCSLRGLGSCDPPIFTSLSRWDYRCVPPCLAN

SEQ ID NO: 777539 - protein, 146 aa, Homo sapiens
EEQLEVLAHLLVLPGGFGPISNWGPEIFTEIGTIAAGIPDLALSALLRGQIQGVTPLAISVIPPPKFAVVFSPIQLSSLTSAQAVAVTPEQMAFLSPEQRRAVAWAQHEGKESPEQQGRSTAWGLQDWSRPSWSLVLTISFLGHLL

SEQ ID NO: 777540 - protein, 101 aa, Homo sapiens
SFLYRNSSVRTPQPTQTAEQIPGTCFCAISPLKLKSKHIRAWQGCMGTLANRQNTLAPQALLVFFPLDQQIFLTAYTCSSPTPNNMQKRKAPQVFLDQEVK

SEQ ID NO: 777541 - protein, 318 aa, Homo sapiens
MAAQGCAASRLLQLLLQLLLLLLLLAAGGARARWRGEGTSAHLRDIFLGRCAEYRALLSPEQRNKNCTAIWEAFKVALDKDPCSVLPSDYDLFINLSRHSIPRDKSLFWENSHLLVNSFADNTRRFMPLSDVLYGRVADFLSWCRQKNDSGLDYQSCPTSEDCENNPVDSFWKRASIQYSKDSSGVIHVMLNGSEPTGAYPIKGFFADYEIPNLQKEKITRIEIWVMHEIGGPNVESCGEGSMKVLEKRLKDMGFQYSCINDYRPVKLLQCVDHSTHPDCALKSAAAATQRKAPSLYTEQRAGLIIPLFLVLASRTQL

SEQ ID NO: 777542 - protein, 318 aa, Homo sapiens; identical to SEQ ID NO: 777541

SEQ ID NO: 777543 - protein, 315 aa, Homo sapiens
MAAQGCAASRLLQLLLQLLLLLLLLAAGGARARWRGEGTSAHLRDIFLGRCAEYRALLSPEQRNKNCTAIWEAFKVALDKDPCSVLPSDYDLFINLSRHSIPRDKSLFWENSHLLVNSFADNTRRFMPLSDVLYGRVADFLSWCRQKNDSGLDYQSCPTSEDCENNPVDSFWKRASIQYSKDSSGVIHVMLNGSEPTGAYPIKGFFADYEIPNLQKEKITRIEIWVMHEIGGPNVESCGEGSMKVLEKRLKDMGFQYSCINDYRPVKLLQCVDHSTHPDCALKSDGVSPCWPGWSRSPGLVIRLPWPPKVLGLQA

SEQ ID NO: 777544 - protein, 289 aa, Homo sapiens
MAAQGCAASRLLQLLLQLLLLLLLLAAGGARARWRGEGTSAHLRDIFLGRCAEYRALLSPEQRNKNCTAIWEAFKVALDKDPCSVLPSDYDLFINLSRHSIPRDKSLFWENSHLLVNSFADNTRRFMPLSDVLYGRVADFLSWCRQKNDSGLDYQSCPTSEDCENNPVDSFWKRASIQYSKDSSGVIHVMLNGSEPTGAYPIKGFFADYEIPNLQKEKITRIEIWVMHEIGGPNVESCGEGSMKVLEKRLKDMGFQYSCINDYRPVKLLQCVDHSTHPDCALKSKLWEP

SEQ ID NO: 777545 - protein, 115 aa, Homo sapiens
PKQNGDLSVCKVLILPTTPHCLKMSLGLTPQQGSSRYSKKSPKSLYRTKGGSYHSPLSGAGFQDSTVTGNCVALTLLQPCSLPLQSSFVFCVYQMILLSKEAFCWENDVLKMVFQ

SEQ ID NO: 777546 - protein, 42 aa, Homo sapiens
LTQSFLSYDHITLQTLHFPNSINFNPPLIVDPNSIHQINFLF

SEQ ID NO: 777547 - protein, 40 aa, Homo sapiens
MGPEDRRGRSAKSPGEAVVSRRGQQRSVGGPLQRAAGFRL

SEQ ID NO: 777548 - protein, 113 aa, Homo sapiens
TGGHENTENHRRTGGHENTEIHRHTQVGMKTRKFTDTQVGVKTRKFTDAQVGVKTRKFTDAQVGVKTRKFTDAQVGVKTWKFTDTQVGVKTRKFTDAQVGVKTRKLTETHRLA

SEQ ID NO: 777549 - protein, 78 aa, Homo sapiens
LEDPEKTTEGRKRRKEVSQAEGGKTTEGEKTTEGEDPAAPISVNAHHPLTHLSESEVWTAASIPYLQSQQWGNRAVDR

SEQ ID NO: 777550 - protein, 109 aa, Homo sapiens
  misc_feature (49)..(49): Xaa can be any naturally occurring amino acid
ECSWSPGKLAFKNQTAMDTALPKIWFTFFTGLTIGANKYNHVKPVRLYXHFMARVLSHKHLFGKAHLPLSLDSPAILIKDLPGEQAAILSSSQQELIIKESCSVAQAGV

SEQ ID NO: 777551 - protein, 71 aa, Homo sapiens
PESGQSPAWRCGRESPTSGQLGPAAVAGRPNLGVEEPTDRRPFGAWRCHRRAGAHPGEATVRPDLGLGSLA

SEQ ID NO: 777552 - protein, 68 aa, Homo sapiens
AASTQVWKMNPAGTCSFYPSVNIEPSRDLQLLLKCGHCTKQGPAASTQVWTLNPAATYKCGHSNCFMT

SEQ ID NO: 777553 - protein, 85 aa, Homo sapiens
GSRGGSRRRRRRRLGIRHGGGSEPGVDLPAPVLDLRDHQGRPSLLHQRGGQEHHLAAPRHRRGGGHRTPAAEHRFAYWLGRSIYF

SEQ ID NO: 777554 - protein, 958 aa, Homo sapiens
ASVTLEDPVNFYTDEVGFDKQDSTGMKLWKKRWFVLSDLCLFYYRDEKEEGILGSILLPSFQIALLTSEDHINRKYAFKAAHPNMRTYYFCTDTGKEMELWMKAMLDAALVQTEPVKRVDKITSENAPTKETNNIPNHRVLIKPEIQNNQKNKEMSKIEEKKALEAEKYGFQKDGQDRPLTKINSVKLNSLPSEYESGSACPAQTVHYRPINLSSSENKIVNVSLADLRGGNRPNTGPLYTEADRVIQRTNSMQQLEQWIKIQKGRGHEEETRGVISYQTLPRNMPSHRAQIMARYPEGYRTLPRNSKTRPESICSVTPSTHDKTLGPGAEEKRRSMRDDTMWQLYEWQQRQFYNKQSTLPRHSTLSSPKTMVNISDQTMHSIPTSPSHGSIAAYQGYSPQRTYRSEVSSPIQRGDVTIDRRHRAHHPKHVYVPDRRSVPAGLTLQSVSPQSLQGKTLSQDEGRGTLYKYRPEEVDIDAKLSRLCEQDKVVHALEEKLQQLHKEKYTLEQALLSASQEIEMHADNPAAIQTVVLQRDDLQNGLLSTCRELSRATAELERAWREYDKLEYDVTVTRNQMQEQLDHLGEVQTESAGIQRAQIQKELWRIQDVMEGLSKHKQQRGTTEIGMIGSKPFSTVKYKNEGPDYRLYKSEPELTTVAEVDESNGEEKSEPVSEIETSVVKGSHFPVGVVPPRAKSPTPESSTIASYVTLRKTKKMMDLRTERPRSAVEQLCLAESTRPRMTVEEQMERIRRHQQACLREKKKGLNVIGASDQSPLQSPSNLRDNPFRTTQTRRRDDKELDTAIRENDVKPDHETPATEIVQLKETEPQNVDFSKELKKTENISYEMLFEPEPNGVNSVEMMDKERNKDKMPEDVTFSPQDETQTANHKPEEHPEENTKNSVDEQEETVISYESTPEVSRGNQTMAVKSLSPSPESSASPVPSTQPQLTEGSHFMCV

SEQ ID NO: 777555 - protein, 1116 aa, Homo sapiens
MAADLNLEWISLPRSWTYGITRGGRVFFINEEAKSTTWLHPVTGEAVVTGHRRQSTDLPTGWEEAYTFEGARYYINHNERKVTCKHPVTGQPSQDNCIFVVNEQTVATMTSEEKKERPISMINEASNYNVTSDYAVHPMSPVGRTSRASKKVHNFGKRSNSIKRNPNAPVVRRGWLYKQDSTGMKLWKKRWFVLSDLCLFYYRDEKEEGILGSILLPSFQIALLTSEDHINRKYAFKAAHPNMRTYYFCTDTGKEMELWMKAMLDAALVQTEPVKRVDKITSENAPTKETNNIPNHRVLIKPEIQNNQKNKEMSKIEEKKALEAEKYGFQKDGQDRPLTKINSVKLNSLPSEYESGSACPAQTVHYRPINLSSSENKIVNVSLADLRGGNRPNTGPLYTEADRVIQRTNSMQQLEQWIKIQKGRGHEEETRGVISYQTLPRNMPSHRAQIMARYPEGYRTLPRNSKTRPESICSVTPSTHDKTLGPGAEEKRRSMRDDTMWQLYEWQQRQFYNKQSTLPRHSTLSSPKTMVNISDQTMHSIPTSPSHGSIAAYQGYSPQRTYRSEVSSPIQRGDVTIDRRHRAHHPKHVYVPDRRSVPAGLTLQSVSPQSLQGKTLSQDEGRGTLYKYRPEEVDIDAKLSRLCEQDKVVHALEEKLQQLHKEKYTLEQALLSASQEIEMHADNPAAIQTVVLQRDDLQNGLLSTCRELSRATAELERAWREYDKLEYDVTVTRNQMQEQLDHLGEVQTESAGIQRAQIQKELWRIQDVMEGLSKHKQQRGTTEIGMIGSKPFSTVKYKNEGPDYRLYKSEPELTTVAEVDESNGEEKSEPVSEIETSVVKGSHFPVGVVPPRAKSPTPESSTIASYVTLRKTKKMMDLRTERPRSAVEQLCLAESTRPRMTVEEQMERIRRHQQACLREKKKGLNVIGASDQSPLQSPSNLRDNPFRTTQTRRRDDKELDTAIRENDVKPDHETPATEIVQLKETEPQNVDFSKELKKTENISYEMLFEPEPNGVNSVEMMDKERNKDKMPEDVTFSPQDETQTANHKPEEHPEENTKNSVDEQEETVISYESTPEVSRGNQTMAVKSLSPSPESSASPVPSTQPQLTEGSHFMCV

SEQ ID NO: 777556 - protein, 1125 aa, Homo sapiens
MAADLNLEWISLPRSWTYGITRGGRVFFINEEAKSTTWLHPVTGEAVVTGHRRQSTDLPTGWEEAYTFEGARYYINHNERKVTCKHPVTGQPSQDNCIFVVNEQTVATMTSEEKKERPISMINEASNYNVTSDYAVHPMSPVGRTSRASKKVHNFGKRSNSIKRNPNAPVVRRGWLYKQDSTGMKLWKKRWFVLSDLCLFYYRDEKEEGILGSILLPSFQIALLTSEDHINRKYAFKAAHPNMRTYYFCTDTGKEMELWMKAMLDAALVQTEPVKRVDKITSENAPTKETNNIPNHRVLIKPEIQNNQKNKEMSKIEEKKALEAEKYGFQKDGQDRPLTKINSVKLNSLPSEYESGSACPAQTVHYRPINLSSSENKIVNVSLADLRGGNRPNTGPLYTEADRVIQRTNSMQQLEQWIKIQKGRGHEEETRGVISYQTLPRNMPSHRAQIMARYPEGYRTLPRNSKTRPESICSVTPSTHDKTLGPGAEEKRRSMRDDTMWQLYEWQQRQFYNKQSTLPRHSTLSSPKTMVNISDQTMHSIPTSPSHGSIAAYQGYSPQRTYRSEVSSPIQRGDVTIDRRHRAHHPKHVYVPDRRSVPAGLTLQSVSPQSLQGKTLSQDEGRGTLYKYRPEEVDIDAKLSRLCEQDKVVHALEEKLQQLHKEKYTLEQALLSASQEIEMHADNPAAIQTVVLQRDDLQNGLLSTCRELSRATAELERAWREYDKLEYDVTVTRNQMQEQLDHLGEVQTESAGIQRAQIQKELWRIQDVMEGLSKHKQQRGTTEIGMIGSKPFSTVKYKNEGPDYRLYKSEPELTTVAEVDESNGEEKSEPVSEIETSVVKGSHFPVGVVPPRAKSPTPESSTIASYVTLRKTKKMMDLRTERPRSAVEQLCLAESTRPRMTVEEQMERIRRHQQACLREKKKGLNVIGASDQSPLQSPSNLRDNPFRTTQTRRRDDKELDTAIRENDVKPDHETPATEIVQLKETEPQNVDFSKELKKTENISYEMLFEPEPNGVNSVEMMDKERNKDKMPEDVTFSPQDETQTANHKPEEHPEENTKNSVDEQEETVISYESTPEVSRGNQTMAVKSLSPSPESSASPVPSTQPQLTEGSHFMSILTSVETIQS

SEQ ID NO: 777557 - protein, 312 aa, Homo sapiens
PVPGYSEELTTVAEVDESNGEEKSEPVSEIETSVVKGSHFPVGVVPPRAKSPTPESSTIASYVTLRKTKKMMDLRTERPRSAVEQLCLAESTRPRMTVEEQMERIRRHQQACLREKKKGLNVIGASDQSPLQSPSNLRDNPFRTTQTRRRDDKELDTAIRENDVKPDHETPATEIVQLKETEPQNVDFSKELKKTENISYEMLFEPEPNGVNSVEMMDKERNKDKMPEDVTFSPQDETQTANHKPEEHPEENTKNSVDEQEETVISYESTPEVSRGNQTMAVKSLSPSPESSASPVPSTQPQLTEGSHFMCV

SEQ ID NO: 777558 - protein, 796 aa, Homo sapiens
MAADLNLEWISLPRSWTYGITRGGRVFFINEEAKSTTWLHPVTGEAVVTGHRRQSTDLPTGWEEAYTFEGARYYINHNERKVTCKHPVTGQPSQDNCIFVVNEQTVATMTSEEKKERPISMINEASNYNVTSDYAVHPMSPVGRTSRASKKVHNFGKRSNSIKRNPNAPVVRRGWLYKQDSTGMKLWKKRWFVLSDLCLFYYRDEKEEGILGSILLPSFQIALLTSEDHINRKYAFKAAHPNMRTYYFCTDTGKEMELWMKAMLDAALVQTEPVKRVDKITSENAPTKETNNIPNHRVLIKPEIQNNQKNKEMSKIEEKKALEAEKYGFQKDGQDRPLTKINSVKLNSLPSEYESGSACPAQTVHYRPINLSSSENKIVNVSLADLRGGNRPNTGPLYTEADRVIQRTNSMQQLEQWIKIQKGRGHEEETRGVISYQTLPRNMPSHRAQIMARYPEGYRTLPRNSKTRPESICSVTPSTHDKTLGPGAEEKRRSMRDDTMWQLYEWQQRQFYNKQSTLPRHSTLSSPKTMVNISDQTMHSIPTSPSHGSIAAYQGYSPQRTYRSEVSSPIQRGDVTIDRRHRAHHPKHVYVPDRRSVPAGLTLQSVSPQSLQGKTLSQDEGRGTLYKYRPEEVDIDAKLSRLCEQDKVVHALEEKLQQLHKEKYTLEQALLSASQEIEMHADNPAAIQTVVLQRDDLQNGLLSTCRELSRATAELERAWREYDKLEYDVTVTRNQMQEQLDHLGEVQTESAGIQRAQIQKELWRIQDVMEGLSKHKQQRGTTEIGMIGSKPFSTVK

SEQ ID NO: 777559 - protein, 1096 aa, Homo sapiens
MAADLNLEWISLPRSWTYGITRGGRVFFINEEAKSTTWLHPVTGEAVVTGHRRQSTDLPTGWEEAYTFEGARYYINHNERKVTCKHPVTGQPSQDNCIFVVNEQTVATMTSEEKKERPISMINEASNYNVTSDYAVHPMSPVGRTSRASKKVHNFGKRSNSIKRNPNAPVVRRGWLYKQDSTGMKLWKKRWFVLSDLCLFYYRDEKEEGILGSILLPSFQIALLTSEDHINRKYAFKAAHPNMRTYYFCTDTGKEMELWMKAMLDAALVQTEPVKRVDKITSENAPTKETNNIPNHRVLIKPEIQNNQKNKEMSKIEEKKALEAEKYGFQKDGQDRPLTKINSVKLNSLPSEYESGSACPAQTVHYRPINLSSSENKIVNVSLADLRGGNRPNTGPLYTEADRVIQRTNSMQQLEQWIKIQKGRGHEEETRGVISYQTLPRNMPSHRAQIMARYPEGYRTLPRNSKTRPESICSVTPSTHDKTLGPGAEEKRRSMRDDTMWQLYEWQQRQFYNKQSTLPRHSTLSSPKTMVNISDQTMHSIPTSPSHGSIAAYQGYSPQRTYRSEVSSPIQRGDVTIDRRHRAHHPKHVYVPDRRSVPAGLTLQSVSPQSLQGKTLSQDEGRGTLYKYRPEEVDIDAKLSRLCEQDKVVHALEEKLQQLHKEKYTLEQALLSASQEIEMHADNPAAIQTVVLQRDDLQNGLLSTCRELSRATAELERAWREYDKLEYDVTVTRNQMQEQLDHLGEVQTESAGIQRAQIQKELWRIQDVMEGLSKHKQQRGTTEIGMIGSKPFSTVKYKNEGPDYRLYKSEPELTTVAEVDESNGEEKSEPVSEIETSVVKGSHFPVGVVPPRAKSPTPESSTIASYVTLRKTKKMMDLRTERPRSAVEQLCLAESTRPRMTVEEQMERIRRHQQACLREKKKGLNVIGASDQSPLQSPSNLRDNPFRTTQTRRRDDKELDTAIRENDVKPDHETPATEIVQLKETEPQNVDFSKELKKTENISYEMLFEPEPNGVNSVEMMDKERNKDKMPEDVTFSPQDETQTANHKPEEHPEENTKNSVDEQEETVISYESTPEVSRGNQTMAAILTSVETIQS

SEQ ID NO: 777560 - protein, 589 aa, Homo sapiens [sequence omitted]

SEQ ID NO: 777561 - protein, 793 aa, Homo sapiens
MAADLNLEWISLPRSWTYGITRGGRVFFINEEAKSTTWLHPVTGEAVVTGHRRQSTDLPTGWEEAYTFEGARYYINHNERKVTCKHPVTGQPSQDNCIFVVNEQTVATMTSEEKKERPISMINEASNYNVTSDYAVHPMSPVGRTSRASKKVHNFGKRSNSIKRNPNAPVVRRGWLYKQDSTGMKLWKKRWFVLSDLCLFYYRDEKEEGILGSILLPSFQIALLTSEDHINRKYAFKAAHPNMRTYYFCTDTGKEMELWMKAMLDAALVQTEPVKRVDKITSENAPTKETNNIPNHRVLIKPEIQNNQKNKEMSKIEEKKALEAEKYGFQKDGQDRPLTKINSVKLNSLPSEYESGSACPAQTVHYRPINLSSSENKIVNVSLADLRGGNRPNTGPLYTEADRVIQRTNSMQQLEQWIKIQKGRGHEEETRGVISYQTLPRNMPSHRAQIMARYPEGYRTLPRNSKTRPESICSVTPSTHDKTLGPGAEEKRRSMRDDTMWQLYEWQQRQFYNKQSTLPRHSTLSSPKTMVNISDQTMHSIPTSPSHGSIAAYQGYSPQRTYRSEVSSPIQRGDVTIDRRHRAHHPKHVYVPDRRSVPAGLTLQSVSPQSLQGKTLSQDEGRGTLYKYRPEEVDIDAKLSRLCEQDKVVHALEEKLQQLHKEKYTLEQALLSASQEIEMHADNPAAIQTVVLQRDDLQNGLLSTCRELSRATAELERAWREYDKLEYDVTVTRNQMQEQLDHLGEVQTESAGIQRAQIQKELWRIQDVMEGLSKHKQQRGTTEIGKLALHFIL

SEQ ID NO: 777562 - protein, 480 aa, Homo sapiens
MAADLNLEWISLPRSWTYGITRGGRVFFINEEAKSTTWLHPVTGEAVVTGHRRQSTDLPTGWEEAYTFEGARYYINHNERKVTCKHPVTGQPSQDNCIFVVNEQTVATMTSEEKKERPISMINEASNYNVTSDYAVHPMSPVGRTSRASKKVHNFGKRSNSIKRNPNAPVVRRGWLYKQDSTGMKLWKKRWFVLSDLCLFYYRDEKEEGILGSILLPSFQIALLTSEDHINRKYAFKAAHPNMRTYYFCTDTGKEMELWMKAMLDAALVQTEPVKRVDKITSENAPTKETNNIPNHRVLIKPEIQNNQKNKEMSKIEEKKALEAEKYGFQKDGQDRPLTKINSVKLNSLPSEYESGSACPAQTVHYRPINLSSSENKIVNVSLADLRGGNRPNTGPLYTEADRVIQRTNSMQQLEQWIKIQKGRGHEEETRGVISYQTLPRNMPSHRAQIMARYPEGYRTLPRNSKTRPESICSVTPSIL

SEQ ID NO: 777563 - protein, 1116 aa, Homo sapiens; identical to SEQ ID NO: 777555

SEQ ID NO: 777564 - protein, 1060 aa, Homo sapiens
MAADLNLEWISLPRSWTYGITRGGRVFFINEEAKSTTWLHPVTGEAVVTGHRRQSTDLPTGWEEAYTFEGARYYINHNERKVTCKHPVTGQPSQDNCIFVVNEQTVATMTSEEKKERPISMINEASNYNVTSDYAVHPMSPVGRTSRASKKVHNFGKRSNSIKRNPNAPVVRRGWLYKQDSTGMKLWKKRWFVLSDLCLFYYRDEKEEGILGSILLPSFQIALLTSEDHINRKYAFKAAHPNMRTYYFCTDTGKEMELWMKAMLDAALVQTEPVKRVDKITSENAPTKETNNIPNHRVLIKPEIQNNQKNKEMSKIEEKKALEAEKYGFQKDGQDRPLTKINSVKLNSLPSEYESGSACPAQTVHYRPINLSSSENKIVNVSLADLRGGNRPNTGPLYTEADRVIQRTNSMQQLEQWIKIQKGRGHEEETRGVISYQTLPRNMPSHRAQIMARYPEGYRTLPRNSKTRPESICSVTPSTHDKTLGPGAEEKRRSMRDDTMWQLYEWQQRQFYNKQSTLPRHSTLSSPKTMVNISDQTMHSIPTSPSHGSIAAYQGYSPQRTYRSEVSSPIQRGDVTIDRRHRAHHPKHVYVPDRRSVPAGLTLQSVSPQSLQGKTLSQDEGRGTLYKYRPEEVDIDAKLSRLCEQDKVVHALEEKLQQLHKEKYTLEQALLSASQEIEMHADNPAAIQTVVLQRDDLQNGLLSTCRELSRATAELERAWREYDKLEYDVTVTRNQMQEQLDHLGEVQTESAGIQRAQIQKELWRIQDVMEGLSKHKQQRGTTEIGSHFPVGVVPPRAKSPTPESSTIASYVTLRKTKKMMDLRTERPRSAVEQLCLAESTRPRMTVEEQMERIRRHQQACLREKKKGLNVIGASDQSPLQSPSNLRDNPFRTTQTRRRDDKELDTAIRENDVKPDHETPATEIVQLKETEPQNVDFSKELKKTENISYEMLFEPEPNGVNSVEMMDKERNKDKMPEDVTFSPQDETQTANHKPEEHPEENTKNSVDEQEETVISYESTPEVSRGNQTMAVKSLSPSPESSASPVPSTQPQLTEGSHFMCV

SEQ ID NO: 777565 - protein, 1174 aa, Homo sapiens
MAADLNLEWISLPRSWTYGITRGGRVFFINEEAKSTTWLHPVTGEAVVTGHRRQSTDLPTGWEEAYTFEGARYYINHNERKVTCKHPVTGQPSQDNCIFVVNEQTVATMTSEEKKERPISMINEASNYNVTSDYAVHPMSPVGRTSRASKKVHNFGKRSNSIKRNPNAPVVRRGWLYKQDSTGMKLWKKRWFVLSDLCLFYYRDEKEEGILGSILLPSFQIALLTSEDHINRKYAFKAAHPNMRTYYFCTDTGKEMELWMKAMLDAALVQTEPVKRVDKITSENAPTKETNNIPNHRVLIKPEIQNNQKNKEMSKIEEKKALEAEKYGFQKDGQDRPLTKINSVKLNSLPSEYESGSACPAQTVHYRPINLSSSENKIVNVSLADLRGGNRPNTGPLYTEADRVIQRTNSMQQLEQWIKIQKGRGHEEETRGVISYQTLPRNMPSHRAQIMARYPEGYRTLPRNSKTRPESICSVTPSTHDKTLGPGAEEKRRSMRDDTMWQLYEWQQRQFYNKQSTLPRHSTLSSPKTMVNISDQTMHSIPTSPSHGSIAAYQGYSPQRTYRSEVSSPIQRGDVTIDRRHRAHHPKHVYVPDRRSVPAGLTLQSVSPQSLQGKTPEELTLLLIKLRRQQAELSSIREHTLAQLMQLKLEAHSPKNEILSHHLQRNTIYLDHQLSQDEGRGTLYKYRPEEVDIDAKLSRLCEQDKVVHALEEKLQQLHKEKYTLEQALLSASQEIEMHADNPAAIQTVVLQRDDLQNGLLSTCRELSRATAELERAWREYDKLEYDVTVTRNQMQEQLDHLGEVQTESAGIQRAQIQKELWRIQDVMEGLSKHKQQRGTTEIGMIGSKPFSTVKYKNEGPDYRLYKSEPELTTVAEVDESNGEEKSEPVSEIETSVVKGSHFPVGVVPPRAKSPTPESSTIASYVTLRKTKKMMDLRTERPRSAVEQLCLAESTRPRMTVEEQMERIRRHQQACLREKKKGLNVIGASDQSPLQSPSNLRDNPFRTTQTRRRDDKELDTAIRENDVKPDHETPATEIVQLKETEPQNVDFSKELKKTENISYEMLFEPEPNGVNSVEMMDKERNKDKMPEDVTFSPQDETQTANHKPEEHPEENTKNSVDEQEETVISYESTPEVSRGNQTMAVKSLSPSPESSASPVPSTQPQLTEGSHFMCV

SEQ ID NO: 777566 - protein, 242 aa, Homo sapiens
MMDLRTERPRSAVEQLCLAESTRPRMTVEEQMERIRRHQQACLREKKKGLNVIGASDQSPLQSPSNLRDNPFRTTQTRRRDDKELDTAIRENDVKPDHETPATEIVQLKETEPQNVDFSKELKKTENISYEMLFEPEPNGVNSVEMMDKERNKDKMPEDVTFSPQDETQTANHKPEEHPEENTKNSVDEQEETVISYESTPEVSRGNQTMAVKSLSPSPESSASPVPSTQPQLTEGSHFMCV

SEQ ID NO: 777567 - protein, 650 aa, Homo sapiens
MAADLNLEWISLPRSWTYGITRGGRVFFINEEAKSTTWLHPVTGEAVVTGHRRQSTDLPTGWEEAYTFEGARYYINHNERKVTCKHPVTGQPSQDNCIFVVNEQTVATMTSEEKKERPISMINEASNYNVTSDYAVHPMSPVGRTSRASKKVHNFGKRSNSIKRNPNAPVVRRGWLYKQDSTGMKLWKKRWFVLSDLCLFYYRDEKEEGILGSILLPSFQIALLTSEDHINRKYAFKAAHPNMRTYYFCTDTGKEMELWMKAMLDAALVQTEPVKRVDKITSENAPTKETNNIPNHRVLIKPEIQNNQKNKEMSKIEEKKALEAEKYGFQKDGQDRPLTKINSVKLNSLPSEYESGSACPAQTVHYRPINLSSSENKIVNVSLADLRGGNRPNTGPLYTEADRVIQRTNSMQQLEQWIKIQKGRGHEEETRGVISYQTLPRNMPSHRAQIMARYPEGYRTLPRNSKTRPESICSVTPSTHDKTLGPGAEEKRRSMRDDTMWQLYEWQQRQFYNKQSTLPRHSTLSSPKTMVNISDQTMHSIPTSPSHGSIAAYQGYSPQRTYRSEVSSPIQRGDVTIDRRHRAHHPKHVYVPDRRSVPAGLTLQSVSPQSLQGKTWGREKVATATGAAEAVASDTHLPRTGSSSPSLLCV

SEQ ID NO: 777568 - protein, 1116 aa, Homo sapiens; identical to SEQ ID NO: 777555

SEQ ID NO: 777569 - protein, 650 aa, Homo sapiens; identical to SEQ ID NO: 777567

SEQ ID NO: 777570 - protein, 85 aa, Homo sapiens; identical to SEQ ID NO: 777553

SEQ ID NO: 777571 - protein, 70 aa, Homo sapiens
MKLGADVSEYDGAPSLWSQSKMELRADGTQSQMELGVTGALSKVELRTDGAQSKMELGVIGAPSKMELGA

SEQ ID NO: 777572 - protein, 70 aa, Homo sapiens
DERWEGLHDANHNKQGASQIRKEARDQRLVSSPVTAGQAPQRSENPGTTRKRWSPHTLRRKWFRARAPRP

SEQ ID NO: 777573 - protein, 111 aa, Homo sapiens
DFSQLNKNPPPIAMYCCALRSCSVPTGPATTFCSFDKSCRCGVCLPSTCPHEISLLQPICCDTCPPPCCKPDTYVPTCWLLNNCHPTPGLSGINLTTYVQPGCESPCEPRC

SEQ ID NO: 777574 - protein, 133 aa, Homo sapiens
RRWDHLVAGNKLRAPIDSTLWGPQAPGCRAIPVPGLLGTGSHGRSVPTGPATTFCSFDKSCRCGVCLPSTCPHEISLLQPICCDTCPPPCCKPDTYVPTCWLLNNCHPTPGLSGINLTTYVQPGCESPCEPRC

SEQ ID NO: 777575 - protein, 170 aa, Homo sapiens
MPQNSPWASHAAWHIYSLGALGSEGLGSSFIYKEIEAKPRQVTPAGLNQPSASMGSSVPPGCGRESLNQQPIVVRNRGRAGVQMAYQRGASSHGGPGGLLSEEHPKLSRTCTQSGRGSAEAHRHPQPHAHAWPGENLGSPCSCDVFSASSPWKVPMLKCGCTQCCLWMEL

SEQ ID NO: 777576 - protein, 135 aa, Homo sapiens
MEEDSQHKRPLEGPQRPSHHTTDMRRHTAAPNPPRTSAPITQYRHTTHAHHDATWAPATTNFDDRHPQKRATSHSNMARTRVHKPRPGVRPHLTERHKPEHARERHLTAVTPPPTIITPTKTRSRDDYYAHNEDL

SEQ ID NO: 777577 - protein, 123 aa, Homo sapiens
MPPRGLQISTPGSPLPPQLWGLHPAEPQGRAHPLSQCGLDTRHRVEGDYFGALRFNDCPAGFQTCMGPVAPLFWPVCLFGLVVFSQCLYPHCILEVTNLFLILQAHRWKGLALSQMRLWTVDF

SEQ ID NO: 777578 - protein, 33 aa, Homo sapiens
GTSQFSSESLIMEWIKHKTKNSTAIDGSVTAHP

SEQ ID NO: 777579 - protein, 70 aa, Homo sapiens
MFHAGGSSFLLMGQISGSLLGQRGKEEMGYFPMGKPRQDPSHSCICTHAAQTWGSASPAQRGWHLGRSPS

SEQ ID NO: 777580 - protein, 95 aa, Homo sapiens
FTHTQRTHIRTTHTQNAHTSVRRTHRMHVRTYNAHKEYTHPYNTQAHNTHVHAHGATYRYTKTRVHTHAESPGQRWRHGGLPPHRLQECLQLWIT

SEQ ID NO: 777581 - protein, 257 aa, Homo sapiens
MASKIGSRRWMLQLIMQLGSVLLTRCPFWGCFSQLMLYAERAEARRKPDIPVPYLYFDMGAAVLCASFMSFGVKRRWFALGAALQLAISTYAAYIGGYVHYGDWLKVRMYSRTVAIIGGFLVLASGAGELYRRKPRSRSLQSTGQVFLGIYLICVAYSLQHSKEDRLAYLNHLPGGELMIQLFFVLYGILALAFLSGYYVTLAAQILAVLLPPVMLLIDGNVAYWHNTRRVEFWNQMKLLGESVGIFGTAVILATDG

SEQ ID NO: 777582 - protein, 257 aa, Homo sapiens; identical to SEQ ID NO: 777581

SEQ ID NO: 777583 - protein, 257 aa, Homo sapiens; identical to SEQ ID NO: 777581

SEQ ID NO: 777584 - protein, 257 aa, Homo sapiens; identical to SEQ ID NO: 777581

SEQ ID NO: 777585 - protein, 199 aa, Homo sapiens
MGAAVLCASFMSFGVKRRWFALGAALQLAISTYAAYIGGYVHYGDWLKVRMYSRTVAIIGGFLVLASGAGELYRRKPRSRSLQSTGQVFLGIYLICVAYSLQHSKEDRLAYLNHLPGGELMIQLFFVLYGILALAFLSGYYVTLAAQILAVLLPPVMLLIDGNVAYWHNTRRVEFWNQMKLLGESVGIFGTAVILATDG

SEQ ID NO: 777586 - protein, 199 aa, Homo sapiens; identical to SEQ ID NO: 777585

SEQ ID NO: 777587 - protein, 171 aa, Homo sapiens
MASKIGSRRWMLQLIMQLGSVLLTRCPFWGCFSQLMLYAERAEARRKPDIPVPYLYFDMGAAVLCASFMSFGVKRRWFALGAALQLAISTYAAYIGGYVHYGDWLKVRMYSRTVAIIGGFLVLASGAGELYRRKPRSRSLQSTGQVFLGIYLICVVCWGTVGWRCLAGSEL

SEQ ID NO: 777588 - protein, 257 aa, Homo sapiens; identical to SEQ ID NO: 777581

SEQ ID NO: 777589 - protein, 77 aa, Homo sapiens
GRVADSGAQAVASQTGGESSIVWDKYGPEGSMADEKAGLRNWVTLDPELENDTVVSGRKKKKRLTRKLRVPSPRLLL

SEQ ID NO: 777590 - protein, 616 aa, Homo sapiens
ARRRMGAAPSPTQASSRGGGPGPPAPTRAVSSSSRARGGALSALGPSPARPLTTSPAPAPPPRSRPARQQPDPQCWEKRGGAGGDTKGGAAGPGPGRLRGMDAEYPAFEPPLCSELKHLCRRLREAYRELKEDLTPFKDDRYYRLAPMRLYTLSKRHFVLVFVVFFICFGLTIFVGIRGPKVIQTSAANFSLNNSKKLKPIQILSNPLSTYNQQLWLTCVVELDQSKETSIKTSFPMTVKVDGVAQDGTTMYIHNKVHNRTRTLTCAGKCAEIIVAHLGYLNYTQYTVIVGFEHLKLPIKGMNFTWKTYNPAFSRLEIWFRFFFVVLTFIVTCLFAHSLRKFSMRDWGIEQKWMSVLLPLLLLYNDPFFPLSFLVNSWLPGMLDDLFQSMFLCALLLFWLCVYHGIRVQGERKCLTFYLPKFFIVGLLWLASVTLGIWQTVNELHDPMYQYRVDTGNFQGMKVFFMVVAAVYILYLLFLIVRACSELRHMPYVDLRLKFLTALTFVVLVISIAILYLRFGAQVLQDNFVAELSTHYQNSAEFLSFYGLLNFYLYTLAFVYSPSKNALYESQLKDNPAFSMLNDSDDDVIYGSDYEEMPLQNGQAIRAKYKEESDSD

SEQ ID NO: 777591 - protein, 616 aa, Homo sapiens; identical to SEQ ID NO: 777590

SEQ ID NO: 777592 - protein, 243 aa, Homo sapiens
ARRRMGAAPSPTQASSRGGGPGPPAPTRAVSSSSRARGGALSALGPSPARPLTTSPAPAPPPRSRPARQQPDPQCWEKRGGAGGDTKGGAAGPGPGRLRGMDAEYPAFEPPLCSELKHLCRRLREAYRELKEDLTPFKDDRYYRLAPMRLYTLSKRHFVLVFVVFFICFGLTIFVGIRGKVRFLLIESFAMRGGPGVLLSVSPAVPLSSTAKGPSVEGEVSTGWMGSQPCASSCSVSCGGGVQ

SEQ ID NO: 777593 - protein, 150 aa, Homo sapiens
TFLEIHPEPPPSDTMVNSCCGSVCSDQGCGLENCCRPSCCQTTCCRTTCCRPSCCVSSCCRPQCCQSVCCQPTCCSPSCCQTTCCRTTCCRPSCCVSSCFRPQCCQSVCCQPTCCRPSCGQTTCCRTTCYRPSCCVSTCCRPTCSSGSCC

SEQ ID NO: 777594 - protein, 115 aa, Homo sapiens
STATYILTQAGMQQRDLGSPQPPPPRFKRYFCLSLLSSWDYRHVPPRPANFRIFSRDRFHHVGQAGLELLVSPQPTLLWFLPCYTTETVPVKVNRDTHAAKSRVTYLSDLHPITI

SEQ ID NO: 777595 - protein, 132 aa, Homo sapiens
MDTCRPIFSPEVLVVGKCKIQRNFSPSMAHCQIKPFSARSGFGSSNRSFLHASEVPKALILGVTSLVRVSATGQDPGAMGHAVPYFIRGVQLSPAHAFSLRKAAGTDIRGWMFLEVHLGEPLGSLACCFLES

SEQ ID NO: 777596 - protein, 135 aa, Homo sapiens
QGASDRWGQSPAGKGGLPPCSAARISSSPGGLPPVLSRVHPSVPRSVSQRSLMEALGSGHYVGGSIRSMAAAALSGLAVRLSRPQGTRGSYGAFCKTLTRTLLTFFDLAWRLRKNFFYFYILASVILNVHLQVYI

SEQ ID NO: 777597 - protein, 135 aa, Homo sapiens; identical to SEQ ID NO: 777596

SEQ ID NO: 777598 - protein, 52 aa, Homo sapiens
SSSLSFCRTGAQAMSGAREKRVSKRLSPCPGPDSHQAGDRRSTARWGKEGRS

SEQ ID NO: 777599 - protein, 119 aa, Homo sapiens
MVRNIFMKNFETNKPSTSIKIILRCLQHYKSSKYRQSPTYRHTGHLPNVNDSHTAGLACAGTLLLPVSRLSTLNPTPLPRRGKEGRTDARRVMSGAPSQLPRGFCCSSYFPHSHLWFLP

SEQ ID NO: 777600 - protein, 105 aa, Homo sapiens
AFIRILLCASKGMHAISHLISKTGLQDKFSFHAHLKDEENKADRYSLKLLELGQARWLTLVIPALWETEAGGSPRSGVRDQPGQHGETPSLLKIQKLARHDGACL

SEQ ID NO: 777601 - protein, 136 aa, Homo sapiens
FFFKDGVSLCCPGWSAMAQSWLTATSTSWVQADSPASASRVAGITGACHHAQMIFVFLVEMGFHHVRQAGLKLLTSGDQPTLASQSTGITGVSHCAQPHLALSLLPHTTESSPTLHPQLMTLLPISPRKENHREVS

SEQ ID NO: 777602 - protein, 49 aa, Homo sapiens
MFLGFGGTEVTCSQGGGRTMISRSESGVSQPDLSVKGSGGDEQTGFHTF

SEQ ID NO: 777603 - protein, 88 aa, Homo sapiens
QTCVMHYTGMLEDGKKFDSSRDRNKPFKFMLGKQEVIRGWEEGVAQMSVGQRAKLTISPDYAYGATGHPGIIPPHATLVFDVELLKLE

SEQ ID NO: 777604 - protein, 134 aa, Homo sapiens
SHCPASHLTPDGVSSLLGVSRVGHPNPLWQVKNPEAQRGEVTSPVSHTSWRAGGRSTPDLLTLRLKQESIMLIIQNLPGLFLLLQTQRAKLTLPQLCSRFHSLTFNLMIVKLGSCGRHHSATCRSHCPCLGHLS

SEQ ID NO: 777605 - protein, 126 aa, Homo sapiens
FLCRWAAGRLQAVRVFDFLTHGKEAVMDSRWPCVLGSGSQVLGQQGRALQMERGSETHGYDTSLHPLPLPSSHVRAFSTPQGSLRPSLGPPPRPCIPAVLHRGLIRTLLLLQALPWLCPFPWLTRP

SEQ ID NO: 777606 - protein, 52 aa, Homo sapiens
MVAAHDSLAADYCVLPSVTFQCNVTAALRRSICFPGAPSRLPHPILSVGASG

SEQ ID NO: 777607 - protein, 90 aa, Homo sapiens
MRLSVCLLLLTLALCCYRANAVVCQALGSEITGFLLAGKPVFKFQLAKFKAPLEAVAAKMEVKKCVDTMAYEKRVLITKTLGKIAEKCDR

SEQ ID NO: 777608 - protein, 70 aa, Homo sapiens
RNGALLDKNFFNANSHFPVKGERIRRRMDLDRVKAEATEDITSGVLCLLFLRLPPNSCIFPSAVLGSTRT

SEQ ID NO: 777609 - protein, 148 aa, Homo sapiens
GPGTQTPSILCSLHPCAVAFVHLVHHTHIPSSQRESKEGGNEREGIPFSLSFYGTIWKFHYRCHTWLRGSLGRCGLQLNHGSCWQTQPDRPYRQGRTWPLQPVLSPHFLTCSCQRVSSLLFLGCPELNSLDSSLACSFSHLRCPLAKR

SEQ ID NO: 777610 - protein, 630 aa, Homo sapiens
MLGMYVPDRFSLKSSRVQDGMGLYTARRVRKGEKFGPFAGEKRMPEDLDENMDYRLMWEVRGSKGEVLYILDATNPRHSNWLRFVHEAPSQEQKNLAAIQEGENIFYLAVEDIETDTELLIGYLDSDMEAEEEEQQIMTVIKEGEVENSRRQSTAGRKDRLGCKEDYACPQCESSFTSEDILAEHLQTLHQKPTEEKEFKCKNCGKKFPVKQALQRHVLQCTAKSSLKESSRSFQCSVCNSSFSSASSFEQHQETCRGDAKFVCKADSCGKRLKSKDALKRHQENVHTGDPKKKLICSVCNKKCSSASSLQEHRKIHEIFDCQECMKKFISANQLKRHMITHSEKRPYNCEICNKSFKRLDQVGAHKVIHSEDKPYKCKLCGKGFAHRNVYKNHKKTHSEERPFQCEECKALFRTPFSLQRHLLIHNSERTFKCHHCDATFKRKDTLNVHVQVVHERHKKYRCELCNKAFVTPSVLRSHKKTHTGEKEKICPYCGQKFASSGTLRVHIRSHTGERPYQCPYCEKGFSKNDGLKMHIRTHTREKPYKCSECSKAFSQKRGLDEHKRTHTGEKPFQCDVCDLAFSLKKMLIRHKMTHNPNRPLAECQFCHKKFTRNDYLKVHMDNIHGVADS

SEQ ID NO: 777611 - protein, 180 aa, Homo sapiens [sequence omitted]

SEQ ID NO: 777612 - protein, 111 aa, Homo sapiens
MLGMYVPDRFSLKSSRVQDGMGLYTARRVRKGEKFGPFAGEKRMPEDLDENMDYRLMWEVRGSKGEVLYILDATNPRHSNWLRFVHEAPSQEQKNLAAIQDKNLGPAEWRG

SEQ ID NO: 777613 - protein, 630 aa, Homo sapiens; identical to SEQ ID NO: 777610

SEQ ID NO: 777614 - protein, 110 aa, Homo sapiens
HTASLGKHFLFCMFLISFSTVLLSSAQDISGLKDTRNNLPLAPPYTSLATVLFWTICLPHSYTVASVLGFHTLTLAAFCLLLLPLYSNYQSTMNSKCHIHSSLQFQTPAL

SEQ ID NO: 777615 - protein, 151 aa, Homo sapiens
MERPEPELIRQSWRAVSRSPLEHGTVLFARLFALEPDLLPLFQYNCRQFSSPEDCLSSPEFLDHIRKVMLVIDAAVTNVEDLSSLEEYLASLGRKHRAVGVKLSSFSTVGESLLYMLEKCLGPAFTPATRAAWSQLYGAVVQAMSRGWDGE

SEQ ID NO: 777616 - protein, 118 aa, Homo sapiens
LSPPERERRIKAHLGKGAPLCDWNVWTALETYLQLQEAFGWEPFTQLFAEYQTLSHLPKDNTGRMNLWVKKFSEKVKKNLVPFFEAWGWPIQKEVADSLASLPEWQENPMQVYLRARK

SEQ ID NO: 777617 - protein, 106 aa, Homo sapiens
TDSTLPLWSGSSHRQNISAWAWLCSSKNFIYKNRTFMKTGHGLGFVLSGHSVPTPGLHRRTLMSATIGTCTSYCCDTHRDTSCLVSEEVNKKVRLVHLNFSLPPQF

SEQ ID NO: 777618 - protein, 130 aa, Homo sapiens
KKTNNPIKKWAKDMNRHFSKEDIYAAKRHMKKCSSSLAIREMQIKTTMRYHLTPVRMAIIKKSGNNRCWRGCGEIGTLLHCWWDCKLVQPLWKSVWRFLRDLELEIPFDPAIPLLGIYPKDYKSCCYKGI

SEQ ID NO: 777619 - protein, 39 aa, Homo sapiens
MSDPGAENSEVPMNSEVPMNSEVPMNSEVPMNSEVPMNS

SEQ ID NO: 777620 - protein, 210 aa, Homo sapiens
MQAEGQGTGGSTGDADGPGGPGIPDGPGGNAGGPGEAGATGGRGPRGAGAARASGPRGGAPRGPHGGAASAQDGRCPCGARRPDSRLLQLHITMPFSSPMEAELVRRILSRDAAPLPRPGAVLKDFTVSGNLLFMSVRDQDREGAGRMRVVGWGLGSASPEGQKARDLRTPKHKVSEQRPGTPGPPPPEGAQGDGCRGVAFNVMFSAPHI

SEQ ID NO: 777621 - protein, 180 aa, Homo sapiens
MQAEGQGTGGSTGDADGPGGPGIPDGPGGNAGGPGEAGATGGRGPRGAGAARASGPRGGAPRGPHGGAASAQDGRCPCGARRPDSRLLQLHITMPFSSPMEAELVRRILSRDAAPLPRPGAVLKDFTVSGNLLFIRLTAADHRQLQLSISSCLQQLSLLMWITQCFLPVFLAQAPSGQRR

SEQ ID NO: 777622 - protein, 33 aa, Homo sapiens
FGGPSAGRKSPSSLQHSKLRQEGADLRVSRLHG

SEQ ID NO: 777623 - protein, 711 aa, Homo sapiens
MPADVNLSQKPQVLGPEKQDGSCEASVSFEDVTVDFSREEWQQLDPAQRCLYRDVMLELYSHLFAVGYHIPNPEVIFRMLKEKEPRVEEAEVSHQRCQEREFGLEIPQKEISKKASFQKDMVGEFTRDGSWCSILEELRLDADRTKKDEQNQIQPMSHSAFFNKKTLNTESNCEYKDPGKMIRTRPHLASSQKQPQKCCLFTESLKLNLEVNGQNESNDTEQLDDVVGSGQLFSHSSSDACSKNIHTGETFCKGNQCRKVCGHKQSLKQHQIHTQKKPDGCSECGGSFTQKSHLFAQQRIHSVGNLHECGKCGKAFMPQLKLSVYLTDHTGDIPCICKECGKVFIQRSELLTHQKTHTRKKPYKCHDCGKAFFQMLSLFRHQRTHSREKLYECSECGKGFSQNSTLIIHQKIHTGERQYACSECGKAFTQKSTLSLHQRIHSGQKSYVCIECGQAFIQKAHLIVHQRSHTGEKPYQCHNCGKSFISKSQLDIHHRIHTGEKPYECSDCGKTFTQKSHLNIHQKIHTGERHHVCSECGKAFNQKSILSMHQRIHTGEKPYKCSECGKAFTSKSQFKEHQRIHTGEKPYVCTECGKAFNGRSNFHKHQITHTRERPFVCYKCGKAFVQKSELITHQRTHMGEKPYECLDCGKSFSKKPQLKVHQRIHTGERPYVCSECGKAFNNRSNFNKHQTTHTRDKSYKCSYSVKGFTKQ

SEQ ID NO: 777624 - protein, 693 aa, Homo sapiens
MPADVNLSQKPQVLGPEKQDGSCEASVSFEDVTVDFSREEWQQLDPAQRCLYRDVMLELYSHLFAVGYHIPNPEVIFRMLKEKEPRVEEAEVSHQRCQEREFGLEIPQKEISKKASFQKDMVGEFTRDGSWCSILEELRLDADRTKKDEQNQIQPMSHSAFFNKKTLNTESNCEYKDPGKMIRTRPHLASSQKQPQKCCLFTESLKLNLEVNGQNESNDTEQLDDVVGSGQLFSHSSSDACSKNIHTGETFCKGNQCRKVCGHKQSLKQHQIHTQKKPDGCSECGGSFTQKSHLFAQQRIHSVGNLHECGKCGKAFMPQLKLSVYLTDHTGDIPCICKECGKVFIQRSELLTHQKTHTRKKPYKCHDCGKAFFQMLSLFRHQRTHSREKLYECSECGKGFSQNSTLIIHQNQKSTLSLHQRIHSGQKSYVCIECGQAFIQKAHLIVHQRSHTGEKPYQCHNCGKSFISKSQLDIHHRIHTGEKPYECSDCGKTFTQKSHLNIHQKIHTGERHHVCSECGKAFNQKSILSMHQRIHTGEKPYKCSECGKAFTSKSQFKEHQRIHTGEKPYVCTECGKAFNGRSNFHKHQITHTRERPFVCYKCGKAFVQKSELITHQRTHMGEKPYECLDCGKSFSKKPQLKVHQRIHTGERPYVCSECGKAFNNRSNFNKHQTTHTRDKSYKCSYSVKGFTKQ

SEQ ID NO: 777625 - protein, 112 aa, Homo sapiens
MPADVNLSQKPQVLGPEKQDGSCEASVSFEDVTVDFSREEWQQLDPAQRCLYRDVMLELYSHLFAVGYHIPNPEVIFRMLKEKEPRVEEAEVSHQRCQGLAQLAPPFHLHHL

SEQ ID NO: 777626 - protein, 107 aa, Homo sapiens
MVGEFTRDGSWCSILEELRLDADRTKKDEQNQIQPMSHSAFFNKKTLNTESNCEYKDPGKMIRTRPHLASSQKQPQKCCLFTESLKLNLEVNGQNESNDTEQLDDVV

SEQ ID NO: 777627 - protein, 51 aa, Homo sapiens
MPADVNLSQKPQVLGPEKQDGSCEVNRGSPGDSSPEREGRHRMQQVWAPCS

SEQ ID NO: 777628 - protein, 116 aa, Homo sapiens
TPSVGDFLRRTHSPHHVVLSSQHGSLLRKDTEQASRGKSRGAESGDLGASSQEPVLVQLHRTRLFSPVSGYDNTCELSATGILLGTQRPGFLLGRSMYPNSRLPEGKQVFSGKHTC

SEQ ID NO: 777629 - protein, 532 aa, Homo sapiens
MNGVLIPHTPIAVDFWSLRRAGTARLFFLSHMHSDHTVGLSSTWARPLYCSPITAHLLHRHLQVSKQWIQALEVGESHVLPLDEIGQETMTVTLLDANHCPGSVMFLFEGYFGTILYTGDFRYTPSMLKEPALTLGKQIHTLYLDNTNCNPALVLPSRQEAAHQIVQLIRKHPQHNIKIGLYSLGKESLLEQLALEFQTWVVLSPRRLELVQLLGLADVFTVEEKAGRIHAVDHMEICHSNMLRWNQTHPTIAILPTSRKIHSSHPDIHVIPYSDHSSYSELRAFVAALKPCQVVPIVSRRPCGGFQDSLSPRISVPLIPDSVQQYMSSSSRKPSLLWLLERRLKRPRTQGVVFESPEESADQSQADRDSKKAKKEKLSPWPADLEKQPSHHPLRIKKQLFPDLYSKEWNKAVPFCESQKRVTMLTAPLGFSVHLRSTDEEFISQKTREEIGLGSPLVPMGDDDGGPEATGNQSAWMGHGSPLSHSSKGTPLLATEFRGLALKYLLTPVNFFQAGYSSRRFDQQVEKYHKPC

SEQ ID NO: 777630 - protein, 559 aa, Homo sapiens
MVGKDTSTVEEPCPRGEDPTGDSNPTTMNGVLIPHTPIAVDFWSLRRAGTARLFFLSHMHSDHTVGLSSTWARPLYCSPITAHLLHRHLQVSKQWIQALEVGESHVLPLDEIGQETMTVTLLDANHCPGSVMFLFEGYFGTILYTGDFRYTPSMLKEPALTLGKQIHTLYLDNTNCNPALVLPSRQEAAHQIVQLIRKHPQHNIKIGLYSLGKESLLEQLALEFQTWVVLSPRRLELVQLLGLADVFTVEEKAGRIHAVDHMEICHSNMLRWNQTHPTIAILPTSRKIHSSHPDIHVIPYSDHSSYSELRAFVAALKPCQVVPIVSRRPCGGFQDSLSPRISVPLIPDSVQQYMSSSSRKPSLLWLLERRLKRPRTQGVVFESPEESADQSQADRDSKKAKKEKLSPWPADLEKQPSHHPLRIKKQLFPDLYSKEWNKAVPFCESQKRVTMLTAPLGFSVHLRSTDEEFISQKTREEIGLGSPLVPMGDDDGGPEATGNQSAWMGHGSPLSHSSKGTPLLATEFRGLALKYLLTPVNFFQAGYSSRRFDQQVEKYHKPC

SEQ ID NO: 777631 - protein, 145 aa, Homo sapiens
MPTSTSWQSTWSPSHISISLCLALPLSPAMEASSIKLTVSEFTQHVFNAKNMMAACEPRHGLYFTLAAVFTGQISMKDVNDKMLNMQNKTQQLLCGMDLQQRQEQSDIPFYGLKWSFTGIVNMVFQKLFKYIADQRKGSSGEKRP

SEQ ID NO: 777632 - protein, 39 aa, Homo sapiens
QRGFRKHVAKMKEPVPEWRGKTQEGTGHGEAPKGGVWSG

SEQ ID NO: 777633 - protein, 487 aa, Homo sapiens
GVALQRRQIARRRRRLHAAGGLLAPVRPARQEGVGGCGRAGSQARGPRPDAGRGAEPPVRPPGLVAELQGALDACAQRQLQLEQSLRVCRRLLHAWEPTGTRALKPPPGPETNGEDPLPACTPSPQDLKELEFLTQALEKAVRVRRGITKAGERDKAPSLKSRSIVTSSGTTASAPPHSPGQAGGHASDTRPTKGLRQTTVPAKGHPERRLLSVGDGTRVGMGARTPRPGAGLRDQQMAPSAAPQAPEAFTLKEKGHLLRLPAAFRKAASQNSSLWAQLSSTQTSDSTDAAAAKTQFLQNMQTASGGPQPRLSAVEVEAEAGRLRKACSLLRLRMREELSAAPMDWMQEYRCLLTLEGLQAMVGQCLHRLQELRAAVAEQPPRPCPVGRPPGASPSCGGRAEPAWSPQLLVYSSTQELQTLAALKLRVAVLDQQIHLEKVLMAELLPLVSAAQPQGPPWLALCRAVHSLLCEGGARVLTILRDEPAV

SEQ ID NO: 777634 - protein, 450 aa, Homo sapiens
GAWLFRGGKLQGDAAAFMLPAGCSRRLVAELQGALDACAQRQLQLEQSLRVCRRLLHAWEPTGTRALKPPPGPETNGEDPLPACTPSPQDLKELEFLTQALEKAVRVRRGITKAGERDKAPSLKSRSIVTSSGTTASAPPHSPGQAGGHASDTRPTKGLRQTTVPAKGHPERRLLSVGDGTRVGMGARTPRPGAGLRDQQMAPSAAPQAPEAFTLKEKGHLLRLPAAFRKAASQNSSLWAQLSSTQTSDSTDAAAAKTQFLQNMQTASGGPQPRLSAVEVEAEAGRLRKACSLLRLRMREELSAAPMDWMQEYRCLLTLEGLQAMVGQCLHRLQELRAAVAEQPPRPCPVGRPPGASPSCGGRAEPAWSPQLLVYSSTQELQTLAALKLRVAVLDQQIHLEKVLMAELLPLVSAAQPQGPPWLALCRAVHSLLCEGGARVLTILRDEPAV

SEQ ID NO: 777635 - protein, 379 aa, Homo sapiens
GAWLFRGGKLQGDAAAFMLPAGCSRRLVAELQGALDACAQRQLQLEQSLRVCRRLLHAWEPTGTRALKPPPGPETNGEDPLPACTPSPQDLKELEFLTQALEKAVRVRRGITKAGERDKAPSLKSRSIVTSSGTTASAPPHSPGQAGGHASDTRPTKGLRQTTVPAKGHPERRLLSVGDGTRVGMGARTPRPGAGLRDQQMAPSAAPQAPEAFTLKEKGHLLRLPAAFRKAASQNSSLWAQLSSTQTSDSTDAAAAKTQFLQNMQTASGGPQPRLSAVEVEAEAGRLRKACSLLRLRMREELSAAPMDWMQEYRCLLTLEGLQAMVGQCLHRLQELRAAPRSCRPWRPSSCEWLCWTSRSTWKRCFWKRRWGCNRGPQP

SEQ ID NO: 777636 - protein, 422 aa, Homo sapiens
GAWLFRGGKLQGDAAAFMLPAGCSRRLVAELQGALDACAQRQLQLEQSLRVCRRLLHAWEPTGTRALKPPPGPETNGEDPLPACTPSPQDLKELEFLTQALEKAVRVRRGITKAGERDKAPSLKSRSIVTSSGTTASAPPHSPGQAGGHASDTRPTKGLRQTTVPAKGHPERRLLSVGDGTRVGMGARTPRPGAGLRDQQMAPSAAPQAPEAFTLKEKGHLLRLPAAFRKAASQNSSLWAQLSSTQTSDSTDAAAAKTQFLQNMQTASGGPQPRLSAVEVEAEAGRLRKACSLLRLRMREELSAAPMDWMQEYRCLLTLEGLQAMVGQCLHRLQELRAAVAEQPPRPCPVGRPPGASPSCGGRAEPAWSPQLLVYSSTQELQTLAALKLRVAVLDQQIHLEKVLLEEEVGVQQRSAALRTRG

SEQ ID NO: 777637 - protein, 530 aa, Homo sapiens
GAWLFRGGKLQGDAAAFMLPAGCSRRLVAELQGALDACAQRQLQLEQSLRVCRRLLHAWYADPGPTGQTSLGPSESRPERPGLGDRAQPPTSELWVVSATLLTLQALSWGPAAGPGGPSGLFGLGPASWPCDGCPCLCREPTGTRALKPPPGPETNGEDPLPACTPSPQDLKELEFLTQALEKAVRVRRGITKAGERDKAPSLKSRSIVTSSGTTASAPPHSPGQAGGHASDTRPTKGLRQTTVPAKGHPERRLLSVGDGTRVGMGARTPRPGAGLRDQQMAPSAAPQAPEAFTLKEKGHLLRLPAAFRKAASQNSSLWAQLSSTQTSDSTDAAAAKTQFLQNMQTASGGPQPRLSAVEVEAEAGRLRKACSLLRLRMREELSAAPMDWMQEYRCLLTLEGLQAMVGQCLHRLQELRAAVAEQPPRPCPVGRPPGASPSCGGRAEPAWSPQLLVYSSTQELQTLAALKLRVAVLDQQIHLEKVLMAELLPLVSAAQPQGPPWLALCRAVHSLLCEGGARVLTILRDEPAV

SEQ ID NO: 777638 - protein, 417 aa, Homo sapiens
GAWLFRGGKLQGDAAAFMLPAGCSRREPTGTRALKPPPGPETNGEDPLPACTPSPQDLKELEFLTQALEKAVRVRRGITKAGERDKAPSLKSRSIVTSSGTTASAPPHSPGQAGGHASDTRPTKGLRQTTVPAKGHPERRLLSVGDGTRVGMGARTPRPGAGLRDQQMAPSAAPQAPEAFTLKEKGHLLRLPAAFRKAASQNSSLWAQLSSTQTSDSTDAAAAKTQFLQNMQTASGGPQPRLSAVEVEAEAGRLRKACSLLRLRMREELSAAPMDWMQEYRCLLTLEGLQAMVGQCLHRLQELRAAVAEQPPRPCPVGRPPGASPSCGGRAEPAWSPQLLVYSSTQELQTLAALKLRVAVLDQQIHLEKVLMAELLPLVSAAQPQGPPWLALCRAVHSLLCEGGARVLTILRDEPAV

SEQ ID NO: 777639 - protein, 225 aa, Homo sapiens
SSVPQARVLGTDLWAQLSSTQTSDSTDAAAAKTQFLQNMQTASGGPQPRLSAVEVEAEAGRLRKACSLLRLRMREELSAAPMDWMQEYRCLLTLEGLQAMVGQCLHRLQELRAAVAEQPPRPCPVGRPPGASPSCGGRAEPAWSPQLLVYSSTQELQTLAALKLRVAVLDQQIHLEKVLMAELLPLVSAAQPQGPPWLALCRAVHSLLCEGGARVLTILRDEPAV

SEQ ID NO: 777640 - protein, 103 aa, Homo sapiens
GVALQRRQIARRRRRLHAAGGLLAPVRPARQEGVGGCGRAGSQARGPRPDAGRGAEPPVRPPGWWPSCRAPWTPAHSDNCNWSRACAFAVGCCMPGNQLGPGL

SEQ ID NO: 777641 - protein, 238 aa, Homo sapiens
MVLLLLVAIPLLVHSSRGPAHYEMLGRCRMVCDPHGPRGPGPDGAPASVPPFPPGAKGEVGRRGKAGLRGPPGPPGPRGPPGEPGRPGPPGPPGPGPGGVAPAAGYVPRIAFYAGLRRPHEGYEVLRFDDVVTNVGNAYEAASGKFTCPMPGVYFFAYHVLMRGGDGTSMWADLMKNGQVRASAIAQDADQNYDYASNSVILHLDVGDEVFIKLDGGKVHGGNTNKYSTFSGFIIYPD

SEQ ID NO: 777642 - protein, 86 aa, Homo sapiens
ESRSPRKYCQYRIKLGSDSAERKHLRNNKIPRRKINNKKDMNDTILLDETNICRTLSLARANTPASQAHTQYFPGWTNGRPQSKPP

SEQ ID NO: 777643 - protein, 184 aa, Homo sapiens
SPSPSPPFYSLAPGILDARAGGAGASSEPPGPSEARAPPSQLPNPPASEMRPRMLPVFFGESIKVNPEPTHEIRCNSEVKYASEKHFQDKVFYAPVPTVTAYSETIVAAPNCTWRNYRSQLTLEPRPRALRFRSTTIIFPKHARSTFRTTLHCSLGRPSRWFTASVQLQLCQDPAPSLLGPATL

SEQ ID NO: 777644 - protein, 184 aa, Homo sapiens; identical to SEQ ID NO: 777643

SEQ ID NO: 777645 - protein, 102 aa, Homo sapiens [sequence omitted]

SEQ ID NO: 777646 - protein, 137 aa, Homo sapiens
KKINHLKRDPKLKGPNRIVSHETWRAFERKKPRPGPALGLHTLGGAEARSGHPAKLSLTGRGHVACRPPGKWIIASRQRPRCDHADLDVQPPTCAQSGPLSSRGPRGPAPIPPAAVPSQHAATPAPGEGFPSVQTPV

SEQ ID NO: 777647 - protein, 116 aa, Homo sapiens
AAAWTRVRRAGGDDGPAMARAGSCGGAAAGAGRPEPWELSLEEVLKAYEQPLNEEQAWAVCFQGCRGLRGSPGRRLRDTGDLLLRGDGSVGAREPEAAEPATMVVPLASSEAQLHR

SEQ ID NO: 777648 - protein, 116 aa, Homo sapiens; identical to SEQ ID NO: 777647

SEQ ID NO: 777649 - protein, 141 aa, Homo sapiens
MDVRRVLVKAEMEKFLQNKELFSSLKKGKICCCCRAKFPLFSWPPSCLFCKRGLCKGHSGRAWRRRSPTLLPALALSLSLGSKPHVSCLSWPYHILVLSSLAPGPEAPEDAGRSWHREEQLCKSVHMATLGLIKEVSQSKN

SEQ ID NO: 777650 - protein, 239 aa, Homo sapiens
AAAWTRVRRAGGDDGPAMARAGSCGGAAAGAGRPEPWELSLEEVLKAYEQPLNEEQAWAVCFQGCRGLRGSPGRRLRDTGDLLLRGDGSVGAREPEAAEPATMVVPLASSEAQTVQSLGFAIYRALDWGLDESEERELSPQLERLIDLMANNDSEDSGCGAADEGYGGPEEEEEAEGVPRSVRTFAQAMRLCAARLTDPRGAQAHYQAVCRALFVENAGAAGLPGQGPGGQGVNGGWGR

SEQ ID NO: 777651 - protein, 666 aa, Homo sapiens
MSCLCLGLLWTDSCCLPGRVLGPLHPPAAFSPPHPPAVPPSDRAPVPQTVQSLGFAIYRALDWGLDESEERELSPQLERLIDLMANNDSEDSGCGAADEGYGGPEEEEEAEGVPRSVRTFAQAMRLCAARLTDPRGAQAHYQAVCRALFVETLELRAFLARVREAKEMLQKLREDEPHLETPRAELDSLGHTDWARLWVQLMRELRRGVKLKKVQEQEFNPLPTEFQLTPFEMLMQDIRARNYKLRKVMVDGDIPPRVKKDAHELILDFIRSRPPLKQVSERRLRPLPPKQRSLHEKILEEIKQERRLRPVRGEGWAARGFGSLPCILNACSGDAKSTSCINLSVTDAGGSAQRPRPRVLLKAPTLAEMEEMNTSEEEESPCGEVTLKRDRSFSEHDLAQLRSEVASGLQSATHPPGGTEPPRPRAGSAHVWRPGSRDQGTCPASVSDPSHPLLSNRGSSGDRPEASMTPDAKHLWLEFSHPVESLALTVEEVMDVRRVLVKAEMEKFLQNKELFSSLKKGKICCCCRAKFPLFSWPPSCLFCKRAVCTSCSIKMKMPSKKFGHIPVYTLGFESPQRVSAAKTAPIQRRDIFQSLQGPQWQSVEEAFPHIYSHGCVLKDVCSECTSFVADVVRSSRKSVDVLNTTPRRSRQTQSLYIPNTRTLDFK

SEQ ID NO: 777652 - protein, 769 aa, Homo sapiens
AAAWTRVRRAGGDDGPAMARAGSCGGAAAGAGRPEPWELSLEEVLKAYEQPLNEEQAWAVCFQGCRGLRGSPGRRLRDTGDLLLRGDGSVGAREPEAAEPATMVVPLASSEAQTVQSLGFAIYRALDWGLDESEERELSPQLERLIDLMANNDSEDSGCGAADEGYGGPEEEEEAEGVPRSVRTFAQAMRLCAARLTDPRGAQAHYQAVCRALFVETLELRAFLARVREAKEMLQKLREDEPHLETPRAELDSLGHTDWARLWVQLMRELRRGVKLKKVQEQEFNPLPTEFQLTPFEMLMQDIRARNYKLRKVMVDGDIPPRVKKDAHELILDFIRSRPPLKQVSERRLRPLPPKQRSLHEKILEEIKQERRLRPVRGEGWAARGFGSLPCILNACSGDAKSTSCINLSVTDAGGSAQRPRPRVLLKAPTLAEMEEMNTSEEEESPCGEVTLKRDRSFSEHDLAQLRSEVASGLQSATHPPGGTEPPRPRAGSAHVWRPGSRDQGTCPASVSDPSHPLLSNRGSSGDRPEASMTPDAKHLWLEFSHPVESLALTVEEVMDVRRVLVKAEMEKFLQNKELFSSLKKGKICCCCRAKFPLFSWPPSCLFCKREFHSCCPVGSAISAHCNLHLPGSSDSPASASWVAGITEPSALPVAKEMKMPSKKFGHIPVYTLGFESPQRVSAAKTAPIQRRDIFQSLQGPQWQSVEEAFPHIYSHGCVLKDVCSECTSFVADVVRSSRKSVDVLNTTPRRSRQTQSLYIPNTRTLDFK

SEQ ID NO: 777653 - protein, 738 aa, Homo sapiens
AAAWTRVRRAGGDDGPAMARAGSCGGAAAGAGRPEPWELSLEEVLKAYEQPLNEEQAWAVCFQGCRGLRGSPGRRLRDTGDLLLRGDGSVGAREPEAAEPATMVVPLASSEAQTVQSLGFAIYRALDWGLDESEERELSPQLERLIDLMANNDSEDSGCGAADEGYGGPEEEEEAEGVPRSVRTFAQAMRLCAARLTDPRGAQAHYQAVCRALFVETLELRAFLARVREAKEMLQKLREDEPHLETPRAELDSLGHTDWARLWVQLMRELRRGVKLKKVQEQEFNPLPTEFQLTPFEMLMQDIRARNYKLRKVMVDGDIPPRVKKDAHELILDFIRSRPPLKQVSERRLRPLPPKQRSLHEKILEEIKQERRLRPVRGEGWAARGFGSLPCILNACSGDAKSTSCINLSVTDAGGSAQRPRPRVLLKAPTLAEMEEMNTSEEEESPCGEVTLKRDRSFSEHDLAQLRSEVASGLQSATHPPGGTEPPRPRAGSAHVWRPGSRDQGTCPASVSDPSHPLLSNRGSSGDRPEASMTPDAKHLWLEFSHPVESLALTVEEVMDVRRVLVKAEMEKFLQNKELFSSLKKGKICCCCRAKFPLFSWPPSCLFCKRAVCTSCSIKMKMPSKKFGHIPVYTLGFESPQRVSAAKTAPIQRRDIFQSLQGPQWQSVEEAFPHIYSHGCVLKDVCSECTSFVADVVRSSRKSVDVLNTTPRRSRQTQSLYIPNTRAVGALLRALASS

SEQ ID NO: 777654 - protein, 165 aa, Homo sapiens
MDVRRVLVKAEMEKFLQNKELFSSLKKGKICCCCRAKFPLFSWPPSCLFCKREMKMPSKKFGHIPVYTLGFESPQRVSAAKTAPIQRRDIFQSLQGPQWQSVEEAFPHIYSHGCVLKDVCSECTSFVADVVRSSRKSVDVLNTTPRRSRQTQSLYIPNTRTLDFK

SEQ ID NO: 777655 - protein, 617 aa, Homo sapiens
AAAWTRVRRAGGDDGPAMARAGSCGGAAAGAGRPEPWELSLEEVLKAYEQPLNEEQAWAVCFQGCRGLRGSPGRRLRDTGDLLLRGDGSVGAREPEAAEPATMVVPLASSEAQTVQSLGFAIYRALDWGLDESEERELSPQLERLIDLMANNDSEDSGCGAADEGYGGPEEEEEAEGVPRSVRTFAQAMRLCAARLTDPRGAQAHYQAVCRALFVETLELRAFLARVREAKEMLQKLREDEPHLETPRAELDSLGHTDWARLWVQLMRELRRGVKLKKVQEQEFNPLPTEFQLTPFEMLMQDIRARNYKLRKVMVDGDIPPRVKKDAHELILDFIRSRPPLKQVSERRLRPLPPKQRSLHEKILEEIKQERRLRPVRGEGWAARGFGSLPCILNACSGDAKSTSCINLSVTDAGGSAQRPRPRVLLKAPTLAEMEEMNTSEEEESPCGEVTLKRDRSFSEHDLAQLRSEVASGLQSATHPPGGTEPPRPRAGSAHVWRPGSRDQGTCPASVSDPSHPLLSNRGSSGDRPEASMTPDAKHLWLEFSHPVESLALTVEEVMDVRRVLVKAEMEKFLQNKELFTITGQISNQRAEGLTSTVSESRPESRSRPSEPPTLPR

SEQ ID NO: 777656 - protein, 459 aa, Homo sapiens
MSLQAPSRLLELAGQSLLRNQFLTIFTLDELPREVFPLMFMEAFSMRRFEALKLMVQAWPFLSLPLGSLMKTLHLETLQAVLRGLDTLVAQKVRPRRWKLQVLDLRDVDENFWTIWSGARVLSCSPEAMSKRQTVEDCPRMGEHQPLKVFIDLCLKESTLDECLSYLFGWIHYRRGLVHLCCSKVQNYSMPTSSFRNLLERIYPDSIQELEVWKKCSLNKTGKFAPYLSQMSNLRELFLAFGYERELYVSVQWPCIPDLDSPFLCLYYPQMLYIKKISNIKEHLEHLLRYLKNPLGAFIFSDAYLTDRDMECLSQYPSLSQLKELRLIHILMWTTHLEPLGVLLEKVAATLKTLVLKDCRIQDPQLRVLLPALSHCSQLTTFNFHGNETSMNALKDLLRHTGGLSKLGLELYPAPLESLDYKGHVNWEILTPIRAELMRTLREVRQPKRIFFGPVPCPN

SEQ ID NO: 777657 - protein, 578 aa, Homo sapiens
MAVRWTWAGKSCLLLAFLTVAYIFVELLVSTFHASAGAGRARELGSRRLSDLQKNTEDLSRPLYKKPPADSRALGEWGKASKLQLNEDELKQQEELIERYAINIYLSDRISLHRHIEDKRMYECKSQKFNYRTLPTTSVIIAFYNEAWSTLLRTIHSVLETSPAVLLKEIILVDDLSDRVYLKTQLETYISNLDRVRLIRTNKREGLVRARLIGATFATGDVLTFLDCHCECNSGWLEPLLERIGRDETAVVCPVIDTIDWNTFEFYMQIGEPMIGGFDWRLTFQWHSVPKQERDRRISRIDPIRSPTMAGGLFAVSKKYFQYLGTYDTGMEVWGGENLELSFRVWQCGGKLEIHPCSHVGHVFPKRAPYARPNFLQNTARAAEVWMDEYKEHFYNRNPPARKEAYGDISERKLLRERLRCKSFDWYLKNVFPNLHVPEDRPGWHGAIRSRGISSECLDYNSPDNNPTGANLSLFGCHGQGGNQFFEYTSNKEIRFNSVTELCAEVPEQKNYVGMQNCPKDGFPVPANIIWHFKEDGTIFHPHSGLCLSAYRTPEGRPDVQMRTCDALDKNQIWSFEK

SEQ ID NO: 777658 - protein, 578 aa, Homo sapiens; identical to SEQ ID NO: 777657

SEQ ID NO: 777659 - protein, 152 aa, Homo sapiens
VRAVGVKMCAAHPSFQHRTKTQRGTCQESQVMEPSGGHVGSCPRWKGSWHSSWFPRLALTFVLSCPWPRLPSSMLGMLRDNPSASPTMSRLLPRILVLWRVDPALPILVPYQGQASHGSFCSPWHRLWGAQPGEQWALEGPGLHVPTPIMEF

SEQ ID NO: 777660 - protein, 88 aa, Homo sapiens
MSRLPSRTLHPSRPVLTACWVLVSCLKSRLRTPGKTPPQHVDPTPPKTLPQHVHWTPPKTPPTARALHDCTQDAAHSTCTHLHPRRPP

SEQ ID NO: 777661 - protein, 102 aa, Homo sapiens
TWRNWVSTKNIKISQTWWLVLVVPATQEAQAGGSLEHHCMPASLGDTVRPCLKNKKRRRKKKNQNYHQGFMSGNRSKSESKEMMEVYRSPLYATSAFKKGIM

SEQ ID NO: 777662 - protein, 49 aa, Homo sapiens
SRYPFPKPSLIGEKNLGPGRACSLPSSDSCQFSALHSIDCSRPGSLLGS

SEQ ID NO: 777663 - protein, 59 aa, Homo sapiens
VLALWEHDDLDLPCAGTRAVISFCILLEMLGYMVVPLASTVLAYRSLWMPTSHLMIELK

SEQ ID NO: 777664 - protein, 41 aa, Homo sapiens
MAPLCSILGDRARVLLKKKLRNEEKSWNRAQGILALGIFLK

SEQ ID NO: 777665 - protein, 106 aa, Homo sapiens
CWSFVPGWLHLGSCPQGSATLERVGASFLFVAESSSVVWLDHVVFMHSLADGHLGRFHFLAIVSHVALKVHVQDLCGHSHGLKLRFHLDDFSPDLSPRPWACLPAR

SEQ ID NO: 777666 - protein, 113 aa, Homo sapiens
TAGATQPAPEAAWLDLRKRGPGWRGEREVGATGLQMTSGLGACCGTRGSGSGLRLPLRGGALCLRFSRRPIYPRDTLILQAVSWTPFPPLASQPDLALSPLGEPVGWGPSAGV

SEQ ID NO: 777667 - protein, 753 aa, Homo sapiens
AENLQLSSTELATSMLYSPGPSLPESAESLDGSQEDKPRGSCAEPTFTDTGMVAHINNSRLKAKGVGQHDNAQNFGNQSFEELRAACLRKGELFEDPLFPAEPSSLGFKDLGPNSKNVQNISWQRPKDIINNPLFIMDGISPTDICQGILGDCWLLAAIGSLTTCPKLLYRVVPRGQSFKKNYAGIFHFQIWQFGQWVNVVVDDRLPTKNDKLVFVHSTERSEFWSALLEKAYAKLSGSYEALSGGSTMEGLEDFTGGVAQSFQLQRPPQNLLRLLRKAVERSSLMGCSIEVTSDSELESMTDKMLVRGHAYSVTGLQDVHYRGKMETLIRVRNPWGRIEWNGAWSDSAREWEEVASDIQMQLLHKTEDGEFWMSYQDFLNNFTLLEICNLTPDTLSGDYKSYWHTTFYEGSWRRGSSAGGCRNHPGTFWTNPQFKISLPEGDDPEDDAEGNVVVCTCLVALMQKNWRHARQQGAQLQTIGFVLYAVPKEFQNIQDVHLKKEFFTKYQDHGFSEIFTNSREVSSQLRLPPGEYIIIPSTFEPHRDADFLLRVFTEKHSESWELDEVNYAEQLQEEKVSEDDMDQDFLHLFKIVAGEGKEIGVYELQRLLNRMAIKFKSFKTKGFGLDACRCMINLMDKDGSGKLGLLEFKILWKKLKKWMDIFRECDQDHSGTLNSYEMRLVIEKAGIKLNNKVMQVLVARYADDDLIIDFDSFISCFLRLKTMFTFFLTMDPKNTGHICLSLEQWLQMTMWG

SEQ ID NO: 777668 - protein, 81 aa, Homo sapiens
QPGSQVQVSREVAGDILVVSGATLVATGLMMAPQMQQWRKIPPKTRKVPLQPRFSRRYSESRGNGPKLEMDSSVVEIAEGQ

SEQ ID NO: 777669 - protein, 311 aa, Homo sapiens
RGPGPAVAPAPRPQRAGHSQPRSGGGRSRRLTMHCHAELRLSSPGQLKAARRRYKTFMIDEILSKETCDYFEKLSLYSVCPSLVVRPKPLHSCTGSPSLRAYPLLSVITRQPTVISHLVPATPGIAQALSCHQVTEAVSAEAPGGEALASSESETEQPTPRQKKPRRSRTIFTELQLMGLEKKFQKQKYLSTPDRLDLAQSLGLTQLQVKTWYQNRRMKWKKMVLKGGQEAPTKPKGRPKKNSIPTSEEIEAEEKMNSQAQGQEQLEPSQGQEELCEAQEPKARDVPLEMAEPPDPPQELPIPSSEPPPLS

SEQ ID NO: 777670 - protein, 105 aa, Homo sapiens
SHNSRTSYSYDSLQLPLPRPCLWPGFPSSCSLPPGQFSQITNLHTGLSTNQAPQALSVNLTLLTCGSRSICPWSRTLNPELARQAFGTKLVSCMATVIPDVCVSL

SEQ ID NO: 777671 - protein, 127 aa, Homo sapiens
LACCGAPSQPPSRAHRLTLACCGVPTRPPSRPPSLLTKKPVSQIHGQRCLLSRHTQGNRPSKHRKSPAQWHGSGGELGVRFSHSKRRYENCSAVPEQTPSVSVSVPASSQQEPGASLLGQIPLTGTV

SEQ ID NO: 777672 - protein, 179 aa, Homo sapiens
LGFFAAAQDEPTLRESETQAPPPSLTDCIGTVDSRAESIDKKISRLDAELVKYKDQIKKMREGPAKNMVKQKALRVLKQKRMYEQQRDNLAQQSFNMEQANYTIQSLKDTKTTVDAMKLGVKEMKKAYKQVKIDQIEDLQDQLEDMMEDANEIQEALSRSYGTPELDEDDLESRVGCTR

SEQ ID NO: 777673 - protein, 95 aa, Homo sapiens
LSLEEILAEGTDLAETAPPPLCASRNSKAKLRALREAMYHSAEHGYVDVTIDIRSIGVPWTLHTWLESLRIAFQQHRRPLIQCLLKEFKTIQEEE

SEQ ID NO: 777674 - protein, 155 aa, Homo sapiens
MAKFGVHRILLLAISLTKCLESTKLLADLKKCGDLECEALINRVSAMRDYRGPDCRYLNFTKGEEISVYVKLAGEREDLWAGSKGKEFGYFPRDAVQIEEVFISEEIQMSTKESDFLCLLGVSYTFDNEDSELNGDYGENIYPYEEDKDEKSSIY

SEQ ID NO: 777675 - protein, 78 aa, Homo sapiens
PDPRPRPGRARAAQVLRRSQQYSTGLSAQRQLLGGPCLKGGLSGGPPGCQEESYSKRVCRLRRSLSVDRGIQASWGYT

SEQ ID NO: 777676 - protein, 350 aa, Homo sapiens
RGCRLQWLAPSSPGQAMKVEFAPLNIQLARRLQTVAVLQWVFSFLTGPMSIGITVMLIIHNYLFLYIPYLMWLYFDWHTPERGGRRSSWIKNWTLWKHFKDYFPIHLIKTQDLDPSHNYIFGFHPHGIMAVGAFGNFSVNYSDFKDLFPGFTSYLHVLPLWFWCPVFREYVMSVGLVSVSKKSVSYMVSKEGGGNISVIVLGGAKESLDAHPGKFTLFIRQRKGFVKIALTHGASLVPVVSFGENELFKQTDNPEGSWIRTVQNKLQKIMGFALPLFHARGVFQYNFGLMTYRKAIHTVVGRPIPVRQTLNPTQEQIEELHQTYMEELRKLFEEHKGKYGIPEHETLVLK

SEQ ID NO: 777677 - protein, 176 aa, Homo sapiens
RGCRLQWLAPSSPGQAMKVEFAPLNIQLARRLQTVAVLQWVFSFLTGPMSIGITVMLIIHNYLFLYIPYLMWLYFDWHTPERGGRRSSWIKNWTLWKHFKDYFPIHLIKTQDLDPSHNYIFGFHPHGIMAVGAFGNFSVNYSDFKDLFPGFTSYLHVLPLWFWCPVFREYVMSVGK

SEQ ID NO: 777678 - protein, 98 aa, Homo sapiens
WAPLYSCADRPTALTEALYDICFRTLKLTTPHLRGSSTTWMSATYERGHHLPDDFTRSSCTADLRKLTVNMVPFPRLPFLLSHWMVPTFMHLTNSESL

SEQ ID NO: 777679 - protein, 58 aa, Homo sapiens
MKAGAVSLGPPTAEPWYPHQPSPVAQYTPSECAHAGQAQWLTPVIPALWEAEAGGALE

SEQ ID NO: 777680 - protein, 197 aa, Homo sapiens
EIHPEPPPSDTMVSSCCGSVSSEQSCGLENCCCPSCCQTTCCRTTCCRPSCCKPQCCQSVCYQPTCCHPSCCISSCCRPYCCESSCCRPCCCRPSCCQTTCCRTTCCRTTCCCPSCCVSSCCRPQCCQSVCCQPTCCRPSYCISSCCHPSCCESSCCRPCCCVRPVCGRVSCHTTCYRPTCVISTCPRPLCCASSCC

SEQ ID NO: 777681 - protein, 113 aa, Homo sapiens [sequence omitted]

SEQ ID NO: 777682 - protein, 159 aa, Homo sapiens
MGADQGRARGAIVHRDVEGWLAGDTVGTTEYHALHGSVMYNKFGNEYPMNECSVATPDLIFRVVLVAILVVYDMHGLGFDFAAKDDPRIGHGHACIVDLASISVLRAIDCPIQAGTRKQESVVRWGVGGELGKYVTGASVVCVRDEDWDLGNSWAAGWM

SEQ ID NO: 777683 - protein, 68 aa, Homo sapiens
DIDTNVLGGRDEGSEAMELEIMDITTDHVKLNERNKERQELQDNTVFFCTLYGNLYQQTREILFSLGE

SEQ ID NO: 777684 - protein, 106 aa, Homo sapiens
LLTSGDPPASASQSAGITGMSQMLRERILFYIPIFPQVTGRMSLCIADRRPVPRVCSRDRGGRCCPGASSGFLCLSSEARCYLSEPQLLAQGLGRELRRGRSRAAP

SEQ ID NO: 777685 - protein, 101 aa, Homo sapiens
WKGHARLGAWSVQRQGGGNTLGSCGDQEKFMVAEIEPVWAGGLSAKGEMGRERLGPEDLHAHKLRVDPVNFKLLSHCLLVTLAAHLPAEFTPAVHASLGQV

SEQ ID NO: 777686 - protein, 119 aa, Homo sapiens [sequence omitted]

SEQ ID NO: 777687 - protein, 81 aa, Homo sapiens
QSPCIGDLPNTHLHFQKEQSRKEAESQVCGGEKGKWVSHEIQVAPQDRRISWARVLPIWVVLVISVCCGHSVAILSAPLPK

SEQ ID NO: 777688 - protein, 105 aa, Homo sapiens
MDSTFTSGVPSHTCSHSFPAPHLVPLCLLLLGEKVHLAQELTFSVFWPGNKTRLPFPIGCSFFATNTEWGKKCLPGTLRHNYAPIVKAYSSFKNALRGWARWLTP

SEQ ID NO: 777689 - protein, 72 aa, Homo sapiens
GHICPSQQGFSERAFRTWKQTPHCVGGLNTKSVEEQVSRHGSGNTNRKRATLESALPLLEFLVNTASSAWRV

SEQ ID NO: 777690 - protein, 108 aa, Homo sapiens
MWSQTVSVLRLGSSVLPQIDGQVPRASQKQGKGRWSVGAVAKGDRRQVVKEPPWVFWVCFSSRCPYPWPLPCRRALVLSGQLPAHPSPALFCFPAWKSVSSPGGHSSF

SEQ ID NO: 777691 - protein, 134 aa, Homo sapiens
SHLGQRLSPTSQLKKLRHGQVEAPYPAVGSPGQAKPPSPRLGQMLPLTCCLPRLISRPPHGALGKSCHPHQPDRRQPRERVGQEGPEALGGGRQGQPPEAGALFSEARGAGGRDNDRPPTQGPPRIPMAPESIA

SEQ ID NO: 777692 - protein, 106 aa, Homo sapiens
RGPRGSGPPTMLTLDGGVESSPQTLRGNSRYTPSATLWPNQSHPSRGHLGLPSVCSAHKAHQCLRFPKSPSQWVLLSSISLAPFNKKMALMQTRLTAQLQSTENEA

SEQ ID NO: 777693 - protein, 71 aa, Homo sapiens
LKTPSGPAAAAAAALPELQISTAIGLRPLHPRDRGPQEEPFLTAPVGLQPYGWEGPWEPPSPPPPWGRGRE

SEQ ID NO: 777694 - protein, 947 aa, Homo sapiens
HEDLWFELSDETLCNWMMFVRPAQNHLEQNLVAYQYGHHVYYTTIKNVEPKQELKVWYAASYAEFVNQKIHDISEEERKVLREQEKNWPCYECNRRFISSEQLQQHLNSHDEKLDVFSRTRGRGRGRGKRRFGPGRRPGRPPKFIRLEITSENGEKSDDGTQDLLHFPTKEQFDEAEPATLNGLDQPEQTTIPIPQLPQETQSSLEHEPETHTLHLQPQHEESVVPTQSTLTADDMRRAKRIRNAALQHLFIRKSFRPFKCLQCGKAFREKDKLDQHLRFHGREGNCPLTCDLCNKGFISSTSLESHMKLHSDQKTYSCIFCPESFDRLDLLKDHVAIHINDGYFTCPTCKKRFPDFIQVKKHVRSFHSEKIYQCTECDKAFCRPDKLRLHMLRHSDRKDFLCSTCGKQFKRKDKLREHMQRMHNPEREAKKADRISRSKTFKPRITSTDYDSFTFKCRLCMMGFRRRGMLVNHLSKRHPDMKIEEVPELTLPIIKPNRDYFCQYCDKVYKSASKRKAHILKNHPGAELPPSIRKLRPAGPGEPDPMLSTHTQLTGTIATPPVCCPHCSKQYSSKTKMVQHIRKKHPEFAQLSNTIHTPLTTAVISATPAVLTTDSATGETVVTTDLLTQAMTELSQTLTTDYRTPQGDYQRIQYIPVSQSASGLQQPQHIQLQVVQVASATSPHQSQQSTVDVGQLHDPQPYPQHAIQVQHIQVSEPTASAPSSAQVSGQPLSPSAQQAQQGLSPSHIQGSSSTQGQALQQQQQQQQNSSVQHTYLPSAWNSFRGYSSEIQMMTLPPGQFVITDSGVATPVTTGQVKAVTSGHYVLSESQSELEEKQTSALSGGVQVEPPAHSDSLDPQTNSQQQTTQYIITAGSKVIQNEFTVGEECELETMTGEKVKTVVQLEGDNKLVTTFKNIKSVTELNGDIITNTMTLGDIVFKRISKRI

SEQ ID NO: 777695 - protein, 59 aa, Homo sapiens
MRQPSKNNSAIPVSSCVTLDFCQGVGLSFPLLPNAEYLYVVTSAAPEGPQDREVSAVND

SEQ ID NO: 777696 - protein, 88 aa, Homo sapiens
GQTHQGPRALTHKAQIEMESRISWWGPQSLVGQPARGAAHSHHACPELAAALQKLLDSSHCPVGIQLCLHKPGSSIERGEAPPPPEQW

SEQ ID NO: 777697 - protein, 331 aa, Homo sapiens
MITLNNQDQPVPFNSSHPDEYKIAALVFYSCIFIIGLFVNITALWVFSCTTKKRTTVTIYMMNVALVDLIFIMTLPFRMFYYAKDEWPFGEYFCQILGALTVFYPSIALWLLAFISADRYMAIVQPKYAKELKNTCKAVLACVGVWIMTLTTTTPLLLLYKDPDKDSTPATCLKISDIIYLKAVNVLNLTRLTFFFLIPLFIMIGCYLVIIHNLLHGRTSKLKPKVKEKSIRIIITLLVQVLVCFMPFHICFAFLMLGTGENSYNPWGAFTTFLMNLSTCLDVILYYIVSKQFQARVISVMLYRNYLRSMRRKSFRSGSLRSLSNINSEML

SEQ ID NO: 777698 - protein, 331 aa, Homo sapiens; identical to SEQ ID NO: 777697

SEQ ID NO: 777699 - protein, 268 aa, Homo sapiens
MITLNNQDQPVPFNSSHPDEYKIAALVFYSCIFIIGLFVNITALWVFSCTTKKRTTVTIYMMNVALVDLIFIMTLPFRMFYYAKDEWPFGEYFCQILGALTVFYPSIALWLLAFISADRYMAIVQPKYAKELKNTCKAVLACVGVWIMTLTTTTPLLLLYKDPDKDSTPATCLKISDIIYLKAVNVLNLTRLTFFFLIPLFIMIGCYLVIIHNLLHGRTSKLKPKVKEKSIRIIITLLVQVLVCFMPFHICFAFLMLGTAGGEKNQVF

SEQ ID NO: 777700 - protein, 331 aa, Homo sapiens; identical to SEQ ID NO: 777697

SEQ ID NO: 777701 - protein, 331 aa, Homo sapiens; identical to SEQ ID NO: 777697

SEQ ID NO: 777702 - protein, 236 aa, Homo sapiens
LLCAIRPESTVARGLGCRDPKSVGCGLGAPSNARPLCSARDISPQRNSPRRGPWVTRDSGLGIEGDYTAQEIAMKSVDLQAGAAERGGEVENAGLGLDSGPGVVWSPRSLNPEGSGLTSAPKSRVPHGGSGPWKFRTPQQFRAVIAFPKPGSPGPRQSGERQALCWVSEDAPKTGTSLQCVRHQLSSPAAARGCCSPGYPGPPSCPAFGLPCSPRCGVAEDGPRLTLGWVPGKRAR

SEQ ID NO: 777703 - protein, 130 aa, Homo sapiens
MNDAASDLGTCTTLGVDASTPNTKGSGQDAPQSGWKATERGRTGPQCQGTAGWLSSSPATPQANGRAAALSFTGGGTEAWREQGLNSHIADAQPSLAEPRDSGAVSTALLCSAAGLWRHQTTMETVSFST

SEQ ID NO: 777704 - protein, 124 aa, Homo sapiens
WFSQNVLLCVEQAGTSVEPRYLSDRLLSFSDHFPHAFQEAVLALRVLNVLNMHINSLGKNLALNLFVYNNANSMLGNIVDSSRFAMVTPVGRSFLNSTHSLDVYNITFLIDSHIHGQRNNSMFS

SEQ ID NO: 777705 - protein, 113 aa, Homo sapiens
SGNKPLRNLTDKCSSFGSSPEAPLMALLVGFGSSCLLGGSSVPSSARSPMGFSSTSLPRPRPCSQTSVKCSSSRSLSSNVNLQPATLLCPLEAPQSHRGLSSAAELLDKWETL

SEQ ID NO: 777706 - protein, 102 aa, Homo sapiens
KTKNKTKNTKADPRPERCGRGFDKSSKAIPMAPYFRNMVSWVNCVDSRVSCKINKSNMVWICVPTKSHSPVLEVGSGGRRLGSWGWFIMNGSAPSPLALSLG

SEQ ID NO: 777707 - protein, 107 aa, Homo sapiens
MISLGEGLGTSWALFSPRSSLRVSVSLIPRCLEPSAHYIRLEVWGHPTIPPQAPPRHHCVQILQTAPPEGAGVCPLRPICRGSTSSVVRTPTAASWEGTSLGPLSVH

SEQ ID NO: 777708 - protein, 156 aa, Homo sapiens
PAWPWSFFHSCPGLPALSNQLAILGRVPSPVLPGVSSPAYPIPALRTAPLRRATGIILPARRNVLPSRGASSTRRARPLERPATPVPVAPSSRAARSSHIAPLLQSSSPTPPGPTGSAAYVAVPTPNSSSPGPAGRPAGAMLYHSWVSEITEIGAF

SEQ ID NO: 777709 - protein, 101 aa, Homo sapiens
VSQGVASASDGDGVFGRCISRGGQKLEVLCGQSDAPNDGFQQLSRSKRERERWNLQHTQLIAQITEGGCESLSAIRGVELHSPFVSPAMDKVQLTYVQCLS

SEQ ID NO: 777710 - protein, 126 aa, Homo sapiens
PRNYRMWPRTYQSQCFQAGCSLGCCPQVPCCRVKWRYQVPDGEHIRHPVIPLPGLGGTALGSSKLQGLLLTLVKASTPGKPLALVRTSDRLCTPSAPQGTDAGHARSPAGGLFCVTVPLHSRKKCP

SEQ ID NO: 777711 - protein, 102 aa, Homo sapiens
TMLVLEQWPGLPHVFLPKAKPRRGPCSSPCSSWSSCGNQASFVFFLSRVAQHRHHQPLRVGSREERAAASEPVLPARSCLMTHGPIVCVPASVCAAGRARYA

SEQ ID NO: 777712 - protein, 106 aa, Homo sapiens
MDVLFFSILGGWFEQHLLTISLVGMFLLKTELGSHKMFLQYKVIIPLAFILLFSCSKCMHLSKRIWAAVQSERCQQRLPRPIQSSKSLFDLLFHTDSSDEHAHELT

SEQ ID NO: 777713 - protein, 156 aa, Homo sapiens
MGDPVLTQVVHKETRDRHRVGDSTPIKKAGGPATFVNIPQEYEGHRDYTRGQGTANKYRRGGKQGNNIEQKYQKKRKRRENAEYDQGASERDSHRRTKKEETKDEAKKRERGETTQRRERNATRGENTTKKQDNKKNTTERNEKAKEKKDEATAPT

SEQ ID NO: 777714 - protein, 156 aa, Homo sapiens
MGDPVLTQVVHKETRDRHRVGDSTPIKKAGGPATFVNIPQEYEGHRDYTRGQGTQINTGAGGNKETTRAEIPEETKKTRERRYDQGASERDSHRRTKKEETKDEAKKRERGETTQRRERNATRGENTTKKQDNKKNTTERNEKAKEKKDEATAPTD

SEQ ID NO: 777715 - protein, 187 aa, Homo sapiens
GKWALTVPRGYKRLNSTHCQDINEAQCLGVCRHGDCLNNPGSYRCVCPPGHSLGPSRTQCIADKPEEKSLCFRLVSPEHQCQHPLTTRLTRQLCCCSVGKAWGARCQRCPTDGTAAFKEICPAGKGYHILTSHQTLTIQGESDFSLFLHPDGPPKPQQLPESPSQAPPPEDTEEERGVTTDSPVSDG

SEQ ID NO: 777716 - protein, 33 aa, Homo sapiens
EPILKNILTYNKEFPFDVQPVPLRRILAPGEEE

SEQ ID NO: 777717 - protein, 1894 aa, Homo sapiens
STHALDLEAEEERTRLCDDRLGLASRELLLQDSKDRVECARIHPPSSCPGDLAPHLMMQQRPAGRGPSPPHPPPSPLAAPHPQPLPVDGGASYGLGHPALHQNLPPGFPASVAGPVPSVFPLPQDAPTQLVILPSEPTPHSAPHALADVMDQASLWPPMYGGRGPASHMQHPGQLPVYSRPQLLRQQELYALQQQRAAQFQRKPEDQHLDLEEPAQEKAPKSTHKPVALTPTAPGAPSPAAGPTKLPPCCHPPDPKPPASSPTPPPRPSAPCTLNVCPASSPGPGSRVRSAEEKNGEGQQSTADIITSEPVARAHSVAHAGLEFLASNDPSTSASQSFGITDLPPGYLRPMAGLGFSLPSDVHSSNLEDPETMQTTAPGAQPEPTRTFLPGEPPPCSPRSLEEPGLLSGAREATQDLAATPYPAERGPQGKAADPSPLEGLQELQCAALLEAGGPEATGQAHSTQGGAREERSREEGEQGPSSGASSQVLEQRAGSPGALEDEGEQPAPEEDELEEDELGQQSMEDSEEDCGGAPDNSHPPRALPGLDALVAATINLGDLPSDSPPDPQPPAASGPPSTVPLPHSSGIHGIALLSELADLAIQRQRSERTVPEEEEDVLSFNLQHLATLATAWSLVEAAGLDSSTAPAQPPTANPCSGPRLTPRMQILQRKDTWTPKTKPVCPLKAAIDQLDTQEVGMRVRLAELQRRYKEKQRELARLQRKHDHERDESSRSPARRGPGRPRKRKHSSSLPAPRPTGPLPRSDGKKVKAVRTSLGLLCAELRGGSGGEPAKKRSKLERSVYAGLQTASVEKAQCKKSSCQGGLAPSVAHRVAQLKPKVKSKGLPTGLSSFQQKEATPGGRIREKLSRAKSAKVSGATRHPQPKGHGSRETPRCPAQPSVAASQEAGSGYDSEDCEGLLGTEAPPREAGLLLHAGASVAVLGPSPSSVVKMEANQKAKKKKERQGLLGACRLSSPESEVKIKRRSVKAKVGTTLERAPGQRPPGALGKKKAKGKAKGSLRAEPGATPSRDALFNPSRAFACREEGSQLASERLKRATRKGTVLQPVLRRKNGALSITLATRNAKAILGKGRKLSKVKHKAGKQGKGRAVSRLLESFAVEEDFEFDDNSSFSEEEEDEEEEEEDSGPLSAEQSAALARSCAIHKEDLRDGLPVLIPKEDSLLYAGSVRTLQPPDIYSIVFKVERAPAEDLLIEPAAAGSVLDVRPQSSRYLPPGTRVCAYWSQKSRCLYPGNVVRGASGDEDEDLDSVVVEFDDGDTGHIAVSNVRLLPPDFKIQCTEPSPALLVSSSCRRTKKVSSEAPPPSEAATPSLSPKAQDGPEALKTPGKKSISKDKAGKAELLTSGAKSPTGASDHFLGRRGSPLLSWSAVAQTKRKAVAAASKGPGVLQNLFQLNGSSKKLRAREALFPVHSVATPIFGNGFRADSFSSLASSYAPFVGGTGPGLPRGAHKLLRANKAERVEAEKGGRRRAGGEFLVKLDHEGVTSPKNKTCKALLMGDKDFSPKLGRPLPSPSYVHPALVGKDKKGRAPIPPLPMGLALRKYAGQAEFPLPYDSDCHSSFSDEDEDGPGLAAGVPSRFLARLSVSSSSSGSSTSSSSGSVSTSSLCSSDNEDSSYSSDDEDPALLLQTCLTHPVPTLLAQPEALRSKGSGPHAHAQRCFLSRATVAGTGAGSGPSSSSKSKLKRKEALSFSKAKELSRRQRPPSVENRPKISAFLPARQLWKWSGNPTQRRGMKGKARKLFYKAIVRGEETLRVGDCAVFLSAGRPNLPYIGRIESMWESWGSNMVVKVKWFYHPEETKLGKRQCDGKNALYQSCHEDENDVQTISHKCQVVAREQYEQMARSRKCQDRQDLYYLAGTYDPTTGRLVTADGVPILC

SEQ ID NO: 777718 - protein, 1894 aa, Homo sapiens; identical to SEQ ID NO: 777717

SEQ ID NO: 777719 - protein, 703 aa, Homo sapiens
GLAGAAATPRPRDQTLRQPWGRAPPAHGSSPAFLQVLDVRPQSSRYLPPGTRVCAYWSQKSRCLYPGNVVRGASGDEDEDLDSVVVEFDDGDTGHIAVSNVRLLPPDFKIQCTEPSPALLVSSSCRRTKKVSSEAPPPSEAATPSLSPKAQDGPEALKTPGKKSISKDKAGAKSPTGASDHFLGRRGSPLLSWSAVAQTKRKAVAAASKGPGVLQNLFQLNGSSKKLRAREALFPVHSVATPIFGNGFRADSFSSLASSYAPFVGGTGPGLPRGAHKLLRANKAERVEAEKGGRRRAGGEFLVKLDHEGVTSPKNKTCKALLMGDKDFSPKLGRPLPSPSYVHPALVGKDKKGRAPIPPLPMGLALRKYAGQAEFPLPYDSDCHSSFSDEDEDGPGLAAGVPSRFLARLSVSSSSSGSSTSSSSGSVSTSSLCSSDNEDSSYSSDDEDPALLLQTCLTHPVPTLLAQPEALRSKGSGPHAHAQRCFLSRATVAGTGAGSGPSSSSKSKLKRKEALSFSKAKELSRRQRPPSVENRPKISAFLPARQLWKWSGNPTQRRGMKGKARKLFYKAIVRGEETLRVGDCAVFLSAGRPNLPYIGRIESMWESWGSNMVVKVKWFYHPEETKLGKRQCDGKNALYQSCHEDENDVQTISHKCQVVAREQYEQMARSRKCQDRQDLYYLAGTYDPTTGRLVTADGVPILC

SEQ ID NO: 777720 - protein, 1894 aa, Homo sapiens; identical to SEQ ID NO: 777717

SEQ ID NO: 777721 - protein, 1894 aa, Homo sapiens; identical to SEQ ID NO: 777717

SEQ ID NO: 777722 - protein, 1894 aa, Homo sapiens; identical to SEQ ID NO: 777717

SEQ ID NO: 777723 - protein, 1894 aa, Homo sapiens; identical to SEQ ID NO: 777717

SEQ ID NO: 777724 - protein, 1110 aa, Homo sapiens
SAPVDRGQGPRGTSSEPGINREAPNRPGAVVCRGRPESAAAPPCSQEKAQCKKSSCQGGLAPSVAHRVAQLKPKVKSKGLPTGLSSFQQKEATPGGRIREKLSRAKSAKVSGATRHPQPKGHGSRETPRCPAQPSVAASQEAGSGYDSEDCEGLLGTEAPPREAGLLLHAGASVAVLGPSPSSVVKMEANQKAKKKKERQGLLGACRLSSPESEVKIKRRSVKAKVGTTLERAPGQRPPGALGKKKAKGKAKGSLRAEPGATPSRDALFNPSRAFACREEGSQLASERLKRATRKGTVLQPVLRRKNGALSITLATRNAKAILGKGRKLSKVKHKAGKQGKGRAVSRLLESFAVEEDFEFDDNSSFSEEEEDEEEEEEDSGPLSAEQSAALARSCAIHKEDLRDGLPVLIPSIVFKVERAPAEDLLIEPAAAGSVLDVRPQSSRYLPPGTRVCAYWSQKSRCLYPGNVVRGASGDEDEDLDSVVVEFDDGDTGHIAVSNVRLLPPDFKIQCTEPSPALLVSSSCRRTKKVSSEAPPPSEAATPSLSPKAQDGPEALKTPGKKSISKDKAGKAELLTSGAKSPTGASDHFLGRRGSPLLSWSAVAQTKRKAVAAASKGPGVLQNLFQLNGSSKKLRAREALFPVHSVATPIFGNGFRADSFSSLASSYAPFVGGTGPGLPRGAHKLLRANKAERVEAEKGGRRRAGGEFLVKLDHEGVTSPKNKTCKALLMGDKDFSPKLGRPLPSPSYVHPALVGKDKKGRAPIPPLPMGLALRKYAGQAEFPLPYDSDCHSSFSDEDEDGPGLAAGVPSRFLARLSVSSSSSGSSTSSSSGSVSTSSLCSSDNEDSSYSSDDEDPALLLQTCLTHPVPTLLAQPEALRSKGSGPHAHAQRCFLSRATVAGTGAGSGPSSSSKSKLKRKEALSFSKAKELSRRQRPPSVENRPKISAFLPARQLWKWSGNPTQRRGMKGKARKLFYKAIVRGEETLRVGDCAVFLSAGRPNLPYIGRIESMWESWGSNMVVKVKWFYHPEETKLGKRQCDGKNALYQSCHEDENDVQTISHKCQVVAREQYEQMARSRKCQDRQDLYYLAGTYDPTTGRLVTADGVPILC

SEQ ID NO: 777725 - protein, 943 aa, Homo sapiens
SAPVDRGQGPRGTSSEPGINREAPNRPGAVVCRGRPESAAAPPCSQEKAQCKKSSCQGGLAPSVAHRVAQLKPKVKSKGLPTGLSSFQQKEATPGGRIREKLSRAKSAKVSGATRHPQPKGHGSRETPRCPAQPSVAASQEAGSGYDSEDCEGLLGTEAPPREAGLLLHAGASVAVLGPSPSSVVKMEANQKAKKKKERQGLLGACRLSSPESEVKIKRRSVKAKVGTTLERAPGQRPPGALGKKKAKGKAKGSLRAEPGATPSRDALFNPSRAFACREEGSQLASERLKRATRKGTVLQPVLRRKNGALSITLATRNAKAILGKGRKLSKVKHKAGKQGKGRAVSRLLESFAVEEDFEFDDNSSFSEEEEDEEEEEEDSGPLSAEQSAALARSCAIHKEDLRDGLPVLIPSIVFKVERAPAEDLLIEPAAAGSVLDVRPQSSRYLPPGTRVCAYWSQKSRCLYPGNVVRGASGDEDEDLDSVVVEFDDGDTGHIAVSNVRLLPPDFKIQCTEPSPALLVSSSCRRTKKVSSEAPPPSEAATPSLSPKAQDGPEALKTPGKKSISKDKAGKAELLTSGAKSPTGASDHFLGRRGSPLLSWSAVAQTKRKAVAAASKGPGVLQNLFQLNGSSKKLRAREALFPVHSVATPIFGNGFRADSFSSLASSYAPSSLCSSDNEDSSYSSDDEDPALLLQTCLTHPVPTLLAQPEALRSKGSGPHAHAQRCFLSRATVAGTGAGSGPSSSSKSKLKRKEALSFSKAKELSRRQRPPSVENRPKISAFLPARQLWKWSGNPTQRRGMKGKARKLFYKAIVRGEETLRVGDCAVFLSAGRPNLPYIGRIESMWESWGSNMVVKVKWFYHPEETKLGKRQCDGKNALYQSCHEDENDVQTISHKCQVVAREQYEQMARSRKCQDRQDLYYLAGTYDPTTGRLVTADGVPILC

SEQ ID NO: 777726 - protein, 1894 aa, Homo sapiens; identical to SEQ ID NO: 777717

SEQ ID NO: 777727 - protein, 1894 aa, Homo sapiens; identical to SEQ ID NO: 777717

SEQ ID NO: 777728 - protein, 101 aa, Homo sapiens
PVHKDWKKWLFLSSAQIPTKLSRRRRNRETWPKERSKINLHKPILKKQRHELPDKEFKIALIKMLYELKVTMHEQNENINKETENPKKKKKKKRRTNQFWN

SEQ ID NO: 777729 - protein, 328 aa, Homo sapiens
MTVEKEAPDAHFTVDKQNISLWPREPPPKSGPSLVPGKTPTVRAALICLTLVLVASVLLQAVLYPRFMGTISDVKTNVQLLKGRVDNISTLDSEIKKNSDGMEAAGVQIQMVNESLGYVRSQFLKLKTSVEKANAQIQILTRSWEEVSTLNAQIPELKSDLEKASALNTKIRALQGSLENMSKLLKRQNDILQVVSQGWKYFKGNFYYFSLIPKTWYSAEQFCVSRNSHLTSVTSESEQEFLYKTAGGLIYWIGLTKAGMEGDWSWVDDTPFNKVQSARFWIPGEPNNAGNNEHCGNIKAPSLQAWNDAPCDKTFLFICKRPYVPSEP

SEQ ID NO: 777730 - protein, 328 aa, Homo sapiens; identical to SEQ ID NO: 777729

SEQ ID NO: 777731 - protein, 105 aa, Homo sapiens
MGTISLCIGVCAFEGANTSTSFYKLVYTAILSYSIQDLLPEQDMKDLCQKVTLTRHRSWGLDNLHLVKDWRTVNEGKGQKEYCNRLTQCSSTKSKIFQCIECGRN

SEQ ID NO: 777732 - protein, 105 aa, Homo sapiens; identical to SEQ ID NO: 777731

SEQ ID NO: 777733 - protein, 210 aa, Homo sapiens
MRCLTTPMLLRALAQAARAGPPGGRSLHSSAVAATYKYVNMQDPEMDMKSVTDRAARTLLWTELFRGLGMTLSYLFREPATINYPFEKGPLSPRFRGEHALRRYPSGEERCIACKLCEAICPAQAITIEAEPRADGSRRTTRYDIDMTKCIYCGFCQEACPVDAIVEGPNFEFSTETHEELLYNKEKLLNNGDKWEAEIAANIQADYLYR

SEQ ID NO: 777734 - protein, 210 aa, Homo sapiens; identical to SEQ ID NO: 777733

SEQ ID NO: 777735 - protein, 133 aa, Homo sapiens [sequence omitted]

SEQ ID NO: 777736 - protein, 210 aa, Homo sapiens; identical to SEQ ID NO: 777733

SEQ ID NO: 777737 - protein, 210 aa, Homo sapiens; identical to SEQ ID NO: 777733

SEQ ID NO: 777738 - protein, 264 aa, Homo sapiens
MRCLTTPMLLRALAQAARAGPPGGRSLHSSAVAATYKYVNMQDPEMDMKSVTDRAARTLLWTELFRGLGMTLSYLFREPATINYPFEKGPLSPRFRGEHALRRYPSGEERCIACKLCEAICPAQGETLRAAGATLNKAVNSPLVRGGSWQMTPAADKQARQAGPRWLTLVIPALWESKAITIEAEPRADGSRRTTRYDIDMTKCIYCGFCQEACPVDAIVEGPNFEFSTETHEELLYNKEKLLNNGDKWEAEIAANIQADYLYR

SEQ ID NO: 777739 - protein, 131 aa, Homo sapiens
MQDPEMDMKSVTDRAARTLLWTELFRGLGMTLSYLFREPATINYPFEKGPLSPRFRGEHALRRYPSGEERCIACKLCEAICPAQVSPCPNRPPRQPLPLGEGGQAALGPNPSPCLMCVPRKSLSPSEPLPS

SEQ ID NO: 777740 - protein, 110 aa, Homo sapiens
MRCLTTPMLLRALAQAARAGPPGGRSLHSMSPRFRGEHALRRYPSGEERCIACKLCEAICPAQVSPCPNRPPRQPLPLGEGGQAALGPNPSPCLMCVPRKSLSPSEPLPS

SEQ ID NO: 777741 - protein, 210 aa, Homo sapiens; identical to SEQ ID NO: 777733

SEQ ID NO: 777742 - protein, 210 aa, Homo sapiens; identical to SEQ ID NO: 777733

SEQ ID NO: 777743 - protein, 210 aa, Homo sapiens; identical to SEQ ID NO: 777733

SEQ ID NO: 777744 - protein, 210 aa, Homo sapiens; identical to SEQ ID NO: 777733

SEQ ID NO: 777745 - protein, 171 aa, Homo sapiens
MRCLTTPMLLRALAQAARAGPPGGRSLHSSAVAATYKYVNMQDPEMDMKSVTDRAARTLLWTELFRGLGMTLSYLFREPATINYPFEKGPLSPRFRGEHALRRYPSGEERCIACKLCEAICPAQVSPCPNRPPRQPLPLGEGGQAALGPNPSPCLMCVPRKSLSPSEPLPS

SEQ ID NO: 777746 - protein, 153 aa, Homo sapiens
MIMVMETDSDSQGQGPSLQYVNMQDPEMDMKSVTDRAARTLLWTELFRGLGMTLSYLFREPATINYPFEKGPLSPRFRGEHALRRYPSGEERCIACKLCEAICPAQVSPCPNRPPRQPLPLGEGGQAALGPNPSPCLMCVPRKSLSPSEPLPS

SEQ ID NO: 777747 - protein, 192 aa, Homo sapiens
MRRPLCATGLVRVGDHWEEYVNMQDPEMDMKSVTDRAARTLLWTELFRGLGMTLSYLFREPATINYPFEKGPLSPRFRGEHALRRYPSGEERCIACKLCEAICPAQAITIEAEPRADGSRRTTRYDIDMTKCIYCGFCQEACPVDAIVEGPNFEFSTETHEELLYNKEKLLNNGDKWEAEIAANIQADYLYR

SEQ ID NO: 777748 - protein, 568 aa, Homo sapiens
KNTHKQMCIERDARVTSSDEATRSPPPDTPGSRGTTAMCSLASGATGGRGAVENEEDLPELSDSGDEAAWEDEDDADLPHGKQQTPCLFCNRLFTSAEETFSHCKSEHQFNIDSMVHKHGLEFYGYIKLINFIRLKNPTVEYMNSIYNPVPWEKEEYLKPVLEDDLLLQFDVEDLYEPVSVPFSYPNGLSENTSVVEKLKHMEARALSAEAALARAREDLQKMKQFAQDFVMHTDVRTCSSSTSVIADLQEDEDGVYFSSYGHYGIHEEMLKDKIRTESYRDFIYQNPHIFKDKVVLDVGCGTGILSMFAAKAGAKKVLGVDQSEILYQAMDIIRLNKLEDTITLIKGKIEEVHLPVEKVDVIISEWMGYFLLFESMLDSVLYAKNKYLAKGGSVYPDICTISLVAVSDVNKHADRIAFWDDVYGFKMSCMKKAVIPEAVVEVLDPKTLISEPCGIKHIDCHTTSISDLEFSSDFTLKITRTSMCTAIAGYFDIYFEKNCHNRVVFSTGPQSTKTHWKQTVFLLEKPFSVKAGEALKGKVTVHKNKKDPRSLTVTLTLNNSTQTYGLQ

SEQ ID NO: 777749 - protein, 598 aa, Homo sapiens
ASRPEAIASQRARFGVPGGLRSFRSPGPAAGSRLCSRSFLESAAAARARCPTRSPPPDTPGSRGTTAMCSLASGATGGRGAVENEEDLPELSDSGDEAAWEDEDDADLPHGKQQTPCLFCNRLFTSAEETFSHCKSEHQFNIDSMVHKHGLEFYGYIKLINFIRLKNPTVEYMNSIYNPVPWEKEEYLKPVLEDDLLLQFDVEDLYEPVSVPFSYPNGLSENTSVVEKLKHMEARALSAEAALARAREDLQKMKQFAQDFVMHTDVRTCSSSTSVIADLQEDEDGVYFSSYGHYGIHEEMLKDKIRTESYRDFIYQNPHIFKDKVVLDVGCGTGILSMFAAKAGAKKVLGVDQSEILYQAMDIIRLNKLEDTITLIKGKIEEVHLPVEKVDVIISEWMGYFLLFESMLDSVLYAKNKYLAKGGSVYPDICTISLVAVSDVNKHADRIAFWDDVYGFKMSCMKKAVIPEAVVEVLDPKTLISEPCGIKHIDCHTTSISDLEFSSDFTLKITRTSMCTAIAGYFDIYFEKNCHNRVVFSTGPQSTKTHWKQTVFLLEKPFSVKAGEALKGKVTVHKNKKDPRSLTVTLTLNNSTQTYGLQ

SEQ ID NO: 777750 - protein, 367 aa, Homo sapiens
MEARALSAEAALARAREDLQKMKQFAQDFVMHTDVRTCSSSTSVIADLQEDEDGVYFSSYGHYGIHEEMLKDKIRTESYRDFIYQNPHIFKDKVVLDVGCGTGILSMFAAKAGAKKVLGVDQSEILYQAMDIIRLNKLEDTITLIKGKIEEVHLPVEKVDVIISEWMGYFLLFESMLDSVLYAKNKYLAKGGSVYPDICTISLVAVSDVNKHADRIAFWDDVYGFKMSCMKKAVIPEAVVEVLDPKTLISEPCGIKHIDCHTTSISDLEFSSDFTLKITRTSMCTAIAGYFDIYFEKNCHNRVVFSTGPQSTKTHWKQTVFLLEKPFSVKAGEALKGKVTVHKNKKDPRSLTVTLTLNNSTQTYGLQ

SEQ ID NO: 777751 - protein, 598 aa, Homo sapiens; identical to SEQ ID NO: 777749

SEQ ID NO: 777752 - protein, 598 aa, Homo sapiens; identical to SEQ ID NO: 777749

SEQ ID NO: 777753 - protein, 553 aa, Homo sapiens
RLEAGSDCEPARALRRSRRSAKFPEPRSRRGFALVLALVPGVGGRCARSLPNPVPAPRHAGLSGHHSHVLVSVRRYRLFTSAEETFSHCKSEHQFNIDSMVHKHGLEFYGYIKLINFIRLKNPTVEYMNSIYNPVPWEKEEYLKPVLEDDLLLQFDVEDLYEPVSVPFSYPNGLSENTSVVEKLKHMEARALSAEAALARAREDLQKMKQFAQDFVMHTDVRTCSSSTSVIADLQEDEDGVYFSSYGHYGIHEEMLKDKIRTESYRDFIYQNPHIFKDKVVLDVGCGTGILSMFAAKAGAKKVLGVDQSEILYQAMDIIRLNKLEDTITLIKGKIEEVHLPVEKVDVIISEWMGYFLLFESMLDSVLYAKNKYLAKGGSVYPDICTISLVAVSDVNKHADRIAFWDDVYGFKMSCMKKAVIPEAVVEVLDPKTLISEPCGIKHIDCHTTSISDLEFSSDFTLKITRTSMCTAIAGYFDIYFEKNCHNRVVFSTGPQSTKTHWKQTVFLLEKPFSVKAGEALKGKVTVHKNKKDPRSLTVTLTLNNSTQTYGLQ

SEQ ID NO: 777754 - protein, 214 aa, Homo sapiens
CRYSVVPPNKKKSYGYFLLFESMLDSVLYAKNKYLAKGGSVYPDICTISLVAVSDVNKHADRIAFWDDVYGFKMSCMKKAVIPEAVVEVLDPKTLISEPCGIKHIDCHTTSISDLEFSSDFTLKITRTSMCTAIAGYFDIYFEKNCHNRVVFSTGPQSTKTHWKQTVFLLEKPFSVKAGEALKGKVTVHKNKKDPRSLTVTLTLNNSTQTYGLQ

SEQ ID NO: 777755 - protein, 113 aa, Homo sapiens
MKEVLSEGRGRTGRRRAHRHLLLEPPGRTGVRGRSDCCVCVLGGRGAVENEEDLPELSDSGDEAAWEDEDDADLPHGKQQTPCLFCNRFVRLQRLASALGCPGAWGLCAQERL

SEQ ID NO: 777756 - protein, 110 aa, Homo sapiens
KTWAPAQCLCSRMGPAWLWLLGTGILASVHCQPLLAHGDKSLQGPQPPRHQLSEPAPAYHRITPTITNFALRLYKELAADAPGNIFFSPVSISTTLALLSLGAQANTSAL

SEQ ID NO: 777757 - protein, 173 aa, Homo sapiens
RTLALECPFCRRACRGCDTSDCLPVLHLIELLGSALRQSPAAHRAAPSAPGALTCHHTFGGWGTLVNPTGLALCPKTGRVVVVHDGRRRVKIFDSGGGCAHQFGEKGDAAQDIRYPVDVTITNDCHVVVTDAGDRSIKVFDFFGQIKLVIGGQFSLPWGVETTPQNGIVVTDA

SEQ ID NO: 777758 - protein, 70 aa, Homo sapiens
QSPEAGTTVRRAAGRAVPRRTWALLAMSLKQDGRRRWLYHQCLLLAMLTRNQELGAGGLYETVQGTDECG

SEQ ID NO: 777759 - protein, 38 aa, Homo sapiens
MGPLVLFKAYSILLNTMKNMQESHISLWHATYWRDELL

SEQ ID NO: 777760 - protein, 78 aa, Homo sapiens
RIFQIHTSRMTLADDVTLDDLIMAKDDLSGADIKAICTEAGLMALRERRMKVTNEDFKKSKENVLYKKQEGTPEGLYL

SEQ ID NO: 777761 - protein, 118 aa, Homo sapiens
RYQYMQRTELMDKNRPHFGKPGMKLNSRAIATALPMGWLSTNVQKCPCHASWRWWWSGEGRRASFVGILTWQGLLHLSLVACCLKYNLQTCSLGLIWELARNAESQAKPGTRVRDGLL

SEQ ID NO: 777762 - protein, 119 aa, Homo sapiens
AVTSGGGSRRPGMAAWSPAAAAPLLRGIRGLPLHHRMFATQTEGELRVTQILKEKFPRATAIKVTDISGGCGAMYEIKIESEEFKEKRTVQQHQMVNQALKEEIKEMHGLRIFTSVPKR

SEQ ID NO: 777763 - protein, 119 aa, Homo sapiens; identical to SEQ ID NO: 777762

SEQ ID NO: 777764 - protein, 68 aa, Homo sapiens
DAWVTHASQLEKVTDISGGCGAMYEIKIESEEFKEKRTVQQHQMVNQALKEEIKEMHGLRIFTSVPKR

SEQ ID NO: 777765 - protein, 113 aa, Homo sapiens
AVTSGGGSRRPGMAAWSPAAAAPLLRGIRGLPLHHRMFATQTEGELRVTQILKEKFPRATAIKVTDISGTKRRNQRDAWIADIYLCPQTLTTPWLHRCCCLRPWMNFTDIILP

SEQ ID NO: 777766 - protein, 113 aa, Homo sapiens; identical to SEQ ID NO: 777765

SEQ ID NO: 777767 - protein, 121 aa, Homo sapiens
AVTSGGGSRRPGMAAWSPAAAAPLLRGIRGVSVGRVGAALPGTGAAEGPRGWRLSGLEDWLPEGARGTGNGGLLFLSLIHSFIHSFTQRQRHSKFQALARSRGAPELGGGWRSGGQTHEQS

SEQ ID NO: 777768 - protein, 34 aa, Homo sapiens
MQGGCALDGPSVACVLAIRYLSHLSLTRGHYKLI

SEQ ID NO: 777769 - protein, 103 aa, Homo sapiens
MFCQGWAKRGTAERQKDVPATKTTWAKDRGLQCKDWNLQHGKLERGKISVSDSRQGHFPLQERRSPHQHKRLALPFSVQASWLERGNSKVLRKNKSGPNSENS

SEQ ID NO: 777770 - protein, 74 aa, Homo sapiens
KTSDAGVGRLKEPPSPLRHCTGVDSIVSLAVVGGFQKVRSEAVSRTSFQETCHLQAVQLSADRARTGKRWLLLL

SEQ ID NO: 777771 - protein, 75 aa, Homo sapiens
SSRYPSLEDFNSSRARGACLSSQCAGIIGVDHCGPVLCFKKPTVKMHKWGNGIVVKRGLILAKYYKMYQSNDDDT

SEQ ID NO: 777772 - protein, 42 aa, Homo sapiens
LSQTTTTTTRGEQGSCGDPVRPHQKHPATSQTPFSVEDQVIS

SEQ ID NO: 777773 - protein, 193 aa, Homo sapiens
GLWPGDLLPPQLLSDHLLQDHLLPPQLLCVQLLQTPVLPVCVLPAHLLAVPAAVRPPAAGPPAAALAAVYPAAADPSAASLCAASPLAAVPAAASPAAVAPAAVCPGAAGPSAASLCAASQPAAVPAAASPAAAAPLAVNPAAAARAAAAPAAACVQSVAESPATPLAIAQPVSFPPAPVPCAVPPLAAELLA

SEQ ID NO: 777774 - protein, 87 aa, Homo sapiens
KYQLQNSQHPAWHRVQELRAQQREDRCSQGGLRKMRLSNSLMHHLLYLLKLGQASGVPSCCQGTQHTGKYSSQDGRCCRGGALGLLH

SEQ ID NO: 777775 - protein, 79 aa, Homo sapiens
TDTNRARTGIFQYGDLTACVLGGGRRFTMTLIGYHKMLLSHLVFSLPSPGINHFSKEPHPHCFEKVPTSRQHPRLTQNL

SEQ ID NO: 777776 - protein, 77 aa, Homo sapiens
AATFHVQALLLLGIQAPGQLVSVGHRTGEQDRGCHFVGMEEAETEAQSPASHCLERGLPPACAGVAEQSQASFFLHS

SEQ ID NO: 777777 - protein, 252 aa, Homo sapiens
MSPRGPHHLDNSSPGPGSEARGINGGPSRMSPKAQRPLRGAKTLSSPSNRPSGETSVPPPPAVGRMYPPRSPKSAAPAPISASCPEPPIGSAVPTSSASIPVTSSVSDPGVGSISPASPKISLAPTDVKELSTTEPGRTLDPQELAQIAEKVPGLQNEQKLFHLEELRKCGAQFNLQPSSSPENSLDPFPPWTLKEEAKGKEKEDDGLLTSEPMGSPVSSKTESVSDKEDKPPLAPAGGTEGPEPPPPPCPS

SEQ ID NO: 777778 - protein, 541 aa, Homo sapiens
GTSRYSEGERYQRFSKMRVFCVGLLLFSVTWAAPTFQPQTEKTKQSCVEEQRQEEKNKDNIGFHHLGKRINQELSSKENIVQERKKDLSLSEASENKGSSKSQNYFTNRQRLNKEYSISNKENTHNGLRMSIYPKSTGNKGFEDGDDAISKLHDQEEYGAALIRNNMQHIMGPVTAIKLLGEENKENTPRNVLNIIPASMNYAKAHSKDKKKPQRDSQAQKSPVKSKSTHRIQHNIDYLKHLSKVKKIPSDFEGSGYTDLQERGDNDISPFSGDGQPFKDIPGKGEATGPDLEGKDIQTGFAGPSEAESTHLDTKKPGYNEIPEREENGGNTIGTRDETAKEADAVDVSLVEGSNDIMGSTNFKELPGREGNRVDAGSQNAHQGKVEFHYPPAPSKEKRKEGSSDAAESTNYNEIPKNGKGSTRKGVDHSNRNQATLNEKQRFPSKGKSQGLPIPSRGLDNEIKNEMDSFNGPSHENIITHGRKYHYVPHRQNNSTRNKGMPQGKGSWGRQPHSNRRFSSRRRDDSSESSDSGSSSESDGD

SEQ ID NO: 777779 - protein, 142 aa, Homo sapiens
MNCSESQRLRTLLSRLLLELHHRGNASGLGAGPRPSMGMGVVPDPFVGREVTSAKGDDAYLYILLIMIFYACLAGGLILAYTRSRKLVEAKDEPSQACAEHEWAPGGALTADAEAAAGSQAEGRRQLASEGLPALAQGAERV

SEQ ID NO: 777780 - protein, 307 aa, Homo sapiens
PRLQDPNKTPRFYPVVKEPKAIDVKSPRKRKTRHSTNPPLECHVGWVMDSRDRGPGTSSVSTSNASPSEGAPLAGSYGCTPHSFPKFQHPSHELLKENGFTQQVYHKYRRRCLSERKRLGIGQSQEMNTLFRFWSFFLRDHFNKKMYEEFRQLAWEDAKENYRYGLECLFRFYSYGLEKKFRREIFQDFQEETKKDYESGQLYGLEKFWAYLKYSQSKTQSIDPKLQEYLCSFKRLEDFRVDPPISDEFGRKRHSSTSGEESNRHRLPPNSSTKPPNAAKPTSTSELQVPINSPRRNISPESSDNSH

SEQ ID NO: 777781 - protein, 307 aa, Homo sapiens; identical to SEQ ID NO: 777780

SEQ ID NO: 777782 - protein, 260 aa, Homo sapiens
MDSRDRGPGTSSVSTSNASPSEGAPLAGSYGCTPHSFPKFQHPSHELLKENGFTQQVYHKYRRRCLSERKRLGIGQSQEMNTLFRFWSFFLRDHFNKKMYEEFRQLAWEDAKENYRYGLECLFRFYSYGLEKKFRREIFQDFQEETKKDYESGQLYGLEKFWAYLKYSQSKTQSIDPKLQEYLCSFKRLEDFRVDPPISDEFGRKRHSSTSGEESNRHRLPPNSSTKPPNAAKPTSTSELQVPINSPRRNISPESSDNSH

SEQ ID NO: 777783 - protein, 168 aa, Homo sapiens
  misc_feature (11)..(11): Xaa can be any naturally occurring amino acid
SSYCNFLNRMXKLAHGSLILHRYMYGLECLFRFYSYGLEKKFRREIFQDFQEETKKDYESGQLYGLEKFWAYLKYSQSKTQSIDPKLQEYLCSFKRLEDFRVDPPISDEFGRKRHSSTSGEESNRHRLPPNSSTKPPNAAKPTSTSELQVPINSPRRNISPESSDNSH

SEQ ID NO: 777784 - protein, 157 aa, Homo sapiens
MDSRDRGPGTSSVSTSNASPSEGAPLAGSYGCTPHSFPKFQHPSHELLKENGFTQQVYHKYRRRCLSERKRLGIGQSQEMNTLFRFWSFFLRDHFNKKMYEEFRQLAWEDAKENYRYGLECLFRFYSYGLEKKFRREIFQDFQEETKKDYESGWGTR

SEQ ID NO: 777785 - protein, 97 aa, Homo sapiens
HNVYYSLLLGQLYGLEKFWAYLKYSQSKTQSIDPKLQEYRLEDFRVDPPISDEFGRKRHSSTSGEEIPPNSSTKPPNAAKPTSTSELQVPINSPRVQ

SEQ ID NO: 777786 - protein, 201 aa, Homo sapiens
MDSRDRGPGTSSVSTSNASPSEGAPLAGSYGCTPHSFPKFQHPSHELLKENGFTQQVYHKYRRRCLSERKRLGIGQSQEMNTLFRFWSFFLRDHFNKKMYEEFRQLAWEDAKENYRYGLECLFRFYSYGLEKKFRREIFQDFQEETKKDYESGQLYGLEKFWAYLKYSQSKTQSIDPKLQEYLCSFKRLEDFRVDEADPIE

SEQ ID NO: 777787 - protein, 307 aa, Homo sapiens; identical to SEQ ID NO: 777780

SEQ ID NO: 777788 - protein, 307 aa, Homo sapiens; identical to SEQ ID NO: 777780

SEQ ID NO: 777789 - protein, 156 aa, Homo sapiens
  misc_feature (8)..(8): Xaa can be any naturally occurring amino acid
RRVSALSXRPTRYGLECLFRFYSYGLEKKFRREIFQDFQEETKKDYESGQLYGLEKFWAYLKYSQSKTQSIDPKLQEYLCSFKRLEDFRVDPPISDEFGRKRHSSTSGEESNRHRLPPNSSTKPPNAAKPTSTSELQVPINSPRRNISPESSDNSH

SEQ ID NO: 777790 - protein, 164 aa, Homo sapiens
MKDILSPLWLGEKCKKKITGYGLECLFRFYSYGLEKKFRREIFQDFQEETKKDYESGQLYGLEKFWAYLKYSQSKTQSIDPKLQEYLCSFKRLEDFRVDPPISDEFGRKRHSSTSGEESNRHRLPPNSSTKPPNAAKPTSTSELQVPINSPRRNISPESSDNSH

SEQ ID NO: 777791 - protein, 260 aa, Homo sapiens; identical to SEQ ID NO: 777782

SEQ ID NO: 777792 - protein, 247 aa, Homo sapiens
MDSRDRGPGTSSVSTSNASPSEGAPLAGSYGCTPHSFPKFQHPSHELLKENGFTQQVYHKYRRRCLSERKRLGIGQSQEMNTLFRFWSFFLRDHFNKKMYEEFRQLAWEDAKENYRYGLECLFRFYSYGLEKKFRREIFQDFQEETKKDYESGQLYGLEKFWAYLKYSQSKTQSIDPKLQEYLCSFKRLEDFRVDPPISDEFGRKRHSSTSGEESNRHRLPPNSSTKPPNAAKPTSTSELQEADPIE

SEQ ID NO: 777793 - protein, 171 aa, Homo sapiens
MLVNFILRCGLLLVTLSLAIAKHKQSSFTKSCYPRGTLSQAVDALYIKAAWLKATIPEDRIKNIRLLKKKTKKQFMKNCQFQEQLLSFFMEDVFGQLQLQGCKKIRFVEDFHSLRQKLSHCISCASSAREMKSITRMKRIFYRIGNKGIYKAISELDILLSWIKKLLESSQ

SEQ ID NO: 777794 - protein, 80 aa, Homo sapiens
DTEGAPAPVHVPACVGVFTQRCARLVSYPSPPPRWGGAVAIHGGQKRKLRLSRVKSLPLGHTAKNSQPRSMPRDSPRGIM

SEQ ID NO: 777795 - protein, 82 aa, Homo sapiens
AIYDKPTANIILNGQKLEAFPLKTGTRQGCPLSPLLFNIVLEVLARAIRQEKEIKGIQLGKEEIKLSLFADDMIVFLENPIV

SEQ ID NO: 777796 - protein, 53 aa, Homo sapiens
RLDLGQNSENMPGRGPHQGQLGGEEGDWRLSPLPRQFWDVRRPFSQAAPAHCG

SEQ ID NO: 777797 - protein, 217 aa, Homo sapiens
MSKVSTMFSEDDFQSTERAPYGPQLQWSQDLPRVQVFREQANLEDRSPRRTQRITGGEQVLWGPITQIFPTVRPADLTRVIMPLEQRSQHCKPEEGLQAQEEDLGLVGAQALQAEEQEAAFFSSTLNVGTLEELPAAESPSPPQSPQEESFSPTAMDAIFGSLSDEGSGSQEKEGPSNLPDLIDPESFSQDILHDQDHSTLGPFMAPQVSESTGLIT

SEQ ID NO: 777798 - protein, 1101 aa, Homo sapiens
ARGQRGPGRDGDCRLQAAMPTNFTVVPVEAHADGGGDETAERTEAPGTPEGPEPERPSPGDGNPRENSPFLNNVEVEQESFFEGKNMALFEEEMDSNPMVSSLLNKLANYTNLSQGVVEHEEDEESRRREAKAPRMGTFIGVYLPCLQNILGVILFLRLTWIVGVAGVLESFLIVAMCCTCTMLTAISMSAIATNGVVPAGGSYYMISRSLGPEFGGAVGLCFYLGTTFAGAMYILGTIEIFLTYISPGAAIFQAEAAGGEAAAMLHNMRVYGTCTLVLMALVVFVGVKYVNKLALVFLACVVLSILAIYAGVIKSAFDPPDIPVCLLGNRTLSRRSFDACVKAYGIHNNSATSALWGLFCNGSQPSAACDEYFIQNNVTEIQGIPGAASGVFLENLWSTYAHAGAFVEKKGVPSVPVAEESRASTLPYVLTDIAASFTLLVGIYFPSVTGIMAGSNRSGDLKDAQKSIPTGTILAIVTTSFIYLSCIVLFGACIEGVVLRDKFGEALQGNLVIGMLAWPSPWVIVIGSFFSTCGAGLQSLTGAPRLLQAIARDGIVPFLQVFGHGKANGEPTWALLLTVLICETGILIASLDSVAPILSMFFLMCYLFVNLACAVQTLLRTPNWRPRFKFYHWTLSFLGMSLCLALMFICSWYYALSAMLIAGCIYKYIEYRGAEKEWGDGIRGLSLNAARYALLRVEHGPPHTKNWRPQVLVMLNLDAEQAVKHPRLLSFTSQLKAGKGLTIVGSVLEGTYLDKHMEAQRAEENIRSLMSTEKTKGFCQLVVSSSLRDGMSHLIQSAGLGGLKHNTVLMAWPASWKQEDNPFSWKNFVDTVRDTTAAHQALLVAKNVDSFPQNQERFGGGHIDVWWIVHDGGMLMLLPFLLRQHKVWRKCRMRIFTVAQVDDNSIQMKKDLQMFLYHLRISAEVEVVEMVENDISAFTYERTLMMEQRSQMLKQMQLSKNEQEREAQLIHDRNTASHTAAAARTQAPPTPDKVQMTWTREKLIAEKYRSRDTSLSGFKDLFSMKPDQSNVRRMHTAVKLNGVVLNKSQDAQLVLLNMPGPPKNRQGDENYMEFLEVLTEGLNRVLLVRGGGREVITIYS

SEQ ID NO: 777799 - protein, 78 aa, Homo sapiens
TRGRGPRRPRPGARRRLLEPGSPWGLRLQEPSLYPASEGRSVLHTKPPPEGSALPPPWAAASARKHQASFVLSTPCNQ

SEQ ID NO: 777800 - protein, 243 aa, Homo sapiens
GEFVVLLGEFVVLLGEFVVLLPFLLRQHKVWRKCRMRIFTVAQVDDNSIQMKKDLQMFLYHLRISAEVEVVEMVENDISAFTYERTLMMEQRSQMLKQMQLSKNEQEREAQLIHDRNTASHTAAAARTQAPPTPDKVQMTWTREKLIAEKYRSRDTSLSGFKDLFSMKPDQSNVRRMHTAVKLNGVVLNKSQDAQLVLLNMPGPPKNRQGDENYMEFLEVLTEGLNRVLLVRGGGREVITIYS

SEQ ID NO: 777801 - protein, 92 aa, Homo sapiens
VKIKRNWRNLRGIDNRVRRRFKGQILMSNIGYASNKKTKHMLHSGFRKFLVHNVKELEVLLMCNKSYCAGLCLQLSESPSTFRKPATSFHKH

SEQ ID NO: 777802 - protein, 1101 aa, Homo sapiens; identical to SEQ ID NO: 777798

SEQ ID NO: 777803 - protein, 1101 aa, Homo sapiens; identical to SEQ ID NO: 777798

SEQ ID NO: 777804 - protein, 101 aa, Homo sapiens
STNLSCLPQNIRSLMSTEKTKGFCQLVVSSSLRDGMSHLIQSAGLGGLKHNTVLMAWPASWKQEDNPFSWKNFVGRHGWRPFGIPSPSPLCPLSVPSLSPR

SEQ ID NO: 777805 - protein, 284 aa, Homo sapiens
ARGQRGPGRDGDCRLQAAMPTNFTVVPVEAHADGGGDETAERTEAPGTPEGPEPERPSPGDGNPRENSPFLNNVEVEQESFFEGKNMALFEEEMDSNPMVSSLLNKLANYTNLSQGVVEHEEDEESRRREAKAPRMGTFIGVYLPCLQNILGVILFLRLTWIVGVAGVLESFLIVAMCCTCTMLTAISMSAIATNGVVPAGGSYYMISRSLGPEFGGAVGLCFYLGTTFAGAMYILGTIEIFLTGTEDGVGSLGLGLAQGNRRQTHLSPSDATQAAHGASYGSF

SEQ ID NO: 777806 - protein, 71 aa, Homo sapiens
RKKEQRKKNKTNPSQVRGPVVIRDEGEHVQFIRAYAPGRGPQLWLCHAGLCLQLSESPSTFRKPATSFHKH

SEQ ID NO: 777807 - protein, 1009 aa, Homo sapiens
ARGQRGPGRDGDCRLQAAMPTNFTVVPVEAHADGGGDETAERTEAPGTPEGPEPERPSPGDGNPRENSPFLNNVEVEQESFFEGKNMALFEEEMDSNPMVSSLLNKLANYTNLSQGVVEHEEDEESRRREAKAPRMGTFIGVYLPCLQNILGVILFLRLTWIVGVAGVLESFLIVAMCCTCTMLTAISMSAIATNGVVPAGGSYYMISRSLGPEFGGAVGLCFYLGTTFAGAMYILGTIEIFLTYISPGAAIFQAEAAGGEAAAMLHNMRVYGTCTLVLMALVVFVGVKYVNKLALVFLACVVLSILAIYAGVIKSAFDPPDIPVCLLGNRTLSRRSFDACVKAYGIHNNSATSALWGLFCNGSQPSAACDEYFIQNNVTEIQGIPGAASGVFLENLWSTYAHAGAFVEKKGVPSVPVAEESRASTLPYVLTDIAASFTLLVGIYFPSVTGIMAGSNRSGDLKDAQKSIPTGTILAIVTTSFIYLSCIVLFGACIEGVVLRDKFGEALQGNLVIGMLAWPSPWVIVIGSFFSTCGAGLQSLTGAPRLLQAIARDGIVPFLQVFGHGKANGEPTWALLLTVLICETGILIASLDSVAPILSMFFLMCYLFVNLACAVQTLLRTPNWRPRFKFYHWTLSFLGMSLCLALMFICSWYYALSAMLIAGCIYKYIEYRGAEKEWGDGIRGLSLNAARYALLRVEHGPPHTKNWRPQVLVMLNLDAEQAVKHPRLLSFTSQLKAGKGLTIVGSVLEGTYLDKHMEAQRAEENIRSLMSTEKTKGFCQLVVSSSLRDGMSHLIQSAGLGGLKHNTVLMAWPASWKQEDNPFSWKNFVDTVRDTTAAHQALLVAKNVDSFPQNQERFGGGHIDVWWIVHDGGMLMLLPFLLRQHKVWRKCRMRIFTVAQVDDNSIQMKKDLQMFLYHLRISAEVEVVEMVENDISAFTYERTLMMEQRSQMLKQMQLSKNEQEREAQLIHDRNTASHTAAAARTQAPPTPRELRGNKVVHKEVASIY

SEQ ID NO: 777808 - protein, 981 aa, Homo sapiens
ARGQRGPGRDGDCRLQAAMPTNFTVVPVEAHADGGGDETAERTEAPGTPEGPEPERPSPGDGNPRENSPFLNNVEVEQESFFEGKNMALFEEEMDSNPMVSSLLNKLANYTNLSQGVVEHEEDEESRRREAKAPRMGTFIGVYLPCLQNILGVILFLRLTWIVGVAGVLESFLIVAMCCTCTMLTAISMSAIATNGVVPAGGSYYMISRSLGPEFGGAVGLCFYLGTTFAGAMYILGTIEIFLTYISPGAAIFQAEAAGGEAAAMLHNMRVYGTCTLVLMALVVFVGVKYVNKLALVFLACVVLSILAIYAGVIKSAFDPPDIPVCLLGNRTLSRRSFDACVKAYGIHNNSATSALWGLFCNGSQPSAACDEYFIQNNVTEIQGIPGAASGVFLENLWSTYAHAGAFVEKKGVPSVPVAEESRASTLPYVLTDIAASFTLLVGIYFPSVTGIMAGSNRSGDLKDAQKSIPTGTILAIVTTSFIYLSCIVLFGACIEGVVLRDKFGEALQGNLVIGMLAWPSPWVIVIGSFFSTCGAGLQSLTGAPRLLQAIARDGIVPFLQVFGHGKANGEPTWALLLTVLICETGILIASLDSVAPILSMFFLMCYLFVNLACAVQTLLRTPNWRPRFKFYHWTLSFLGMSLCLALMFICSWYYALSAMLIAGCIYKYIEYRGAEKEWGDGIRGLSLNAARYALLRVEHGPPHTKNWRPQVLVMLNLDAEQAVKHPRLLSFTSQLKAGKGLTIVGSVLEGTYLDKHMEAQRAEENIRSLMSTEKTKGFCQLVVSSSLRDGMSHLIQSAGLGGLKHNTVLMAWPASWKQEDNPFSWKNFVDTVRDTTAAHQALLVAKNVDSFPQNQERFGGGHIDVWWIVHDGGMLMLLPFLLRQHKVWRKCRMRIFTVAQVDDNSIQMKKDLQMFLYHLRISAEVEVVEMVENDISAFTYERTLMMEQRSQMLKQMQLSKNEQEREAQLIHDPNSGYASS

SEQ ID NO: 777809 - protein, 96 aa, Homo sapiens
LGEDRHFLPNCCISQDHPGLPCPHLVPIKTPKTLAGRLEAAELDVERNTLTLAHLQATDRQKQNDTNLVGTVRGESRLLISQTSGENHLPSGSPIC

SEQ ID NO: 777810 - protein, 150 aa, Homo sapiens
MSVQPKLSLGGFEITPPALLQLKCDSGPVHISGQHLVAVEEDAESEDEEEENVKLLSISGKQLVPGSGSKFPQKKVKLVADEDDDDDDDFDDEETEEKAPVKKSIQDTTAKNAHKSNQNGKDSKPSSTPRSKGQESFKKQEKTPKTPKGP

SEQ ID NO: 777811 - protein, 41 aa, Homo sapiens
ERPEVTLLASCHEAAGNRVLAVLCGLPQHTSTLVPSWFRPF

SEQ ID NO: 777812 - protein, 98 aa, Homo sapiens
TCCRPSCCISSCCRPSCCISSCCKPSCCQTTCCRPSCCISSCYRPQCCQPSCCRPACCISSCCHPSCCVSSCRCPFSCPTTCCRTTCFHPICCGSSCC

SEQ ID NO: 777813 - protein, 66 aa, Homo sapiens
SDIDPDNSCRKWYRNHPRSRQRLEGPGPCPRSAGCQAGSQNPSWGVSPGWLNLDSTGCGNIWKMVA

SEQ ID NO: 777814 - protein, 104 aa, Homo sapiens
TAATWRRVPCVWSFTFSAPHPPRRRSLVTPREARTCQAGEFELTPGWPSPVQLDREPNHVRPRGVLEPWVVSSGVAWGLSRADALEQEKWAVLLDLMDPAASFS

SEQ ID NO: 777815 - protein, 93 aa, Homo sapiens
TDGVPAQQLRIPLSFQNPLFHMAADGPGPPGGHGGGGGHGPPSSHHHHHHHHHHRGGEPPGDTFAPFHGYSKSEDLSSGVPKPPAASILHSHS

SEQ ID NO: 777816 - protein, 85 aa, Homo sapiens
LQEPVRLDQHCQELSRARHRAQDLAALISAACGSCSPPPPSGKSSPLGWAPCIPRGASSAPPSPVALAARVGLATQLGYKSARCD

SEQ ID NO: 777817 - protein, 103 aa, Homo sapiens [sequence omitted]

SEQ ID NO: 777818 - protein, 75 aa, Homo sapiens
DIECEAYNTSSASLRVLRQVLLTQRIRLLLLLLSGLLHRKGLLSEHKWGNLEFIYLRGSFGTQLNFTVSSFPCVS

SEQ ID NO: 777819 - protein, 785 aa, Homo sapiens [sequence omitted]

SEQ ID NO: 777820 - protein, 785 aa, Homo sapiens [sequence omitted]

SEQ ID NO: 777821 - protein, 125 aa, Homo sapiens
MGTSSIFLCVLFLCGALGLTMSPARGRLRCYICGFTKPCHPVPTECRDDEACGISIGTSGKSCLSRAQCPLPGYATYWLHSYTLWHHCCEQDLCNIAASPQQLTSLLASLPLFVASFAGRGHLLH

SEQ ID NO: 777822 - protein, 89 aa, Homo sapiens
AQRRKEREELAQQYEAILRECGHGRFQWTLYFVLGLALMADGVEVFVVGFVLPSAEKDMCLSDSNKGMLWPSSSTLGHDGGTPSSERTV

SEQ ID NO: 777823 - protein, 71 aa, Homo sapiens
VDSDIPYASVLKCLLVPNVQHSSTLAPPTRGTKNSLLGVGLGGAHPAHSRTFSSIPGLHPRDAGSTDPSPV

SEQ ID NO: 777824 - protein, 505 aa, Homo sapiens
MEQTEKSKVYAENGLLEKIKLCLSKKPLPSPTERKKFDHDFAISTSFHGIHNIVQNRSKIRRVLWLVVVLGSVSLVTWQIYIRLLNYFTWPTTTSIEVQYVEKMEFPAVTFCNLNRFQTDAVAKFGVIFFLWHIVSKVLHLQEITANSTGSREATDFAASHQNFSIVEFIRNKGFYLNNSTLLDCEFFGKPCSPKDFAHVFTEYGNCFTFNHGETLQAKRKVSVSGRGLSLLFNVNQEAFTDNPALGFVDAGIIFVIHSPKKVPQFDGLGLLSPVGMHARVTIRQVKTVHQEYPWGECNPNIKLQNFSSYSTSGCLKECKAQHIKKQCGCVPFLLPGYGIECDLQKYFSCVSPVLDHIEFKDLCTVGTHNSSCPVSCEEIEYPATISYSSFPSQKALKYLSKKLNQSRKYIRENLVKIEINYSDLNYKITQQQKAVSVSELLADLGGQLGLFCGASLITIIEIIEYLFTNFYWICIFFLLKISEMTQWTPPPQNHLGNKNRIEEC

SEQ ID NO: 777825 - protein, 53 aa, Homo sapiens
MLMDAGQDYMVFEDVAIHFSQEEWGILNDVQRHLHSDVMLENFALLSSVGKAL

SEQ ID NO: 777826 - protein, 53 aa, Homo sapiens; identical to SEQ ID NO: 777825

SEQ ID NO: 777827 - protein, 188 aa, Homo sapiens
LVSATSLITPKSTFLTTTKPVSLLESTKKTIPELDQPPKLRGVLQGHLESSRNDPFLHPDFCCLLPLGFYVLGLFWLLFASVVLILLLSWVGHVKPQALDSGQGAALTTATQTTHLELQRGRQVTVPRAWLLFLRGSLPTFRSSLFLWVRPNGRVGPLVAGRRPSALSQGRGQDLLSTVSIRYSGHSL

SEQ ID NO: 777828 - protein, 143 aa, Homo sapiens
HSVAYARRAHEQELDHLYRWLTCSIKGYDFRSSCVFRGGEWNLESRLEKAEHGHADLKASNLRVRGEVGELQRMVHGWYSRKIQDNSFCEPVRVASLDIGFASDLIMDFPVSRTVSYKGLSPYLLSLGKIRVIFGRKSISGFC

SEQ ID NO: 777829 - protein, 95 aa, Homo sapiens
HSVAYARRAHEQELDHLYRWLTCSIKGYDFRSSCVFRGGEWNLESRLEKAEHGHADLKASNLRVRGEVGELQRMVHGWYSRCELRTGAFVFRAPR

SEQ ID NO: 777830 - protein, 385 aa, Homo sapiens
PVGARQRGGQVACVLRPRGKMNGTRNWCTLVDVHPEDQAAAGRKTYAMVSSHSAGHSLASELVESHDGHEEIIKVYLKGRSGDKMIHEKNINQLKSEVQYIQEARNCLQKLREDISSKLDRNLGDSLHRQEIQVVLEKPNGFSQSPTALYSSPPEVDTCINEDVESLRKTVQDLLAKLQEAKRQHQSDCVAFEVTLSRYQREAEQSNVALQREEDRVEQKEAEVGELQRRLLGMETEHQALLAKVREGEVALEELRSNNADCQAEREKAATLEKEVAGLREKIHHLDDMLKSQQRKVRQMIEQLQNSKAVIQSKDATIQELKEKIAYLEAENLEMHDRMEHLIEKQISHGNFSTQARAKTENPGSIRISKPPSPKPMPVIRVVET

SEQ ID NO: 777831 - protein, 141 aa, Homo sapiens
MWCLSHLSLSLSLSSLLGQAGRKTYAMVSSHSAGHSLASELVESHDGHEEIIKVYLKGRSGDKMIHEKNINQLKSEVQYIQEARNCLQKLREDISSKLDRNLGDSLHRQEIQVIGNGPWLGPHRGGGVVPGSLIYQLPSVC

SEQ ID NO: 777832 - protein, 334 aa, Homo sapiens
MWCLSHLSLSLSLSSLLGQAGRKTYAMVSSHSAGHSLASELVESHDGHEEIIKVYLKGRSGDKMIHEKNINQLKSEVQYIQEVVLEKPNGFSQSPTALYSSPPEVDTCINEDVESLRKTVQDLLAKLQEAKRQHQSDCVAFEVTLSRYQREAEQSNVALQREEDRVEQKEAEVGELQRRLLGMETEHQALLAKVREGEVALEELRSNNADCQAEREKAATLEKEVAGLREKIHHLDDMLKSQQRKVRQMIEQLQNSKAVIQSKDATIQELKEKIAYLEAENLEMHDRMEHLIEKQISHGNFSTQARAKTENPGSIRISKPPSPKPMPVIRVVET

SEQ ID NO: 777833 - protein, 385 aa, Homo sapiens; identical to SEQ ID NO: 777830

SEQ ID NO: 777834 - protein, 410 aa, Homo sapiens
PVGARQRGGQVACVLRPRGKMNGTRNWCTLVDVHPEDQAAGSVDILRLTLQGELTGDELEHIAQKAGRKTYAMVSSHSAGHSLASELVESHDGHEEIIKVYLKGRSGDKMIHEKNINQLKSEVQYIQEARNCLQKLREDISSKLDRNLGDSLHRQEIQVVLEKPNGFSQSPTALYSSPPEVDTCINEDVESLRKTVQDLLAKLQEAKRQHQSDCVAFEVTLSRYQREAEQSNVALQREEDRVEQKEAEVGELQRRLLGMETEHQALLAKVREGEVALEELRSNNADCQAEREKAATLEKEVAGLREKIHHLDDMLKSQQRKVRQMIEQLQNSKAVIQSKDATIQELKEKIAYLEAENLEMHDRMEHLIEKQISHGNFSTQARAKTENPGSIRISKPPSPKPMPVIRVVET

SEQ ID NO: 777835 - protein, 387 aa, Homo sapiens
LEDLEVTGSRAPEDQAAGSVDILRLTLQGELTGDELEHIAQKAGRKTYAMVSSHSAGHSLASELVESHDGHEEIIKVYLKGRSGDKMIHEKNINQLKSEVQYIQEARNCLQKLREDISSKLDRNLGDSLHRQEIQVVLEKPNGFSQSPTALYSSPPEVDTCINEDVESLRKTVQDLLAKLQEAKRQHQSDCVAFEVTLSRYQREAEQSNVALQREEDRVEQKEAEVGELQRRLLGMETEHQALLAKVREGEVALEELRSNNADCQAEREKAATLEKEVAGLREKIHHLDDMLKSQQRKVRQMIEQLQNSKAVIQSKDATIQELKEKIAYLEAENLEMHDRMEHLIEKQISHGNFSTQARAKTENPGSIRISKPPSPKPMPVIRVVET

SEQ ID NO: 777836 - protein, 154 aa, Homo sapiens
VTEDVGNRAGADTIMNLSLPFLCLFLLSFSFKLALQLRKVSLLSLRLWGQSICCLEKEGNQDSSGTQMSSSLALLNPLLHNWSFILALNDPAGHHGFLFLLFFFFSETESHSVTQAGVQWRDLSSLQPLPPGFKRFFCLSLPSSWDYRCATTPG

SEQ ID NO: 777837 - protein, 1481 aa, Homo sapiens
QVILYDPAAGPPGSAGPRRAATAAVPKMFAFDAVFPQDSEQAEVCSGTVADVLQSVVSGADGCIFSFGHMSLGKSYTMIGKDSSPQSLGIVPCAISWLFRLIEERRERTGTRFSVRVSAVEVCGRDQSLRDLLAEVAPGSLQDTQSPGVYLREDPVCGAQLQNQSELRAPTAEKAAFYLDAALAARSTSRAGCGEDARRSSHMLFTLHVYQYRMEKCGRGGMSGGRSRLHLIDLGSCEAAAGRAGEAAGGPLCLSLSALGSVILALVNGAKHVPYRDHRLTMLLRESLATAGCRTTMIAHVSDAPAQHAETLSTVQLAARIHRLRRKKAKYASSSSGGESSCEEGRARRPPHLRPFHPRTVALDPDRTPPCLPGDPDYSSSSEQSCDTVIYVGPGGAALSDRELTDNEGPPDFVPIIPALSRHRPSKGPRDADHFRCSTFAELQERLECMDGNEGPSGGPGGTDGAQASPARGGRKPSPPEAASPRKAVGTPMAASTPRGSSGPDTHQGTPEPCKAIVWGDQREDSSAWPELLVPEKAAVSGGRRPLPSPAPPPPQLLEACRAPEEPGGGGTDGVARTPPVGMSGQVAGSPMLPGATCPRLAAGSRCPERGLLTTTVTLQRPVELNGEDELVFTVVEELSLGALAGAGRPTSLASFDSDCSLRALASGSRPVSIISSINDEFDAYTSQAPEGGPLEGAAWAGSSHGSSISSWLSEVSVCTADSRDPTPQPRFSPDSLAGLDPGGPPALDGSLGDGSSGFLGPDRPDSPGPTWGPCPGEVAAVAPSRPGREPQAGPSRWASAAQTIHSSLPRKPRTASATTRVGCARLGQSPPGRGGLFEDPWLLRVGECDTQAASAGRAPSPTLGSPRLPEAQVMLACAQRVVDGCEVAARAARRPEAVARIPPLRRGATTLGVTTPAVSWGDAPTEVVACSGSLKASPTSKKGLAPKAGFLPRPSGAAPPAPPTRKSSLEQRSSPASAPPHAVNPARVGAAAVLRGEEEPRPSSRADHSVPRATSSLKARASKVEAAHRLAGHASLERYEGLAHSSSKGREAPGRPPRAVPKLGVPPSSPTHGPAPACRSGAAKAVGAPKPPVGGGKGRGLVAGGSRALGPSVKLSTASVTGRSPGGPVAGPRAAPRAGPSVGAKAGRGTVMGTKQALRAAHSRVHELSASGAPGRGGSSWGSADSDSGHDSGVNVGEERPPTGPALPSPYSKVTAPRRPQRYSSGHGSDNSSVLSGELPPAMGRTALFHHSGGSSGYESLRRDSEATGSASSAPDSMSESGAASPGARTRSLKSPKKRATGLQRRRLIPAPLPDTTALGRKPSLPGQWVDLPPPLAGSLKEPFEIKVYEIDDVERLQRPRPTPREAPTQGLACVSTRLRLAERRQQRLREVQAKHKHLCEELAETQGRLMLEPGRWLEQFEVDPELEPESAEYLAALERATAALEQCVNLCKAHVMMVTCFDISVAASAAIPGPQEVDV

SEQ ID NO: 777838 - protein, 1413 aa, Homo sapiens
QVILYDPAAGPPGSAGPRRAATAAVPKMFAFDAVFPQDSEQAEVCSGTVADVLQSVVSGADGCIFSFGHMSLGKSYTMIGKDSSPQSLGIVPCAISWLFRLIEERRERTGTRFSVRVSAVEVCGRDQSLRDLLAEVAPGSLQDTQSPGVYLREDPVCGAQLQNQSELRAPTAEKAAFYLDAALAARSTSRAGCGEDARRSSHMLFTLHVYQYRMEKCGRGGMSGGRSRLHLIDLGSCEAAAGRAGEAAGGPLCLSLSALGSVILALVNGAKHVPYRDHRLTMLLRESLATAGCRTTMIAHVSDAPAQHAETLSTVQLAARIHRLRRKKAKYASSSSGGESSCEEGRARRPPHLRPFHPRTVALDPDRTPPCLPGDPDYSSSSEQSCDTVIYVGPGGAALSDRELTDNEGPPDFVPIIPALSRHRPSKGPRDADHFRCSTFAELQERLECMDGNEGPSGGPGGTDGAQASPARGGRKPSPPEAASPRKAVGTPMAASTPRGSSGPDTHQGTPEPCKAIVWGDQREDSSAWPELLVPEKAAVSGGRRPLPSPAPPPPQLLEACRAPEEPGGGGTDGVARTPPVGMSGQVAGSPMLPGATCPRLAAGSRCPERGLLTTTVTLQRPVELNGEDELVFTVVEELSLGALAGAGRPTSLASFDSDCSLRALASGSRPVSIISSINDEFDAYTSQAPEGGPLEGAAWAGSSHGSSISSWLSEVSVCTADSRDPTPQPRFSPDSLAGLDPGGPPALDGSLGDGSSGFLGPDRPDSPGPTWGPCPGEVAAVAPSRPGREPQAGPSRWASAAQTIHSSLPRKPRTASATTRVGCARLGQSPPGRGGLFEDPWLLRVGECDTQAASAGRAPSPTLGSPRLPEAQVMLACAQRVVDGCEVAARAARRPEAVARIPPLRRGATTLGVTTPAVSWGDAPTEVVACSGSLKASPTSKKGLAPKAGFLPRPSGAAPPAPPTRKSSLEQRSSPASAPPHAVNPARVGAAAVLRGEEEPRPSSRADHSVPRATSSLKARASKVEAAHRLAGHASLERYEGLAHSSSKGREAPGRPPRAVPKLGVPPSSPTHGPAPACRSGAAKAVGAPKPPVGGGKGRGLVAGGSRALGPSVKLSTASVTGRSPGGPVAGPRAAPRAGPSVGAKAGRGTVMGTKQALRAAHSRVHELSASGAPGRGGSSWGSADSDSGHDSGVNVGEERPPTGPALPSPYSKVTAPRRPQRYSSGHGSDNSSVLSGELPPAMGRTALFHHSGGSSGYESLRRDSEATGSASSAPDSMSESGAASPGARTRSLKSPKKRATGLQRRRLIPAPLPDTTALGRKPSLPGQWVDLPPPLAGSLKEPFEIKVYEIDDVERLQRPRPTPREAPTQGLACVSTRLRLAERRQQRLRGVSLPAFATSPHDRLILSEDRA

SEQ ID NO: 777839 - protein, 96 aa, Homo sapiens
CAWAGPRLCSPCARLSVPGLQRRRLIPAPLPDTTALGRKPSLPGQWVDLPPPLAGSLKEPFEIKVYEIDDVERLQRPRPTPREAPTQVGPLVGWGL

SEQ ID NO: 777840 - protein, 227 aa, Homo sapiens
GSPPREVLRRAAGARRARRAPLGLPGGGPGRPLSAAAAAPAAFCVAGQGPGPHIASPGNAGALEPGSRGDRREGSSPGWRSSGAAPSPGNQPSPPQESAGVDAPARSFLVLPVALQFREESQRRRGPQRRLVFLAHTLPPHRVLLFLPGCFLSSPGKRIWRNRFRDCHPTGKGPASWKGGRGGTGAPSELLLEAVARPGNVVTSAGRLRPTPALPPGPRGSQREPQL

SEQ ID NO: 777841 - protein, 117 aa, Homo sapiens
AFIGHIGTAAVSTERERERERNRVWKLFSKSWEMQSHRRMTGPSSNPNEITSKYLGAFQLLLVELDKSDLRQVILSVFLKVRLHCISCPISWQWKRGQLFLVLGELEKQRICHLGVG

SEQ ID NO: 777842 - protein, 114 aa, Homo sapiens
VIIPQLKLEGTLSVPGPSFADTEVRCSSLEATHSVHIINNTSYSKDGTFLPSTHTANSTVNTDSQHAGPSLITQKMHAINSDSKKSSTKSNSRPGTVAHTCKPSILKGRGGLIA

SEQ ID NO: 777843 - protein, 128 aa, Homo sapiens
LIWFEPLFLPNLMLKCNSQHWRQSLAGDVCIMGVNGSVTSPWCILKCVAPAPLTLSLLLPLLPCEMPAPPSPSTMIGSFLRSHQEQMPVLCFLYSLQNCEPIKPLFFTNYPASGIPLQQCKNRLIQCP

SEQ ID NO: 777844 - protein, 203 aa, Homo sapiens
MSKSESPEEPEQLRKLFIGGLSFETTDESLRSHFEQWGMLTDCVVMRDPNTKHPRGFGFVTYATVEEVDAAMNARPHKVDGRVVEPKRAVSREDSERPGAHLTVKKIFVGGIKEDTEEHHLRDDFEQYGKIEVIEIMTDRGSGKKRGFAFVNFDDHDSMDKIVIQKYHTVNGHNCEVRKAPSQQEMDSASSSQRGRSGSGNFG

SEQ ID NO: 777845 - protein, 81 aa, Homo sapiens
VAVLIQCAGLDGRPDELLHKLPAGILNEHLFGPKLQCLLPGFLEVFLLASVGQVGNDVIALFLQPHEDARGVRAATVGQNH

SEQ ID NO: 777846 - protein, 648 aa, Homo sapiens
  misc_feature (455)..(455): Xaa can be any naturally occurring amino acid
MSRKASENVEYTLRSLSSLMGERRRKQPEPDAASAAGECSLLAAAESSTSLQSAGAGGGGVGDLERAARRQFQQDETPAFVYVVAVFSALGGFLFGYDTGVVSGAMLLLKRQLSLDALWQELLVSSTVGAAAVSALAGGALNGVFGRRAAILLASALFTAGSAVLAAANNKETLLAGRLVVGLGIGIASMTVPVYIAEVSPPNLRGRLVTINTLFITGGQFFASVVDGAFSYLQKDGWRYMLGLAAVPAVIQFFGFLFLPESPRWLIQKGQTQKARRILSQMRGNQTIDEEYDSIKNNIEEEEKEVGSAGPVICRMLSYPPTRRALIVGCGLQMFQQLSGINTIMYYSATILQMSGVEDDRLAIWLASVTAFTNFIFTLVGVWLVEKVGRRKLTFGSLAGTTVALIILALGFVLSAQVSPRITFKPIAPSGQNATCTRYSYCNECMLDPDCGFCXKMNKSTVIDSSCVPVNKASTNEAAWGRCENETKFKTEDIFWAYNFCPTPYSWTALLGLILYLVFFAPGMGPMPWTVNSEIYPLWARSTGNACSSGINWIFNVLVSLTFLHTAEYLTYYGAFFLYAGFAAVGLLFIYGCLPETKGKKLEEIESLFDNRLCTCGTSDSDEGRYIEYIRVKGSNYHLSDNDASDVE

SEQ ID NO: 777847 - protein, 357 aa, Homo sapiens
MSRKASENVEYTLRSLSSLMGERRRKQPEPDAASAAGECSLLAAAESSTSLQSAGAGGGGVGDLERAARRQFQQDETPAFVYVVAVFSALGGFLFGYDTGVVSGAMLLLKRQLSLDALWQELLVSSTVGAAAVSALAGGALNGVFGRRAAILLASALFTAGSAVLAAANNKETLLAGRLVVGLGIGIASMTVPVYIAEVSPPNLRGRLVTINTLFITGGQFFASVVDGAFSYLQKDGWRYMLGLAAVPAVIQFFGFLFLPESPRWLIQKGQTQKARRILSQMRGNQTIDEEYDSIKNNIEEEEKEVGSAGPVICRMLSYPPTRRALIVGCGLQMFQQLSGINTIMYVFLSGFLLKRL

SEQ ID NO: 777848 - protein, 313 aa, Homo sapiens
MSDLLLLGLIGGLTLLLLLTLLAFAGYSGLLAGVEVSAGSPPIRNVTVAYKFHMGLYGETGRLFTESCSISPKLRSIAVYYDNPHMVPPDKCRCAVGSILSEGEESPSPELIDLYQKFGFKVFSFPAPSHVVTATFPYTTILSIWLATRRVHPALDTYIKERKLCAYPRLEIYQEDQIHFMCPLARQGDFYVPEMKETEWKWRGLVEAIDTQVDGTGADTMSDTSSVSLEVSPGSRETSAATLSPGASSRGWDDGDTRSEHSYSESGASGSSFEELDLEGEGPLGESRLDPGTEPLGTTKWLWEPTAPEKGKE

SEQ ID NO: 777849 - protein, 352 aa, Homo sapiens
MRPWGSPYSSGQPTSAATGAGHAPGPWSCLEVQCWGSRAMSDLLLLGLIGGLTLLLLLTLLAFAGYSGLLAGVEVSAGSPPIRNVTVAYKFHMGLYGETGRLFTESCSISPKLRSIAVYYDNPHMVPPDKCRCAVGSILSEGEESPSPELIDLYQKFGFKVFSFPAPSHVVTATFPYTTILSIWLATRRVHPALDTYIKERKLCAYPRLEIYQEDQIHFMCPLARQGDFYVPEMKETEWKWRGLVEAIDTQVDGTGADTMSDTSSVSLEVSPGSRETSAATLSPGASSRGWDDGDTRSEHSYSESGASGSSFEELDLEGEGPLGESRLDPGTEPLGTTKWLWEPTAPEKGKE

SEQ ID NO: 777850 - protein, 161 aa, Homo sapiens
GALEDLNRTNKEPFEHESLLLNRKDHKLTKAEKKAAKKSYEEDKRTSVPYTRPSYAQYYPASDQSLTSIPAFSQRNWQPTLKGDEKPVASVRPVQSTPIPMMPRHVPLGGSVSSASSTNPSMNFPINYLQRAGVLVQKVVTTTDIVIPGLNSSLSWRLNPL

SEQ ID NO: 777851 - protein, 1385 aa, Homo sapiens
AAIGATNGKNLASEDPKKKRAQKPSHMRRNIRKLLREDQLEPVTKAAQQEELERRKRLEQQRKDYAAPIPTVPLEFLPEEIALRASDGPQLPPRVLAQEVICLDSSSGSEDEKSSRDEVIELSSGEEDTLHIVDSSESVSEDDEEEEKGGTHVNDVLNQRDALGRVLVNLNHPPEEENVFLAPQLARAVKPHQIGGIRFLYDNLVESLERFKTSSGFGCILAHSMGLGKTLQVISFIDVLFRHTPAKTVLAIVPVNTLQNWLAEFNMWLPPPEALPADNKPEEVQPRFFKVHILNDEHKTMASRAKVMADWVSEGGVLLMGYEMYRLLTLKKSFATGRPKKTKKRSHPVIIDLDEEDRQQEFRREFEKALCRPGPDVVICDEGHRIKNCQASTSQALKNIRSRRRVVLTGYPLQNNLIEYWCMVDFVRPDFLGTRQEFSNMFERPILNGQCIDSTPQDVRLMRYRSHVLHSLLEGFVQRRGHTVLKIHLPAKEENVILVRLSKIQRDLYTQFMDRFRDCGSSGWLGLNPLKAFCVCCKIWNHPDVLYEALQKESLANEQDLDVEELGSAGTSARCPPQGTKGKGEDSTLASSMGEATNSKFLQGVGFNPFQERGNNIVTYEWAKDLLTNYQTGVLENSPKMVLLFHLIEESVKLGDKILVFSQSLSTLALIEEFLGKREVPCPPGTEGQGAQKWVRNISYFRLDGSTPAFERERLINQFNDPSNLTTWLFLLSTRAGCLGVNLIGANRVVVFDASWNPCHDAQAVCRVYRYGQKKPCYIYRLVADYTLEKKIYDRQISKQGMSDRVVDDLNPMLNFTRKEVENLLHFVEKEPAPQVSLNVKGIKESVLQLACLKYPHLITKEPFEHESLLLNRKDHKLTKAEKKAAKKSYEEDKRTSVPYTRPSYAQYYPASDQSLTSIPAFSQRNWQPTLKGDEKPVASVRPVQSTPIPMMPRHVPLGGSVSSASSTNPSMNFPINYLQRAGVLVQKVVTTTDIVIPGLNSSTDVQARINAGESIHIIRGTKGTYIRTSDGRIFAVRATGKPKVPEDGRMAASGSQGPSCESTSNGRHSASSPKAPDPEGLARPVSPDSPEIISELQQYADVAAARESRQSSPSTNAALPGPPAQLMDSSAVPGTALGTEPRLGGHCLNSSLLVTGQPCGDRHPVLDLRGHKRKLATPPAAQESSRRRSRKGHLPAPVQPYEHGYPVSGGFAMPPVSLNHNLTTPFTSQAGENSLFMGSTPSYYQLSNLLADARLVFPVTTDPLVPAGPVSSSSTATSVTASNPSFMLNPSVPGILPSYSLPFSQPLLSEPRMFAPFPSPVLPSNLSRGMSIYPGYMSPHAGYPAGGLLRSQVPPFDSHEVAEVGFSSNDDEDKDDDVIEVTGK

SEQ ID NO: 777852 - protein, 1751 aa, Homo sapiens
AAIGATNGKNLASEDPKKKRAQKPSHMRRNIRKLLREDQLEPVTKAAQQEELERRKRLEQQRKDYAAPIPTVPLEFLPEEIALRASDGPQLPPRVLAQEVICLDSSSGSEDEKSSRDEVIELSSGEEDTLHIVDSSESVSEDDEEEEKGGTHVNDVLNQRDALGRVLVNLNHPPEEENVFLAPQLARAVKPHQIGGIRFLYDNLVESLERFKTSSGFGCILAHSMGLGKTLQVISFIDVLFRHTPAKTVLAIVPVNTLQNWLAEFNMWLPPPEALPADNKPEEVQPRFFKVHILNDEHKTMASRAKVMADWVSEGGVLLMGYEMYRLLTLKKSFATGRPKKTKKRSHPVIIDLDEEDRQQEFRREFEKALCRPGPDVVICDEGHRIKNCQASTSQALKNIRSRRRVVLTGYPLQNNLIEYWCMVDFVRPDFLGTRQEFSNMFERPILNGQCIDSTPQDVRLMRYRSHVLHSLLEGFVQRRGHTVLKIHLPAKEENVILVRLSKIQRDLYTQFMDRFRDCGSSGWLGLNPLKAFCVCCKVIGASGKIEMGTKDTHGPKGVTPTESLQERENKVRGGHLSSLHWRFGGSKERGDGFVPHNSWGCHSHSVIYLMPPAVCNSAAQLVIPRGLMEKYCGAAFLTASIIRIQEIYSLDKLLGVPSIDSILNQIETSLILFLRDLFALTSYLYPWLLFSRPVRYYSELTTALISQQKVCVWGQEGFPNISFIATVLGQGQETKASVVCDDDFGITASFLLPFLSSPGSSQLLLGILCEMICDWSTISQIHFVYEFYTVADCSHTVKLEHSYSYLNKNVKKACDSFFDYVSNILTGMAPGMHAAIHVVMVTRTDNQNKYAGPLAVKGSDFNFGVTVFIVGRVCLSKYVFPDSLGHPWNVFCPVSPLPFLEPQIWNHPDVLYEALQKESLANEQDLDVEELGSAGTSARCPPQGTKGKGEDSTLASSMGEATNSKFLQGVGFNPFQERGNNIVTYEWAKDLLTNYQTGVLENSPKMVLLFHLIEESVKLGDKILVFSQSLSTLALIEEFLGKREVPCPPGTEGQGAQKWVRNISYFRLDGSTPAFERERLINQFNDPSNLTTWLFLLSTRAGCLGVNLIGANRVVVFDASWNPCHDAQAVCRVYRYGQKKPCYIYRLVADYTLEKKIYDRQISKQGMSDRVVDDLNPMLNFTRKEVENLLHFVEKEPAPQVSLNVKGIKESVLQLACLKYPHLITKEPFEHESLLLNRKDHKLTKAEKKAAKKSYEEDKRTSVPYTRPSYAQYYPASDQSLTSIPAFSQRNWQPTLKGDEKPVASVRPVQSTPIPMMPRHVPLGGSVSSASSTNPSMNFPINYLQRAGVLVQKVVTTTDIVIPGLNSSTDVQARINAGESIHIIRGTKGTYIRTSDGRIFAVRATGKPKVPEDGRMAASGSQGPSCESTSNGRHSASSPKAPDPEGLARPVSPDSPEIISELQQYADVAAARESRQSSPSTNAALPGPPAQLMDSSAVPGTALGTEPRLGGHCLNSSLLVTGQPCGDRHPVLDLRGHKRKLATPPAAQESSRRRSRKGHLPAPVQPYEHGYPVSGGFAMPPVSLNHNLTTPFTSQAGENSLFMGSTPSYYQLSNLLADARLVFPVTTDPLVPAGPVSSSSTATSVTASNPSFMLNPSVPGILPSYSLPFSQPLLSEPRMFAPFPSPVLPSNLSRGMSIYPGYMSPHAGYPAGGLLRSQVPPFDSHEVAEVGFSSNDDEDKDDDVIEVTGK

SEQ ID NO: 777853 - protein, 1529 aa, Homo sapiens
AAIGATNGKNLASEDPKKKRAQKPSHMRRNIRKLLREDQLEPVTKAAQQEELERRKRLEQQRKDYAAPIPTVPLEFLPEEIALRASDGPQLPPRVLAQEVICLDSSSGSEDEKSSRDEVIELSSGEEDTLHIVDSSESVSEDDEEEEKGGTHVNDVLNQRDALGRVLVNLNHPPEEENVFLAPQLARAVKPHQIGGIRFLYDNLVESLERFKTSSGFGCILAHSMGLGKTLQVISFIDVLFRHTPAKTVLAIVPVNTLQNWLAEFNMWLPPPEALPADNKPEEVQPRFFKVHILNDEHKTMASRAKVMADWVSEGGVLLMGYEMYRLLTLKKSFATGRPKKTKKRSHPVIIDLDEEDRQQEFRREFEKALCRPGPDVVICDEGHRIKNCQASTSQALKNIRSRRRVVLTGYPLQNNLIEYWCMVDFVRPDFLGTRQEFSNMFERPILNGQCIDSTPQDVRLMRYRSHVLHSLLEGFVQRRGHTVLKIHLPAKEENVILVRLSKIQRDLYTQFMDRFRDCGSSGWLGLNPLKAFCVCCKIWNHPDVLYEALQKESLANEQDLDVEELGSAGTSARCPPQGTKGKGEDSTLASSMGEATNSKFLQGVGFNPFQERGNNIVTYEWAKDLLTNYQTGVLENSPKMVLLFHLIEESVKLGDKILVFSQSLSTLALIEEFLGKREVPCPPGTEGQGAQKWVRNISYFRLDGSTPAFERERLINQFNDPSNLTTWLFLLSTRAGCLGVNLIGANRVVVFDASWNPCHDAQAVCRVYRYGQKKPCYIYRLVADYTLEKKIYDRQISKQGMSDRVVDDLNPMLNFTRKEVENLLHFVEKEPAPQVSLNVKGIKESVLQLACLKYPHLITKEPFEHESLLLNRKDHKLTKAEKKAAKKSYEEDKRTSVPYTRPSYAQYYPASDQSLTSIPAFSQRNWQPTLKGDEKPVASVRPVQSTPIPMMPRHVPLGGSVSSASSTNPSMNFPINYLQRAGVLVQKVVTTTDIVIPGLNSSTDVQARINAGESIHIIRGTKGTYIRTSDGRIFAVRATGKPKVPEDGRMAASGSQGPSCESTSNGRHSASSPKAPDPEGLARPVSPDSPEIISELQQYADVAAARESRQSSPSTNAALPGPPAQLMDSSAVPGTALGTEPRLGGHCLNSSLLVTGQPCGDRHPVLDLRGHKRKLATPPAAQESSRRRSRKGHLPAPVQPYEHGCLEVQCWGSRAMSDLLLLGLIGGLTLLLLLTLLAFAGYSGLLAGVEVSAGSPPIRNVTVAYKFHMGLYGETGRLFTESCSISPKLRSIAVYYDNPHMVPPDKCRCAVGSILSEGEESPSPELIDLYQKFGFKVFSFPAPSHVVTATFPYTTILSIWLATRRVHPALDTYIKERKLCAYPRLEIYQEDQIHFMCPLARQGDFYVPEMKETEWKWRGLVEAIDTQVDGTGADTMSDTSSVSLEVSPGSRETSAATLSPGASSRGWDDGDTRSEHSYSESGASGSSFEELDLEGEGPLGESRLDPGTEPLGTTKWLWEPTAPEKGKE

SEQ ID NO: 777854 - protein, 313 aa, Homo sapiens; identical to SEQ ID NO: 777848

SEQ ID NO: 777855 - protein, 345 aa, Homo sapiens
GKWAHCQSRLPASSPFFLLCSCLEVQCWGSRAMSDLLLLGLIGGLTLLLLLTLLAFAGYSGLLAGVEVSAGSPPIRNVTVAYKFHMGLYGETGRLFTESCSISPKLRSIAVYYDNPHMVPPDKCRCAVGSILSEGEESPSPELIDLYQKFGFKVFSFPAPSHVVTATFPYTTILSIWLATRRVHPALDTYIKERKLCAYPRLEIYQEDQIHFMCPLARQGDFYVPEMKETEWKWRGLVEAIDTQVDGTGADTMSDTSSVSLEVSPGSRETSAATLSPGASSRGWDDGDTRSEHSYSESGASGSSFEELDLEGEGPLGESRLDPGTEPLGTTKWLWEPTAPEKGKE

SEQ ID NO: 777856 - protein, 313 aa, Homo sapiens; identical to SEQ ID NO: 777848

SEQ ID NO: 777857 - protein, 1529 aa, Homo sapiens; identical to SEQ ID NO: 777853

SEQ ID NO: 777858 - protein, 1529 aa, Homo sapiens; identical to SEQ ID NO: 777853

SEQ ID NO: 777859 - protein, 133 aa, Homo sapiens
MCPLARQGDFYVPEMKETEWKWRGLVEAIDTQVDGTGADTMSDTSSVSLEVSPGSRETSAATLSPGASSRGWDDGDTRSEHSYSESGASGSSFEELDLEGEGPLGESRLDPGTEPLGTTKWLWEPTAPEKGKE

SEQ ID NO: 777860 - protein, 1202 aa, Homo sapiens
AAIGATNGKNLASEDPKKKRAQKPSHMRRNIRKLLREDQLEPVTKAAQQEELERRKRLEQQRKDYAAPIPTVPLEFLPEEIALRASDGPQLPPRVLAQEVICLDSSSGSEDEKSSRDEVIELSSGEEDTLHIVDSSESVSEDDEEEEKGGTHVNDVLNQRDALGRVLVNLNHPPEEENVFLAPQLARAVKPHQIGGIRFLYDNLVESLERFKTSSGFGCILAHSMGLGKTLQVISFIDVLFRHTPAKTVLAIVPVNTLQNWLAEFNMWLPPPEALPADNKPEEVQPRFFKVHILNDEHKTMASRAKVMADWVSEGGVLLMGYEMYRLLTLKKSFATGRPKKTKKRSHPVIIDLDEEDRQQEFRREFEKALCRPGPDVVICDEGHRIKNCQASTSQALKNIRSRRRVVLTGYPLQNNLIEYWCMVDFVRPDFLGTRQEFSNMFERPILNGQCIDSTPQDVRLMRYRSHVLHSLLEGFVQRRGHTVLKIHLPAKEENVILVRLSKIQRDLYTQFMDRFRDCGSSGWLGLNPLKAFCVCCKIWNHPDVLYEALQKESLANEQDLDVEELGSAGTSARCPPQGTKGKGEDSTLASSMGEATNSKFLQGVGFNPFQERGNNIVTYEWAKDLLTNYQTGVLENSPKMVLLFHLIEESVKLGDKILVFSQSLSTLALIEEFLGKREVPCPPGTEGQGAQKWVRNISYFRLDGSTPAFERERLINQFNDPSNLTTWLFLLSTRAGCLGVNLIGANRVVVFDASWNPCHDAQAVCRVYRYGQKKPCYIYRLVADYTLEKKIYDRQISKQGMSDRVVDDLNPMLNFTRKEVENLLHFVEKEPAPQVSLNVKGIKESVLQLACLKYPHLITKEPFEHESLLLNRKDHKLTKAEKKAAKKSYEEDKRTSVPYTRPSYAQYYPASDQSLTSIPAFSQRNWQPTLKGDEKPVASVRPVQSTPIPMMPRHVPLGGSVSSASSTNPSMNFPINYLQRAGVLVQKVVTTTDIVIPGLNSSTDVQARINAGESIHIIRGTKGTYIRTSDGRIFAVRATGKPKVPEDGRMAASGSQGPSCESTSNGRHSASSPKAPDPEGLARPVSPDSPEIISELQQYADVAAARESRQSSPSTNAALPGPPAQLMDSSAVPGTALGTEPRLGGHCLNSSLLVTGQPCGDRHPVLDLRGHKRKLATPPAAQESSRRRSRKESSASPRAAV

SEQ ID NO: 777861 - protein, 125 aa, Homo sapiens
RPPPRPVPPPARRSRFSPLFSYKTPHCSGADTMSDTSSVSLEVSPGSRETSAATLSPGASSRGWDDGDTRSEHSYSESGASGSSFEELDLEGEGPLGESRLDPGTEPLGTTKWLWEPTAPEKGKE

SEQ ID NO: 777862 - protein, 1385 aa, Homo sapiens; identical to SEQ ID NO: 777851

SEQ ID NO: 777863 - protein, 313 aa, Homo sapiens; identical to SEQ ID NO: 777848

SEQ ID NO: 777864 - protein, 474 aa, Homo sapiens
RIGVTQRAAAEVRAGPEERHTHWGVGLGLPLSALARPQDSPCPLRDPRGPGRSLHLVLPTAGLGQVRGPGCDLGAAPTLPGSPLPRPPVQGMPRGRGGEGKRRESRFNSAPVPQGRASQPGLQTLASFKLQTCVGLREEVGEEKGSEYNSCLEVQCWGSRAMSDLLLLGLIGGLTLLLLLTLLAFAGYSGLLAGVEVSAGSPPIRNVTVAYKFHMGLYGETGRLFTESCSISPKLRSIAVYYDNPHMVPPDKCRCAVGSILSEGEESPSPELIDLYQKFGFKVFSFPAPSHVVTATFPYTTILSIWLATRRVHPALDTYIKERKLCAYPRLEIYQEDQIHFMCPLARQGDFYVPEMKETEWKWRGLVEAIDTQVDGTGADTMSDTSSVSLEVSPGSRETSAATLSPGASSRGWDDGDTRSEHSYSESGASGSSFEELDLEGEGPLGESRLDPGTEPLGTTKWLWEPTAPEKGKE

SEQ ID NO: 777865 - protein, 316 aa, Homo sapiens
VVKVLPLVFLSAVQLLGASALSPVAIETWAGQCLLPSGVPLLHCAHGQRPCPAARGWLERAVRWLGCAQCSCNRTLSRCADRRPQRAAAEPPDKCRCAVGSILSEGEESPSPELIDLYQKFGFKVFSFPAPSHVVTATFPYTTILSIWLATRRVHPALDTYIKERKLCAYPRLEIYQEDQIHFMCPLARQGDFYVPEMKETEWKWRGLVEAIDTQVDGTGADTMSDTSSVSLEVSPGSRETSAATLSPGASSRGWDDGDTRSEHSYSESGASGSSFEELDLEGEGPLGESRLDPGTEPLGTTKWLWEPTAPEKGKE

SEQ ID NO: 777866 - protein, 390 aa, Homo sapiens
MSDLLLLGLIGGLTLLLLLTLLAFAGYSGLLAGVEVSAGSPPIRNVTVAYKFHMGLYGETGRLFTESCSISPKLRSIAVYYDNPHMVLLYILQLLEMKSDLALPSVKLCVADMSAPHEVILQQGHVCLSVHMNFELEVHGEAAIESAAGGSREGVDFMLVPSHVPPDKCRCAVGSILSEGEESPSPELIDLYQKFGFKVFSFPAPSHVVTATFPYTTILSIWLATRRVHPALDTYIKERKLCAYPRLEIYQEDQIHFMCPLARQGDFYVPEMKETEWKWRGLVEAIDTQVDGTGADTMSDTSSVSLEVSPGSRETSAATLSPGASSRGWDDGDTRSEHSYSESGASGSSFEELDLEGEGPLGESRLDPGTEPLGTTKWLWEPTAPEKGKE

SEQ ID NO: 777867 - protein, 1202 aa, Homo sapiens; identical to SEQ ID NO: 777860

SEQ ID NO: 777868 - protein, 1110 aa, Homo sapiens
AAIGATNGKNLASEDPKKKRAQKPSHMRRNIRKLLREDQLEPVTKAAQQEELERRKRLEQQRKDYAAPIPTVPLEFLPEEIALRASDGPQLPPRVLAQEVICLDSSSGSEDEKSSRDEVIELSSGEEDTLHIVDSSESVSEDDEEEEKGGTHVNDVLNQRDALGRVLVNLNHPPEEENVFLAPQLARAVKPHQIGGIRFLYDNLVESLERFKTSSGFGCILAHSMGLGKTLQVISFIDVLFRHTPAKTVLAIVPVNTLQNWLAEFNMWLPPPEALPADNKPEEVQPRFFKVHILNDEHKTMASRAKVMADWVSEGGVLLMGYEMYRLLTLKKSFATGRPKKTKKRSHPVIIDLDEEDRQQEFRREFEKALCRPGPDVVICDEGHRIKNCQASTSQALKNIRSRRRVVLTGYPLQNNLIEYWCMVDFVRPDFLGTRQEFSNMFERPILNGQCIDSTPQDVRLMRYRSHVLHSLLEGFVQRRGHTVLKIHLPAKEENVILVRLSKIQRDLYTQFMDRFRDCGSSGWLGLNPLKAFCVCCKIWNHPDVLYEALQKESLANEQDLDVEELGSAGTSARCPPQGTKGKGEDSTLASSMGEATNSKFLQGVGFNPFQERGNNIVTYEWAKDLLTNYQTGVLENSPKMVLLFHLIEESVKLGDKILVFSQSLSTLALIEEFLGKREVPCPPGTEGQGAQKWVRNISYFRLDGSTPAFERERLINQFNDPSNLTTWLFLLSTRAGCLGVNLIGANRVVVFDASWNPCHDAQAVCRVYRYGQKKPCYIYRLVADYTLEKKIYDRQISKQGMSDRVVDDLNPMLNFTRKEVENLLHFVEKEPAPQVSLNVKGIKESVLQLACLKYPHLITKEPFEHESLLLNRKDHKLTKAEKKAAKKSYEEDKRTSVPYTRPSYAQYYPASDQSLTSIPAFSQRNWQPTLKGDEKPVASVRPVQSTPIPMMPRHVPLGGSVSSASSTNPSMNFPINYLQRAGVLVQKVVTTTDIVIPGLNSSTDVQARINAGESIHIIRGTKGTYIRTSDGRIFAVRATGKPKVPEDGRMAASGSQGPSCESTSNGRHSASSPKAPDPEGLARPVSPDSPEIISELQQYAETWQNPIST

SEQ ID NO: 777869 - protein, 1011 aa, Homo sapiens
AAIGATNGKNLASEDPKKKRAQKPSHMRRNIRKLLREDQLEPVTKAAQQEELERRKRLEQQRKDYAAPIPTVPLEFLPEEIALRASDGPQLPPRVLAQEVICLDSSSGSEDEKSSRDEVIELSSGEEDTLHIVDSSESVSEDDEEEEKGGTHVNDVLNQRDALGRVLVNLNHPPEEENVFLAPQLARAVKPHQIGGIRFLYDNLVESLERFKTSSGFGCILAHSMGLGKTLQVISFIDVLFRHTPAKTVLAIVPVNTLQNWLAEFNMWLPPPEALPADNKPEEVQPRFFKVHILNDEHKTMASRAKVMADWVSEGGVLLMGYEMYRLLTLKKSFATGRPKKTKKRSHPVIIDLDEEDRQQEFRREFEKALCRPGPDVVICDEGHRIKNCQASTSQALKNIRSRRRVVLTGYPLQNNLIEYWCMVDFVRPDFLGTRQEFSNMFERPILNGQCIDSTPQDVRLMRYRSHVLHSLLEGFVQRRGHTVLKIHLPAKEENVILVRLSKIQRDLYTQFMDRFRDCGSSGWLGLNPLKAFCVCCKIWNHPDVLYEALQKESLANEQDLDVEELGSAGTSARCPPQGTKGKGEDSTLASSMGEATNSKFLQGVGFNPFQERGNNIVTYEWAKDLLTNYQTGVLENSPKMVLLFHLIEESVKLGDKILVFSQSLSTLALIEEFLGKREVPCPPGTEGQGAQKWVRNISYFRLDGSTPAFERERLINQFNDPSNLTTWLFLLSTRAGCLGVNLIGANRVVVFDASWNPCHDAQAVCRVYRYGQKKPCYIYRLVADYTLEKKIYDRQISKQGMSDRVVDDLNPMLNFTRKEVENLLHFVEKEPAPQVSLNVKGIKESVLQLACLKYPHLITKEPFEHESLLLNRKDHKLTKAEKKAAKKSYEEDKRTSVPYTRPSYAQYYPASDQSLTSIPAFSQRNWQPTLKGDEKPVASVRPVQSTPIPMMPRHVPLGGSVSSASSTNPSMNFPINYLQRAGVLVQKVVTTTDIVIPGLNSSLSWRLNPL

SEQ ID NO: 777870 - protein, 1246 aa, Homo sapiens
GSESWNPAGVALSAGCEEGGSGQAIAMAVAVAMAGALIGSEPGPAEELAKLEYLSLVSKVCTELDNHLGINDKDLAEFVISLAEKNTTFDTFKASLVKNGAEFTDSLISNLLRLIQTMRPPAKPSTSKDPVVKPKTEKEKLKELFPVLCQPDNPSVRTMLDEDDVKVAVDVLKELEALMPSAAGQEKQRDAEHRDRTKKKKRSRSRDRNRDRDRDRERNRDRDHKRRHRSRSRSRSRTRERNKVKSRYRSRSRSQSPPKDRKDRDKYGERNLDRWRDKHVDRPPPEEPTIGDIYNGKVTSIMQFGCFVQLEGLRKRWEGLVHISELRREGRVANVADVVSKGQRVKVKVLSFTGTKTSLSMKDVDQETGEDLNPNRRRNLVGETNEETSMRNPDRPTHLSLVSAPEVEDDSLERKRLTRISDPEKWEIKQMIAANVLSKEEFPDFDEETGILPKVDDEEDEDLEIELVEEEPPFLRGHTKQSMDMSPIKIVKNPDGSLSQAAMMQSALAKERRELKQAQREAEMDSIPMGLNKHWVDPLPDAEGRQIAANMRGIGMMPNDIPEWKKHAFGGNKASYGKKTQMSILEQRESLPIYKLKEQLVQAVHDNQILIVIGETGSGKTTQITQYLAEAGYTSRGKIGCTQPRRVAAMSVAKRVSEEFGCCLGQEVGYTIRFEDCTSPETVIKYMTDGMLLRECLIDPDLTQYAIIMLDEAHERTIHTDVLFGLLKKTVQKRQDMKLIVTSATLDAVKFSQYFYEAPIFTIPGRTYPVEILYTKEPETDYLDASLITVMQIHLTEPPGDILVFLTGQEEIDTACEILYERMKSLGPDVPELIILPVYSALPSEMQTRIFDPAPPGSRKVVIATNIAETSLTIDGIYYVVDPGFVKQKVYNSKTGIDQLVVTPISQAQAKQRAGRAGRTGPGKCYRLYTERAYRDEMLTTNVPEIQRTNLASTVLSLKAMGINDLLSFDFMDAPPMETLITAMEQLYTLGALDDEGLLTRLGRRMAEFPLEPMLCKMLIMSVHLGCSEEMLTIVSMLSVQNVFYRPKDKQALADQKKAKFHQTEGDHLTLLAVYNSWKNNKFSNPWCYENFIQARSLRRAQDIRKQMLGIMDRHKLDVVSCGKSTVRVQKAICSGFFRNAAKKDPQEGYRTLIDQQVVYIHPSSALFNRQPEWVVYHELVLTTKEYMREVTTIDPRWLVEFAPAFFKVSDPTKLSKQKKQQRLEPLYNRYEEPNAWRISRAFRRR

SEQ ID NO: 777871 - protein, 1252 aa, Homo sapiens
GSESWNPAGVALSAGCEEGGSGQAIAMAVAVAMAGALIGSEPGPAEELAKLEYLSLVSKVCTELDNHLGINDKDLAEFVISLAEKNTTFDTFKASLVKNGAEFTDSLISNLLRLIQTMRPPAKPSTSKDPVVKPKTEKEKLKELFPVLCQPDNPSVRTMLDEDDVKVAVDVLKELEALMPSAAGQEKQRDAEHRCLLIFRDRTKKKKRSRSRDRNRDRDRDRERNRDRDHKRRHRSRSRSRSRTRERNKVKSRYRSRSRSQSPPKDRKDRDKYGERNLDRWRDKHVDRPPPEEPTIGDIYNGKVTSIMQFGCFVQLEGLRKRWEGLVHISELRREGRVANVADVVSKGQRVKVKVLSFTGTKTSLSMKDVDQETGEDLNPNRRRNLVGETNEETSMRNPDRPTHLSLVSAPEVEDDSLERKRLTRISDPEKWEIKQMIAANVLSKEEFPDFDEETGILPKVDDEEDEDLEIELVEEEPPFLRGHTKQSMDMSPIKIVKNPDGSLSQAAMMQSALAKERRELKQAQREAEMDSIPMGLNKHWVDPLPDAEGRQIAANMRGIGMMPNDIPEWKKHAFGGNKASYGKKTQMSILEQRESLPIYKLKEQLVQAVHDNQILIVIGETGSGKTTQITQYLAEAGYTSRGKIGCTQPRRVAAMSVAKRVSEEFGCCLGQEVGYTIRFEDCTSPETVIKYMTDGMLLRECLIDPDLTQYAIIMLDEAHERTIHTDVLFGLLKKTVQKRQDMKLIVTSATLDAVKFSQYFYEAPIFTIPGRTYPVEILYTKEPETDYLDASLITVMQIHLTEPPGDILVFLTGQEEIDTACEILYERMKSLGPDVPELIILPVYSALPSEMQTRIFDPAPPGSRKVVIATNIAETSLTIDGIYYVVDPGFVKQKVYNSKTGIDQLVVTPISQAQAKQRAGRAGRTGPGKCYRLYTERAYRDEMLTTNVPEIQRTNLASTVLSLKAMGINDLLSFDFMDAPPMETLITAMEQLYTLGALDDEGLLTRLGRRMAEFPLEPMLCKMLIMSVHLGCSEEMLTIVSMLSVQNVFYRPKDKQALADQKKAKFHQTEGDHLTLLAVYNSWKNNKFSNPWCYENFIQARSLRRAQDIRKQMLGIMDRHKLDVVSCGKSTVRVQKAICSGFFRNAAKKDPQEGYRTLIDQQVVYIHPSSALFNRQPEWVVYHELVLTTKEYMREVTTIDPRWLVEFAPAFFKVSDPTKLSKQKKQQRLEPLYNRYEEPNAWRISRAFRRR

SEQ ID NO: 777872 - protein, 597 aa, Homo sapiens
MSVAKRVSEEFGCCLGQEVGYTIRFEDCTSPETVIKYMTDGMLLRECLIDPDLTQYAIIMLDEAHERTIHTDVLFGLLKKTVQKRQDMKLIVTSATLDAVKFSQYFYEAPIFTIPGRTYPVEILYTKEPETDYLDASLITVMQIHLTEPPGDILVFLTGQEEIDTACEILYERMKSLGPDVPELIILPVYSALPSEMQTRIFDPAPPGSRKVVIATNIAETSLTIDGIYYVVDPGFVKQKVYNSKTGIDQLVVTPISQAQAKQRAGRAGRTGPGKCYRLYTERAYRDEMLTTNVPEIQRTNLASTVLSLKAMGINDLLSFDFMDAPPMETLITAMEQLYTLGALDDEGLLTRLGRRMAEFPLEPMLCKMLIMSVHLGCSEEMLTIVSMLSVQNVFYRPKDKQALADQKKAKFHQTEGDHLTLLAVYNSWKNNKFSNPWCYENFIQARSLRRAQDIRKQMLGIMDRHKLDVVSCGKSTVRVQKAICSGFFRNAAKKDPQEGYRTLIDQQVVYIHPSSALFNRQPEWVVYHELVLTTKEYMREVTTIDPRWLVEFAPAFFKVSDPTKLSKQKKQQRLEPLYNRYEEPNAWRISRAFRRR

SEQ ID NO: 777873 - protein, 582 aa, Homo sapiens
LFLATVPTRARVSVSPRGPRCLRRSLCRAVTCTGRGSRREDAGTPGSREMDSVAFEDVAVNFTLEEWALLDPSQKNLYRDVMRETFRNLASVGKQWEDQNIEDPFKIPRRNISHIPERLCESKEGGQGEETFSQIPDGILNKKTPGVKPCESSVCGEVGMGPSSLNRHIRDHTGREPNEYQEYGTKSYTRNQCGRALSYHRSFQYVKGLILEGKPYDCKECGETFISLVSIRRHMLTHRGGVPYKCKVCGKAFDYPSLFRIHERSHTGEKPYECKQCGKAFSCSSYIRIHERTHTGDKPYECKQCGKAFSCSKYIRIHERTHTGEKPYECKQCGKAFRCASSVRSHERTHTGEKLFECKECGKALTCLASVRRHMIKHTGNGPYKCKVCGKAFDFPSSFRIHERTHTGEKPYDCKQCGKAFSCSSSFRKHERIHTGEKPYKCTKCGKAFSRSSYFRIHERTHTGEKPYECKQCGKAFSRSTYFRVHEKIHTGEKPYENPNPKLQLSQFFHEHKRSHIEKPHESKKFGKAFSPFCFFQLRERIHSGERPCKIIGFKLRETCDRTVKPRVGVGSLDCVMSVLVG

SEQ ID NO: 777874 - protein, 39 aa, Homo sapiens
MALTRMMPRADTALPGPEAKADNGTRGRRKKWGAPKPSS

SEQ ID NO: 777875 - protein, 121 aa, Homo sapiens [sequence omitted]

SEQ ID NO: 777876 - protein, 54 aa, Homo sapiens
LTGSGVQSSSSAVHSIMLYPRALVRDIKRLSLPLNNLKPNYTDNHNNDLDLKSR

SEQ ID NO: 777877 - protein, 195 aa, Homo sapiens
MINYKSLLALLFILASWIIFTVFQNSTKVWSALNLSISLHYWNNSTKSLFPKTPLISLKPLTETELRIKEIIEKLDQQIPPRPFTHVNTTTSATHSTATILNPRDTYCRGDQLHILLEVRDHLGRRKQYGGDFLRARMSSPALMAGASGKVTDFNNGTYLVSFTLFWEGQVSLALLLIHPSEGVCSSLECKEPRL

SEQ ID NO: 777878 - protein, 132 aa, Homo sapiens
MINYKSLLALLFILASWIIFTVFQNSTKVWSALNLSISLHYWNNSTKSLFPKTPLISLKPLTETELRIKEIIEKLDQQIPPRPFTHVNTTTSATHSTATILNPRDTYCRGDQLHILLEVKCGCRDYGKIQYN

SEQ ID NO: 777879 - protein, 124 aa, Homo sapiens
GRTCTAWGACHSTASWLRYARDSPLGARQTSKPVGWPPASCEGAGIGAWKMSSDLPKVMQTTPDGCLVNWKLAEPPDSSVSSWLHHAVSSVQSSTEQSLGSPLSGFRSQLRSPAARWEQGPVDL

SEQ ID NO: 777880 - protein, 96 aa, Homo sapiens
PDYSPKALHDPAPFTAPGSLPTSCSQPTDHRLPHAPSPRISSTSASWLFLELPEFTPVSRTFLCFSLDRRHPSQFTWLTRFIQVSSPVSPPCDPWI

SEQ ID NO: 777881 - protein, 104 aa, Homo sapiens
LKYKIFFLILSKAKYFYRKVCPYRWSNDGVSLCQSDWSAVARSQLTATSASRVQEILSSSWYYRGPGQCQHQEPHMRWRGQWTCSSTWCCTSGRSCSLHHCSPS

SEQ ID NO: 777882 - protein, 66 aa, Homo sapiens
KEAKKAAKVQKLSKNEVLMVNIGSLSTGGRVSAVKADLGKIVLTNPVCTEVGEKIALSRRVEKHWR

SEQ ID NO: 777883 - protein, 472 aa, Homo sapiens
MAGGEAGVTLGQPHLSRQDLTTLDVTKLTPLSHEVISRQATINIGTIGHVAHGKSTVVKAISGVHTVRFKNELERNITIKLGYANAKIYKLDDPSCPRPECYRSCGSSTPDEFPTDIPGTKGNFKLVRHVSFVDCPGHDILMATMLNGAAVMDAALLLIAGNESCPQPQTSEHLAAIEIMKLKHILILQNKIDLVKESQAKEQYEQILAFVQGTVAEGAPIIPISAQLKYNIEVVCEYIVKKIPVPPRDFTSEPRLIVIRSFDVNKPGCEVDDLKGGVAGGSILKGVLKVGQEIEVRPGIVSKDSEGKLMCKPIFSKIVSLFAEHNDLQYAAPGGLIGVGTKIDPTLCRADRMVGQVLGAVGALPEIFTELEISYFLLRRLLGVRTEGDKKAAKVQKLSKNEVLMVNIGSLSTGGRVSAVKADLGKIVLTNPVCTEVGEKIALSRRVEKHWRLIGWGQIRRGVTIKPTVDDD

SEQ ID NO: 777884 - protein, 472 aa, Homo sapiens; identical to SEQ ID NO: 777883

SEQ ID NO: 777885 - protein, 472 aa, Homo sapiens; identical to SEQ ID NO: 777883

SEQ ID NO: 777886 - protein, 472 aa, Homo sapiens; identical to SEQ ID NO: 777883

SEQ ID NO: 777887 - protein, 472 aa, Homo sapiens; identical to SEQ ID NO: 777883

SEQ ID NO: 777888 - protein, 472 aa, Homo sapiens; identical to SEQ ID NO: 777883

SEQ ID NO: 777889 - protein, 472 aa, Homo sapiens; identical to SEQ ID NO: 777883

SEQ ID NO: 777890 - protein, 472 aa, Homo sapiens; identical to SEQ ID NO: 777883

SEQ ID NO: 777891 - protein, 472 aa, Homo sapiens; identical to SEQ ID NO: 777883

SEQ ID NO: 777892 - protein, 472 aa, Homo sapiens; identical to SEQ ID NO: 777883

SEQ ID NO: 777893 - protein, 472 aa, Homo sapiens; identical to SEQ ID NO: 777883

SEQ ID NO: 777894 - protein, 452 aa, Homo sapiens [sequence omitted]

SEQ ID NO: 777895 - protein, 143 aa, Homo sapiens
LLIICLQVGQEIEVRPGIVSKDSEGKLMCKPIFSKIVSLFAEHNDLQYAAPGGLIGVGTKIDPTLCRADRMVGQVLGAVGALPEIFTELEISYFLLRRLLGVRTEGDKKAAKVQKLSKNEVLMVNIGSLSTGGRVSAVKADLV

SEQ ID NO: 777896 - protein, 262 aa, Homo sapiens
MAGGEAGVTLGQPHLSRQDLTTLDVTKLTPLSHEVISRQATINIGTIGHVAHGKSTVVKAISGVHTVRFKNELERNITIKLGYANAKIYKLDDPSCPRPECYRSCGSSTPDEFPTDIPGTKGNFKLVRHVSFVDCPGHDILMATMLNGAAVMDAALLLIAGNESCPQPQTSEHLAAIEIMKLKHILILQNKIDLVKESQAKEQYEQILAFVQGTVAEGAPIIPISAQLKYNIEVVCEYIVKKIPVPPRIYLNPVCVDFVSQR

SEQ ID NO: 777897 - protein, 183 aa, Homo sapiens
MAGGEAGVTLGQPHLSRQDLTTLDVTKLTPLSHEVISRQATINIGTIGHVAHGKSTVVKAISGVHTVRFKNELERNITIKLGYANAKIYKLDDPSCPRPECYRSCGSSTPDEFPTDIPGTKGNFKLVRHVSFVDCPGHDILMATMLNGAAVMDAALLLIGKYLTIGLDKSMWNKSKMKYLKGN

SEQ ID NO: 777898 - protein, 114 aa, Homo sapiens [sequence omitted]

SEQ ID NO: 777899 - protein, 107 aa, Homo sapiens
  misc_feature (100)..(100): Xaa can be any naturally occurring amino acid
MAGGEAGVTLGQPHLSRQDLTTLDVTKLTPLSHEVISRQATINIGTIGHVAHGKSTVVKAISGVHTVRFKNELERNITIKLGYANAKLDERITRIDGDMXARRTFSA

SEQ ID NO: 777900 - protein, 472 aa, Homo sapiens; identical to SEQ ID NO: 777883

SEQ ID NO: 777901 - protein, 472 aa, Homo sapiens; identical to SEQ ID NO: 777883

SEQ ID NO: 777902 - protein, 412 aa, Homo sapiens
MAGGEAGVTLGQPHLSRQDLTTLDVTKLTPLSHEVISRQATINIGTIGHVAHGKSTVVKAISGVHTVRFKNELERNITIKLGYANAKIYKLDDPSCPRPECYRSCGSSTPDEFPTDIPGTKGNFKLVRHVSFVDCPGHDILMATMLNGAAVMDAALLLIAGNESCPQPQTSEHLAAIEIMKLKHILILQNKIDLVKESQAKEQYEQILAFVQGTVAEGAPIIPISAQLKYNIEVVCEYIVKKIPVPPRDFTSEPRLIVIRSFDVNKPGCEVDDLKGGVAGGSILKGVLKVGQEIEVRPGIVSKDSEGKLMCKPIFSKIVSLFAEHNDLQYAAPGGLIGVGTKIDPTLCRADRMVGQVLGAVGALPEIFTELEISYFLLRRLLGVRTEGDKKAAKFNWLGSDKKRSDNQANSR

SEQ ID NO: 777903 - protein, 452 aa, Homo sapiens [sequence omitted]

SEQ ID NO: 777904 - protein, 309 aa, Homo sapiens
GRRGSTHASHLAAIEIMKLKHILILQNKIDLVKESQAKEQYEQILAFVQGTVAEGAPIIPISAQLKYNIEVVCEYIVKKIPVPPRDFTSEPRLIVIRSFDVNKPGCEVDDLKGGVAGGSILKGVLKVGQEIEVRPGIVSKDSEGKLMCKPIFSKIVSLFAEHNDLQYAAPGGLIGVGTKIDPTLCRADRMVGQVLGAVGALPEIFTELEISYFLLRRLLGVRTEGDKKAAKVQKLSKNEVLMVNIGSLSTGGRVSAVKADLGKIVLTNPVCTEVGEKIALSRRVEKHWRLIGWGQIRRGVTIKPTVDDD

SEQ ID NO: 777905 - protein, 163 aa, Homo sapiens
MCKPIFSKIVSLFAEHNDLQYAAPGGLIGVGTKIDPTLCRADRMVGQVLGAVGALPEIFTELEISYFLLRRLLGVRTEGDKKAAKVQKLSKNEVLMVNIGSLSTGGRVSAVKADLGKIVLTNPVCTEVGEKIALSRRVEKHWRLIGWGQIRRGVTIKPTVDDD

SEQ ID NO: 777906 - protein, 245 aa, Homo sapiens
MAGGEAGVTLGQPHLSRQDLTTLDVTKLTPLSHEVISRQATINIGTIGHVAHGKSTVVKAISGVHTVRFKNELERNITIKLGYANAKIYKLDDPSCPRPECYRSCGSSTPDEFPTDIPGTKGNFKLVRHVSFVDCPGHDILMATMLNGAAVMDAALLLIAGNESCPQPQTSEHLAAIEIMKLKHILILQNKIDLVKESQAKEQYEQILAFVQGRGLQIHFSVMGKDSRLLVEYNRCTGRQLWRTM

SEQ ID NO: 777907 - protein, 166 aa, Homo sapiens
MAGGEAGVTLGQPHLSRQDLTTLDVTKLTPLSHEVISRQATINIGTIGHVAHGKSTVVKAISGVHTVRFKHMTLSTQHNHSPHQALGSCSMLKHLSQLACTQRLPLGPSTCSSASLVEQPDHHHGTAAFPHGTIHRGHLNRGTLSTHIHDPDTHVLSLSRYDTMVA

SEQ ID NO: 777908 - protein, 294 aa, Homo sapiens
MAPWKKGFSKNQYGCGGEGAPRRVNRPTVWTHIRRASPQGKNTGEQEPTDGAGELSTHSNDKKQRHAAKQTPRKAFLPDSNKSQHIRTNYTRKESHQQPAANSLKQQDKRSSAPQKAEKRSKQDNEKEMDTTQPHEQTGGAQTERERRENTTKQKTNNRQNTREQKTQQNHEKTNKKHKPTVEQERAAGRKEDRGAERKQARETRDTREKEEGSASHGKENETERKDRKGRERNEKERRKRERTKEARHEENRQQKEKREASEERSYERRKKHEARTKNDREARRESKGERQCT

SEQ ID NO: 777909 - protein, 79 aa, Homo sapiens
WAEGQQPPCWGQGFVLIEESKAIHSFIHSSTYPPWSGHLCCAWPPVPGLLGTDPAVWTRLWPWEPCAQPPGTQLLSIEV

SEQ ID NO: 777910 - protein, 127 aa, Homo sapiens
PGSSDSAAPAFQEAEITGAHQARLIFIFLVGEQSGSGLHFPEDSAGQYHVSRDFGFLLARWQNLSLCPISCCHALESGVTWPGRPRAELEKAEDEESGSGPFVCGGLRRGVCVCDCDGCRGSSWSVT

SEQ ID NO: 777911 - protein, 228 aa, Homo sapiens
ACSNPSQQVRSRPWSRHHSKASWAEFSILRELLAQDVLCDVSKPYRLATPVYASLTPRSRPRPPKDSQASPGRPSSVEEVRIAASPKSTGPRPSLRPLRLEVKREVRRPARLQQQEEEDEEEEEEEEEEEKEEEEEWGRKRPGRGLPWTKLGRKLESSVCPVRRSRRLNPELGPWLTFADEPLVPSEPQGALPSLCLAPKAYDVERELGSPTDEDSGQDQQLLRGPQI

SEQ ID NO: 777912 - protein, 450 aa, Homo sapiens
QFEPVEIKVVKKSEERPMTAEELREREFLERKHRRKKLETDGKLPPTVSKKAPSQKESVGTKLSKGSGDRHPSSKGMPLPHAEKKSRPSMANEKHLALSSSKSMPGERIKAGSGNSSQPSLREGHDKPVFNGAGKPHSSTSSPSVPKTSASRTQKSAVEHKAKKSLSHPSHSRPGPMVTPHNKAKSPGVRQPGSSSSSAPGQPSTGVARPTVSSGPVPRRQNGSSSSGPERSISGSKKPTNDSNPSRRTVSGTCGPGQPASSSGGPGRPISGSVSSARPLGSSRGPGGPVSSPHELRRPVSGLGPPGRSVSGPGRSISGSIPAGRTVSNSVPGRPVSSLGPGQTVSSSGPTIKPKCTVVSETISSKNIISRSSNGQMNGMKPPLSGYRAAQGPQRLPFPTGYKRQREYEEEDDDDDEYDSEMEDFIEDEGEPQEEISKHIREIFGYDRKK

SEQ ID NO: 777913 - protein, 171 aa, Homo sapiens
  misc_feature (8)..(8): Xaa can be any naturally occurring amino acid
LFLWPTLXLHRPAARPRLWGARRGSKQMMQWHKERACAPEPTSQTPPASPLSKLSRPYLVELLSRRAGRPDPEPSEPSKEDQESSDRRPPSPPGPEERKGQKRDEEEEATERKPASPPLPATQQEKPSQTPEAGRKTSSAQHQRHHRNSSARSTHPAPATPSSWPPPAVDG

SEQ ID NO: 777914 - protein, 164 aa, Homo sapiens
  misc_feature (8)..(8): Xaa can be any naturally occurring amino acid
LFLWPTLXLHRPAARPRLWGARRGSKQMMQWHKERACAPEPTSQTPPASPLSKLSRPYLVELLSRRAGRPDPEPSEPSKEDQESSDRRPPSPPGPEERKGQKRDEEEEATERKPASPPLPATQQEKPSQTPEAGRKEADASEQTLLRWLQTYRESGNCSRAAGN

SEQ ID NO: 777915 - protein, 48 aa, Homo sapiens
MLCPDWTPWCLSIILSRVTFPCTVTLRSFKQWFPKVTEQVVVWCVCVC

SEQ ID NO: 777916 - protein, 175 aa, Homo sapiens
PSLGFPAQMNHQKGPSPSFGVQPCGPHDSARGGMIPHPQSRGPFPTCQLKSELDMLVGKCREEPLEGDMSSPNSTGIQDPLLGMLDGREDLEREEKREPESVYETDCRWDGCSQEFDSQEQLVHHINSEHIHGERKEFVCHWGGCSRELRPFKAQYMLVVHMRRHTGEKPHKCTY

SEQ ID NO: 777917 - protein, 118 aa, Homo sapiens
DVSMAAAPDYPAPFYPSSGRNPSPRPFPLKGNGPKVGRAARLPRSIQVKRESDQTGEPRGPIFRDLTGHLDRPLQLGTFQENEGNVVIAPEPHSSSEVLFTSLWKKIGYLFLVERVEI

SEQ ID NO: 777918 - protein, 46 aa, Homo sapiens
HHLRTSVPDPLEKNLYFNKIPRWFAYTLSVSHAASELLPEEWLSDQ

SEQ ID NO: 777919 - protein, 280 aa, Homo sapiens
MPADIMEKNSSSPVAATPASVNTTPDKPKTASEHRKSSKPIMEKRRRARINESLSQLKTLILDALKKDSSRHSKLEKADILEMTVKHLRNLQRAQMTAALSTDPSVLGKYRAGFSECMNEVTRFLSTCEGVNTEVRTRLLGHLANCMTQINAMTYPGQPHPALQAPPPPPPGPGGPQHAPFAPPPPLVPIPGGAAPPPGGAPCKLGSQAGEAAKVFGGFQVVPAPDGQFAFLIPNGAFAHSGPVIPVYTSNSGTSVGPNAVSPSSGPSLTADSMWRPWRN

SEQ ID NO: 777920 - protein, 280 aa, Homo sapiens; identical to SEQ ID NO: 777919

SEQ ID NO: 777921 - protein, 280 aa, Homo sapiens; identical to SEQ ID NO: 777919

SEQ ID NO: 777922 - protein, 280 aa, Homo sapiens; identical to SEQ ID NO: 777919

SEQ ID NO: 777923 - protein, 107 aa, Homo sapiens
MPADIMEKNSSSPVAATPASVNTTPDKPKTASEHRKSSKPIMEKRRRARINESLSQLIFWFSKTALLIIFQYTELFYSFYIVNMTVVLYLLNIGVGLKYNKSVPYQK

SEQ ID NO: 777924 - protein, 414 aa, Homo sapiens
MPADIMEKNSSSPVAATPASVNTTPDKPKTASEHRKSSKPIMEKRRRARINESLSQLKTLILDALKKDKLEKADILEMTVKHLRNLQRAQMTAALSTDPSVLGKYRAGFSECMNEVTRFLSTGNAARSFNEKTNTFSATKSETPRPAGSGTRWYCVLPGGRARPYSLGSRDNACAPWPGGGTPSTLKQLTRGSLSFLAYSMQSSRHSKLEKADILEMTVKHLRNLQRAQMTAALSTDPSVLGKYRAGFSECMNEVTRFLSTCEGVNTEVRTRLLGHLANCMTQINAMTYPGQPHPALQAPPPPPPGPGGPQHAPFAPPPPLVPIPGGAAPPPGGAPCKLGSQAGEAAKVFGGFQVVPAPDGQFAFLIPNGAFAHSGPVIPVYTSNSGTSVGPNAVSPSSGPSLTADSMWRPWRN

SEQ ID NO: 777925 - protein, 123 aa, Homo sapiens
MPADIMEKNSSSPVAATPASVNTTPDKPKTASEHRKSSKPIMEKRRRARINESLSQLKTLILDALKKDSSRHSKLEKADILEMTVKHLRNLQRAQMTGEGGSPRPPVRASRSPRGDFFQTSAR

SEQ ID NO: 777926 - protein, 257 aa, Homo sapiens
MPADIMEKNSSSPVAATPASVNTTPDKPKTASEHRKSSKPIMEKRRRARINESLSQLKTLILDALKKDKLEKADILEMTVKHLRNLQRAQMTAALSTDPSVLGKYRAGFSECMNEVTRFLSTGNAARSFNEKTNTFSATKSETPRPAGSGTRWYCVLPGGRARPYSLGSRDNACAPWPGGGTPSTLKQLTRGSLSFLAYSMQSSRHSKLEKADILEMTVKHLRNLQRAQMTGEGGSPRPPVRASRSPRGDFFQTSAR

SEQ ID NO: 777927 - protein, 558 aa, Homo sapiens
GTGGLSVYKPRPFRSLGLPRAPSVVMAAPASRQVRRRARAAPRPRSAEDWWWDRLAPRGSGYHLLQSDSMLLVLSEPGPARPRAQRRASRRTPRQPPRGPSAAAKPKAGLRSEAAAAPAPAPAPTPTPEEGPDAGWGDRIPLEILVQIFGLLVAADGPMPFLGRAARVCRRWQEAASQPALWHTVTLSSPLVGRPAKGGVKAEKKLLASLEWLMPNRFSQLQRLTLIHWKSQLVGECCPRLTFLKLSGCHGVTADALVMLAKACCQLHSLDLQHSMVESTAVVSFLEEAGSRMRKLWLTYSSQTTAILGALLGSCCPQLQVLEVSTGINRNSIPLQLPVEALQKGCPQLQVLRLLNLMWLPKPPGRGVAPGPGFPSLEELCLASSTCNFVSNEVLGRLLHGSPNLRLLDLRGCARITPAGLQDLPCRELEQLHLGLYGTSDRLTLAKEGSPFLTQKWCHTLRELDLSGQGFSEKDLEQALAAFLSTPGGSHPALCSLNLRGTRVTPSTVSSVISSCPGLLYLNLESCRCLPRGLKRAYRGLEEVQWCLEQLLTSPSPS

SEQ ID NO: 777928 - protein, 564 aa, Homo sapiens
GTGGLSVYKPRPFRSLGLPRAPSVVMAAPASRQVRRRARAAPRPRSAEDWWWDRLAPRGSGYHLLQSDSMLLVLSEPGPARPRAQRRASRRTPRQPPRGPSAAAKPKAGLRSEAAAAPAPAPAPTPTPEEGPDAGWGDRIPLEILVQIFGLLVAADGPMPFLGRAARVCRRWQEAASQPALWHTVTLSSPLVGRPAKGGVKAEKKLLASLEWLMPNRFSQLQRLTLIHWKSQVHPVLKLVGECCPRLTFLKLSGCHGVTADALVMLAKACCQLHSLDLQHSMVESTAVVSFLEEAGSRMRKLWLTYSSQTTAILGALLGSCCPQLQVLEVSTGINRNSIPLQLPVEALQKGCPQLQVLRLLNLMWLPKPPGRGVAPGPGFPSLEELCLASSTCNFVSNEVLGRLLHGSPNLRLLDLRGCARITPAGLQDLPCRELEQLHLGLYGTSDRLTLAKEGSPFLTQKWCHTLRELDLSGQGFSEKDLEQALAAFLSTPGGSHPALCSLNLRGTRVTPSTVSSVISSCPGLLYLNLESCRCLPRGLKRAYRGLEEVQWCLEQLLTSPSPS

SEQ ID NO: 777929 - protein, 300 aa, Homo sapiens
MLAKACCQLHSLDLQHSMVESTAVVSFLEEAGSRMRKLWLTYSSQTTAILGALLGSCCPQLQVLEVSTGINRNSIPLQLPVEALQKGCPQLQVLRLLNLMWLPKPPGRGVAPGPGFPSLEELCLASSTCNFVSNEVLGRLLHGSPNLRLLDLRGCARITPAGLQDLPCRELEQLHLGLYGTSDRLTLAKEGSPFLTQKWCHTLRELDLSGQGFSEKDLEQALAAFLSTPGGSHPALCSLNLRGTRVTPSTVSSVISSCPGLLYLNLESCRCLPRGLKRAYRGLEEVQWCLEQLLTSPSPS

SEQ ID NO: 777930 - protein, 660 aa, Homo sapiens
GTGGLSVYKPRPFRSLGLPRAPSVVMAAPASRQVRRRARAAPRPRSAEDWWWDRLAPRGSGYHLLQSDSMLLVLSEPGPARPRAQRRASRRTPRQPPRGPSAAAKPKAGLRSEAAAAPAPAPAPTPTPEEGPDAGWGDRIPLEILVQIFGLLVAADGPMPFLGRAARVCRRWQEAASQPALWHTVTLSSPLVGRPAKGGVKAEKKLLASLEWLMPNRFSQLQRLTLIHWKSQVHPVLKLVGECCPRLTFLKLSGCHGVTADALVMLAKACCQLHSLDLQHSMVESTAVVSFLEEAGSRMRKLWLTYSSQTTAILGALLGSCCPQLQVLEVSTGINRNSIPLQLPVEALQKGCPQLQVLRLLNLMWLPKPPGRGVAPGPGFPSLEELCLASSTCNFVSNEVLGRLLHGSPNLRLLDLRGCARITPAGLQDLPCRELEQLHLGLYGTSDRLTLAKEGSPFLTQKWCHTLRELDLSGQGFSEKDLEQALAAFLSTPGGSHPALCSLNLRGTRVTPSTVRSASPTPVPGASVAVTVSAWAWKLCPAWPETSRGQRGMHTVQAPAWGGPEDTRGTGLGLGGYGWQSQVSNTSRHSSLAWPSPSEATAQLPVVCPPHSSVISSCPGLLYLNLESCRCLPRGLKRAYRGLEEVQWCLEQLLTSPSPS

SEQ ID NO: 777931 - protein, 300 aa, Homo sapiens; identical to SEQ ID NO: 777929

SEQ ID NO: 777932 - protein, 435 aa, Homo sapiens
GTGGLSVYKPRPFRSLGLPRAPSVVMAAPASRQVRRRARAAPRPRSAEDWWWDRLAPRGSGYHLLQSDSMLLVLSEPGPARPRAQRRASRRTPRQPPRGPSAAAKPKAGLRSEAAAAPAPAPAPTPTPEEGPDAGWGDRIPLEILVQIFGLLVAADGPMPFLGRAARVCRRWQEAASQPALWHTVTLSSPLVGRPAKGGVKAEKKLLASLEWLMPNRFSQLQRLTLIHWKSQVHPVLKLVGECCPRLTFLKLSGCHGVTADALVMLAKACCQLHSLDLQHSMVESTAVVSFLEEAGSRMRKLWLTYSSQTTAILGALLGSCCPQLQVLEVSTGINRNSIPLQLPVEALQKGCPQLQVLRLLNLMWLPKPPGRGVAPGPGFPSLEELCLASSTCNFVSNEVLGRLLHGSPNLRLLDLRGCARITPAGLQDLPCRAL

SEQ ID NO: 777933 - protein, 103 aa, Homo sapiens
MLAKACCQLHSLDLQHSMVESTAVVSFLEEAGSRMRKLWLTYSSQTTAILGALLGSCCPQLQVLEVSTGINRNSIPLQLPVEALQKGCPQLQVPGALPLPPVT

SEQ ID NO: 777934 - protein, 130 aa, Homo sapiens
LPVTDASSVSTGHATSLPVTDASSVFTGHATSLPVTIPSSASSGHTTPLPVTDASSVSTGHATSLPVTDASSVSTGHATPLPVTDASSVSTGHATPLPVTDTSSVSTGHATPLPLTSLSSVSTGDTTPLP

SEQ ID NO: 777935 - protein, 117 aa, Homo sapiens
MDSSGPSAISPASLTEDGEFQTKLILPPGKPAPSAVIDGLRSSALGLNPKQEEEAGVLRCPSGRPGAASNCLCVWDLTGEGVPKPSISPSWPMDSGFPRRGKCARATGKAELCGPAS

SEQ ID NO: 777936 - protein, 67 aa, Homo sapiens
AIAAMLCCGEFPPVQTTQTPLSWQAKMADSSHGNGGCPSLQELSHLRQSPVSCRWPGWNSKSVDLIL

SEQ ID NO: 777937 - protein, 71 aa, Homo sapiens
HGALQYTKAETQSPQVERGSLDGISYLQSSWVPIEPPTFCLSQIGVTIFILSDFRPPSESDVRSSPIEERK

SEQ ID NO: 777938 - protein, 118 aa, Homo sapiens
PGTRCIPVFPAGPSESSLSASGNLAPLTPLASAQPWCTCENCPPRPGGESPGVQRLCTAPSGLAVSTQNIFRSCLGGSCPLASVFLFHIRACGACILSASPNLLVGSSPNSLCTLKFI

SEQ ID NO: 777939 - protein, 141 aa, Homo sapiens
AYDQLTLTVTNFFKQEGDRLSDEDLYKFLADMRRPSSVLRRLRPITAQLKIDISPAPENPHYCLTPELLQVKLYPDSRVRPTREILEFPARWFMFQTLLTEIFSTYTLRVLILPIVKVLLGNITVKVQFMYGRGSKAMPCR

SEQ ID NO: 777940 - protein, 189 aa, Homo sapiens [sequence omitted]

SEQ ID NO: 777941 - protein, 112 aa, Homo sapiens
LSLASVTFTQNTMGTPCPFAAGFLCHSFGMGVENAHPQPLEPGVGGKAILSCTYPPLSRSRAGWVQTPTSSTSHAVSFLHTVAHRLSLGTREEFSNHLAEEIPPVPWTTTRT

SEQ ID NO: 777942 - protein, 175 aa, Homo sapiens
MSHSQHSPYLQSYHNSSAAAQTRGDDTDQQKTTVIENGEIRFNGKGKKIRKPRTIYSSLQLQALNHRFQQTQYLALPERAELAASLGLTQTQVKIWFQNKRSKFKKLLKQGSNPHESDPLQGSAALSPRSPALPPVWDVSASAKGVSMPPNSYMPGYSHWYSSPHQDTMQRPQMM

SEQ ID NO: 777943 - protein, 218 aa, Homo sapiens
HCSGQGLGQGDYADAGSTRAEWTKRGRGIIGIFRGNPYWALGRFVACHARSREMAAVASRVTAPLYYLLTDQQKTTVIENGEIRFNGKGKKIRKPRTIYSSLQLQALNHRFQQTQYLALPERAELAASLGLTQTQVKIWFQNKRSKFKKLLKQGSNPHESDPLQGSAALSPRSPALPPVWDVSASAKGVSMPPNSYMPGYSHWYSSPHQDTMQRPQMM

SEQ ID NO: 777944 - protein, 95 aa, Homo sapiens
DATLEAMSALGDPVLLAPTNYTKGHMSQIPFLKNTKKIKCHQMAGEGGAGYKIRVCPKASQCCWSLSDESSLQKNKKEADVQGEEEIRDCESPEK

SEQ ID NO: 777945 - protein, 131 aa, Homo sapiens
GPQLCQHMACRLLSNGCLKIEAIKLAEQKHREERRRRATVVVGDLHPLRDALPELLGLEAGSRRQARSRESNKPRPSELSRMSAAQRQQLLEEERTRFQELLASPAYRASPLVAIGQTLARQMQLEDGGQL

SEQ ID NO: 777946 - protein, 135 aa, Homo sapiens
GPQLCQHMACRLLSNGCLKIEAIKLAEQKHREERRRRATVVVGDLHPLRDALPELLGLEAGSRRQARRGRKDPVSGAAGQSGLQSQPPGGHRADAGPADAAGRWRPALTRAAGMPQLLRTHVGQVESAGPSRTMA

SEQ ID NO: 777947 - protein, 85 aa, Homo sapiens
MPLRVLEEPGEPLRGQFVSLEPPMWAQGGRLGLGLDPSWGKVQVCAMQLLAQVGPLWAGSCPGARGMDTGASSHGKLISFHFYTE

SEQ ID NO: 777948 - protein, 68 aa, Homo sapiens
AADDSQRIPPALIFGMNTICHLIFPQRKSKARQYVKRPAQEQGKFSPPRNLLSPERSLFCGKNRGFEE

SEQ ID NO: 777949 - protein, 227 aa, Homo sapiens
LCLNIIPTFANLIDYPSMKNALIPRIKNACLQTSSLAVRVNSLVCLGKILEYLDKWFVLDDILPFLQQIPSKEPAVLMGILGIYKCTFTHKKLGITKEQLAGKVLPHLIPLSIENNLNLNQKFSMDVVCLPICFMFNSFISVIEEMLNRLESEHKTKLEQLHIMQEQQKSLDIGNQMNVSEEMKVTNIGNQQIDKVFNNIGADLLTGSESENKEDGLQNKHKRVSFL

SEQ ID NO: 777950 - protein, 36 aa, Homo sapiens
MLSLRCREHPGRVNGIKRDMCTGSEGFTAIGGSEHK

SEQ ID NO: 777951 - protein, 118 aa, Homo sapiens
MHGKDLGKWHSDWENSISRGTEVGEFRVQGRAKTVTNNFNPLHTGVSKKENVSVGLASGAAGSRASKTHQDSASSSQLSLLFLLGTGWSPAAPDRLPSSFTSLKKRAPLSHGSNRNPG

SEQ ID NO: 777952 - protein, 94 aa, Homo sapiens
MRTPVGLAGGPAWEVPHWAGPQDLHTRENSNLCQPQNTGGGGCRPPLGGPSLGRTPIPRCQGELKSLSAPEYWRGWGELAGGLSWKDPHWAGTG

SEQ ID NO: 777953 - protein, 214 aa, Homo sapiens
GILLMEVLVLAVKQLFPEFEFMWLVDEAKKNLPLELDFLNEGRNAEKVSQMLRHFDFLKVPRIHWDLSTERVLLMEFADGGQVNDRDYMERNKIDVNEISRHLGKMYSEMIFVNGFVHCDPHPGNVLVRKHPGTGKAEIVLLDHGLYQMLTEEFRLNYCHLWQSLIWTDMKRVKEYSQRLGAGDLYPLFACMLTARSWDSVNRGISQAPVTATE

SEQ ID NO: 777954 - protein, 109 aa, Homo sapiens
VFCSDGSHYVAQAGLVLLGSFIPPTLASQSVGIAGVAIAPGLFPLFISSEWLSGDGDNEFQLSRKRLKTPTCPKSCVAVSRGSWSPYYCFQSTPMAHGSAWSVGSRPTS

SEQ ID NO: 777955 - protein, 121 aa, Homo sapiens
  misc_feature (121)..(121): Xaa can be any naturally occurring amino acid
HLGLSGDTAVPAPGPHGPDSACPPLVGRAAFWFLCAPSFCPSPDLCPCCFLCLTVPPTCTCACTHTHTHVSHTWPGRIECIWVASNRNRPWLIEGGITKDDSPSRRLLILMWDDEVNMAGX

SEQ ID NO: 777956 - protein, 117 aa, Homo sapiens
MSPSHTPAVGSGELSTGAASLWRRDPLPSLRRTLAANTSGYEPGARPGCLCHPLSPAQGRQVTPTPGCASIHSAGEAGDRHFWSPLPGVHLCCALRGLGGLGQRCSSYSASVSSPVK

SEQ ID NO: 777957 - protein, 118 aa, Homo sapiens
MPSFPLLFMTAMGTPSCWSSILRNSFTGTPSRFCCQVHGEDVMIGPTRSVGKFWRLFCLRKCNSKVMIDPRKFKASGIKAVMFPEFGGHITISINFALNGLSSLSHAYDVFFCNIIPH

SEQ ID NO: 777958 - protein, 120 aa, Homo sapiens
ARNNIVRIFKLGWSGQGPGACLAFSPGSSPANPANRALTSSSWVGMNPRSIQSAFLGTSNHSNINNNKNNNRSYHLFLNMPAVILVTLHAFPHLIFTIALQNAGCYYFHFENEETEAQRG

SEQ ID NO: 777959 - protein, 487 aa, Homo sapiens
MASLVAYDDSDSEAETEHAGSFNATGQQKDTSGVARPPGQDFASGTLDVPKAGAQPTKHGSCEDPGGYRLPLAQLGRSDRGSCPSQRLQWPGKEPQVTFPIKEPSCSSLWTSHVPASHMPLAAARFKQVKLSRNFPKSSFRAQSESETVGKNGSSFQKKKCEDCVVPYTPRRLRQRQALSTETGKGKDVEPQGPPAGRAPAPLYVGPGVSEFIQPYLNSHYKETTVPRKVLFHLRGHRGPVNTIQWCPVLSKSHMLLSTSMDKTFKEPSYLVVEVTLESLPVKFHPKDHNIFLCGGFSSEMKAWDIRTGKVMRSYKATIQQTLDILFLREGSEFLSSTDASTRDSADRTIIAWDFRTSAKISNQIFHERFTCPSLALHPREPVFLAQTNGNYLALFSTVWPYRMSRRRRYEGHKVEGYSVGCECSPGGDLLVTGSADGRVLMYSFRTASRACTLQGHTQACVGTTYHPVLPSVLATCSWGGDMKIWH

SEQ ID NO: 777960 - protein, 543 aa, Homo sapiens
MTARTLSLMASLVAYDDSDSEAETEHAGSFNATGQQKDTSGVARPPGQDFASGTLDVPKAGAQPTKHGSCEDPGGYRLPLAQLGRSDRGSCPSQRLQWPGKEPQVTFPIKEPSCSSLWTSHVPASHMPLAAARFKQVKLSRNFPKSSFRAQSESETVGKNGSSFQKKKCEDCVVPYTPRRLRQRQALSTETGKGKDVEPQGPPAGRAPAPLYVGPGVSEFIQPYLNSHYKETTVPRKVLFHLRGHRGPVNTIQWCPVLSKSHMLLSTSMDKTFKVERRGLRALPADLLPAHRGSAGRRWAPCGRRILSGGFDFALHLTDLETGTQLFSGRSDFRITTLKFHPKDHNIFLCGGFSSEMKAWDIRTGKVMRSYKATIQQTLDILFLREGSEFLSSTDASTRDSADRTIIAWDFRTSAKISNQIFHERFTCPSLALHPREPVFLAQTNGNYLALFSTVWPYRMSRRRRYEGHKVEGYSVGCECSPGGDLLVTGSADGRVLMYSFRTASRACTLQGHTQACVGTTYHPVLPSVLATCSWGGDMKIWH

SEQ ID NO: 777961 - protein, 543 aa, Homo sapiens; identical to SEQ ID NO: 777960

SEQ ID NO: 777962 - protein, 92 aa, Homo sapiens
GDNLLARYEAWVVSFLRAKVKDPLCEGSAEVGSHAPSRPLPALHSGRNLSFPCEKGQRVQASQVQREGPQPLLAAKHADPMDIWGKGSLGCW

SEQ ID NO: 777963 - protein, 146 aa, Homo sapiens
MTDTPGESWAKASWPVSLSSTAGGLGGVCRGVPGAPGVRVCRGLQGVQGLGELSNFLELIPGTHFQRPHRLTAEPCLVYMGRVEGAWGTESCVSPEGGKTCRGTGRKRCGRADGMGTSSTATLPLARVLATPHKTSTHHTQAQRGR

SEQ ID NO: 777964 - protein, 79 aa, Homo sapiens
MEPPGGAYLHLGAVTSPVCTARVLQLAFGCTTFSLVAHRGGFAGVQGTFCMDAWGFCFAVSALVVACEFTRLHGCLRLS

SEQ ID NO: 777965 - protein, 79 aa, Homo sapiens; identical to SEQ ID NO: 777964

SEQ ID NO: 777966 - protein, 319 aa, Homo sapiens
MSVGFIGAGQLAFALAKGFTAAGVLAAHKIMASSPDMDLATVSALRKMGVKLTPHNKETVQHSDVLFLAVKPHIIPFILDEIGADIEDRHIVVSCAAGVTISSIEKKLSAFRPAPRVIRCMTNTPVVVREGATVYATGTHAQVEDGRLMEQLLSSVGFCTEVEEDLIDAVTGLSGSGPAYAFTALDALADGGVKMGLPRRLAVRLGAQALLGAAKMLLHSEQHPGQLKDNVSSPGGATIHALHVLESGGFRSLLINAVEASCIRTRELQSMADQEQVSPAAIKKTILDKVKLDSPAGTALSPSGHTKLLPRSLAPAGKD

SEQ ID NO: 777967 - protein, 380 aa, Homo sapiens
DGGGAWVRVPRGGRSAEGWVRPAHGSWVGVGLREWWAAVAGWGATSRCHLWGLWARGSPDSMSVGFIGAGQLAFALAKGFTAAGVLAAHKIMASSPDMDLATVSALRKMGVKLTPHNKETVQHSDVLFLAVKPHIIPFILDEIGADIEDRHIVVSCAAGVTISSIEKKLSAFRPAPRVIRCMTNTPVVVREGATVYATGTHAQVEDGRLMEQLLSSVGFCTEVEEDLIDAVTGLSGSGPAYAFTALDALADGGVKMGLPRRLAVRLGAQALLGAAKMLLHSEQHPGQLKDNVSSPGGATIHALHVLESGGFRSLLINAVEASCIRTRELQSMADQEQVSPAAIKKTILDKVKLDSPAGTALSPSGHTKLLPRSLAPAGKD

SEQ ID NO: 777968 - protein, 319 aa, Homo sapiens; identical to SEQ ID NO: 777966

SEQ ID NO: 777969 - protein, 319 aa, Homo sapiens; identical to SEQ ID NO: 777966

SEQ ID NO: 777970 - protein, 319 aa, Homo sapiens; identical to SEQ ID NO: 777966

SEQ ID NO: 777971 - protein, 319 aa, Homo sapiens; identical to SEQ ID NO: 777966

SEQ ID NO: 777972 - protein, 319 aa, Homo sapiens; identical to SEQ ID NO: 777966

SEQ ID NO: 777973 - protein, 319 aa, Homo sapiens; identical to SEQ ID NO: 777966

SEQ ID NO: 777974 - protein, 319 aa, Homo sapiens; identical to SEQ ID NO: 777966

SEQ ID NO: 777975 - protein, 289 aa, Homo sapiens
MASSPDMDLATVSALRKMGVKLTPHNKETVQHSDVLFLAVKPHIIPFILDEIGADIEDRHIVVSCAAGVTISSIEKKLSAFRPAPRVIRCMTNTPVVVREGATVYATGTHAQVEDGRLMEQLLSSVGFCTEVEEDLIDAVTGLSGSGPAYAFTALDALADGGVKMGLPRRLAVRLGAQALLGAAKMLLHSEQHPGQLKDNVSSPGGATIHALHVLESGGFRSLLINAVEASCIRTRELQSMADQEQVSPAAIKKTILDKVKLDSPAGTALSPSGHTKLLPRSLAPAGKD

SEQ ID NO: 777976 - protein, 217 aa, Homo sapiens
MSVGFIGAGQLAFALAKGFTAAGVLAAHKIMASSPDMDLATVSALRKMGVKLTPHNKETVQHSDVLFLAVKPHIIPFILDEIGADIEDRHIVVSCAAGVTISSIEKKLSAFRPAPRVIRCMTNTPVVVREGATVYATGTHAQVEDGRLMEQLLSSVGFCTEVEEDLIDAVTGLSGSGPAYAFTALDALADGGVKMGLPRRLAVRLGAQALLGAAVHG

SEQ ID NO: 777977 - protein, 217 aa, Homo sapiens; identical to SEQ ID NO: 777976

SEQ ID NO: 777978 - protein, 288 aa, Homo sapiens
MSVGFIGAGQLAFALAKGFTAAGVLAAHKIMASSPDMDLATVSALRKMGVKLTPHNKETVQHSDVLFLAVKPHIIPFILDEIGADIEDRHIVVSCAAGVTISSIEKKLSAFRPAPRVIRCMTNTPVVVREGATVYATGTHAQVEDGRLMEQLLSSVGFCTEVEEDLIDAVTGLSGSGPAYGAAKMLLHSEQHPGQLKDNVSSPGGATIHALHVLESGGFRSLLINAVEASCIRTRELQSMADQEQVSPAAIKKTILDKVKLDSPAGTALSPSGHTKLLPRSLAPAGKD

SEQ ID NO: 777979 - protein, 288 aa, Homo sapiens; identical to SEQ ID NO: 777978

SEQ ID NO: 777980 - protein, 395 aa, Homo sapiens
MSVGFIGAGQLAFALAKGFTAAGVLAAHKIMASSPDMDLATVSALRKMGVKLTPHNKETVQHSDVLFLAVKPHIIPFILDEIGADIEDRHIVVSCAAGVTISSIEKKLSAFRPAPRVIRCMTNTPVVVREGATVYATGTHAQVEDGRLMEQLLSSVGFCTEVEEDLIDAVTGLSGSGPAYAFTALDALADGGVKMGLPRRLAVRLGAQALLGAAKMLLHSEQHPGQLKDNVSSPGGATIHALHVLESGGFRSLLINAVEASCIRTRELQSMADQEQVSPAAIKKTILDKMSGPPSSRAREPGGSSPTPTPVSAGTGSFLRAKVKDPLCEGSAEVGSHAPSRPLPALHSGRNLSFPCEKGQRVQASQVQREGPQPLLAAKHADPMDIWGKGSLGCW

SEQ ID NO: 777981 - protein, 186 aa, Homo sapiens [sequence omitted]

SEQ ID NO: 777982 - protein, 104 aa, Homo sapiens [sequence omitted]

SEQ ID NO: 777983 - protein, 106 aa, Homo sapiens
MSGPPSSRAREPGGSSPTPTPVSAGTGSFLRAKVKDPLCEGSAEVGSHAPSRPLPALHSGRNLSFPCEKGQRVQASQVQREGPQPLLAAKHADPMDIWGKGSLGCW

SEQ ID NO: 777984 - protein, 319 aa, Homo sapiens; identical to SEQ ID NO: 777966

SEQ ID NO: 777985 - protein, 319 aa, Homo sapiens; identical to SEQ ID NO: 777966

SEQ ID NO: 777986 - protein, 319 aa, Homo sapiens; identical to SEQ ID NO: 777966

SEQ ID NO: 777987 - protein, 319 aa, Homo sapiens; identical to SEQ ID NO: 777966

SEQ ID NO: 777988 - protein, 319 aa, Homo sapiens; identical to SEQ ID NO: 777966

SEQ ID NO: 777989 - protein, 319 aa, Homo sapiens; identical to SEQ ID NO: 777966

SEQ ID NO: 777990 - protein, 319 aa, Homo sapiens; identical to SEQ ID NO: 777966

SEQ ID NO: 777991 - protein, 319 aa, Homo sapiens; identical to SEQ ID NO: 777966

SEQ ID NO: 777992 - protein, 217 aa, Homo sapiens; identical to SEQ ID NO: 777976

SEQ ID NO: 777993 - protein, 217 aa, Homo sapiens; identical to SEQ ID NO: 777976

SEQ ID NO: 777994 - protein, 199 aa, Homo sapiens [sequence omitted]

SEQ ID NO: 777995 - protein, 336 aa, Homo sapiens
MSVGFIGAGQLAFALAKGFTAAGVLAAHKIMASSPDMDLATVSALRKMGVKLTPHNKETVQHSDVLFLAVKPHIIPFILDEIGADIEDRHIVVSCAAGVTISSIEKKLSAFRPAPRVIRCMTNTPVVVREGATVYATGTHAQVEDGRLMEQLLSSVGFCTEVEEDLIDAVTGLSGSGPAYAFTALDALADGGVKMGLPRRLAVRLGAQALLGAAKMLLHSEQHPGQLKDNVSSPGGATIHALHVLESGGFRSLLINAVEASCIRTRGGPPRCPLPWSPVLAWQRPLSHTSAHSRTQQIRIELQPSVAQDTGGPEVPWVTVGSAPPHLPFPARREHP

SEQ ID NO: 777996 - protein, 174 aa, Homo sapiens
MGRGEQLLSSVGFCTEVEEDLIDAVTGLSGSGPAYAFTALDALADGGVKMGLPRRLAVRLGAQALLGAAKMLLHSEQHPGQLKDNVSSPGGATIHALHVLESGGFRSLLINAVEASCIRTRELQSMADQEQVSPAAIKKTILDKVKLDSPAGTALSPSGHTKLLPRSLAPAGKD

SEQ ID NO: 777997 - protein, 226 aa, Homo sapiens
TGAGPGCGCRVAAAALRGGYDPRTSRCHLWGLWARGSPDSMSVGFIGAGQLAFALAKGFTAAGVLAAHKIMASSPDMDLATVSALRKMGVKLTPHNKETVQHSDVLFLAVKPHIIPFILDEIGADIEDRHIVVSCAAGVTISSIEKKLSAFRPAPRVIRCMTNTPVVVREGATVYATGTHAQVEDGRLMEQLLSSVGFCTEVEEDLIDAVTGLSGSGPAYGAAVHG

SEQ ID NO: 777998 - protein, 192 aa, Homo sapiens
MSVGFIGAGQLAFALAKGFTAAGVLAAHKIMASSPDMDLATVSALRKMGVKLTPHNKETVQHSDVLFLAVKPHIIPFILDEIGADIEDRHIVVSCAAGVTISSIEKKLSAFRPAPRVIRCMTNTPVVVREGATVYATGTHAQVEDGRLMEQLLSSVGFCTEVEEDLIDAVTGLSGSGPAYPGPSGQGLTRPA

SEQ ID NO: 777999 - protein, 106 aa, Homo sapiens; identical to SEQ ID NO: 777983

SEQ ID NO: 778000 - protein, 104 aa, Homo sapiens
MPQSPPTSPSQHLDLVSTSPSLAWNSCWGHKAYFFCFLSYFLPMFHSLERTFLTKTKTVLYRHLDLADMSHVLQQNAHALEIWHIRASKTIKQLFSNFSVLKTD

SEQ ID NO: 778001 - protein, 164 aa, Homo sapiens
EAFPTGYEKATVVISSLLSDIIPRLAFPPLYSPITDRPLLVKSPKQFLRLLVFSELTVFLKHTSPSSATNLKRTGYFYHFPFSEFGLVLKMLQGTAHLSSCIDAPFIRPQSHSRHQTNLDCTPKTCHPYCLLSSHTPIHHYQLLINALLFFTLPVYTVSPSHHS

SEQ ID NO: 778002 - protein, 130 aa, Homo sapiens
VSSGSIGQALTQAGLKPVELSSFSVDSLQGAAVCPGSQLCGAMGGGSWTLEGKVGAKLNIASHIQGRNLDLVYGRRGGVCVCKYSSSLVEDALVGRGGRMGAVTLEAVVCSSGRGNGSGSRHREIKGNPS

SEQ ID NO: 778003 - protein, 49 aa, Homo sapiens
QLKEEKGVCFYGNLKCPSTSPVNYLCVQAAELDSCEERRVVLMGALERK

SEQ ID NO: 778004 - protein, 120 aa, Homo sapiens
MQGQGIPCCSTIRFGTPPPPGPTRGHQLCLEGDHNRLDRIHRLGPRQEEGRRPQTPRTPAAPPTRRSPPLGSILPPPDTHTPATSRLLTLGQALWRCRRSRLFLKSQDWKADSHRLLSST

SEQ ID NO: 778005 - protein, 266 aa, Homo sapiens
QHGKKQLDPLTIYGIRCHLFYKFGITESDWYRIKQSIDSKCRTAWRRKQRGQSLAVKSFSRRTPNSSSYCPSEPMMSTPPPARELLQPQPQPQALHYALANVQQVQIHQIGEDGQVQVIPQGHLHIAKVPQGEQVQITQDSEGNLQIHHVGQDGQLLEATRIPCLLAPSVFKASSGQVLQGAQLIAVASSDPAAAGVDGSPLQGSDIQVQYVQLAPVSDHTAGAQTAEALQPTLQPEMQLEHGAIQIQGAGAQWHQEPSPVRYGRP

SEQ ID NO: 778006 - protein, 101 aa, Homo sapiens
CAEKDVSREAERRKLISQCRAGLGGLSSSPARSWELSHCSPCPFLLKFPRMDSAPCTQENTGGRARWLTPVIPALWEAKKGGSRGQEIETILANTVKPRLY

SEQ ID NO: 778007 - protein, 184 aa, Homo sapiens
MQFTSISNSLTSTAAIGLSFTTSTTTTATFTTNTTTTITSGFTVNQNQLLSRGFENLVPYTSTVSVVATPVMTYGHLEGLINEWNLELEDQEKYFLLQATQVNAWDHTLIENGEMIRILHGEVNKVKLDQKRLEQELDFILSQQQELEFLLTYLEESTRDQSGLHYLQDADEEHVETSTRSAEF

SEQ ID NO: 778008 - protein, 110 aa, Homo sapiens
ITSFVPGKPLVLLTRKLIIVLSFEGKSRSVLHKEIMPQTVRNATLLKDEILASHLNQSCENCVNIEKEGQRNIKNGAYRVTVSYLHITEILLFRELQSKTINPVTPLIQS

SEQ ID NO: 778009 - protein, 86 aa, Homo sapiens
MQHPSLFMEEEAGAWGQRCPLGGGWLEPEPWPRAAPFMWASLDGYVHKLTPGPLPPPRGLTLIFQVDPSPQMLWAIRGGVRLSSES

SEQ ID NO: 778010 - protein, 262 aa, Homo sapiens
MARAGPAWLLLAIWVVLPSWLSSAKVSSLIERISDPKDLKKLLRTRNNVLVLYSKSEVAAENHLRLLSTVAQAVKGQGTICWVDCGDAESRKLCKKMKVDLSPKDKKVELFHYQDGAFHTEYNRAVTFKSIVAFLKDPKGPPLWEEDPGAKDVVHLDSEKDFRRLLKKEEKPLLIMFYAPWCSMCKRMMPHFQKAATQLRGHAVLAGMNVYSSEFENIKEEYSVRGFPTICYFEKGRFLFQYDNYGSTAEDIVEWLKKVWPL

SEQ ID NO: 778011 - protein, 114 aa, Homo sapiens
MARAGPAWLLLAIWVVLPSWLSSAKVSSLIERISDPKDLKKLLRTRNNVLVLYSKSEVAAENHLRLLSTVAQAVKGQGTICWVDCGDAESRKLCKKMKVDLSPKDKKVELFHYQ

SEQ ID NO: 778012 - protein, 519 aa, Homo sapiens
MARAGPAWLLLAIWVVLPSWLSSAKVSSLIERISDPKDLKKLLRTRNNVLVLYSKSEVAAENHLRLLSTVAQAVKGQGTICWVDCGDAESRKLCKKMKVDLSPKDKKVELFHYQDGAFHTEYNRAVTFKSIVAFLKDPKGPPLWEEDPGAKDVVHLDSEKDFRRLLKKEEKPLLIMFYAPWCSMCKRMMPHFQKAATQLRGHAVLAGMNVYSSEFENIKEEYSVRGFPTICYFEKGRFLFQYDNYGSTAEDIVEWLKNPQPPQPQVPETPWADEGGSVYHLTDEDFDQFVKEHSSVLVMFHAPWCGHCKKMKPEFEKAAEALHGEADSSGVLAAVDATVNKALAERFHISEFPTLKYFKNGEKYAVPVLRTKKKFLEWMQNPEAPPPPEPTWEEQQTSVLHLVGDNFRETLKKKKHTLVMFYAPWCPHCKKVIPHFTATADAFKDDRKIACAAVDCVKDKNQDLCQQEAVKGYPTFHYYHYGKFAEKYDSDRTELGFTNYIRALREGDHERLGKKKEEL

SEQ ID NO: 778013 - protein, 519 aa, Homo sapiens; identical to SEQ ID NO: 778012

SEQ ID NO: 778014 - protein, 582 aa, Homo sapiens
GGHWVLRGRQRASRCPRRQALPDAGAGGSCGAPGDPWQGAYATATTLRGCRSGHSRSGRTPAGCGVSSAPDSEPCTCVVLPSWLSSAKVSSLIERISDPKDLKKLLRTRNNVLVLYSKSEVAAENHLRLLSTVAQAVKGQGTICWVDCGDAESRKLCKKMKVDLSPKDKKVELFHYQDGAFHTEYNRAVTFKSIVAFLKDPKGPPLWEEDPGAKDVVHLDSEKDFRRLLKKEEKPLLIMFYAPWCSMCKRMMPHFQKAATQLRGHAVLAGMNVYSSEFENIKEEYSVRGFPTICYFEKGRFLFQYDNYGSTAEDIVEWLKNPQPPQPQVPETPWADEGGSVYHLTDEDFDQFVKEHSSVLVMFHAPWCGHCKKMKPEFEKAAEALHGEADSSGVLAAVDATVNKALAERFHISEFPTLKYFKNGEKYAVPVLRTKKKFLEWMQNPEAPPPPEPTWEEQQTSVLHLVGDNFRETLKKKKHTLVMFYAPWCPHCKKVIPHFTATADAFKDDRKIACAAVDCVKDKNQDLCQQEAVKGYPTFHYYHYGKFAEKYDSDRTELGFTNYIRALREGDHERLGKKKEEL

SEQ ID NO: 778015 - protein, 525 aa, Homo sapiens
DSSGAQPEAGTHSHWLLDPQVVLPSWLSSAKVSSLIERISDPKDLKKLLRTRNNVLVLYSKSEVAAENHLRLLSTVAQAVKGQGTICWVDCGDAESRKLCKKMKVDLSPKDKKVELFHYQDGAFHTEYNRAVTFKSIVAFLKDPKGPPLWEEDPGAKDVVHLDSEKDFRRLLKKEEKPLLIMFYAPWCSMCKRMMPHFQKAATQLRGHAVLAGMNVYSSEFENIKEEYSVRGFPTICYFEKGRFLFQYDNYGSTAEDIVEWLKNPQPPQPQVPETPWADEGGSVYHLTDEDFDQFVKEHSSVLVMFHAPWCGHCKKMKPEFEKAAEALHGEADSSGVLAAVDATVNKALAERFHISEFPTLKYFKNGEKYAVPVLRTKKKFLEWMQNPEAPPPPEPTWEEQQTSVLHLVGDNFRETLKKKKHTLVMFYAPWCPHCKKVIPHFTATADAFKDDRKIACAAVDCVKDKNQDLCQQEAVKGYPTFHYYHYGKFAEKYDSDRTELGFTNYIRALREGDHERLGKKKEEL

SEQ ID NO: 778016 - protein, 209 aa, Homo sapiens [sequence omitted]

SEQ ID NO: 778017 - protein, 519 aa, Homo sapiens; identical to SEQ ID NO: 778012

SEQ ID NO: 778018 - protein, 514 aa, Homo sapiens [sequence omitted]

SEQ ID NO: 778019 - protein, 355 aa, Homo sapiens
MARAGPAWLLLAIWVVLPSWLSSAKVSSLIERISDPKDLKKLLRTRNNVLVLYSKSEVAAENHLRLLSTVAQAVKGQGTICWVDCGDAESRKLCKKMKVDLSPKDKKVELFHYQDGAFHTEYNRAVTFKSIVAFLKDPKGPPLWEEDPGAKDVVHLDSEKDFRRLLKKEEKPLLIMFYAPWCSMCKRMMPHFQKAATQLRGHAVLAGMNVYSSEFENIKEEYSVRGFPTICYFEKGRFLFQYDNYGSTAEDIVEWLKNPQPPQPQVPETPWADEGGSVYHLTDEDFDQFVKEHSSVLVMFHAPCEWNFAPPPPHPPLSQSRMSVALCNVNPGSTYFLDARTHAKPGDAVVTGEVP

SEQ ID NO: 778020 - protein, 258 aa, Homo sapiens
MARAGPAWLLLAIWVVLPSWLSSAKVSSLIERISDPKDLKKLLRTRNNVLVLYSKSEVAAENHLRLLSTVAQAVKGQGTICWVDCGDAESRKLCKKMKVDLSPKDKKVELFHYQDGAFHTEYNRAVTFKSIVAFLKDPKGPPLWEEDPGAKDVVHLDSEKDFRRLLKKEEKPLLIMFYAPWCSMCKRMMPHFQKAATQLRGHAVLAGMNVYSSEFENIKEEYSVRGFPTICYFEKGRFLFQYDKRPWQKDSTSQSFLR

SEQ ID NO: 778021 - protein, 141 aa, Homo sapiens
MQNPEAPPPPEPTWEEQQTSVLHLVGDNFRETLKKKKHTLVMFYAPWCPHCKKVIPHFTATADAFKDDRKIACAAVDCVKDKNQDLCQQEAVKGYPTFHYYHYGKFAEKYDSDRTELGFTNYIRALREGDHERLGKKKEEL

SEQ ID NO: 778022 - protein, 296 aa, Homo sapiens
MARAGPAWLLLAIWVVLPSWLSSAKVSSLIERISDPKDLKKLLRTRNNVLVLYSKSEVAAENHLRLLSTVAQAVKGQGTICWVDCGDAESRKLCKKMKVDLSPKDKKVELFHYQDGAFHTEYNRAVTFKSIVAFLKDPKGPPLWEEDPGAKDVVHLDSEKDFRRLLKKEEKPLLIMFYAPWCSMCKRMMPHFQKAATQLRGHAVLAGMNVYSSEFENIKEEYSVRGFPTICYFEKGRFLFQYDNYGSTAEDIVEWLKNPQPPQPQVPETPWADEGGSVYHLTDEDFDLQPRGSSRA

SEQ ID NO: 778023 - protein, 180 aa, Homo sapiens
AAARLIKQFGRLAPEIAPGEEESSGERRAQATGAERSREQPESAPDSARVLSRPQLARIPGVLLAPLHEEGAFAARPAGVRTGPLETALAAPWAGRGTRARRARLASAPGGEQWSRAAGSRSAGTRQGWGRPSPRGTTLLAPATTPLGTHSRVSKPSAPPYLSPAALRRVPLCGAKPREP

SEQ ID NO: 778024 - protein, 354 aa, Homo sapiens
MRARPQVCEALLFALALQTGVCYGIKWLALSKTPSALALNQTQHCKQLEGLVSAQVQLCRSNLELMHTVVHAAREVMKACRRAFADMRWNCSSIELAPNYLLDLERGTRESAFVYALSAAAISHAIARACTSGDLPGCSCGPVPGEPPGPGNRWGGCADNLSYGLLMGAKFSDAPMKVKKTGSQANKLMRLHNSEVGRQALRASLEMKCKCHGVSGSCSIRTCWKGLQELQDVAADLKTRYLSATKVVHRPMGTRKHLVPKDLDIRPVKDSELVYLQSSPDFCMKNEKVGSHGTQDRQCNKTSNGSDSCDLMCCGRGYNPYTDRVVERCHCKYHWCCYVTCRRCERTVERYVCK

SEQ ID NO: 778025 - protein, 354 aa, Homo sapiens; identical to SEQ ID NO: 778024

SEQ ID NO: 778026 - protein, 236 aa, Homo sapiens
MRARPQVCEALLFALALQTGVCYGIKWLALSKTPSALALNQTQHCKQLEGLVSAQVQLCRSNLELMHTVVHAAREVMKACRRAFADMRWNCSSIELAPNYLLDLERGTRESAFVYAADLKTRYLSATKVVHRPMGTRKHLVPKDLDIRPVKDSELVYLQSSPDFCMKNEKVGSHGTQDRQCNKTSNGSDSCDLMCCGRGYNPYTDRVVERCHCKYHWCCYVTCRRCERTVERYVCK

SEQ ID NO: 778027 - protein, 354 aa, Homo sapiens; identical to SEQ ID NO: 778024

SEQ ID NO: 778028 - protein, 354 aa, Homo sapiens; identical to SEQ ID NO: 778024

SEQ ID NO: 778029 - protein, 354 aa, Homo sapiens; identical to SEQ ID NO: 778024

SEQ ID NO: 778030 - protein, 197 aa, Homo sapiens [sequence omitted]

SEQ ID NO: 778031 - protein, 197 aa, Homo sapiens [sequence omitted]

SEQ ID NO: 778032 - protein, 124 aa, Homo sapiens
MAEPGPEPGRAWRVLALCGVAVFLAAAAAGGALVAWNLAASAARGPRCPEPGANATAPPGDPPPGVDDLRRRLAEAAEREEALARQLDQAESIRHELEKALKACEGRQVGGPGRGGARESRMLR

SEQ ID NO: 778033 - protein, 784 aa, Homo sapiens
RKWRGSLSSPSSLRGRRLVTGQTSPRGTWCLYPGFCRSVACAMPCCSHRSCREDPGTSESREMDPVAFEDVAVNFTQEEWTLLDISQKNLFREVMLETFRNLTSIGKKWSDQNIEYEYQNPRRSFRSLIEEKVNEIKEDSHCGETFTQVPDDRLNFQEKKASPEVKSCDSFVCAEVGIGNSSFNMSIRGDTGHKAYEYQEYGPKPYKCQQPKNKKAFRYRPSIRTQERDHTGEKPYACKVCGKTFIFHSSIRRHMVMHSGDGTYKCKFCGKAFHSFSLYLIHERTHTGEKPYECKQCGKSFTYSATLQIHERTHTGEKPYECSKCDKAFHSSSSYHRHERSHMGEKPYQCKECGKAFAYTSSLRRHERTHSGKKPYECKQYGEGLSYLISFQTHIRMNSGERPYKCKICGKGFYSAKSFQTHEKTHTGEKRYKCKQCGKAFNLSSSFRYHERIHTGEKPYECKQCGKAFRSASQLRVHGGTHTGEKPYECKECGKAFRSTSHLRVHGRTHTGEKPYECKECGKAFRYVKHLQIHERTEKHIRMPSGERPYKCSICEKGFYSAKSFQTHEKTHTGEKPYECNQCGKAFRCCNSLRYHERTHTGEKPYECKQCGKAFRSASHLRMHERTHTGEKPYECKQCGKAFSCASNLRKHGRTHTGEKPYECKQCGKAFRSASNLQMHERTHTGEKPYECKECEKAFCKFSSFQIHERKHRGEKPYECKHCGNGFTSAKILQIHARTHIGEKHYECKECGKAFNYFSSLHIHARTHMGEKPYECKDCGKAFS

SEQ ID NO: 778034 - protein, 129 aa, Homo sapiens
RKWRGSLSSPSSLRGRRLVTGQTSPRGTWCLYPGFCRSVACAMPCCSHRSCREDPGTSESREMDPVAFEDVAVNFTQEEWTLLDISQKNLFREVMLETFRNLTSIGNGVTRTLNMSTKDSHCGAFTQVP

SEQ ID NO: 778035 - protein, 766 aa, Homo sapiens
RKWRGSLSSPSSLRGRRLVTGQTSPRGTWCLYPGFCRSVACAMPCCSHRSCREDPGTSESREMDPVAFEDVAVNFTQEEWTLLDISQKNLFREVMLETFRNLTSIGKKWSDQNIEYEYQNPRRSFRSLIEEKVNEIKEDSHCGETFTQVPDDRLNFQEKKASPEFNMSIRGDTGHKAYEYQEYGPKPYKCQQPKNKKAFRYRPSIRTQERDHTGEKPYACKVCGKTFIFHSSIRRHMVMHSGDGTYKCKFCGKAFHSFSLYLIHERTHTGEKPYECKQCGKSFTYSATLQIHERTHTGEKPYECSKCDKAFHSSSSYHRHERSHMGEKPYQCKECGKAFAYTSSLRRHERTHSGKKPYECKQYGEGLSYLISFQTHIRMNSGERPYKCKICGKGFYSAKSFQTHEKTHTGEKRYKCKQCGKAFNLSSSFRYHERIHTGEKPYECKQCGKAFRSASQLRVHGGTHTGEKPYECKECGKAFRSTSHLRVHGRTHTGEKPYECKECGKAFRYVKHLQIHERTEKHIRMPSGERPYKCSICEKGFYSAKSFQTHEKTHTGEKPYECNQCGKAFRCCNSLRYHERTHTGEKPYECKQCGKAFRSASHLRMHERTHTGEKPYECKQCGKAFSCASNLRKHGRTHTGEKPYECKQCGKAFRSASNLQMHERTHTGEKPYECKECEKAFCKFSSFQIHERKHRGEKPYECKHCGNGFTSAKILQIHARTHIGEKHYECKECGKAFNYFSSLHIHARTHMGEKPYECKDCGKAFS

SEQ ID NO: 778036 - protein, 754 aa, Homo sapiens
WSPQHPENFLGIESRPPVLSLSPIFLYTCEMFQDPVAFEDVAVNFTQEEWTLLDISQKNLFREVMLETFRNLTSIGKKWSDQNIEYEYQNPRRSFRSLIEEKVNEIKEDSHCGETFTQVPDDRLNFQEKKASPEVKSCDSFVCAEVGIGNSSFNMSIRGDTGHKAYEYQEYGPKPYKCQQPKNKKAFRYRPSIRTQERDHTGEKPYACKVCGKTFIFHSSIRRHMVMHSGDGTYKCKFCGKAFHSFSLYLIHERTHTGEKPYECKQCGKSFTYSATLQIHERTHTGEKPYECSKCDKAFHSSSSYHRHERSHMGEKPYQCKECGKAFAYTSSLRRHERTHSGKKPYECKQYGEGLSYLISFQTHIRMNSGERPYKCKICGKGFYSAKSFQTHEKTHTGEKRYKCKQCGKAFNLSSSFRYHERIHTGEKPYECKQCGKAFRSASQLRVHGGTHTGEKPYECKECGKAFRSTSHLRVHGRTHTGEKPYECKECGKAFRYVKHLQIHERTEKHIRMPSGERPYKCSICEKGFYSAKSFQTHEKTHTGEKPYECNQCGKAFRCCNSLRYHERTHTGEKPYECKQCGKAFRSASHLRMHERTHTGEKPYECKQCGKAFSCASNLRKHGRTHTGEKPYECKQCGKAFRSASNLQMHERTHTGEKPYECKECEKAFCKFSSFQIHERKHRGEKPYECKHCGNGFTSAKILQIHARTHIGEKHYECKECGKAFNYFSSLHIHARTHMGEKPYECKDCGKAFS

SEQ ID NO: 778037 - protein, 1186 aa, Homo sapiens
MVWCLGLAVLSLVISQGADGRGKPEVVSVVGRAGESVVLGCDLLPPAGRPPLHVIEWLRFGFLLPIFIQFGLYSPRIDPDYVGRVRLQKGASLQIEGLRVEDQGWYECRVFFLDQHIPEDDFANGSWVHLTVNSPPQFQETPPAVLEVQELEPVTLRCVARGSPLPHVTWKLRGKDLGQGQGQVQVQNGTLRIRRVERGSSGVYTCQASSTEGSATHATQLLVLGPPVIVVPPKNSTVNASQDVSLACHAEAYPANLTYSWFQDNINVFHISRLQPRVRILVDGSLRLLATQPDDAGCYTCVPSNGLLHPPSASAYLTVLYPAQVTAMPPETPLPIGMPGVIRCPVRANPPLLFVSWTKDGKALQLDKFPGWSQGTEGSLIIALGNEDALGEYSCTPYNSLGTAGPSPVTRVLLKAPPAFIERPKEEYFQEVGRELLIPCSAQGDPPPVVSWTKGSPVVLYVGRGLQGQAQVDSNSSLILRPLTKEAHGHWECSASNAVARVATSTNVYVLGTSPHVVTNVSVVALPKGANVSWEPGFDGGYLQRFSVWYTPLAKRPDRMHHDWVSLAVPVGAAHLLVPGLQPHTQYQFSVLAQNKLGSGPFSEIVLSAPEGLPTTPAAPGLPPTEIPPPLSPPRGLVAVRTPRGVLLHWDPPELVPKRLDGYVLEGRQGSQGWEVLDPAVAGTETELLVPGLIKDVLYEFRLVAFAGSFVSDPSNTANVSTSGLEVYPSRTQLPGLLPQPVLAGVVGGVCFLGVAVLVSILAGCLLNRRRAARRRRKRLRQDPPLIFSPTGKSAAPSALGSGSPDSVAKLKLQGSPVPSLRQSLLWGDPAGTPSPHPDPPSSRGPLPLEPICRGPDGRFVMGPTVAAPQERSGREQAEPRTPAQRLARSFDCSSSSPSGAPQPLCIEDISPVAPPPAAPPSPLPGPGPLLQYLSLPFFREMNVDGDWPPLEEPSPAAPPDYMDTRRCPTSSFLRSPETPPVSPRESLPGAVVGAGATAEPPYTALADWTLRERLLPGLLPAAPRGSLTSQSSGRGSASFLRPPSTAPSAGGSYLSPAPGDTSSWASGPERWPRREHVVTVSKRRNTSVDENYEWDSEFPGDMELLETLHLGLASSRLRPEAEPELGVKTPEEGCLLNTAHVTGPEARCAALREEFLAFRRRRDATRARLPAYRQPVPHPEQATLL

SEQ ID NO: 778038 - protein, 726 aa, Homo sapiens
MVGRGLQGQAQVDSNSSLILRPLTKEAHGHWECSASNAVARVATSTNVYVLGTSPHVVTNVSVVALPKGANVSWEPGFDGGYLQRFSVWYTPLAKRPDRMHHDWVSLAVPVGAAHLLVPGLQPHTQYQFSVLAQNKLGSGPFSEIVLSAPEGLPTTPAAPGLPPTEIPPPLSPPRGLVAVRTPRGVLLHWDPPELVPKRLDGYVLEGRQGSQGWEVLDPAVAGTETELLVPGLIKDVLYEFRLVAFAGSFVSDPSNTANVSTSGLEVYPSRTQLPGLLPQPVLAGVVGGVCFLGVAVLVSILAGCLLNRRRAARRRRKRLRQDPPLIFSPTGKSAAPSALGSGSPDSVAKLKLQGSPVPSLRQSLLWGDPAGTPSPHPDPPSSRGPLPLEPICRGPDGRFVMGPTVAAPQERSGREQAEPRTPAQRLARSFDCSSSSPSGAPQPLCIEDISPVAPPPAAPPSPLPGPGPLLQYLSLPFFREMNVDGDWPPLEEPSPAAPPDYMDTRRCPTSSFLRSPETPPVSPRESLPGAVVGAGATAEPPYTALADWTLRERLLPGLLPAAPRGSLTSQSSGRGSASFLRPPSTAPSAGGSYLSPAPGDTSSWASGPERWPRREHVVTVSKRRNTSVDENYEWDSEFPGDMELLETLHLGLASSRLRPEAEPELGVKTPEEGCLLNTAHVTGPEARCAALREEFLAFRRRRDATRARLPAYRQPVPHPEQATLL

SEQ ID NO: 778039 - protein, 1179 aa, Homo sapiens
MVWCLGLAVLSLVISQGADGRGKPEVVSVVGRAGESVVLGCDLLPPAGRPPLHVIEWLRFGFLLPIFIQFGLYSPRIDPDYVGRVRLQKGASLQIEGLRVEDQGWYECRVFFLDQHIPEDDFANGSWVHLTVNSPPQFQETPPAVLEVQELEPVTLRCVARGSPLPHVTWKLRGKDLGQGQGQVQVQNGTLRIRRVERGSSGVYTCQASSTEGSATHATQLLVLGPPVIVVPPKNSTVNASQDVSLACHAEAYPANLTYSWFQDNINVFHISRLQPRVRILVDGSLRLLATQPDDAGCYTCVPSNGLLHPPSASAYLTVLYPAQVTAMPPETPLPIGMPGVIRCPVRANPPLLFVSWTKDGKALQLDKFPGWSQGTEGSLIIALGNEDALGEYSCTPYNSLGTAGPSPVTRVLLKAPPAFIERPKEEYFQEVGRELLIPCSAQGDPPPVVSWTKVGRGLQGQAQVDSNSSLILRPLTKEAHGHWECSASNAVARVATSTNVYVLGTSPHVVTNVSVVALPKGANVSWEPGFDGGYLQRFSVWYTPLAKRPDRMHHDWVSLAVPVGAAHLLVPGLQPHTQYQFSVLAQNKLGSGPFSEIVLSAPEGLPTTPAAPGLPPTEIPPPLSPPRGLVAVRTPRGVLLHWDPPELVPKRLDGYVLEGRQGSQGWEVLDPAVAGTETELLVPGLIKDVLYEFRLVAFAGSFVSDPSNTANVSTSGLEVYPSRTQLPGLLPQPVLAGVVGGVCFLGVAVLVSILAGCLLNRRRAARRRRKRLRQDPPLIFSPTGKSAAPSALGSGSPDSVAKLKLQGSPVPSLRQSLLWGDPAGTPSPHPDPPSSRGPLPLEPICRGPDGRFVMGPTVAAPQERSGREQAEPRTPAQRLARSFDCSSSSPSGAPQPLCIEDISPVAPPPAAPPSPLPGPGPLLQYLSLPFFREMNVDGDWPPLEEPSPAAPPDYMDTRRCPTSSFLRSPETPPVSPRESLPGAVVGAGATAEPPYTALADWTLRERLLPGLLPAAPRGSLTSQSSGRGSASFLRPPSTAPSAGGSYLSPAPGDTSSWASGPERWPRREHVVTVSKRRNTSVDENYEWDSEFPGDMELLETLHLGLASSRLRPEAEPELGVKTPEEGCLLNTAHVTGPEARCAALREEFLAFRRRRDATRARLPAYRQPVPHPEQATLL

SEQ ID NO: 778040 - protein, 915 aa, Homo sapiens
RQEAPRGPTTGVAIHSVFSVSGTPWSCAVTASHYWEGSLCRKERKHWKSERGQAQTWSCWSLLHSCGFLILPPLLYCHPGLVSAELLSLAVIFSSFQFPGWSQGTEGSLIIALGNEDALGEYSCTPYNSLGTAGPSPVTRVLLKAPPAFIERPKEEYFQEVGRELLIPCSAQGDPPPVVSWTKGSPVVLEVGRGLQGQAQVDSNSSLILRPLTKEAHGHWECSASNAVARVATSTNVYVLGTSPHVVTNVSVVALPKGANVSWEPGFDGGYLQRFSVWYTPLAKRPDRMHHDWVSLAVPVGAAHLLVPGLQPHTQYQFSVLAQNKLGSGPFSEIVLSAPEGLPTTPAAPGLPPTEIPPPLSPPRGLVAVRTPRGVLLHWDPPELVPKRLDGYVLEGRQGSQGWEVLDPAVAGTETELLVPGLIKDVLYEFRLVAFAGSFVSDPSNTANVSTSGLEVYPSRTQLPGLLPQPVLAGVVGGVCFLGVAVLVSILAGCLLNRRRAARRRRKRLRQDPPLIFSPTGKSAAPSALGSGSPDSVAKLKLQGSPVPSLRQSLLWGDPAGTPSPHPDPPSSRGPLPLEPICRGPDGRFVMGPTVAAPQERSGREQAEPRTPAQRLARSFDCSSSSPSGAPQPLCIEDISPVAPPPAAPPSPLPGPGPLLQYLSLPFFREMNVDGDWPPLEEPSPAAPPDYMDTRRCPTSSFLRSPETPPVSPRESLPGAVVGAGATAEPPYTALADWTLRERLLPGLLPAAPRGSLTSQSSGRGSASFLRPPSTAPSAGGSYLSPAPGDTSSWASGPERWPRREHVVTVSKRRNTSVDENYEWDSEFPGDMELLETLHLGLASSRLRPEAEPELGVKTPEEGCLLNTAHVTGPEARCAALREEFLAFRRRRDATRARLPAYRQPVPHPEQATLL

SEQ ID NO: 778041 - protein, 1179 aa, Homo sapiens; identical to SEQ ID NO: 778039

SEQ ID NO: 778042 - protein, 110 aa, Homo sapiens
MLLGVVAVVIASFLIICAAPFASHFLYKAGGGSYIAAGILFSLVVMLYVIWVQAVADMESYRNMKMKDCLDFTPSVLYGWSFFLAPAGIFFSLLAGLLFLVVGRHIQIHH

SEQ ID NO: 778043 - protein, 205 aa, Homo sapiens
RCWLGVLVSGKVGTGHIINTIENVTFHHEGFFWRCWFNGIVEENDSNIWKFWYTNQPPSKNCTHAYLSPYPFMRGEHNSTSYDSAVIYRGFWAVLMLLGVVAVVIASFLIICAAPFASHFLYKAGGGSYIAAGILFSLVVMLYVIWVQAVADMESYRNMKMKDCLDFTPSVLYGWSFFLAPAGIFFSLLAGLLFLVVGRHIQIHH

SEQ ID NO: 778044 - protein, 91 aa, Homo sapiens
PGPAPSSRRPLQVQNFLESASPGPAPPASQWPLSAQPSSWLSAAFPGPAFDFWQPLQAQNLTSSRPLQSRPPASRRPARARPRPRPHSGLS

SEQ ID NO: 778045 - protein, 243 aa, Homo sapiens
RNVSAYCLMYINDKLPYFNAEAAPTESDQMSEVEALSVELKHYIQEDNWRFEQEVEEWEEEQSCKIPQMESSTNSSSQDYSTSQEPSVASSHGVRCLSSEHAVIVKEQTAQAIANTARAYEKSGVEAALSEAFHEEYSRLYQLAKETPTSHSDPRLQHVLVYFFQNEAPKRVVERTLLEQFADKNLSYDERSISIMKVAQAKLKEIGPDDMNMEEYKKWHEDYSLFRKVSVYLLTGLELYQKG

SEQ ID NO: 778046 - protein, 56 aa, Homo sapiens
GEGTGLRMGLRSKTETLIQRETTIGADPFICPGNVLPRLESSAQNKGKGVQLPPWQ

SEQ ID NO: 778047 - protein, 53 aa, Homo sapiens
QPSQGCPELATLTRVSKSNGHRKIHLVKPNQDWQSCQADHLRRMRNKHSLLHA

SEQ ID NO: 778048 - protein, 68 aa, Homo sapiens
MGVPHRCPSHPNPEHQASRGAQPRNIPGLERPSHLHAARLWLRRLLLGAWWSQAGGRAGDCSAEPRPR

SEQ ID NO: 778049 - protein, 33 aa, Homo sapiens
AEQRPWLLPTPCQEHLPVVTATSDPDTVQCPLG

SEQ ID NO: 778050 - protein, 92 aa, Homo sapiens
RIEPVPSGTSKTVKDESGGERGLTPVMAAFEEADAGNTGVNHRAQPRVVTFLYTCEITTIKTMIKSTAPEIPHVLMPFAIPPRFLFLSPGNH

SEQ ID NO: 778051 - protein, 106 aa, Homo sapiens
GLSLALSLSPRLECSGMILVHYLQGSCNAPSSASCVAGIRGSHHHVQLIIVFLVEMRFHHVDQAGLKLLTSGDLPILASHSAGITGVSHSARPPLLSLNSPGHCLG

SEQ ID NO: 778052 - protein, 125 aa, Homo sapiens
EEILIYVANKCRFLLRNGYSPKDIAVLFTKASEVEKYKDRLLTAMRKRKLSQLHEESDLLLQIGDASDVLTDHIVLDSVCRFSGLERNIVFGINPGVAPPAGAYNLLLCLASRAKRHLYILKASV

SEQ ID NO: 778053 - protein, 129 aa, Homo sapiens
EEILIYVANKCRFLLRNGYSPKDIAVLFTKASEVEKYKDRLLTAMRKRKLSQLHEESDLLLQIGDASDVLTDHIVLDSVCRFSGLERNIVFGINPGVAPPAGAYNLLLCLASRAKTIKWFSSLINCETI

SEQ ID NO: 778054 - protein, 77 aa, Homo sapiens
EPVVAQATVRWLTRPGCSRNTSVAATALAMAHEGSVSFSSAGDAPEPGSAVKVGVGNSGLALGRPVPLLAPAHRAGV

SEQ ID NO: 778055 - protein, 112 aa, Homo sapiens
PTFAVLSHPVCGNLLQKPQETNTTGKPSSCTRQLQSGASVPLVHSPTPEWGLCSPGTLANSGVGPLFPSYTRQLRSGASVSLVHSPTPEWGLCSPGTLANSRVGPLFPSYTR

SEQ ID NO: 778056 - protein, 36 aa, Homo sapiens
ALPKQPVDGKAPLATGEDDDNEVPDLVENFDEASKN

SEQ ID NO: 778057 - protein, 102 aa, Homo sapiens
LDGYSTPPDGVGLGRRVQNIKGPLPLSGKDTKSSSASSLYTSDIISWPGAVAHARNPCNPSTLGGRGGQITRSRDRDHPGQHSETLSLLKTQKLAGCGGTCL

SEQ ID NO: 778058 - protein, 66 aa, Homo sapiens
NKMKELELLCSMKEVSFDGNDLENMVLSLREKFLQEVNSLIQKPSHPLAKTKTLVKSLMNRAELLL

SEQ ID NO: 778059 - protein, 70 aa, Homo sapiens
GITGSPPYSGTPAPPPENTHLGVPPMEAAGPGSSEGWCCCCPVQDGSASSSQKPRLPCGLPTWLQLLNVW

SEQ ID NO: 778060 - protein, 95 aa, Homo sapiens
AWGRVMAEGQGRSGGVTASSFGLVCLAAGPRMHTGTPGGLVKMQALAQLVWGTQHLGWLRLWSFPDHALRCEECGKGLLHKPGEASPEQDPQYPH

SEQ ID NO: 778061 - protein, 129 aa, Homo sapiens
EPNKLVSFQEMAPGKQETRAGVVHGAIGEAGVTALLALCLCLIFFIVKTHRRKAARTAVGRNDTHPTTGSASPKHQKKSKLHGPTETSSCSGAAPTVEMDEELHYASLNFHGMNPSKDTSTEYSEVRTQ

SEQ ID NO: 778062 - protein, 113 aa, Homo sapiens
THPPTQSLGNGMGSFTVLSWKDLCQAIPFIPLFHRHPSKIKIPPISKQLKQKLFCHLSPSLLHVFVPFWFLPGIPSLSGNEVFLEFPRAVQALSLLKMKHGGSQGQTALPGLT

SEQ ID NO: 778063 - protein, 70 aa, Homo sapiens
RFGCWMCGPWSERRRFGCWMCGPWSERRRFGCWMPGPWSERRHFGCADLLHSPPRPQRRRTPASISKTII

SEQ ID NO: 778064 - protein, 93 aa, Homo sapiens
  misc_feature (1)..(1): Xaa can be any naturally occurring amino acid
XGTRKKIGNKMWVRPTVPCRPEISVWPEQAYRKAVPGGRKCGASLSWETPELERKSVTKCGFGQQCPVGLKFRSGQSKHTERLYLEEGSAEPA

SEQ ID NO: 778065 - protein, 93 aa, Homo sapiens; identical to SEQ ID NO: 778064
  misc_feature (1)..(1): Xaa can be any naturally occurring amino acid

SEQ ID NO: 778066 - protein, 106 aa, Homo sapiens
  misc_feature (1)..(1): Xaa can be any naturally occurring amino acid
XGTRKKIGNKMWVRPTVPCRPEISVWPEQAYRKAVPGGRKCGASLSWETPELERKSVTKCGFGQQCPVGLKFRSGQSKMVLPFKVYYLNISMALVLTAFTVSFMGS

SEQ ID NO: 778067 - protein, 106 aa, Homo sapiens; identical to SEQ ID NO: 778066
  misc_feature (1)..(1): Xaa can be any naturally occurring amino acid

SEQ ID NO: 778068 - protein, 168 aa, Homo sapiens
AQPASGRAPSLPLDRRPPGTAAPGVRTGARVRGLNPFGPADATRLGEAGSRHLPAGRTGGAPGFRVSRWPGDAGEVTGWTAEALRGQRRRSGSPPGGSQSRPVGRECGAAGWEGRGSRKPGSPARTPTSRWPGAQGGQTDLCKHSFESNSRRDDLPEGRLSEFCRGGN

SEQ ID NO: 778069 - protein, 261 aa, Homo sapiens
MQLVILRVTIFLPWCFAVPVPPAADHKGWDFVEGYFHQFFLTEKESPLLTQETQTQLLQQFHRNGTDLLDMQMHALLHQPHCGVPDGSDTSISPGRCKWNKHTLTYRIINYPHDMKPSAVKDSIYNAVSIWSNVTPLIFQQVQNGDADIKVSFWQWAHEDGWPFDGPGGILGHAFLPNSGNPGVVHFDKNEHWSASDTGYNLFLVATHEIGHSLGLQHSGNQSSIMYPTYWYHDPRTFQLSADDIQRIQHLYGEKCSSDIP

SEQ ID NO: 778070 - protein, 55 aa, Homo sapiens
MALLSGVYLWFFVLVEKESGHGHTQRVSLRAESLIDKEQEREKMRPHAEKAGCPR

SEQ ID NO: 778071 - protein, 114 aa, Homo sapiens
MSGAGLGIRRVYRALGLDTVSGVCAFRAWWSSQATGHMKTKVRPPFQKVLPHTHTQKEEMHAQRGQEEIQRDRPCWVSPLRLFTFDHCPFCPVISLHSCPCVLETQHKSGQFSL

SEQ ID NO: 778072 - protein, 108 aa, Homo sapiens
MNHAFSTERPSSLVNAPPEMSKNSVPEPGWLHENHLRAFANIGPYWLQMYSSLGEEERGRTRNRMGRNQPCAQEDAGIPPASLAQCSLFYKVTEAQRGKPAQVLIACK

SEQ ID NO: 778073 - protein, 79 aa, Homo sapiens
CLWSSLAGSPMGWAQLGSSSVPCDGTGAAVIQRLNWAERARFLAHVAISGAGCCWELHWTSVQSSSAHLSVSLPCGSGF

SEQ ID NO: 778074 - protein, 107 aa, Homo sapiens
KIHRSSSLNLCLPNACSSLARNPNNIKPFVSKKSLKALFPHFPRIGFVTVREAEARPAYFSLGAFIQPLKLCLLFTKVGCAYFTVFILITFHIHLHVDSCGRLQNGP

SEQ ID NO: 778075 - protein, 69 aa, Homo sapiens
GAVPVLPAHAGAQRDRWARTPPCGDEAPSSPATPQPPLAPHPTPKGPPSAQDRVWEKVFARRVGRERGG

SEQ ID NO: 778076 - protein, 199 aa, Homo sapiens
MRLLCGLWLWLSLLKVLQAQTPTPLPLPPPMQSFQGNQFQGEWFVLGLAGNSFRPEHRALLNAFTATFELSDDGRFEVWNAMTRGQHCDTWSYVLIPAAQPGQFTVDHGVEPGADREETRVVDSDYTQFALMLSRRHTSRLAVLRISLLGRSWLLPPGTLDQFICLGRAQGLSDDNIVFPDVTGGALDLSSLPWVAAPA

SEQ ID NO: 778077 - protein, 131 aa, Homo sapiens
MLSTRAQAHVLVCTHLHTPAHSLCQASWVCSESGGPWGQGQVRGFLRTWGCWEPLWATSSAPSQPPSPQPLPLDPLLVPFLPPASHLKPPAPPLCPPLLPPGLCPLLPLCPPSRLHLPHQAGHPRPASVEG

SEQ ID NO: 778078 - protein, 160 aa, Homo sapiens
MRLLCGLWLWLSLLKVLQAQTPTPLPLPPPMQSFQGNQFQGEWFVLGLAGNSFRPEHRALLNAFTATFELSDDGRFEVWNAMTRGQHCDTWSYVLIPAAQPGQFTVDHGVGRSWLLPPGTLDQFICLGRAQGLSDDNIVFPDVTGGALDLSSLPWVAAPA

SEQ ID NO: 778079 - protein, 199 aa, Homo sapiens; identical to SEQ ID NO: 778076

SEQ ID NO: 778080 - protein, 156 aa, Homo sapiens
MRLLCGLWLWLSLLKVLQAQTPTPLPLPPPMQSFQGNQFQGEWFVLGLAGNSFRPEHRALLNAFTATFELSDDGRFEVWNAMTRGQHCDTWSYVLIPAAQPGQFTVDHGVDTRAGWPSSGSACWAGAGCCLPGRWTSSSAWAELRASRMTTLSSQM

SEQ ID NO: 778081 - protein, 160 aa, Homo sapiens; identical to SEQ ID NO: 778078

SEQ ID NO: 778082 - protein, 156 aa, Homo sapiens; identical to SEQ ID NO: 778080

SEQ ID NO: 778083 - protein, 221 aa, Homo sapiens
VPVGPAAARMRLLCGLWLWLSLLKVLQAQTPTPLPLPPPMQSFQGNQFQGEWFVLGLAGNSFRPEHRALLNAFTATFELSDDGRFEVWNAMTRGQHCDTWSYVLIPAAQPGQFTVDHGVGRSWLLPPGTLDQFICLGRAQGLSDDNIVFPDVTGNMVHLQACWAVGTGPAGMSLVDPRGAGPSVYPGSSAPACAQGSPGSWVPVLKPGSEPPPAAPGPLSW

SEQ ID NO: 778084 - protein, 82 aa, Homo sapiens
SVREGKQAREGRTATGQGHHVPARPRFQGEWFVLGLAGNSFRPEHRALLNAFTATFELSDDGRFEVWNAMTRTSGGRGRRIT

SEQ ID NO: 778085 - protein, 81 aa, Homo sapiens
KRAEWRENIDTVLNWFTKEEFDFVTLYYREPDNMGHRFRPEAENRKLMIQQINRTIGYLVGATEKHSLQSTSASSSHETMG

SEQ ID NO: 778086 - protein, 58 aa, Homo sapiens
MRQVCLHLADENLSEEVQDHTASTGLWCRAVSKAHRSTTRLCSQRGRWNLRDFWKGSL

SEQ ID NO: 778087 - protein, 130 aa, Homo sapiens [sequence omitted]

SEQ ID NO: 778088 - protein, 130 aa, Homo sapiens [sequence omitted]

SEQ ID NO: 778089 - protein, 63 aa, Homo sapiens
PLQRWCHMEGRWDRKSGREGDQGGDDTYGGAMRGAGPLALDFLQQPSHGKSPPPTSQGWVAGH

SEQ ID NO: 778090 - protein, 100 aa, Homo sapiens
VGWGDQSGSQECHSSALCGWAVVRIITKGVIPSRICITHKGWAVVLPCLVRRPALCHPPGWAQPQVGNVVPPGQMPRTVEKQRKVREKRLRPAGVKAGDL

SEQ ID NO: 778091 - protein, 176 aa, Homo sapiens
WLECHPPTGGIVGQCILGADQGDEETRPWSTAPTCCVWCWEAGSCCSRGATPGSRASGDQSEDAVSTWLAGAPQPPPPTSSGSLSAKWGLLVLQDNPASPTLCSDTKQSSDSPSLGIRRAPYNTHILSRVLDQSLLVSVAAITHYHKLGSLKQQKFTLTVLEARSLKSRCQQYCAL

SEQ ID NO: 778092 - protein, 145 aa, Homo sapiens
LVFLRDNLCHCHVSEDKWREICPASWWHSESAMEQHSLRLRMDRKKALSSSCQRREIPCGRSGCRAPGKCLPDPSLWQNLKGHCDLYQVTQCLALGKGGAWSRHRRSRGEALSSPDRSAPFCCSRHYLQQSGAYSSRLSDDFSLS

SEQ ID NO: 778093 - protein, 249 aa, Homo sapiens
GRRSRLRPDHTGGTLSYFRASPGPQRPAWPRWRFGREARESDPSGRLRVGGAGCAARDPSGSRAGSSSRAAACRPGRPRGGAPSGPGEAQKRVDWRGSAGERRAHRGPLARTRSAACSAFRAGEGARPCSPSPGMGRAASPGAAWTASSPPPVRDSRLPKVAGAGARDKIPESGQPISEVAGNRTGRSLRTPGLAQAVRTLGRLQHLGELPAPWPSSLACLIPLQRLSPSESALPGDRRGRTLPTAPRT

SEQ ID NO: 778094 - protein, 33 aa, Homo sapiens
MTWAHPDHPGTSPHPHVLHFIVCKVPYATEGDT

SEQ ID NO: 778095 - protein, 948 aa, Homo sapiens
GFSAPQSEHGPRTLDNLINPPLNLQETQVTIEEITPLVPPQSGDKGQEDLTSYFLEALLKYIVIQVKSLEWKNKENQERGFSFLFSHFKKYYLPYIFPNICKENSLYHPILDIPQMRPKPHYVVIKKDAETNEAIYCTKEPFIKARVIVIRWLVSFWLEPKPHTGPHIPGMEGEVLPKNIQRAAASLVSREESKNDNADKTDRTTEPEQSHSNTSTLTEREPSSSSLCSIDEEHLTDIEIVRRVFSSKRSNVNFVTEIFRQAFLLPICEAAAMRKVVKVYQEWIQQEEKPLFMQEPEEIVITSSDLPCIENVTDHDISMEEGEKREEENGTNTADHVRNSSWAKNGSYQGALHNASEEATEQNIRAGTQAVLQVFIINSSNIFLLEPANEIKNLLDEHTDMCKRILNIYRYMVVQVSMDKKTWEQMLLVLLRVTESVLKMPSQAFLQFQGKKNMTLAGRLAGPLFQTLIVAWIKANLNVYISRELWDDLLSVLSSLTYWEELATEWSLTMETLTKVLARNLYSLDLSDLPLDKLSEQKQKKHKGKGVGHEFQKVSVDKSFSRGWSRDQPGQAPMRQRSATTTGSPGTEKARSIVRQKTVAMRSRSIGECALPSAYIRSAKSAPVLIHTSKPFLPDIVLTPLSDELSDIDDAQILPRSTRVRHFSQSEETGNEVFGALNEEQPLPRSSSTSDILEPFTVERAKVNKEDMSQKLPPLNSDIGGSSANVPDLMDEFIAERLRSGNASTMTRRGSSPGSLEIPKDLPDILNKQNQMRPIDDPGVPSEWTSPASAGSSDLISSDSHSDSFSAFQYDGRKFDNFGFGTDTGVTSSADVDSGSGHHQSAEEQEVASLTTLHIDSETSSLNQQAFSAEVATITGSESASPVHSPLGSRSQTPSPSTLNIDHMEQKDLQLDEKLHHSVLQTPDDLGNISKLDIYLFSFRASVSGDHK

SEQ ID NO: 778096 - protein, 600 aa, Homo sapiens
GFSAPQSEHGPRTLDNLINPPLNLQETQVTIEEITPLVPPQSGDKGQEDLTSYFLEALLKYIVIQVKSLEWKNKENQERGFSFLFSHFKKYYLPYIFPNICKENSLYHPILDIPQMRPKPHYVVIKKDAETNEAIYCTKEPFIKARVIVIRWLVSFWLEPKPHTGPHIPGMEGEVLPKNIQRAAASLVSREESKNDNADKTDRTTEPEQSHSNTSTLTEREPSSSSLCSIDEEHLTDIEIVRRVFSSKRSNVNFVTEIFRQAFLLPICEAAAMRKVVKVYQEWIQQEEKPLFMQEPEEIVITSSDLPCIENVTDHDISMEEGEKREEENGTNTADHVRNSSWAKNGSYQGALHNASEEATEQNIRAGTQAVLQVFIINSSNIFLLEPANEIKNLLDEHTDMCKRILNIYRYMVVQVSMDKKTWEQMLLVLLRVTESVLKMPSQAFLQFQGKKNMTLAGRLAGPLFQTLIVAWIKANLNVYISRELWDDLLSVLSSLTYWEELATEWSLTMETLTKVLARNLYSLDLSDLPLDKLSEQKQKKHKGKGVGHEFQKVSVDKSFSRGWSRDQPGQAPMRQRSATTTGSPGTEKARSIVRQKTVG

SEQ ID NO: 778097 - protein, 417 aa, Homo sapiens
MLLVLLRVTESVLKMPSQAFLQFQGKKNMTLAGRLAGPLFQTLIVAWIKANLNVYISRELWDDLLSVLSSLTYWEELATEWSLTMETLTKVLARNLYSLDLSDLPLDKLSEQKQKKHKGKGVGHEFQKVSVDKSFSRGWSRDQPGQAPMRQRSATTTGSPGTEKARSIVRQKTVDIDDAQILPRSTRVRHFSQSEETGNEVFGALNEEQPLPRSSSTSDILEPFTVERAKVNKEDMSQKLPPLNSDIGGSSANVPDLMDEFIAERLRSGNASTMTRRGSSPGSLEIPKDLPDILNKQNQMRPIDDPGVPSEWTSPASAGSSDLISSDSHSDSFSAFQYDGRKFDNFGFGTDTGVTSSADVDSGSGHHQSAEEQEVASLTTLHIDSETSSLNQQAFSAEVATITGKVIHGNVFLKCIF

SEQ ID NO: 778098 - protein, 336 aa, Homo sapiens
MLLVLLRVTESVLKMPSQAFLQFQGKKNMTLAGRLAGPLFQTLIVAWIKANLNVYISRELWDDLLSVLSSLTYWEELATEWSLTMETLTKVLARNLYSLDLSDLPLDKLSEQKQKKHKGKGVGHEFQKVSVDKSFSRGWSRDQPGQAPMRQRSATTTGSPGTEKARSIVRQKTVDIDDAQILPRSTRVRHFSQSEETGNEVFGALNEEQPLPRSSSTSDILEPFTVERAKGAVPVIDSSSRHAPSLQSSTEASSITRSTESHITDTHSRESSLEVGDSIYDHLCHLIGPVELADSAFEQIQYIDLEGDDDLLSTLKEYFKENQENHSKNETGKDPA

SEQ ID NO: 778099 - protein, 726 aa, Homo sapiens
GFSAPQSEHGPRTLDNLINPPLNLQETQVTIEEITPLVPPQSGDKGQEDLTSYFLEALLKYIVIQRAAASLVSREESKNDNADKTDRTTEPEQSHSNTSTLTEREPSSSSLCSIDEEHLTDIEIVRRVFSSKRSNVNFVTEIFRQAFLLPICEAAAMRKVVKVYQEWIQQEEKPLFMQEPEEIVITSSDLPCIENVTDHDISMEEGEKREEENGTNTADHVRNSSWAKNGSYQGALHNASEEATEQNIRAGTQAVLQVFIINSSNIFLLEPANEIKNLLDEHTDMCKRILNIYRYMVVQVSMDKKTWEQMLLVLLRVTESVLKMPSQAFLQFQGKKNMTLAGRLAGPLFQTLIVAWIKANLNVYISRELWDDLLSVLSSLTYWEELATEWSLTMETLTKVLARNLYSLDLSDLPLDKLSEQKQKKHKGKGVGHEFQKVSVDKSFSRGWSRDQPGQAPMRQRSATTTGSPGTEKARSIVRQKTVDIDDAQILPRSTRVRHFSQSEETGNEVFGALNEEQPLPRSSSTSDILEPFTVERAKVNKEDMSQKLPPLNSDIGGSSANVPDLMDEFIAERLRSGNASTMTRRGSSPGSLEIPKDLPDILNKQNQMRPIDDPGVPSEWTSPASAGSSDLISSDSHSDSFSAFQYDGRKFDNFGFGTDTGVTSSADVDSGSGHHQSAEEQEVASLTTLHIDSETSSLNQQAFSAEVATITGKVIHGNVFLKCIF

SEQ ID NO: 778100 - protein, 423 aa, Homo sapiens
GFSAPQSEHGPRTLDNLINPPLNLQETQVTIEEITPLVPPQSGDKGQEDLTSYFLEALLKYIVIQVKSLEWKNKENQERGFSFLFSHFKKYYLPYIFPNICKENSLYHPILDIPQMRPKPHYVVIKKDAETNEAIYCTKEPFIKARVIVIRWLVSFWLEPKPHTGPHIPGMEGEVLPKNIQRAAASLVSREESKNDNADKTDRTTEPEQSHSNTSTLTEREPSSSSLCSIDEEHLTDIEIVRRVFSSKRSNVNFVTEIFRQAFLLPICEAAAMRKVVKVYQEWIQQEEKPLFMQEPEEIVITSSDLPCIENVTDHDISMEEGEKREEENGTNTADHVRNSSWAKNGSYQGALHNASEEATEQNIRAGTQAVLQVFIINSSNIFLLEPANEIKNLLDEHTDMCKRILNIYRYMVVQVSMDKKTW

SEQ ID NO: 778101 - protein, 277 aa, Homo sapiens
GFSAPQSEHGPRTLDNLINPPLNLQETQVTIEEITPLVPPQSGDKGQEDLTSYFLEALLKYIVIQVKSLEWKNKENQERGFSFLFSHFKKYYLPYIFPNICKENSLYHPILDIPQMRPKPHYVVIKKDAETNEAIYCTKEPFIKARVIVIRWLVSFWLEPKPHTGPHIPGMEGEVLPKNIQRAAASLVSREESKNDNADKTDRTTEPEQSHSNTSTLTEREPSSSSLCSIDEEHLTDIEIVRRVFSSKRSNVNFVTEIFRQVTYLSVFLIYKEGFYL

SEQ ID NO: 778102 - protein, 161 aa, Homo sapiens
GFSAPQSEHGPRTLDNLINPPLNLQETQVTIEEITPLVPPQSGDKGQEDLTSYFLEALLKYIVIQRAAASLVSREESKNDNADKTDRTTEPEQSHSNTSTLTEREPSSSSLCSIDEEHLTDIEIVRRVFSSKRSNVNFVTEIFRQVTYLSVFLIYKEGFYL

SEQ ID NO: 778103 - protein, 85 aa, Homo sapiens
SALQVRMVAAEHRHSSGLPYWPYLTAETLKNRMGRQPPPPTQQHSITDNSLSLKTPPECLLRPLPPSVDDNIKECPLAPLPPLSG

SEQ ID NO: 778104 - protein, 165 aa, Homo sapiens
KRARALGAGSVALQFSGQELHGSGPWAWAFDLGPLLGVVLILLLAEAHTGLLQVQAARLRMGGSSQSQQLHSSGAEKFMFATLRSQLWKGGQWRALPWPLSHTQAVLGGQGPGVVKDPLGAFAFQEQALVFHITLTKAGGFSGCDQLATADSSGVVLFLNISSCC

SEQ ID NO: 778105 - protein, 119 aa, Homo sapiens
AVSPPDRERLSQLWVLEATHLKTWQGAGIGEGWMVRVSDAITQLVTKPGSKPKRSSVPPGPVSNSSSSPAASLGLLAETVQMLGEWEESRGDPIHVTLGPKVGCGKQGKEHWIGSQAWV

SEQ ID NO: 778106 - protein, 86 aa, Homo sapiens
ATYRVGGRDQLVLAGKAPILRLPSLPAGGILMGTERGEVRHIPQVVSGRDKAVAILLLAASLLVQRATPRGSRPVTMCPDVKAAVA

SEQ ID NO: 778107 - protein, 69 aa, Homo sapiens
RRGAPLGSPLERRAAPAHEESGVRSSPPAGGCAPPAGTLRGPQPDARSDLTVNVRFACSHCIVAGLGDR

SEQ ID NO: 778108 - protein, 109 aa, Homo sapiens
PSFFTSSGSGFEAFFTAAGTLVVAVCTRKEYLTMSLPEVSFADSAWHCVAIVHVPGRRPFSQNLVHVYKDGHLVKTAPLRCPSLSEPFSSCCIGSAGYRTTTTTTGLPT

SEQ ID NO: 778109 - protein, 80 aa, Homo sapiens
YGISSTTRSADAWLEVLFYDYAYHTVSLLDILEQASYRVRFEEVIEYVTEPSEALIFTDGWANEKKKMKLNFMIHPKTTF

SEQ ID NO: 778110 - protein, 233 aa, Homo sapiens
  misc_feature (230)..(230): Xaa can be any naturally occurring amino acid
ASARLGVESAEGPRCRHRIAQLFAVGALVCCLVLLHLSAMISASRAAAARLVGAAASRGPTAARHQDSWNGLSHEAFRLVSRRDYASEAIKGAVVGIDLGTTNSCVAVMEGKQAKVLENAEGARTTPSVVAFTADGERLVGMPAKRQAVTNPNNTFYATKRLIGRRYDDPEVQKDIKNVPFKIVRASNGDAWVEAHGKLYSPSQIGAFVLMKMKETAENYLGHTAKKIGXPFG

SEQ ID NO: 778111 - protein, 68 aa, Homo sapiens
LLLFRVFFYFYVNCVSFYFFCLLITFTAFTFSLLFLLFFTFFILFFLFFLLLLLFRVFFYSIYNFLNL

SEQ ID NO: 778112 - protein, 721 aa, Homo sapiens
VTNPRPSPHVVGGFQKRCRHRIAQLFAVGALVCCLVLLHLSAMISASRAAAARLVGAAASRGPTAARHQDSWNGLSHEAFRLVSRRDYASEAIKGAVVGIDLGTTNSCVAVMEGKQAKVLENAEGARTTPSVVAFTADGERLVGMPAKRQAVTNPNNTFYATKRLIGRRYDDPEVQKDIKNVPFKIVRASNGDAWVEAHGKLYSPSQIGAFVLMKMKETAENYLGHTAKNAVITVPAYFNDSQRQATKDAGQISGLNVLRVINEPTAAALAYGLDKSEDKVIAVYDLGGGTFDISILEIQKGVFEVKSTNGDTFLGGEDFDQALLRHIVKEFKRETGVDLTKDNMALQRVREAAEKAKCELSSSVQTDINLPYLTMDSSGPKHLNMKLTRAQFEGIVTDLIRRTIAPCQKAMQDAEVSKSDIGEVILVGGMTRMPKVQQTVQDLFGRAPSKAVNPDEAVAIGAAIQGGVLAGDVTDVLLLDVTPLSLGIETLGGVFTKLINRNTTIPTKKSQVFSTAADGQTQVEIKVCQGEREMAGDNKLLGQFTLIGIPPAPRGVPQIEVTFDIDANGIVHVSAKDKGTGREQQIVIQSSGGLSKDDIENMVKNAEKYAEEDRRKKERVEAVNMAEGIIHDTETKMEEFKDQLPADECNKLKEEISKMRELLARKDSETGENIRQAASSLQQASLKLFEMAYKKMASEREGSGSSGTGEQKEDQKEEKQ

SEQ ID NO: 778113 - protein, 721 aa, Homo sapiens
  misc_feature (5)..(6): Xaa can be any naturally occurring amino acid
SLQYXXGYCSEAWVCARCRHRIAQLFAVGALVCCLVLLHLSAMISASRAAAARLVGAAASRGPTAARHQDSWNGLSHEAFRLVSRRDYASEAIKGAVVGIDLGTTNSCVAVMEGKQAKVLENAEGARTTPSVVAFTADGERLVGMPAKRQAVTNPNNTFYATKRLIGRRYDDPEVQKDIKNVPFKIVRASNGDAWVEAHGKLYSPSQIGAFVLMKMKETAENYLGHTAKNAVITVPAYFNDSQRQATKDAGQISGLNVLRVINEPTAAALAYGLDKSEDKVIAVYDLGGGTFDISILEIQKGVFEVKSTNGDTFLGGEDFDQALLRHIVKEFKRETGVDLTKDNMALQRVREAAEKAKCELSSSVQTDINLPYLTMDSSGPKHLNMKLTRAQFEGIVTDLIRRTIAPCQKAMQDAEVSKSDIGEVILVGGMTRMPKVQQTVQDLFGRAPSKAVNPDEAVAIGAAIQGGVLAGDVTDVLLLDVTPLSLGIETLGGVFTKLINRNTTIPTKKSQVFSTAADGQTQVEIKVCQGEREMAGDNKLLGQFTLIGIPPAPRGVPQIEVTFDIDANGIVHVSAKDKGTGREQQIVIQSSGGLSKDDIENMVKNAEKYAEEDRRKKERVEAVNMAEGIIHDTETKMEEFKDQLPADECNKLKEEISKMRELLARKDSETGENIRQAASSLQQASLKLFEMAYKKMASEREGSGSSGTGEQKEDQKEEKQ

SEQ ID NO: 778114 - protein, 717 aa, Homo sapiens
GVRYEAGVDRPRRCRHRIAQLFAVGALVCCLVLLHLSAMISASRAAAARLVGAAASRGPTAARHQDSWNGLSHEAFRLVSRRDYASEAIKGAVVGIDLGTTNSCVAVMEGKQAKVLENAEGARTTPSVVAFTADGERLVGMPAKRQAVTNPNNTFYATKRLIGRRYDDPEVQKDIKNVPFKIVRASNGDAWVEAHGKLYSPSQIGAFVLMKMKETAENYLGHTAKNAVITVPAYFNDSQRQATKDAGQISGLNVLRVINEPTAAALAYGLDKSEDKVIAVYDLGGGTFDISILEIQKGVFEVKSTNGDTFLGGEDFDQALLRHIVKEFKRETGVDLTKDNMALQRVREAAEKAKCELSSSVQTDINLPYLTMDSSGPKHLNMKLTRAQFEGIVTDLIRRTIAPCQKAMQDAEVSKSDIGEVILVGGMTRMPKVQQTVQDLFGRAPSKAVNPDEAVAIGAAIQGGVLAGDVTDVLLLDVTPLSLGIETLGGVFTKLINRNTTIPTKKSQVFSTAADGQTQVEIKVCQGEREMAGDNKLLGQFTLIGIPPAPRGVPQIEVTFDIDANGIVHVSAKDKGTGREQQIVIQSSGGLSKDDIENMVKNAEKYAEEDRRKKERVEAVNMAEGIIHDTETKMEEFKDQLPADECNKLKEEISKMRELLARKDSETGENIRQAASSLQQASLKLFEMAYKKMASEREGSGSSGTGEQKEDQKEEKQ

SEQ ID NO: 778115 - protein, 718 aa, Homo sapiens
ASARLGVESAEGPRCRHRIAQLFAVGALVCCLVLLHLSAMISASRAAAARLVGAAASRGPTAARHQDSWNGLSHEAFRLVSRRDYASEAIKGAVVGIDLGTTNSCVAVMEGKQAKVLENAEGARTTPSVVAFTADGERLVGMPAKRQAVTNPNNTFYATKRLIGRRYDDPEVQKDIKNVPFKIVRASNGDAWVEAHGKLYSPSQIGAFVLMKMKETAENYLGHTAKNAVITVPAYFNDSQRQATKDAGQISGLNVLRVINEPTAAALAYGLDKSEDKVIAVYDLGGGTFDISILEIQKGVFEVKSTNGDTFLGGEDFDQALLRHIVKEFKRETGVDLTKDNMALQRVREAAEKAKCELSSSVQTDINLPYLTMDSSGPKHLNMKLTRAQFEGIVTDLIRRTIAPCQKAMQDAEVSKSDIGEVILVGGMTRMPKVQQTVQDLFGRAPSKAVNPDEAVAIGAAIQGGVLAGDVTDVLLLDVTPLSLGIETLGGVFTKLINRNTTIPTKKSQVFSTAADGQTQVEIKVCQGEREMAGDNKLLGQFTLIGIPPAPRGVPQIEVTFDIDANGIVHVSAKDKGTGREQQIVIQSSGGLSKDDIENMVKNAEKYAEEDRRKKERVEAVNMAEGIIHDTETKMEEFKDQLPADECNKLKEEISKMRELLARKDSETGENIRQAASSLQQASLKLFEMAYKKMASEREGSGSSGTGEQKEDQKEEKQ

SEQ ID NO: 778116 - protein, 721 aa, Homo sapiens; identical to SEQ ID NO: 778112

SEQ ID NO: 778117 - protein, 721 aa, Homo sapiens; identical to SEQ ID NO: 778112

SEQ ID NO: 778118 - protein, 721 aa, Homo sapiens; identical to SEQ ID NO: 778112

SEQ ID NO: 778119 - protein, 444 aa, Homo sapiens
VTNPRPSPHVVGGFQKRCRHRIAQLFAVGALVCCLVLLHLSAMISASRAAAARLVGAAASRGPTAARHQDSWNGLSHEAFRLVSRRDYASEAIKGAVVGIDLGTTNSCVAVMEGKQAKVLENAEGARTTPSVVAFTADGERLVGMPAKRQAVTNPNNTFYATKRLIGRRYDDPEVQKDIKNVPFKIVRASNGDAWVEAHGKLYSPSQIGAFVLMKMKETAENYLGHTAKNAVITVPAYFNDSQRQATKDAGQISGLNVLRVINEPTAAALAYGLDKSEDKVIAVYDLGGGTFDISILEIQKGVFEVKSTNGDTFLGGEDFDQALLRHIVKEFKRETGVDLTKDNMALQRVREAAEKAKCELSSSVQTDINLPYLTMDSSGPKHLNMKLTRAQFEGIVTDLIRRTIAPCQKAMQDAEVSKSDIGEVILVGGMTRMPKEICKKKKK

SEQ ID NO: 778120 - protein, 721 aa, Homo sapiens; identical to SEQ ID NO: 778112

SEQ ID NO: 778121 - protein, 540 aa, Homo sapiens
VTNPRPSPHVVGGFQKRCRHRIAQLFAVGALVCCLVLLHLSAMISASRAAAARLVGAAASRGPTAARHQDSWNGLSHEAFRLVSRRDYASEAIKGAVVGIDLGTTNSCVAVMEGKQAKVLENAEGARTTPSVVAFTADGERLVGMPAKRQAVTNPNNTFYATKRLIGRRYDDPEVQKDIKNVPFKIVRASNGDAWVEAHGKLYSPSQIGAFVLMKMKETAENYLGHTAKNAVITVPAYFNDSQRQATKDAGQISGLNVLRVINEPTAAALAYGLDKSEDKVIAVYDLGGGTFDISILEIQKGVFEVKSTNGDTFLGGEDFDQALLRHIVKEFKRETGVDLTKDNMALQRVREAAEKAKCELSSSVQTDINLPYLTMDSSGPKHLNMKLTRAQFEGIVTDLIRRTIAPCQKAMQDAEVSKSDIGEVILVGGMTRMPKVQQTVQDLFGRAPSKAVNPDEAVAIGAAIQGGVLAGDVTDVLLLDVTPLSLGIETLGGVFTKLINRNTTIPTKKSQVRAITSYLVTWVLGSMTDVIAATFMSFF

SEQ ID NO: 778122 - protein, 721 aa, Homo sapiens; identical to SEQ ID NO: 778112

SEQ ID NO: 778123 - protein, 721 aa, Homo sapiens; identical to SEQ ID NO: 778112

SEQ ID NO: 778124 - protein, 725 aa, Homo sapiens
VTNPRPSPHVVGGFQKRCRHRIAQLFAVGALVCCLVLLHLSAMISASRAAAARLVGAAASRGPTAARHQDSWNGLSHEAFRLVSRRDYASEAIKGAVVGIDLGTTNSCVAVMEGKQAKVLENAEGARTTPSVVAFTADGERLVGMPAKRQAVTNPNNTFYATKRLIGRRYDDPEVQKDIKNVPFKIVRASNGDAWVEAHGKLYSPSQIGAFVLMKMKETAENYLGHTAKNAVITVPAYFNDSQRQATKDAGQISGLNVLRVINEPTAAALAYGLDKSEDKVIAVYDLGGGTFDISILEIQKGVFEVKSTNGDTFLGGEDFDQALLRHIVKEFKRETGVDLTKDNMALQRVREAAEKAKCELSSSVQTDINLPYLTMDSSGPKHLNMKLTRAQFEGIVTDLIRRTIAPCQKAMQDAEVSKSDIGEVILVGGMTRMPKVQQTVQDLFGRAPSKAVNPDEAVAIGAAIQGGVLAGDVTDVLLLDVTPLSLGIETLGGVFTKLINRNTTIPTKKSQVFSTAADGQTQVEIKVCQGEREMAGDNKLLGQFTLIGIPPAPRGVPQIEVTFDIDANGIVHVSAKDKGTGREQQIVIQSSGGLSKDDIENMVKNAEKYAEEDRRKKERVEAVNMAEGIIHDTETKMEEFKDQLPADECNKLKEEISKMRELLARKDSETGENIRQAASSLQQASLKLFEMAYKKMASEREGSGSSGTGEQKEDQKEERSEETS

SEQ ID NO: 778125 - protein, 721 aa, Homo sapiens; identical to SEQ ID NO: 778112

SEQ ID NO: 778126 - protein, 553 aa, Homo sapiens
LGARLGGAERHKNVPFKIVRASNGDAWVEAHGKLYSPSQIGAFVLMKMKETAENYLGHTAKNAVITVPAYFNDSQRQATKDAGQISGLNVLRVINEPTAAALAYGLDKSEDKVIAVYDLGGGTFDISILEIQKGVFEVKSTNGDTFLGGEDFDQALLRHIVKEFKRETGVDLTKDNMALQRVREAAEKAKCELSSSVQTDINLPYLTMDSSGPKHLNMKLTRAQFEGIVTDLIRRTIAPCQKAMQDAEVSKSDIGEVILVGGMTRMPKVQQTVQDLFGRAPSKAVNPDEAVAIGAAIQGGVLAGDVTDVLLLDVTPLSLGIETLGGVFTKLINRNTTIPTKKSQVFSTAADGQTQVEIKVCQGEREMAGDNKLLGQFTLIGIPPAPRGVPQIEVTFDIDANGIVHVSAKDKGTGREQQIVIQSSGGLSKDDIENMVKNAEKYAEEDRRKKERVEAVNMAEGIIHDTETKMEEFKDQLPADECNKLKEEISKMRELLARKDSETGENIRQAASSLQQASLKLFEMAYKKMASEREGSGSSGTGEQKEDQKEEKQ

SEQ ID NO: 778127 - protein, 322 aa, Homo sapiens
EYRASEAAVNRTRADAEVSKSDIGEVILVGGMTRMPKVQQTVQDLFGRAPSKAVNPDEAVAIGAAIQGGVLAGDVTDVLLLDVTPLSLGIETLGGVFTKLINRNTTIPTKKSQVFSTAADGQTQVEIKVCQGEREMAGDNKLLGQFTLIGIPPAPRGVPQIEVTFDIDANGIVHVSAKDKGTGREQQIVIQSSGGLSKDDIENMVKNAEKYAEEDRRKKERVEAVNMAEGIIHDTETKMEEFKDQLPADECNKLKEEISKMRELLARKDSETGENIRQAASSLQQASLKLFEMAYKKMASEREGSGSSGTGEQKEDQKEEKQ

SEQ ID NO: 778128 - protein, 554 aa, Homo sapiens
SLAGDMMYGWVGDSLSLAGDMMILKYRKDIKNVPFKIVRASNGDAWVEAHGKLYSPSQIGAFVLMKMKETAENYLGHTAKNAVITVPAYFNDSQRQATKDAGQISGLNVLRVINEPTAAALAYGLDKSEDKVIAVYDLGGGTFDISILEIQKGVFEVKSTNGDTFLGGEDFDQALLRHIVKEFKRETGVDLTKDNMALQRVREAAEKAKCELSSSVQTDINLPYLTMDSSGPKHLNMKLTRAQFEGIVTDLIRRTIAPCHVGGMTRMPKVQQTVQDLFGRAPSKAVNPDEAVAIGAAIQGGVLAGDVTDVLLLDVTPLSLGIETLGGVFTKLINRNTTIPTKKSQVFSTAADGQTQVEIKVCQGEREMAGDNKLLGQFTLIGIPPAPRGVPQIEVTFDIDANGIVHVSAKDKGTGREQQIVIQSSGGLSKDDIENMVKNAEKYAEEDRRKKERVEAVNMAEGIIHDTETKMEEFKDQLPADECNKLKEEISKMRELLARKDSETGENIRQAASSLQQASLKLFEMAYKKMASEREGSGSSGTGEQKEDQKEEKQ

SEQ ID NO: 778129 - protein, 697 aa, Homo sapiens
VTNPRPSPHVVGGFQKRCRHRIAQLFAVGALVCCLVLLHLSAMISASRAAAARLVGAAASRGPTAARHQDSWNGLSHEAFRLVSRRDYASEAIKGAVVGIDLGTTNSCVAVMEGKQAKVLENAEGARTTPSVVAFTADGERLVGMPAKRQAVTNPNNTFYATKRLIGRRYDDPEVQKDIKNVPFKIVRASNGDAWVEAHGKLYSPSQIGAFVLMKMKETAENYLGHTAKNAVITVPAYFNDSQRQATKDAGQISGLNVLRVINEPTAAALAYGLDKSEDKVIAVYDLGGGTFDISILEIQKGVFEVKSTNGDTFLGGEDFDQALLRHIVKEFKRETGVDLTKDNMALQRVREAAEKAKCELSSSVQTDINLPYLTMDSSGPKHLNMKLTRAQFEGIVTDLIRRTIAPCQKAMQDAEVSKSDIGEVILVGGMTRMPKVQQTVQDLFGRAPSKAVNPDEAVAIGAAIQGGVLAGDVTDVLLLDVTPLSLGIETLGGVFTKLINRNTTIPTKKSQVFSTAADGQTQVEIKVCQGEREMAGDNKLLGQFTLIGIPPAPRGVPQIEVTFDIDANGIVHVSAKDKGTGREQQIVIQSSGGLSKDDIENMVKNAEKYAEEDRRKKERVEAVNMAEGIIHDTETKMEEFKDQLPADECNKEGRDSQMRGAPGRKEGNRGIFDGGFSSSEGTEAGPEAYNEGLGKG

SEQ ID NO: 778130 - protein, 553 aa, Homo sapiens
VTNPRPSPHVVGGFQKRCRHRIAQLFAVGALVCCLVLLHLSAMISASRAAAARLVGAAASRGPTAARHQDSWNGLSHEAFRLVSRRDYASEAIKGAVVGIDLGTTNSCVAVMEGKQAKVLENAEGARTTPSVVAFTADGERLVGMPAKRQAVTNPNNTFYATKRLIGRRYDDPEVQKDIKNVPFKIVRASNGDAWVEAHGKLYSPSQIGAFVLMKMKETAENYLGHTAKNAVITVPAYFNDSQRQATKDAGQISGLNVLRVINEPTAAALAYGLDKSEDKVIAVYDLGGGTFDISILEIQKGVFEVKSTNGDTFLGGEDFDQALLRHIVKEFKRETGVDLTKDNMALQRVREAAEKAKCELSSSVQTDINLPYLTMDSSGPKHLNMKLTRAQFEGIVTDLIRRTIAPCQKAMQDAEVSKSDIGEVILVGGMTRMPKVQQTVQDLFGRAPSKAVNPDEAVAIGAAIQGGVLAGDVTDVLLLDVTPLSLGIETLGGVFTKLINRNTTIPTKKSQVFSTAADGQTQVEIKVCQGEREMAGDNKLLGQFTLVGYCES

SEQ ID NO: 778131 - protein, 374 aa, Homo sapiens
VTNPRPSPHVVGGFQKRCRHRIAQLFAVGALVCCLVLLHLSAMISASRAAAARLVGAAASRGPTAARHQDSWNGLSHEAFRLVSRRDYASEAIKGAVVGIDLGTTNSCVAVMEGKQAKVLENAEGARTTPSVVAFTADGERLVGMPAKRQAVTNPNNTFYATKRLIGRRYDDPEVQKDIKNVPFKIVRASNGDAWVEAHGKLYSPSQIGAFVLMKMKETAENYLGHTAKNAVITVPAYFNDSQRQATKDAGQISGLNVLRVINEPTAAALAYGLDKSEDKVIAVYDLGGGTFDISILEIQKGVFEVKSTNGDTFLGGEDFDQALLRHIVKEFKRETGVDLTKDNMALQRVREAAEKAKCELSSSVQRNLEQWET

SEQ ID NO: 778132 - protein, 374 aa, Homo sapiens; identical to SEQ ID NO: 778131

SEQ ID NO: 778133 - protein, 721 aa, Homo sapiens; identical to SEQ ID NO: 778112

SEQ ID NO: 778134 - protein, 771 aa, Homo sapiens
VTNPRPSPHVVGGFQKRCRHRIAQLFAVGALVCCLVLLHLSAMISASRAAAARLVGAAASRGPTAARHQDSWNGLSHEAFRLVSRRDYASEAIKGAVVGIDLGTTNSCVAVMEGKQAKVLENAEGARTTPSVVAFTADGERLVGMPAKRQAVTNPNNTFYATKRLIGRRYDDPEVQKDIKNVPFKIVRASNGDAWVEAHGKLYSPSQIGAFVLMKMKETAENYLGHTAKNAVITVPAYFNDSQRQATKDAGQISGLNVLRVINEPTAAALAYGLDKSEDKVIAVYDLGGGTFDISILEIQKGVFEVKSTNGDTFLGGEDFDQALLRHIVKEFKRETGVDLTKDNMALQRVREAAEKAKCELSSSVQTDINLPYLTMDSSGPKHLNMKLTRAQFEGIVTDLIRRTIAPCQKAMQDAEVSKSDIGEVILVGGMTRMPKEICKKKKNEPGKKRSWTRWMPHILRNPRGRVQWLTPVIPAFGRPRRADHEVQQTVQDLFGRAPSKAVNPDEAVAIGAAIQGGVLAGDVTDVLLLDVTPLSLGIETLGGVFTKLINRNTTIPTKKSQVFSTAADGQTQVEIKVCQGEREMAGDNKLLGQFTLIGIPPAPRGVPQIEVTFDIDANGIVHVSAKDKGTGREQQIVIQSSGGLSKDDIENMVKNAEKYAEEDRRKKERVEAVNMAEGIIHDTETKMEEFKDQLPADECNKLKEEISKMRELLARKDSETGENIRQAASSLQQASLKLFEMAYKKMASEREGSGSSGTGEQKEDQKEEKQ

SEQ ID NO: 778135 - protein, 703 aa, Homo sapiens
VTNPRPSPHVVGGFQKRCRHRIAQLFAVGALVCCLVLLHLSAMISASRAAAARLVGAAASRGPTAARHQDSWNGLSHEAFRLVSRRDYASEAIKGAVVGIDLGTTNSCVAVMEGKQAKVLENAEGARTTPSVVAFTADGERLVGMPAKRQAVTNPNNTFYATKRLIGRRYDDPEVQKDIKNVPFKIVRASNGDAWVEAHGKLYSPSQIGAFVLMKMKETAENYLGHTAKNAVITVPAYFNDSQRQATKDAGQISGLNVLRVINEPTAAALAYGLDKSEDKVIAVYDLGGGTFDISILEIQKGVFEVKSTNGDTFLGGEDFDQALLRHIVKEFKRETGVDLTKDNMALQRVREAAEKAKCELSSSVQTDINLPYLTMDSSGPKHLNMKLTRAQFEGIVTDLIRRTIAPCHVGGMTRMPKVQQTVQDLFGRAPSKAVNPDEAVAIGAAIQGGVLAGDVTDVLLLDVTPLSLGIETLGGVFTKLINRNTTIPTKKSQVFSTAADGQTQVEIKVCQGEREMAGDNKLLGQFTLIGIPPAPRGVPQIEVTFDIDANGIVHVSAKDKGTGREQQIVIQSSGGLSKDDIENMVKNAEKYAEEDRRKKERVEAVNMAEGIIHDTETKMEEFKDQLPADECNKLKEEISKMRELLARKDSETGENIRQAASSLQQASLKLFEMAYKKMASEREGSGSSGTGEQKEDQKEEKQ

SEQ ID NO: 778136 - protein, 634 aa, Homo sapiens
VTNPRPSPHVVGGFQKRCRHRIAQLFAVGALVCCLVLLHLSAMISASRAAAARLVGAAASRGPTAARHQDSWNGLSHEAFRLVSRRDYASEAIKGAVVGIDLGTTNSCVAVMEGKQAKVLENAEGARTTPSVVAFTADGERLVGMPAKRQAVTNPNNTFYATKRLIGRRYDDPEVQKDIKNVPFKIVRASNGDAWVEAHGKLYSPSQIGAFVLMKMKETAENYLGHTAKNAVITVPAYFNDSQRQATKDAGQISGLNVLRVINEPTAAALAYGLDKSEDKVIAVYDLGGGTFDISILEIQKGVFEVKSTNGDTFLGGEDFDQALLRHIVKEFKRETGVDLTKDNMALQRVREAAEKAKCELSSSVQTDINLPYLTMDSSGPKHLNMKLTRAQFEGIVTDLIRRTIAPCQKAMQDAEVSKSDIGEVILVGGMTRMPKVQQTVQDLFGRAPSKAVNPDEAVAIGAAIQGGVLAGDVTDVLLLDVTPLSLGIETLGGVFTKLINRNTTIPTKKSQVFSTAADGQTQVEIKVCQGEREMAGDNKLLGQFTLIGIPPAPRGVPQIEVTFDIDANGIVHVSAKDKGTGREQQIVIQSSGGLSKDDIENMVKNAEKYAEEDRRKKVITSCLLNFNLSKAQS

SEQ ID NO: 778137 - protein, 721 aa, Homo sapiens; identical to SEQ ID NO: 778112

SEQ ID NO: 778138 - protein, 522 aa, Homo sapiens
MARYEAGFEFGRGLMKMKETAENYLGHTAKNAVITVPAYFNDSQRQATKDAGQISGLNVLRVINEPTAAALAYGLDKSEDKVIAVYDLGGGTFDISILEIQKGVFEVKSTNGDTFLGGEDFDQALLRHIVKEFKRETGVDLTKDNMALQRVREAAEKAKCELSSSVQTDINLPYLTMDSSGPKHLNMKLTRAQFEGIVTDLIRRTIAPCQKAMQDAEVSKSDIGEVILVGGMTRMPKVQQTVQDLFGRAPSKAVNPDEAVAIGAAIQGGVLAGDVTDVLLLDVTPLSLGIETLGGVFTKLINRNTTIPTKKSQVFSTAADGQTQVEIKVCQGEREMAGDNKLLGQFTLIGIPPAPRGVPQIEVTFDIDANGIVHVSAKDKGTGREQQIVIQSSGGLSKDDIENMVKNAEKYAEEDRRKKERVEAVNMAEGIIHDTETKMEEFKDQLPADECNKLKEEISKMRELLARKDSETGENIRQAASSLQQASLKLFEMAYKKMASEREGSGSSGTGEQKEDQKEEKQ

SEQ ID NO: 778139 - protein, 368 aa, Homo sapiens
VFCDDSLNLPPLHTDINLPYLTMDSSGPKHLNMKLTRAQFEGIVTDLIRRTIAPCQKAMQDAEVSKSDIGEVILVGGMTRMPKVQQTVQDLFGRAPSKAVNPDEAVAIGAAIQGGVLAGDVTDVLLLDVTPLSLGIETLGGVFTKLINRNTTIPTKKSQVFSTAADGQTQVEIKVCQGEREMAGDNKLLGQFTLIGIPPAPRGVPQIEVTFDIDANGIVHVSAKDKGTGREQQIVIQSSGGLSKDDIENMVKNAEKYAEEDRRKKERVEAVNMAEGIIHDTETKMEEFKDQLPADECNKLKEEISKMRELLARKDSETGENIRQAASSLQQASLKLFEMAYKKMASEREGSGSSGTGEQKEDQKEEKQ

SEQ ID NO: 778140 - protein, 296 aa, Homo sapiens
  misc_feature (5)..(5): Xaa can be any naturally occurring amino acid
MRISXPPSYWISSIQALDLFGRAPSKAVNPDEAVAIGAAIQGGVLAGDVTDVLLLDVTPLSLGIETLGGVFTKLINRNTTIPTKKSQVFSTAADGQTQVEIKVCQGEREMAGDNKLLGQFTLIGIPPAPRGVPQIEVTFDIDANGIVHVSAKDKGTGREQQIVIQSSGGLSKDDIENMVKNAEKYAEEDRRKKERVEAVNMAEGIIHDTETKMEEFKDQLPADECNKLKEEISKMRELLARKDSETGENIRQAASSLQQASLKLFEMAYKKMASEREGSGSSGTGEQKEDQKEEKQ

SEQ ID NO: 778141 - protein, 265 aa, Homo sapiens
  misc_feature (3)..(3): Xaa can be any naturally occurring amino acid
RGXTKIKAGTGCVLAGDVTDVLLLDVTPLSLGIETLGGVFTKLINRNTTIPTKKSQVFSTAADGQTQVEIKVCQGEREMAGDNKLLGQFTLIGIPPAPRGVPQIEVTFDIDANGIVHVSAKDKGTGREQQIVIQSSGGLSKDDIENMVKNAEKYAEEDRRKKERVEAVNMAEGIIHDTETKMEEFKDQLPADECNKLKEEISKMRELLARKDSETGENIRQAASSLQQASLKLFEMAYKKMASEREGSGSSGTGEQKEDQKEEKQ

SEQ ID NO: 778142 - protein, 540 aa, Homo sapiens; identical to SEQ ID NO: 778121

SEQ ID NO: 778143 - protein, 75 aa, Homo sapiens
TTTKFGGVDEISKMRELLARKDSETGENIRQAASSLQQASLKLFEMAYKKMASEREGSGSSGTGEQKEDQKEEKQ

SEQ ID NO: 778144 - protein, 66 aa, Homo sapiens
ESHQQLCCQRFERLSDSAKQELMDFKSRRVSSFRKNLIELAELELKHAKASTLILRNTLVALKGEP

SEQ ID NO: 778145 - protein, 78 aa, Homo sapiens
SPLCVSFLTDGRVSGMFVAKASQPPQLRASVRLLVLGLSQELGGLPGGMQWTRSFLSSLRESLPRDCHCRRIAAVHAA

SEQ ID NO: 778146 - protein, 68 aa, Homo sapiens
SVLPLLTGLLGASVFDPGTTTGTHSGKVDGSSRLSNRVLTCAGQWHLHHWTRKALDMAHPLLPFLRQM

SEQ ID NO: 778147 - protein, 76 aa, Homo sapiens
MILLRPSSTTAPACGRLASQVTMTPGVFPFIVWHPKHQGMMVGMGRKDSHVGDEAQSKRGILTLKCLIEHGIITNW

SEQ ID NO: 778148 - protein, 78 aa, Homo sapiens
MRDDGEQPTDLSLIYNYSSLSSTRWGTEVQFPGESRLLKRPSDRLQPLLSQVLSTTLYHQYPTLILMPKVPLDTRDTL

SEQ ID NO: 778149 - protein, 70 aa, Homo sapiens
KANVGNGGLASPSSWTERAAITWAMETKRASLSHTGMEAQSSRITTPAQSSRKRCGEGNDHDTDAHGVSP

SEQ ID NO: 778150 - protein, 276 aa, Homo sapiens
MAWRALHPLLLLLLLFPGSQAQSKAQVLQSVAGQTLTVRCQYPPTGSLYEKKGWCKEASALVCIRLVTSSKPRTMAWTSRFTIWDDPDAGFFTVTMTDLREEDSGHYWCRIYRPSDNSVSKSVRFYLVVSPASASTQTPWTPRDLVSSQTQTQSCVPPTAGARQAPESPSTIPVPSQPQNSTLRPGPAAPIALVPVFCGLLVAKSLVLSALLVWWGDIWWKTVMELRSLDTQKATCHLQQVTDLPWTSVSSPVEREILYHTVARTKISDDDDEHTL

SEQ ID NO: 778151 - protein, 270 aa, Homo sapiens [sequence omitted]

SEQ ID NO: 778152 - protein, 258 aa, Homo sapiens [sequence omitted]

SEQ ID NO: 778153 - protein, 41 aa, Homo sapiens
QCGCGGGTQREWALLAEHRLGNSLKTELVKPPTCAFYMNSL

SEQ ID NO: 778154 - protein, 178 aa, Homo sapiens
AGDAAGETEGSMERMGEPSQDPKQGTSGGVDTSSEQIATLTGFPDFREHIAKIFEKPVLGALATPGEKAGAGRSAVGKDLTRPLGPEKLLDGPPGVDVTLLPAPPARLQVEKKQQLAGEAEISHLALQDPASDKLLGPAGLTWERNLPGAGVGKEMAGVPPTLREDERPEGPGAAWPG

SEQ ID NO: 778155 - protein, 135 aa, Homo sapiens
PTRVSSSTALNLQHWLPTGSPDAWPSNWNISSTPGIQLHSPQTGTSAPCRVSRCTALKLEHQLPAGYPAARPSNWNISSPPGLQLHGPHTGTSAPHQISSCTALKQEHQLPTGSPAARLSNRNISSPPDLQLHGS

SEQ ID NO: 778156 - protein, 136 aa, Homo sapiens
TCRVCTCPVALGLQIGDADTALLLVCAKPAQPASSPARPPRPWAPGGPPYPAPTKQQARSWRASFPDRERGQSRADGSDQRTTAPQGPPTVLGPRPPVPRPPRGLRRSWDAHWLRPGATLCPSVTPHGGSHHPSRA

SEQ ID NO: 778157 - protein, 26 aa, Homo sapiens
MTICILLPAFSLNTTVLNPEPSRESY

SEQ ID NO: 778158 - protein, 73 aa, Homo sapiens
QIFRWGNLLNQVKQIFHHRDNSLMDPWISPQNFLIPNSTYRRKLCYAFPGNRTETIPGYTTYQNSPAASTGFA

SEQ ID NO: 778159 - protein, 33 aa, Homo sapiens
KKNVGNSPTPARLWVNDGDMQVAEELRPLLRSR

SEQ ID NO: 778160 - protein, 100 aa, Homo sapiens
RGLGEPRGVQGWSFPPALRHYTLNPARMVEAGTDYQPYLTYGKTEKETLGQGHPAGAGVPSPSLGRYFVPPPHSVGRCWSMRGRPWIGIEVGGVTTGASI

SEQ ID NO: 778161 - protein, 93 aa, Homo sapiens
PEDGEPIDHDCQQIIVQTYAARDDLVEVPLTNPDLNLYTDGSSFVENGIRRAGYAIVSDVTILESKPLTPETSAQLVELVHHPLTLPLPTTKS

SEQ ID NO: 778162 - protein, 81 aa, Homo sapiens
LPSQHPTSRTSPASPTSPGPSPPSSSTQERENCYFRFPSPSRQRHLLQEHPPLHQAPTGQPPPAPPWSRGEGFITWALLTF

SEQ ID NO: 778163 - protein, 152 aa, Homo sapiens
MEAEDLSKAEDRNEDPGSKNEGQLAAVQPDVPHGGQSSSPTALWDMLERKFLEYQQLTHKSPIERQKSLLSLLPLFLKAWEHSVGIICFPSLQRLAEDVSDQLAQQLQKALVGKPAEQARLAAGQLLWWKGDVDQDGYLLLKSVYVLTGTDS

SEQ ID NO: 778164 - protein, 131 aa, Homo sapiens
AQYIQSSSKFITKSDFSSPPMLPGPSTIIPHLDYFNNDPSFFFPKISKHYSQGNPFLLKTLQLSKVSQSLIKTNRMCLPVTLLISSLSNLFFILLKSQLYLFQEHALHVITSEHLYVNYSSSGILFFQGST

SEQ ID NO: 778165 - protein, 142 aa, Homo sapiens
IKLREKRISSLHYTVSTIANTYSITFSKHKALCGGCSMGNLLWNSDLSVCDSEKKHHINIGEDRRTSRKTQESGLDNNTYHLLYSHHIPGFSFNSYKGLQRWALASPFSNEGHGALLVYITCPILVVEADFSQKSALLWIDA

SEQ ID NO: 778166 - protein, 904 aa, Homo sapiens
MQASPLQTSQPTPPEELHAAAYVFTNDGQQMRSDEVNLVATGHQSKKKHSRKSKRHSSSKRRKSMSSWLDKQEDAAVTHSICEERINNGQPVADNVLSTAPPWPDATIAHNIREERMENGQSRTDKVLSTAPPQLVHMAAAGIPSMSTRDLHSTVTHNIREERMENGQPQPDNVLSTGPTGLINMAATPIPAMSARDLYATVTHNVCEQKMENVQPAPDNVLLTLRPRRINMTDTGISPMSTRDPYATITYNVPEEKMEKGQPQPDNILSTASTGLINVAGAGTPAISTNGLYSTVPHNVCEEKMENDQPQPNNVLSTVQPVIIYLTATGIPGMNTRDQYATITHNVCEERVVNNQPLPSNALSTVLPGLAYLATADMPAMSTRDQHATIIHNLREEKKDNSQPTPDNVLSAVTPELINLAGAGIPPMSTRDQYATVNHHVHEARMENGQRKQDNVLSNVLSGLINMAGASIPAMSSRDLYATITHSVREEKMESGKPQTDKVISNDAPQLGHMAAGGIPSMSTKDLYATVTQNVHEERMENNQPQPSYDLSTVLPGLTYLTVAGIPAMSTRDQYATVTHNVHEEKIKNGQAASDNVFSTVPPAFINMAATGVSSMSTRDQYAAVTHNIREEKINNSQPAPGNILSTAPPWLRHMAAAGISSTITRDLYVTATHSVHEEKMTNGQQAPDNSLSTVPPGCINLSGAGISCRSTRDLYATVIHDIQEEEMENDQTPPDGFLSNSDSPELINMTGHCMPPNALDSFSHDFTSLSKDELLYKPDSNEFAVGTKNYSVSAGDPPVTVMSSVETVPNTPQISPAMAKKINDDIKYQLMKEVRRFGQNYERIFILLEEVQGSMKVKRQFVEFTIKEAARFKKVVLIQQLEKALKEIDSHCHLRKVKHMRKR

SEQ ID NO: 778167 - protein, 71 aa, Homo sapiens
DCITVSAFSSAAAPPSLSDNIPHPCHLGFRLPLGGTGKLGSTSRGPSVYFCRSKSNGQDHLASDLAPHNLS

SEQ ID NO: 778168 - protein, 400 aa, Homo sapiens
GVGSTSRALPGCEVWLGYGPRAAAAAAATVLFGGAGPTETMFVARSIAADHKDLIHDVSFDFHGRRMATCSSDQSVKVWDKSESGDWHCTASWKTHSGSVWRVTWAHPEFGQVLASCSFDRTAAVWEEIVGESNDKLRGQSHWVKRTTLVDSRTSVTDVKFAPKHMGLMLATCSADGIVRIYEAPDVMNLSQWSLQHEISCKLSCSCISWNPSSSRAHSPMIAVGSDDSSPNAMAKVQIFEYNENTRKYAKAETLMTVTDPVHDIAFAPNLGRSFHILAIATKDVRIFTLKPVRKELTSSGGPTKFEIHIVAQFDNHNSQVWRVSWNITGTVLASSGDDGCVRLWKANYMDNWKCTGILKGNGSPVNGSSQQGTSNPSLGSNIPSLQNSLNGSSAGRKHS

SEQ ID NO: 778169 - protein, 383 aa, Homo sapiens
GVGSTSRALPGCEVWLGYGPRAAAAAAATVLFGGAGPTETMFVARSIAADHKDLIHDVSFDFHGRRMATCSSDQSVKTHSGSVWRVTWAHPEFGQVLASCSFDRTAAVWEEIVGESNDKLRGQSHWVKRTTLVDSRTSVTDVKFAPKHMGLMLATCSADGIVRIYEAPDVMNLSQWSLQHEISCKLSCSCISWNPSSSRAHSPMIAVGSDDSSPNAMAKVQIFEYNENTRKYAKAETLMTVTDPVHDIAFAPNLGRSFHILAIATKDVRIFTLKPVRKELTSSGGPTKFEIHIVAQFDNHNSQVWRVSWNITGTVLASSGDDGCVRLWKANYMDNWKCTGILKGNGSPVNGSSQQGTSNPSLGSNIPSLQNSLNGSSAGRKHS

SEQ ID NO: 778170 - protein, 135 aa, Homo sapiens
MISAHCNLCLLDSSDSCALASQVAGITGVHHHAQLIFVFLIETEFHHVGQAGLELWVQEILPPCLPKCWDYRCEPPRMALNLLFLGIPKFSTFSALEFVNIFVEYHMTVIPECSNLFMIYLGKFTTVLLFAIIWL

SEQ ID NO: 778171 - protein, 58 aa, Homo sapiens
GFSSIHGGTCVSRRILQCPRQDVCGEKDSPVSMVGSVWREGFSSVHGRTCVARILQYP

SEQ ID NO: 778172 - protein, 106 aa, Homo sapiens
  misc_feature (88)..(88): Xaa can be any naturally occurring amino acid
  misc_feature (94)..(94): Xaa can be any naturally occurring amino acid
VAVTTWLGAGKKNTLKPNFWQRSMSSGEGDSSPSLRMLPTAHRHLSGATREQVLCCTVTDGLPISLHHSRPLGKKVQDPVGVVIVDSXGAELGXDAAALSEKPPSL

SEQ ID NO: 778173 - protein, 192 aa, Homo sapiens
MRSRGSDTEGSAQKKFPRHTKGHSFQGPKNMKHRQQDKDSPSESDVILPCPKAEKPHSGNGHQAEDLSRDDLLFLLSILEGELQARDAVLAILQAEKMEPGLLEAQYAVVTPKSVRRSPGEMLSKRNLTLGGGLLVNMVRGHVGATYDFATRELWENPGPIGWATRLTLERIMQKRKTPGGMYIRIEPERTH

SEQ ID NO: 778174 - protein, 111 aa, Homo sapiens
MRSVAYEVLDLFNPDDWILMFAAKTGPNAYRSTQHKVKSAYMLDSSLGGVACKNYIFKGDMQKLVPFFTELHLLLAQDAEKIKKEIRRNYWTCRSGHGHCHKGAAVQKECV

SEQ ID NO: 778175 - protein, 111 aa, Homo sapiens
SPHPLLYPEVLLSLHQPPKYIPTYPLPYIPKCAFPSPGHIIGKISSAEASYPSYPTGLLAFHLIPAWYIFLHTRAKVIIFKHELEHSSFLSKTPQWLSSTLRKENPNLSMT

SEQ ID NO: 778176 - protein, 88 aa, Homo sapiens
LIRRAHASAFLCGRRGGPACDRACVGGRACVSVRPDHGGLWVGRIVHARPICAPQASLALLVPVPACCYQLVNMWHLPGHCDESGMSI

SEQ ID NO: 778177 - protein, 75 aa, Homo sapiens
VNRGVRKRNLEMDVLMVHVTGVYSNRMSKRDVRYAKMIDARHWATALQPRQQEKLRLKQKNKQTKNYENPQPTLQ

SEQ ID NO: 778178 - protein, 159 aa, Homo sapiens
  misc_feature (154)..(154): Xaa can be any naturally occurring amino acid
MFCHYHQTANATQRVVNNGNETGTISTVDHAVVEGERNRQHQTRHELFTIPHRLHRGLGNAEDSHFRRVHNRREVGSTQAADAGDGEATALHFARSQLTVTRFLEIVISSRDSSMMPFLVTSLNTRNNHTVRGIHRHTRCWMEFLSRSERLTRXSDRRN

SEQ ID NO: 778179 - protein, 67 aa, Homo sapiens
LHTPLTASNAADCIQTPLTASNAADCIQRSQQSSFIEINVLVAQGDKVLTFISLPPEIPLNDGKIIN

SEQ ID NO: 778180 - protein, 101 aa, Homo sapiens
ARYPGKMTQTICNTIAAFAIWSPLLSFCRNCFLEGYPHHLIARTTVLSPYSHFRLADSNYFISRKVVTTFFLTLKLTLDSLTVFWLITYLSEAHCSAKYIF

SEQ ID NO: 778181 - protein, 47 aa, Homo sapiens
APRSGDPTRCPGPPVPGFLGNKLFQPNRSLCRWEDGDREGAGERASG

SEQ ID NO: 778182 - protein, 153 aa, Homo sapiens
HGWDPLRPYPMHHSLWLVLLVSFCYNKTVIISMYFSELYESFYQIIKPECIPRTLKLNQGVEVEVAPFTITPSDPLAKFLLPVPATLCSASLEILVPEGGMLPPGDTTMIPLNWKLRLPPGYFGLLLPVSQQATKRVIVLAGVTDPHYQDEIS

SEQ ID NO: 778183 - protein, 245 aa, Homo sapiens
VRPVIAFQGHRGYLRLPGPGWSCLFSFIVSQCCQEGAGGSLDLVCQRFLRSGPNSLHCLGSLRERLIIWAAMDSIPAPSSVQGHNLTEDARHPESWQNTGGYSEGDAVSQPQMALEEVSVSDPLASNQGQSLPGSSREHMAQWEVRSQTHVPNREPVQALPSSASRKRLDKKRSVPVATVELEEKRFRTLPLVPSPLQGLTNQDLQEGEDWEQEDEDMDPRLEHSSSVQEDSESPSPEDIPDYLL

SEQ ID NO: 778184 - protein, 196 aa, Homo sapiens
MRYSFPLTVLEGEDPGISERGPWMLKSSWVPDSMLSRPSYYDALHNRSSGHAQRPAGHSASPAQHLLRGPPSEAAGRRGGSPRCHLGPPGPQNPQHPPGQEERMGVINTWLTIVIRGTDFGGTSLGYLSLPVFLEKLIKFGHLRSATKLTYKMLSFLEELIFPVSKWTLWDPRLYQHKTTRSTDGTHAGLTLVPAD

SEQ ID NO: 778185 - protein, 129 aa, Homo sapiens
PSLTQMTAPPDHLPSNQSDNSRAETLLTSPLGNPLPSFAGSDTTFNPLFLPAVNGASGLMTLNPQLLGGVLNSASANTANHPEVSIATSSQATTTTTTTSSAVAALTVSTLGGTAVVSMAETLLNISNN

SEQ ID NO: 778186 - protein, 88 aa, Homo sapiens
NGDDDVANHKEASDDGSNDDKEDDASDGDEDEMVTMMMMMTDVVMMISSVYFEHFLQAKNLPCILSSQPLPFKMWPMDQQHGCHLSTC

SEQ ID NO: 778187 - protein, 68 aa, Homo sapiens
YDDEEFEYRHVVLPKDIAKLVRKTHLMSESEWRNLGVQQSQGWVYYMIHEPEPHILLFRCPLPKKPKK

SEQ ID NO: 778188 - protein, 68 aa, Homo sapiens; identical to SEQ ID NO: 778187

SEQ ID NO: 778189 - protein, 68 aa, Homo sapiens; identical to SEQ ID NO: 778187

SEQ ID NO: 778190 - protein, 120 aa, Homo sapiens
SFLETHPEPPPSDTMVNSCCGSVCSDQGCGLENCCRPSYCQTTCCRTTCCRPSCCRPSCCRPQCCQSVCCQPTCCCPSYCVSSCCRPQCCQTTCCRTTCCRPSCCVSRCYRPHCGQSLCC

SEQ ID NO: 778191 - protein, 180 aa, Homo sapiens
SFLETHPEPPPSDTMVNSCCGSVCSDQGCGLENCCRPSYCQTTCCRTTCCRPSCCVSSCCRPQCCQTTCCRTTCCHPSCCVSSCCRPQCCQSVCCQPTCCRPQCCQTTCCRTTCCRPSCCRPQCCQSVCCQPTCCCPSYCVSSCCRPQCCQTTCCRTTCCRPSCCVSRCYRPHCGQSLCC

SEQ ID NO: 778192 - protein, 368 aa, Homo sapiens
MRRNTQDENMRKWFKVTIPYGIKYDKAWLMNSIQSNCSVPFTPVDFHYIRNRACFFVQVASAASALKDVSYKIYDDENQKICIFVSHFTAPYSVKNKLKPGQMEMLKLTMNKRYNVSQQALDLQNLRFDPDLMGRDIDIILNRRNCMAATLKITERNFPELLSLNLCNNKLYQLDGLSDITEKAPKVKTLNLSKNKLESAWELGKVKGLKLEELWLEGNPLCSTFSDQSAYVSAIRDCFPKLLRLDGRELSAPVIVDIDSSETMKPCKENFTGSETLKHLVLQFLQQSNLCKYFKDSRNIKILKDPYLQRKLLKHTKCPRNVDSLSALPETQHDFTSILVDMWYQTVNTCFLPRAGPESQSGRMVSGF

SEQ ID NO: 778193 - protein, 168 aa, Homo sapiens
MRRNTQDENMRKWFKVTIPYGIKYDKAWLMNSIQSNCSVPFTPVDFHYIRNRACFFVQVASAASALKDVSYKIYDDENQKICIFVSHFTAPYSVKNKLKPGQMEMLKLTMNKRYNVSQQALDLQNLRFDPDLMGRDIDIILNRRNCMAATLKITERNFPERRLPKSRP

SEQ ID NO: 778194 - protein, 305 aa, Homo sapiens
MRRNTQDENMRKWFKVTICIFVSHFTAPYSVKNKLKPGQMEMLKLTMNKRYNVSQQALDLQNLRFDPDLMGRDIDIILNRRNCMAATLKITERNFPELLSLNLCNNKLYQLDGLSDITEKAPKVKTLNLSKNKLESAWELGKVKGLKLEELWLEGNPLCSTFSDQSAYVSAIRDCFPKLLRLDGRELSAPVIVDIDSSETMKPCKENFTGSETLKHLVLQFLQQSNLCKYFKDSRNIKILKDPYLQRKLLKHTKCPRNVDSLSALPETQHDFTSILVDMWYQTVNTCFLPRAGPESQSGRMVSGF

SEQ ID NO: 778195 - protein, 397 aa, Homo sapiens
MRRNTQDENMRKWFKVTIPYGIKYDKAWLMNSIQSNCSVPFTPVDFHYIRNRACFFVQVASAASALKDVSYKIYDDENQKICIFVSHFTAPYSVKNKLKPGQMEMLKLTMNKRYNVSQQALDLQNLRFDPDLMGRDIDIILNRRNCMAATLKITERNFPELLSLNLCNNKLYQLDGLSDITEKAPKVKTLNLSKNKLESAWELGKVKGLKLEELWLEGNPLCSTFSDQSAYVSAIRDCFPKLLRLDGRELSAPVIVDIDSSETMKPCKENFTGSETLKHLVLQFLQQSNLCKYFKDSRNIKILKDPYLQRKLLKHTKCPRNVDSLSALPETQHDFTSILVDMWYQTVNTCFLPRAGPESQRWWCLLSLKWKDGLRVLILPSCGPSSLPLAAIPVCAS

SEQ ID NO: 778196 - protein, 302 aa, Homo sapiens
MRRNTQDENMRKWFKVTICIFVSHFTAPYSVKNKLKPGQMEMLKLTMNKRYNVSQQALDLQNLRFDPDLMGRDIDIILNRRNCMAATLKITERNFPELLSLNLCNNKLYQLDGLSDITEKAPKVKTLNLSKNKLESAWELGKVKGLKLEELWLEGNPLCSTFSDQSAYVSAIRDCFPKLLRLDGRELSAPVIVDIDSSETMKPCKENFTGSETLKHLVLQFLQQSNLCKYFKDSRNIKILKDPYLQRKLLKHTKCPRNVDSLSALPETQHDFTSILVDMWYQTVNTCFLPRAGPESQRWVGG

SEQ ID NO: 778197 - protein, 217 aa, Homo sapiens
PPKIYDISNDMTVNEGTNVTLTCLATGKPEPSISWRHISPSAKPFENGQYLDIYGITRDQAGEYECSAENDVSFPDVRKVKVVVNFAPTIQEIKSGTVTPGRSGLIRCEGAGVPPPAFEWYKGEKKLFNGQQGIIIQNFSTRSILTVTNVTQEHFGNYTCVAANKLGTTNASLPLNPPSTAQYGITGSADVLFSCWYLVLTLSSFTSIFSLKNAILQ

SEQ ID NO: 778198 - protein, 177 aa, Homo sapiens
MDMMLLVQGACCSNQWLAAVLLSLCCLLPSCLPAGQSVDFPWAAVDNMMVRKGDTAVLRCYLEDGASKGAWLNQSSIIFAGGDKWSVDPRVSISTLNKRDYSLQIQNVDVTDDGPYTCSVQTQHTPRTMQVHLTVQAPSTAQYGITGSADVLFSCWYLVLTLSSFTSIFSLKNAIAT

SEQ ID NO: 778199 - protein, 177 aa, Homo sapiens
MDMMLLVQGACCSNQWLAAVLLSLCCLLPSCLPAGQSVDFPWAAVDNMMVRKGDTAVLRCYLEDGASKGAWLNQSSIIFAGGDKWSVDPRVSISTLNKRDYSLQIQNVDVTDDGPYTCSVQTQHTPRTMQVHLTVQAPSTAQYGITGSADVLFSCWYLVLTLSSFTSIFSLKNAILQ

SEQ ID NO: 778200 - protein, 150 aa, Homo sapiens
MDMMLLVQGACCSNQWLAAVLLSLCCLLPSCLPAGQSVDFPWAAVDNMMVRKGDTAVLRCYLEDGASKGAWLNQSSIIFAGGDKWSVDPRVSISTLNKRDYSLQIQNVDVTDDGPYTCSVQTQHTPRTMQVHLTVQGMYFQNCYIVKDCA

SEQ ID NO: 778201 - protein, 118 aa, Homo sapiens
EGLADGWALVTKATGKRVAVDTGWFIDLLRSQGDFPADNSRGSIAELSEALLLSAVTRSFSVENKGEDVVTGPLHGCAVNELTCIKHQEQCQNVVGSHVNSHQYCEFCVLHRMEGEVI

SEQ ID NO: 778202 - protein, 139 aa, Homo sapiens
TRSSSPQTITFDACLVIPCGDLQSQKQLSDSEKYLCPFKIKGSPYQDPCSLTNAGKQVCHSWNDVVWTTEYQGWTSSTGGCMSLKPYIHFTKESTPHNCQYNQCNPVQISILIPTSTDPKPTLSCLYGMGAEIAGAHLI

SEQ ID NO: 778203 - protein, 71 aa, Homo sapiens
QKEATQCSSSEAETQEAEHGSALLWKHGWNTWAWPEQAQVSLWGDERHVVLVPHSQRLIQSANLQEPSIAT

SEQ ID NO: 778204 - protein, 428 aa, Homo sapiens
MALSGNCSRYYPREQGSAVPNSFPEVVELNVGGQVYFTRHSTLISIPHSLLWKMFSPKRDTANDLAKDSKGRFFIDRDGFLFRYILDYLRDRQVVLPDHFPEKGRLKREAEYFQLPDLVKLLTPDEIKQSPDEFCHSDFEDASQGSDTRICPPSSLLPADRKWGFITVGYRGSCTLGREGQADAKFRRVPRILVCGRISLAKEVFGETLNESRDPDRAPERYTSRFYLKFKHLERAFDMLSECGFHMVACNSSVTASFINQYTDDKIWSSYTEYVFYREPSRWSPSHCDCCCKNGKGDKEGESGTSCNDLSTSSCDSQSEASSPQETVICGPVTRQTNIQTLDRPIKKGPVQLIQQSEMRRKSDLLRTLTSGSRESNMSSKKKAVKEKLSIEEELEKCIQDFLKIKIPDRFPERKHPWQSELLRKYHL

SEQ ID NO: 778205 - protein, 120 aa, Homo sapiens
MTHCNERCMAKSRNPSSESHGRLNFPAHAVTPCVTCCLLGRLVRDPSQGFTRGWSHRLPRLVPPRFQPSEERRCSAQTMWCSQLFRHSEPPSRLGHGGWEHSGNPHSQTTPRDLAHHRPA

SEQ ID NO: 778206 - protein, 258 aa, Homo sapiens
MAAADGGGPGGASVGTEEDGGGVGHRTVYLFDRREKESELGDRPLQVGERSDYAGFRACVCQTLGISPEEKFVITTTSRKEITCDNFDETVKDGVTLYLLQSVNQLLLTATKERIDFLPHYDTLVKSGMYEYYASEGQNPLPFALAELIDNSLSATSRNIGVRRIQIKLLFDETQGKPAVAVIDNGRGMTSKQLNNWAVYRLSKFTRQGDFERLENLTFFFLWVAMYFSKDKKLVCLWMHMIHWRFYCYSHIYLGFIL

SEQ ID NO: 778207 - protein, 390 aa, Homo sapiens
MAAADGGGPGGASVGTEEDGGGVGHRTVYLFDRREKESELGDRPLQVGERSDYAGFRACVCQTLGISPEEKFVITTTSRKEITCDNFDETVKDGVTLYLLQSVNQLLLTATKERIDFLPHYDTLVKSGMYEYYASEGQNPLPFALAELIDNSLSATSRNIGVRRIQIKLLFDETQGKPAVAVIDNGRGMTSKQLNNWAVYRLSKFTRQGDFESDHSGYVRPVPVPRSLNSDISYFGVGGKQAVFFVGQSARMISKPADSQDVHELVLSKEDFEKKEKNKEAIYSGYIRNRKPSDSVHITNDDERFLHHLIIEEKEKDSFTAVVITGVQPEHIQYLKNYFHLWTRQLAHIYHYYIHGPKGNEIRTSKEVEPFNNIDIEISMFEKGKVPKIV

SEQ ID NO: 778208 - protein, 73 aa, Homo sapiens
RRSEDPSLSSAPGKHNPCFHKIYVLVGETRNLSGQIQGGALGTNRKGIQHRCGEGGQLGKDTQGKENGISNTE

SEQ ID NO: 778209 - protein, 396 aa, Homo sapiens
RSGSDEGTGPGSLDESERVTSSRCGCRPCPAGPFRVAPQCCGRRGTMAVFVVLLALVAGVLGNEFSILKSPGSVVFRNGNWPIPGERIPDVAALSMGFSVKEDLSWPGLAVGNLFHRPRATVMVMVKGVNKLALPPGSVISYPLENAVPFSLDSVANSIHSLFSEETPVVLQLAPSEERVYMVGKANSVFEDLSVTLRQLRNRLFQENSVLSSLPLNSLSRNNEVDLLFLSELQVLHDISSLLSRHKHLAKDHSPDLYSLELAGLDEIGKRYGEDSEQFRDASKILVDALQKFADDMYSLYGGNAVVELVTVKSFDTSLIRKTRTILEAKQAKNPASPYNLAYKYNFEYSVVFNMVLWIMIALALAVIITSYNIWNMDPGYDSIIYRMTNQKIRMD

SEQ ID NO: 778210 - protein, 396 aa, Homo sapiens; identical to SEQ ID NO: 778209

SEQ ID NO: 778211 - protein, 238 aa, Homo sapiens
  misc_feature (13)..(13): Xaa can be any naturally occurring amino acid
PRLQEFGTSPVAXQLAPSEERVYMVGKANSVFEDLSVTLRQLRNRLFQENSVLSSLPLNSLSRNNEVDLLFLSELQVLHDISSLLSRHKHLAKDHSPDLYSLELAGLDEIGKRYGEDSEQFRDASKILVDALQKFADDMYSLYGGNAVVELVTVKSFDTSLIRKTRTILEAKQAKNPASPYNLAYKYNFEYSVVFNMVLWIMIALALAVIITSYNIWNMDPGYDSIIYRMTNQKIRMD

SEQ ID NO: 778212 - protein, 183 aa, Homo sapiens
RSGSDEGTGPGSLDESERVTSSRCGCRPCPAGPFRVAPQCCGRRGTMAVFVVLLALVAGVLGNEFSILKSPGSVVFRNGNWPIPGERIPDVAALSMGFSVKEDLSWPGLAVGNLFHRPRATVMVMVKGVNKLALPPGSVISYPLENAVPFSLDSVANSIHSLFSEETPVVLQLAPSEEFECRC

SEQ ID NO: 778213 - protein, 396 aa, Homo sapiens; identical to SEQ ID NO: 778209

SEQ ID NO: 778214 - protein, 380 aa, Homo sapiens
RSGSDEGTGPGSLDESERVTSSRCGCRPCPAGPFRVAPQCCGRRGTMAVFVVLLALVAGVLGNEFSILKSPGSVVFRNGNWPIPGERIPDVAALSMGFSVKEDLSWPGLAVGNLFHRPRATVMVMVKGVNKLALPPGSVISYPLENAVPFSLDSVANSIHSLFSEETPVVLQLAPSEERVYMVGKANSVFEDLSVTLRQLRNRLFQENSVLSSLPLNSLSRNNEVDLLFLSELQVLHDISSLLSRHKHLAKDHSPDLYSLELAGLDEIGKRYGEDSEQFRDASKILVDALQKLVTVKSFDTSLIRKTRTILEAKQAKNPASPYNLAYKYNFEYSVVFNMVLWIMIALALAVIITSYNIWNMDPGYDSIIYRMTNQKIRMD

SEQ ID NO: 778215 - protein, 301 aa, Homo sapiens
MGFSVKEDLSWPGLAVGNLFHRPRATVMVMVKGVNKLALPPGSVISYPLENAVPFSLDSVANSIHSLFSEETPVVLQLAPSEERVYMVGKANSVFEDLSVTLRQLRNRLFQENSVLSSLPLNSLSRNNEVDLLFLSELQVLHDISSLLSRHKHLAKDHSPDLYSLELAGLDEIGKRYGEDSEQFRDASKILVDALQKFADDMYSLYGGNAVVELVTVKSFDTSLIRKTRTILEAKQAKNPASPYNLAYKYNFEYSVVFNMVLWIMIALALAVIITSYNIWNMDPGYDSIIYRMTNQKIRMD

SEQ ID NO: 778216 - protein, 353 aa, Homo sapiens
SGAEATKGRDPGAWTSPSASPPHAAAVARVPPARSVSPRSAAAAAAPWLCLSCSWRWWRDLSWPGLAVGNLFHRPRATVMVMVKGVNKLALPPGSVISYPLENAVPFSLDSVANSIHSLFSEETPVVLQLAPSEERVYMVGKANSVFEDLSVTLRQLRNRLFQENSVLSSLPLNSLSRNNEVDLLFLSELQVLHDISSLLSRHKHLAKDHSPDLYSLELAGLDEIGKRYGEDSEQFRDASKILVDALQKFADDMYSLYGGNAVVELVTVKSFDTSLIRKTRTILEAKQAKNPASPYNLAYKYNFEYSVVFNMVLWIMIALALAVIITSYNIWNMDPGYDSIIYRMTNQKIRMD

SEQ ID NO: 778217 - protein, 257 aa, Homo sapiens
GTSGTSSAVPFSLDSVANSIHSLFSEETPVVLQLAPSEERVYMVGKANSVFEDLSVTLRQLRNRLFQENSVLSSLPLNSLSRNNEVDLLFLSELQVLHDISSLLSRHKHLAKDHSPDLYSLELAGLDEIGKRYGEDSEQFRDASKILVDALQKFADDMYSLYGGNAVVELVTVKSFDTSLIRKTRTILEAKQAKNPASPYNLAYKYNFEYSVVFNMVLWIMIALALAVIITSYNIWNMDPGYDSIIYRMTNQKIRMD

SEQ ID NO: 778218 - protein, 215 aa, Homo sapiens [sequence omitted]

SEQ ID NO: 778219 - protein, 197 aa, Homo sapiens
RSGSDEGTGPGSLDESERVTSSRCGCRPCPAGPFRVAPQCCGRRGTMAVFVVLLALVAGVLGNEFSILKSPGSVVFRNGNWPIPGERIPDVAALSMGFSVKEDLSWPGLAVGNLFHRPRATVMVMVKGVNKLALPPGSVISYPLENAVPFSLDSVANSIHSLFSEETPVVLQLAPSEERVYMVGKANLFSVHSPSIL

SEQ ID NO: 778220 - protein, 349 aa, Homo sapiens
SGAEATKGRDPGAWTSPSASPPHAAAVARVPPARSVSPRSAAAAAAPWLCLSCSWRWWRDLSWPGLAVGNLFHRPRATVMVMVKGVNKLALPPGSVISYPLENRVYMVGKANSVFEDLSVTLRQLRNRLFQENSVLSSLPLNSLSRNNEVDLLFLSELQVLHDISSLGEKHIFQEHKPGRKNHPGHSPNLAVDFFLSRHKHLAKDHSPDLYSLELAGLDEIGKRYGEDSEQFRDASKILVDALQKFADDMYSLYGGNAVVELVTVKSFDTSLIRKTRTILEAKQAKNPASPYNLAYKYNFEYSVVFNMVLWIMIALALAVIITSYNIWNMDPGYDSIIYRMTNQKIRMD

SEQ ID NO: 778221 - protein, 95 aa, Homo sapiens
  misc_feature (15)..(16): Xaa can be any naturally occurring amino acid
  misc_feature (22)..(22): Xaa can be any naturally occurring amino acid
TKHDMLLLSNFCLPXXKRAGEXRPSSPPQKSKNPASPYNLAYKYNFEYSVVFNMVLWIMIALALAVIITSYNIWNMDPGYDSIIYRMTNQKIRMD

SEQ ID NO: 778222 - protein, 176 aa, Homo sapiens
RSGSDEGTGPGSLDESERVTSSRCGCRPCPAGPFRVAPQCCGRRGTMAVFVVLLALVAGVLGNEFSILKSPGSVVFRNGNWPIPGERIPDVAALSMGFSVKEDLSWPGLAVGNLFHRPRATVMVMVKGVNKLALPPGSVISYPLENVSIYYKKLKGCILHFPLSAVIMNCILNILL

SEQ ID NO: 778223 - protein, 396 aa, Homo sapiens; identical to SEQ ID NO: 778209

SEQ ID NO: 778224 - protein, 396 aa, Homo sapiens; identical to SEQ ID NO: 778209

SEQ ID NO: 778225 - protein, 378 aa, Homo sapiens
RSGSDEGTGPGSLDESERVTSSRCGCRPCPAGPFRVAPQCCGRRGTMAVFVVLLALVAGVLGNEFSILRIPDVAALSMGFSVKEDLSWPGLAVGNLFHRPRATVMVMVKGVNKLALPPGSVISYPLENAVPFSLDSVANSIHSLFSEETPVVLQLAPSEERVYMVGKANSVFEDLSVTLRQLRNRLFQENSVLSSLPLNSLSRNNEVDLLFLSELQVLHDISSLLSRHKHLAKDHSPDLYSLELAGLDEIGKRYGEDSEQFRDASKILVDALQKFADDMYSLYGGNAVVELVTVKSFDTSLIRKTRTILEAKQAKNPASPYNLAYKYNFEYSVVFNMVLWIMIALALAVIITSYNIWNMDPGYDSIIYRMTNQKIRMD

SEQ ID NO: 778226 - protein, 396 aa, Homo sapiens; identical to SEQ ID NO: 778209

SEQ ID NO: 778227 - protein, 364 aa, Homo sapiens
RSGSDEGTGPGSLDESERVTSSRCGCRPCPAGPFRVAPQCCGRRGTMAVFVVLLALVAGVLGNEFSILKSPGSVVFRNGNWPIPGERIPDVAALSMGFSVKEDLSWPGLAVGNLFHRPRATVMVMVKGVNKLALPPGSVISYPLENRVYMVGKANSVFEDLSVTLRQLRNRLFQENSVLSSLPLNSLSRNNEVDLLFLSELQVLHDISSLLSRHKHLAKDHSPDLYSLELAGLDEIGKRYGEDSEQFRDASKILVDALQKFADDMYSLYGGNAVVELVTVKSFDTSLIRKTRTILEAKQAKNPASPYNLAYKYNFEYSVVFNMVLWIMIALALAVIITSYNIWNMDPGYDSIIYRMTNQKIRMD

SEQ ID NO: 778228 - protein, 318 aa, Homo sapiens
RSGSDEGTGPGSLDESERVTSSRCGCRPCPAGPFRVAPQCCGRRGTMAVFVVLLALVAGVLGNEFSILKSPGSVVFRNGNWPIPGERIPDVAALSMGFSVKEDLSWPGLAVGNLFHRPRATVMVMVKGVNKLALPPGSVISYPLENVDLLFLSELQVLHDISSLLSRHKHLAKDHSPDLYSLELAGLDEIGKRYGEDSEQFRDASKILVDALQKFADDMYSLYGGNAVVELVTVKSFDTSLIRKTRTILEAKQAKNPASPYNLAYKYNFEYSVVFNMVLWIMIALALAVIITSYNIWNMDPGYDSIIYRMTNQKIRMD

SEQ ID NO: 778229 - protein, 138 aa, Homo sapiens
WRESSSVPSRDRRYGEDSEQFRDASKILVDALQKFADDMYSLYGGNAVVELVTVKSFDTSLIRKTRTILEAKQAKNPASPYNLAYKYNFEYSVVFNMVLWIMIALALAVIITSYNIWNMDPGYDSIIYRMTNQKIRMD

SEQ ID NO: 778230 - protein, 136 aa, Homo sapiens
PRDLPDHRVPPRDLRAPLHAPHLRALPPPGVLRPLLPAGRLLPPHHLLPLVVHGCGVQALLLGHHLLPACVCAVPLLPAPLRPADPLQHHLQDLLLLSHHLLPACVCAVPLRPADPLQHHLQDLLLLSSALTARNA

SEQ ID NO: 778231 - protein, 111 aa, Homo sapiens
CSLRAWLAVSRVPVAVTLAQLSVCPATLCHVFARVPWYMGPAGGAGPQADLGRASSLQLAGRVHGARGGSCLLVCLALLAPPFMFVVVVGTLTSGAPGVSPSSPQAVTGGF

SEQ ID NO: 778232 - protein, 121 aa, Homo sapiens
MLDTLCSSLFPCIGEAAKMYWPLLDCRSSTAAASCHAFVLSSPQASMVYQAFQCSRQEKQSPGKPPEKLEIGFRLQLSPSPGKGKSQVFSPTCFTLSWGNGYGDRVHANPSLLFCSEWSLD

SEQ ID NO: 778233 - protein, 137 aa, Homo sapiens
PVLAETGVLWRFSLKSSPRLEGLCMLGCWGMQGLLYLGTPSPLLLPHTAQGSITPASPTPPSFSHTRDAKLLPTVILLVSVPQLGPAAGGTSHHSLDEAPSSRPSHPCNLALSSPLPLFFLRHCHYLFLTLPTISHH

SEQ ID NO: 778234 - protein, 107 aa, Homo sapiens
GVFRELENDLMWKMHTFCARNVVSREKVLFLGSRLKDFVTSSVKIPGYQWPLLVIPNCPLDSVQSPGSSSCQGAKPFYSLCPTVKLFPPSYPQTHNPKPNKTKHCLP

SEQ ID NO: 778235 - protein, 147 aa, Homo sapiens
ACIYRENGGILRREQSDYNKIRDKRLQPESSVINSPRSLHLLSFLLRIREAQCLTGTSSGTLSFTVLQRSPEEGRPLAAQVPWGERDFCCCREWHPVGPGALGWSVKLPRTSLKDALQNVSGRPASRSTHHKREDQEGTMARVLHLL

SEQ ID NO: 778236 - protein, 276 aa, Homo sapiens
MAAIGRGRSLKNLRVRGRNDSGEENVPLDLTREPSDNLREILQNVARLQGVSNMRKLGHLNNFTKLLCDIGHSEEKLGFHYEDIIICLRLALLNEAKEVRAAGLRALRYLIQDSSILQKVLKLKVDYLIARCIDIQQSNEVERTQALRLVRKMITVNASLFPSSVTNSLIAVGNDGLQERDRMVRACIAIICELALQNPEVVALRGGLNTILKNVIDCQLSRINEALITTILHLLNHPKTRQYVRADVELERNYGTYTVFTYRPFQIQVKDSSGNG

SEQ ID NO: 778237 - protein, 103 aa, Homo sapiens
METDRVEGARDGDKRKEVCFVPIQGSFCFMRLTCARLVAALDIHGLSFSLRFCGSRDTKHEDITGREGQVTPLPRGTPQLCTARVGLSSPRTRGQGVPISCKT

SEQ ID NO: 778238 - protein, 119 aa, Homo sapiens
SGRKENTGGREAEEHVMETDRVEGARDGDKRKEVCFVPIQGSFCFMRLTCARLVAALDIHGLSFSLRFCGSRDTKHEDITGREGQVTPLPRGTPQLCTARVGLSSPRTRGQGVPISCKT

SEQ ID NO: 778239 - protein, 173 aa, Homo sapiens
SPDTAAGQLQEVREARFLASQMGIIATFRSWAGIINLCKPGNSGIQSLIGVLCIPNMEIRRGLLEVLYDIFRLPLPVVTEEFIEALLSVDPGRFQDSWRLSDGFVAAEAKTILPHRARSRPDLMDNYLALILSAFIRNGLLEGLVEVITNSDDNISVRATILLGELLHMASTS

SEQ ID NO: 778240 - protein, 327 aa, Homo sapiens [sequence omitted]

SEQ ID NO: 778241 - protein, 327 aa, Homo sapiens [sequence omitted]

SEQ ID NO: 778242 - protein, 350 aa, Homo sapiens
  misc_feature (18)..(18): Xaa can be any naturally occurring amino acid
GTSGTSAERTRVERRSGXNRGPMMWRPSVLLLLLLLRHGAQGKPSPDAGPHGQGRVHQAAPLSDAPHDDAHGNFQYDHEAFLGREVAKEFDQLTPEESQARLGRIVDRMDRAGDGDGWVSLAELRAWIAHTQQRHIRDSVSAAWDTYDTDRDGRVGWEELRNATYGHYAPGEEFHDVEDAETYKKMLARDERRFRVADQDGDSMATREELTAFLHPEEFPHMRDIVIAETLEDLDRNKDGYVQVEEYIADLYSAEPGEEEPAWVQTERQQFRDFRDLNKDGHLDGSEVGHWVLPPAQDQPLVEANHLLHESDTDKDGRLSKAEILGNWNMFVGSQATNYGEDLTRHHDEL

SEQ ID NO: 778243 - protein, 215 aa, Homo sapiens
MTPTGTSSTTMRLSWDGKWPRNSTNSPQRKARPVWGEEFHDVEDAETYKKMLARDERRFRVADQDGDSMATREELTAFLHPEEFPHMRDIVIAETLEDLDRNKDGYVQVEEYIADLYSAEPGEEEPAWVQTERQQFRDFRDLNKDGHLDGSEVGHWVLPPAQDQPLVEANHLLHESDTDKDGRLSKAEILGNWNMFVGSQATNYGEDLTRHHDEL

SEQ ID NO: 778244 - protein, 259 aa, Homo sapiens
MWRPSVLLLLLLLRHGAQGKPSPDAGPHGQGRVHQAAPLSDAPHDDAHGNFQYDHEAFLGREVAKEFDQLTPEESQARLGRIVDRMDRAGDGDGWVSLAELRAWIAHTQQRHIRDSVSAAWDTYDTDRDGRVGWEELRNATYGHYAPGEEFHDVEDAETYKKMLARDERRFRVADQDGDSMATREELTAFLHPEDEVGHWVLPPAQDQPLVEANHLLHESDTDKDGRLSKAEILGNWNMFVGSQATNYGEDLTRHHDEL

SEQ ID NO: 778245 - protein, 247 aa, Homo sapiens
MWRPSVLLLLLLLRHGAQGKPSPDAGPHGQGRVHQAAPLSDAPHDDAHGNFQYDHEAFLGREVAKEFDQLTPEESQARLGRIVDRMDRAGDGDGWVSLAELRAWIAHTQQRHIRDSVSAAWDTYDTDRDGRVGWEELRNATYGHYAPGEEFHDVEDAETYKKMLARDERRFRVADQDGDSMATREELTAFLHPEEFPHMRDIVIAETLEDLDRNKDGYVQVEEYIADLYSAEPGEEEPAWVQTERQH

SEQ ID NO: 778246 - protein, 219 aa, Homo sapiens
MWRPSVLLLLLLLRHGAQGKPSPDAGPHGQGRVHQAAPLSDAPHDDAHGNFQYDHEAFLGREVAKEFDQLTPEESQARLGRIVDRMDRAGDGDGWVSLAELRAWIAHTQQRHIRDSVSAAWDTYDTDRDGRVGWEELRNATYGHYAPGEEFHDVEDAETYKKMLARDERRFRVADQDGDSMATREELTAFLHPEEFPHMRDIVIALFFSRIYLLTFLLL

SEQ ID NO: 778247 - protein, 100 aa, Homo sapiens
LGAAPCPGPAPGGSQPPAARERHGQGAVTGPRQERGAGGHCGPDSRKEQDLGLELRVPFRWDKKRGTERGRKREGTEPQKERGTETQRPKERRTGTKTGT

SEQ ID NO: 778248 - protein, 327 aa, Homo sapiens [sequence omitted]

SEQ ID NO: 778249 - protein, 165 aa, Homo sapiens [sequence omitted]

SEQ ID NO: 778250 - protein, 294 aa, Homo sapiens
MWRPSVLLLLLLLRHGAQGKPSPDAGPHGQGRVHQAAPLSDAPHDDAHGNFQYDHEAFLGREVAKEFDQLTPEESQARLGRIVDRMDRAGDGDGWVSLAELRAWIAHTQQRHIRDSVSAAWDTYDTDRDGRVGWEELRNATYGHYAPGEEFHDVEDAETYKKMLARDERRFRVADQDGDSMATREELTAFLHPEEFPHMRDIVIAETLEDLDRNKDGYVQVEEYIADLYSAEPGEEEPAWVQTERQQFRDFRDLNKDGHLDGSEVGHWVLPPAQDQPLVEANHLLHESDTDKVQ

SEQ ID NO: 778251 - protein, 131 aa, Homo sapiens
MIAYKSGFVTNSIETEEDAEAEREGSELLKGLVQEVSEPGSAPSSTRPPELPLTLSPLSRPPADLYSAEPGEEEPAWVQTERQQFRDFRDLNKDGHLDGSEVGHWVLPPAQDQPLVEANHLLHESDTDKVQ

SEQ ID NO: 778252 - protein, 51 aa, Homo sapiens
CMGTCGPARTPHIHCTCCRATGGTAQGHTGGTCSYRHRCELISWHGPGAGQ

SEQ ID NO: 778253 - protein, 101 aa, Homo sapiens
HEGPPSSGEARMGRKRQLGTHRPEHASCSPCLSPHSCRPFTEQKAHVKRLTTIFQGMEFIKILLEAFGWNVFSPCKTGTIAVLSIGKLRIRSETSVTTETM

SEQ ID NO: 778254 - protein, 79 aa, Homo sapiens
IVGRTLGKDAYPAMLRHLPSRLPVKMWGRTLEKQSWRDSSQIPSPMSYPRLDHIVMTVKSIKDSTMCNSKILGMEVIDL

SEQ ID NO: 778255 - protein, 58 aa, Homo sapiens
MQPVHQLPCQSLAISGPRGLRTVKQLALAPLGATLAWNAAHQTGVVELLAIPKCPTPS

SEQ ID NO: 778256 - protein, 92 aa, Homo sapiens
GYSLPFTGSRTRRLSPQPGVRSVLVTKNPGSLGRRLRHLTALRGLLRCPQPLSVVPFPDHLAKHFLSPEKLLGRKAERHMTRQGSPPQRGEG

SEQ ID NO: 778257 - protein, 149 aa, Homo sapiens
VVFQRILAIIGTELAGQIWMSLLSTIQNARPLFLEKAVLGSFVPGDFLSKAFFIWKTHKAPTNGLPLSVSPLGWDLKRAPLSLAQGLVHRAGHPALPCRAHECGSRTHWPATAAAMTNISPRPGPRESHVDGKPTLLGSRVPRAQYSCR

SEQ ID NO: 778258 - protein, 43 aa, Homo sapiens
NLSKRDSQIQSLRTIRAARSCCLPQEVPLGSPQALTCSFCENT

SEQ ID NO: 778259 - protein, 464 aa, Homo sapiens
GRHGAQLRTARRGLRSAAGSRMAAHRKHVFVEKVLQRLFPPVPSGQGKREPQTLAVQNPPKKVTSEKVSQKHAEPLTDTGSETPTARRLYTASGPPEGYVPCWPEPSSCGSPENASSGDDTEDQDPHDQPKRRRIRKHKSKKKFKNPNNVLIEQAELEKQQSLLQEKSQRQHTDGTTISKNKKRKLKKKQQIKRKKAAGLAAKAAGVSFMYQPEDSSNEGEGVGEACEEDGVDTSEEDPTLAGEEDVKDTREEDGADASEEDLTRARQEEGADASEEDPTPAGEEDVKDAREEDGVDTIEEDLTRAGEEDGKDTREEDGADASEEDPTWAGEEEGADSGEEDGADASEEDDTITNEKAHSILNFLKSTQEMYFYDGVSRDAASAALADAAEELLDRLASHSMLPSDVSILYHMKTLLLLQDTERLKHALEMFPEHCTMPPDHARVISAFFSYWITHILPEKSSD

SEQ ID NO: 778260 - protein, 459 aa, Homo sapiens
AGTGQEMLGMSAAGSRMAAHRKHVFVEKVLQRLFPPVPSGQGKREPQTLAVQNPPKKVTSEKVSQKHAEPLTDTGSETPTARRLYTASGPPEGYVPCWPEPSSCGSPENASSGDDTEDQDPHDQPKRRRIRKHKSKKKFKNPNNVLIEQAELEKQQSLLQEKSQRQHTDGTTISKNKKRKLKKKQQIKRKKAAGLAAKAAGVSFMYQPEDSSNEGEGVGEACEEDGVDTSEEDPTLAGEEDVKDTREEDGADASEEDLTRARQEEGADASEEDPTPAGEEDVKDAREEDGVDTIEEDLTRAGEEDGKDTREEDGADASEEDPTWAGEEEGADSGEEDGADASEEDDTITNEKAHSILNFLKSTQEMYFYDGVSRDAASAALADAAEELLDRLASHSMLPSDVSILYHMKTLLLLQDTERLKHALEMFPEHCTMPPDHARVISAFFSYWITHILPEKSSD

SEQ ID NO: 778261 - protein, 255 aa, Homo sapiens
MYQPEDSSNEGEGVGEACEEDGVDTSEEDPTLAGEEDVKDTREEDGADASEEDLTRARQEEGADASEEDPTPAGEEDVKDAREEDGVDTIEEDLTRAGEEDGKDTREEDGADASEEDPTWAGEEEGADSGEEDGADASEEDDTITNEKAHSILNFLKSTQEMYFYDGVSRDAASAALADAAEELLDRLASHSMLPSDVSILYHMKTLLLLQDTERLKHALEMFPEHCTMPPDHARVISAFFSYWITHILPEKSSD

SEQ ID NO: 778262 - protein, 447 aa, Homo sapiens
HLQYTHPDNDTINNTTNQYSSLIMMDGYSNKTRNSHPFTSESQRLTQGVGEDDEEDGVDTIEEDLTLAGEEDVKDTREEDGVDTKRGKTRHGLGRKRVQTPGMTQNQDPHDQPKRRRIRKHKSKKKFKNPNNVLIEQAELEKQQSLLQEKSQRQHTDGTTISKNKKRKLKKKQQIKRKKAAGLAAKAAGVSFMYQPEDSSNEGEGVGEACEEDGVDTSEEDPTLAGEEDVKDTREEDGADASEEDLTRARQEEGADASEEDPTPAGEEDVKDAREEDGVDTIEEDLTRAGEEDGKDTREEDGADASEEDPTWAGEEEGADSGEEDGADASEEDDTITNEKAHSILNFLKSTQEMYFYDGVSRDAASAALADAAEELLDRLASHSMLPSDVSILYHMKTLLLLQDTERLKHALEMFPEHCTMPPDHARVISAFFSYWITHILPEKSSD

SEQ ID NO: 778263 - protein, 291 aa, Homo sapiens
GRHGAQLRTARRGLRSAAGSRMAAHRKHVFVEKVLQRLFPPVPSGQGKREPQTLAVQNPPKKVTSEKVSQKHAEPLTDTGSETPTARRLYTASGPPEGYVPCWPEPSSCGSPENASSGDDTEEKCPEQAPSTALQLQSRWSLQGPQEPEARRSKDGTPLSLTLQGQCGNTAHKKEEPLSFFGCSFKHRDQDPHDQPKRRRIRKHKSKKKFKNPNNVLIEQAELEKQQSLLQEKSQRQHTDGTTISKNKKRKLKKKQQIKRKKAAGLAAKAAGVSFMYQPEDGLRALRDPLE

SEQ ID NO: 778264 - protein, 114 aa, Homo sapiens
RKARRSAQDRAPWSEVRGRVPHGGAQEARVCGEGAAETFSSCSKWPRKEGTPDAGRPKSTKESDTLALRPRLPDGSTLPAGLLRATSPVGRSPAAVGAPRTPPAGMTQKNQESS

SEQ ID NO: 778265 - protein, 497 aa, Homo sapiens
GRHGAQLRTARRGLRSAAGSRMAAHRKHVFVEKVLQRLFPPVPSGQGKREPQTLAVQNPPKKVTSEKVSQKHAEPLTDTGSETPTARRLYTASGPPEGYVPCWPEPSSCGSPENASSGDDTEDQDPHDQPKRRRIRKHKSKKKFKNPNNVLIEQAELEKQQSLLQEKSQRQHTDGTTISKNKKRKLKKKQQIKRKKAAGLAAKAAGVSFMYQPEDSSNEGEGVGEACEEDGVDTSEEDPTLAGEEDVKDTREEDGADASEEDLTRARQEEGADASEEDPTPAGEEDVKDAREEDGVDTIEEDLTRAGEEDGKDTREEDGADASEEDPTWAGEEEGADSGEEDGADASEEDDTITNEKAHSILNFLKSTQEMYFYDGVSRDAASAALADAAEELLDRLASHSMLPSDVSILYHMKTLLLLQDTERLKHALEMFPEHCTMPPDQILMTSQREEELGSINQRRNFKNPNNVLIEQAELEKQQSLLQEKSQRQHTDGTTIS

SEQ ID NO: 778266 - protein, 530 aa, Homo sapiens
GRHGAQLRTARRGLRSAAGSRMAAHRKHVFVEKVLQRLFPPVPSGQGKREPQTLAVQNPPKKVTSEKVSQKHAEPLTDTGSETPTARRLYTASGPPEGYVPCWPEPSSCGSPENASSGDDTEEKCPEQAPSTALQLQSRWSLQGPQEPEARRSKDGTPLSLTLQGQCGNTAHKKEEPLSFFGCSFKHRDQDPHDQPKRRRIRKHKSKKKFKNPNNVLIEQAELEKQQSLLQEKSQRQHTDGTTISKNKKRKLKKKQQIKRKKAAGLAAKAAGVSFMYQPEDSSNEGEGVGEACEEDGVDTSEEDPTLAGEEDVKDTREEDGADASEEDLTRARQEEGADASEEDPTPAGEEDVKDAREEDGVDTIEEDLTRAGEEDGKDTREEDGADASEEDPTWAGEEEGADSGEEDGADASEEDDTITNEKAHSILNFLKSTQEMYFYDGVSRDAASAALADAAEELLDRLASHSMLPSDVSILYHMKTLLLLQDTERLKHALEMFPEHCTMPPDHARVISAFFSYWITHILPEKSSD

SEQ ID NO: 778267 - protein, 369 aa, Homo sapiens
PTSGNESLDLEVSCILGHQKRLCWFLKDQDPHDQPKRRRIRKHKSKKKFKNPNNVLIEQAELEKQQSLLQEKSQRQHTDGTTISKNKKRKLKKKQQIKRKKAAGLAAKAAGVSFMYQPEDSSNEGEGVGEACEEDGVDTSEEDPTLAGEEDVKDTREEDGADASEEDLTRARQEEGADASEEDPTPAGEEDVKDAREEDGVDTIEEDLTRAGEEDGKDTREEDGADASEEDPTWAGEEEGADSGEEDGADASEEDDTITNEKAHSILNFLKSTQEMYFYDGVSRDAASAALADAAEELLDRLASHSMLPSDVSILYHMKTLLLLQDTERLKHALEMFPEHCTMPPDHARVISAFFSYWITHILPEKSSD

SEQ ID NO: 778268 - protein, 203 aa, Homo sapiens
MSIFLQLGVERLLVESVHSLDHKSPAPKEGLLLGSAAAISEDGHRLHVDDTASRCLRTVFLQAPGRCFNWSPGIHTNFLCYEWHFRFVISSKPSKAEKKSFLTDKRTQSQKGKTTAIKPHSKQTRNSNHVLVGCKVYNTFFFLTFYFEIISDLKKSYRKSTKHSYMPFTQHPDFLKVHFLPYMFCPSVYPSLFSEPVESELQP

SEQ ID NO: 778269 - protein, 1057 aa, Homo sapiens
GAGNAPPAQPTPGNRGLTARMEVGPATETFVLELQCLEDGGPGPDTLSGGSGGSESQEEEEPQERNSSPQRPAVSAPVGASEIAEETRPGQRELQLQQLEQQPEPQQQPQHEQLQQPQPHLELQQQPQQDGQQQLSQLQQEKHQSVHHQELKPELQLMHQQQQLQPQQVQEQQRLQQQQEQLQTQQAQEQQVLQQQEQLQQQVQEQQLLQQQQEQLQQQQLLQQQEQLQQQQFQQQQEQLQQQQQLLLLQQQGQLQQQLLQQQQAQLQQQLLEQQQAQLQQQLLLQQQEQLQQQQQQQLLQQQQEQLQQQQLQPPPLEPEEEEEVELELMPVDLGSEQELEQQRQELERQQELERQQEQRQLQLKLQEELQQLEQQLEQQQQQLEQQEVQLELTPVELGAQQQEVQLELTPVQPELQLELVPAAGGGGAAVPGAPAAVVVAPPGYVVVQELMVLPAVAAPAVVAIPGPAGSAALTPARQRRRRRARDRPTICGECGKGFSRSTDLVRHQATHTGERPHRCGECGKGFSQHSNLVTHQRIHTGEKPYACSYCAKRFSESSALVQHQRTHTGERPYACGDCGKRFSVSSNLLRHRRTHSGERPYVCEDCGERFRHKVQIRRHERQLHGAGRSRGLGLLRASRPAALGGPARAEQAATATAPADKALEGRDRGCLAGRGPPTRLHLKSSLTRVMGAGGVLEYPWSKRLPPSSSSSSPGFPEKIPGSQISPPEKSIRQKRSGPGLKQHTGHVCLPFEGSAKGFPSGKTGLTTNEEKPPVARRLMTLAEDWTPTRESRRGETHVENLQILVKMIARRNSGRKQTCLHYVETDQGIESSSEAFALKILSKMKIHQGGIILMKTPVFINTGSERSPGRCANPSQEVLLRVEGKTFPPGNQGLRRASEAASWPLLLCPPVPPARINVLWNKSLWLKQRAFWESSPRSGRRVPQKELRGSPTVAPLDSTSFMLLRCYPGAGPGRPGQISPAPGCGGLEGCLSRHCAIAGAGERISETTFGSNALYHVHQIVWGRGCELQQLLVPCGKVGQGGGCPPPLPPVTSCLT

SEQ ID NO: 778270 - protein, 664 aa, Homo sapiens
GAGNAPPAQPTPGNRGLTARMEVGPATETFVLELQCLEDGGPGPDTLSGGSGGSESQEEEEPQERNSSPQRPAVSAPVGASEIAEETRPGQRELQLQQLEQQPEPQQQPQHEQLQQPQPHLELQQQPQQDGQQQLSQLQQEKHQSVHHQELKPELQLMHQQQQLQPQQVQEQQRLQQQQEQLQTQQAQEQQVLQQQEQLQQQVQEQQLLQQQQEQLQQQQLLQQQEQLQQQQFQQQQEQLQQQQQLLLLQQQGQLQQQLLQQQQAQLQQQLLEQQQAQLQQQLLLQQQEQLQQQQQQQLLQQQQEQLQQQQLQPPPLEPEEEEEVELELMPVDLGSEQELEQQRQELERQQELERQQEQRQLQLKLQEELQQLEQQLEQQQQQLEQQEVQLELTPVELGAQQQEVQLELTPVQPELQLELVPAAGGGGAAVPGAPAAVVVAPPGYVVVQELMVLPAVAAPAVVAIPGPAGSAALTPARQRRRRRARDRPTICGECGKGFSRSTDLVRHQATHTGERPHRCGECGKGFSQHSNLVTHQRIHTGEKPYACSYCAKRFSESSALVQHQRTHTGERPYACGDCGKRFSVSSNLLRHRRTHSGERPYVCEDCGERFRHKVQIRRHERQLHGAGRSRGLGLLRASRPAALGGPARAEQAATATAPADKAL

SEQ ID NO: 778271 - protein, 52 aa, Homo sapiens
EETWVAETLCGLKMKAKRRRVSLVLPEYYEAFNRLLEDPVIKRLLAWDKDLR

SEQ ID NO: 778272 - protein, 107 aa, Homo sapiens [sequence omitted]

SEQ ID NO: 778273 - protein, 92 aa, Homo sapiens
  misc_feature (65)..(65): Xaa can be any naturally occurring amino acid
MHRSEPFLKMSLLILLFLGLAEACTPREVNLLKGIIGLMSRLSPDEILGLLSLQVLHEETSGCKXEVKPFSGTTPSRKPLPKRKNTWNFPEM

SEQ ID NO: 778274 - protein, 67 aa, Homo sapiens
ADQQKALEYPPDNVHNLYFRFCSSGVACVIDRVPKEKEVIAMRSDLLLLDRRLWSVMQPEIKPQLYH

SEQ ID NO: 778275 - protein, 53 aa, Homo sapiens
MGSSEDTYVFGWLFPLGCASSGGAWGLTPLSQCLPGPVPVWRGWQGQLESLEL

SEQ ID NO: 778276 - protein, 160 aa, Homo sapiens
MPLLERFLVLLQEGEVKRPKHLHGVKPFTYLSHNLLAVFDHEKVTSPFSKEDIYAAKRHMKKCSSSLAIREMQIKTTMRYHLTPVRMAIIKKSGNKRCWRGCGEIGTLLHCWWDCKLVQPLWKSVWRFIKDLELEIPFDPAIPLLGIYPKDYKSCCYKDT

SEQ ID NO: 778277 - protein, 91 aa, Homo sapiens
YGLQNPGMNRFLGLYGEDDDSWCSSSSSSSDSEEEGYFLGQPIPQPRPQRFAYYTDDLSSPPSALPTPQFGQRTTKSKKKKGHKGKNCIIS

SEQ ID NO: 778278 - protein, 48 aa, Homo sapiens
MERSTDDVEFKSGAGTELSVRGEYSVGLLCLWFVTELNNNTLHSLSND

SEQ ID NO: 778279 - protein, 180 aa, Homo sapiens
  misc_feature (155)..(155): Xaa can be any naturally occurring amino acid
MTTSGWTAESCQTVATSQSSWATVTLGPSKLAVMSASNEEAIEKDIPSELLEDPAVTVAEDVRPGAAHLADGQACEAGATAKLEDSPGGRKGDRVCDCTRYSLLGALPCAPRSPVSEGCWVLGPFCKVEGSVPSDQACGAVEMMAVLLESVTSLXRAAPKRGRESQSSNQTTVALKTVAF

SEQ ID NO: 778280 - protein, 1011 aa, Homo sapiens
MRVFLLCAYILLLMVSQLRAVSFPEDDEPLNTVDYHYSRQYPVFRGRPSGNESQHRLDFQLMLKIRDTLYIAGRDQVYTVNLNEMPKTEVIPNKKLTWRSRQQDRENCAMKGKHKDECHNFIKVFVPRNDEMVFVCGTNAFNPMCRYYRLSTLEYDGEEISGLARCPFDARQTNVALFADGKLYSATVADFLASDAVIYRSMGDGSALRTIKYDSKWIKEPHFLHAIEYGNYVYFFFREIAVEHNNLGKAVYSRVARICKNDMGGSQRVLEKHWTSFLKARLNCSVPGDSFFYFDVLQSITDIIQINGIPTVVGVFTTQLNSIPGSAVCAFSMDDIEKVFKGRFKEQKTPDSVWTAVPEDKVPKPRPGCCAKHGLAEAYKTSIDFPDETLSFIKSHPLMDSAVPPIADEPWFTKTRVRYRLTAISVDHSAGPYQNYTVIFVGSEAGMVLKVLAKTSPFSLNDSVLLEEIEAYNHAKCSAENEEDKKVISLQLDKDHHALYVAFSSCIIRIPLSRCERYGSCKKSCIASRDPYCGWLSQGSCGRVTPGMLLLTEDFFAFHNHSAEGYEQDTEFGNTAHLGDCHGVRWEVQSGESNQMVHMNVLITCVFAAFVLGAFIAGVAVYCYRDMFVRKNRKIHKDAESAQSCTDSSGSFAKLNGLFDSPVKEYQQNIDSPKLYSNLLTSRKELPPNGDTKSMVMDHRGQPPELAALPTPESTPVLHQKTLQAMKSHSEKAHGHGASRKETPQFFPSSPPPHSPLSHGHIPSAIVLPNATHDYNTSFSNSNAHKAEKKLQNIDHPLTKSSSKRDHRRSVDSRNTLNDLLKHLNDPNSNPKAIMGDIQMAHQNLMLDPMGSMSEVPPKVPNREASLYSPPSTLPRNSPTKRVDVPTTPGVPMTSLERQRGYHKNSSQRHSISAMPKNLNSPNGVLLSRQPSMNRGGYMPTPTGAKVDYIQGTPVSVHLQPSLSRQSSYTSNGTLPRTGLKRTPSLKPDVPPKPSFVPQTPSVRPLNKYTY

SEQ ID NO: 778281 - protein, 151 aa, Homo sapiens
RPLPTVPLPLLAERAAGGLPGPEQPTGHPTAHPAPGVSSRPLYPATFRALFPDWKCFTEASWTGSPPGDKSSVLRCVTFSSPHQLWMETNKEESILLSPFSGNERRSAAGREPPLAPAAAGRGMVRRKVGKLLFPVLTAAVFVPGLQKLIQ

SEQ ID NO: 778282 - protein, 784 aa, Homo sapiens
SINYVEVQSRVVISVRGLEFSVQAVYSRVARICKNDMGGSQRVLEKHWTSFLKARLNCSVPGDSFFYFDVLQSITDIIQINGIPTVVGVFTTQLNSIPGSAVCAFSMDDIEKVFKGRFKEQKTPDSVWTAVPEDKVPKPRPGCCAKHGLAEAYKTSIDFPDETLSFIKSHPLMDSAVPPIADEPWFTKTRVRYRLTAISVDHSAGPYQNYTVIFVGSEAGMVLKVLAKTSPFSLNDSVLLEEIEAYNHAKCSAENEEDKKVISLQLDKDHHALYVAFSSCIIRIPLSRCERYGSCKKSCIASRDPYCGWLSQGSCGRVTPGMLAEGYEQDTEFGNTAHLGDCHDMEVIFIFCYHNGVRWEVQSGESNQMVHMNVLITCVFAAFVLGAFIAGVAVYCYRDMFVRKNRKIHKDAESAQSCTDSSGSFAKLNGLFDSPVKEYQQNIDSPKLYSNLLTSRKELPPNGDTKSMVMDHRGQPPELAALPTPESTPVLHQKTLQAMKSHSEKAHGHGASRKETPQFFPSSPPPHSPLSHGHIPSAIVLPNATHDYNTSFSNSNAHKAEKKLQNIDHPLTKSSSKRDHRRSVDSRNTLNDLLKHLNDPNSNPKAIMGDIQMAHQNLMLDPMGSMSEVPPKVPNREASLYSPPSTLPRNSPTKRVDVPTTPGVPMTSLERQRGYHKNSSQRHSISAMPKNLNSPNGVLLSRQPSMNRGGYMPTPTGAKVDYIQGTPVSVHLQPSLSRQSSYTSNGTLPRTGLKRTPSLKPDVPPKPSFVPQTPSVRPLNKYTY

SEQ ID NO: 778283 - protein, 476 aa, Homo sapiens
MRVFLLCAYILLLMVSQLRAVSFPEDDEPLNTVDYHYSRQYPVFRGRPSGNESQHRLDFQLMLKIRDTLYIAGRDQVYTVNLNEMPKTEVIPNKKLTWRSRQQDRENCAMKGKHKDECHNFIKVFVPRNDEMVFVCGTNAFNPMCRYYRLSTLEYDGEEISGLARCPFDARQTNVALFADGKLYSATVADFLASDAVIYRSMGDGSALRTIKYDSKWIKEPHFLHAIEYGNYVYFFFREIAVEHNNLGKAVYSRVARICKNDMGGSQRVLEKHWTSFLKARLNCSVPGDSFFYFDVLQSITDIIQINGIPTVVGVFTTQLNSIPGSAVCAFSMDDIEKVFKGRFKEQKTPDSVWTAVPEDKVPKPRPGCCAKHGLAEAYKTSIDFPDETLSFIKSHPLMDSAVPPIADEPWFTKTRVRYRLTAISVDHSAGPYQNYTVIFVGSEAGMVLKVLAKTSPFSLNDSVLLEEIEAYNHAK

SEQ ID NO: 778284 - protein, 1010 aa, Homo sapiens
MRVFLLCAYILLLMVSQLRAVSFPEDDEPLNTVDYHYSRQYPVFRGRPSGNESQHRLDFQLMLKIRDTLYIAGRDQVYTVNLNEMPKTEVIPNKKLTWRSRQQDRENCAMKGKHKDECHNFIKVFVPRNDEMVFVCGTNAFNPMCRYYRLSTLEYDGEEISGLARCPFDARQTNVALFADGKLYSATVADFLASDAVIYRSMGDGSALRTIKYDSKWIKEPHFLHAIEYGNYVYFFFREIAVEHNNLGKAVYSRVARICKNDMGGSQRVLEKHWTSFLKARLNCSVPGDSFFYFDVLQSITDIIQINGIPTVVGVFTTQLNSIPGSAVCAFSMDDIEKVFKGRFKEQKTPDSVWTAVPEDKVPKPRPGCCAKHGLAEAYKTSIDFPDETLSFIKSHPLMDSAVPPIADEPWFTKTRVRYRLTAISVDHSAGPYQNYTVIFVGSEAGMVLKVLAKTSPFSLNDSVLLEEIEAYNHAKCSAENEEDKKVISLQLDKDHHALYVAFSSCIIRIPLSRCERYGSCKKSCIASRDPYCGWLSQGSCGRVTPGMLAEGYEQDTEFGNTAHLGDCHDMEVIFIFCYHNGVRWEVQSGESNQMVHMNVLITCVFAAFVLGAFIAGVAVYCYRDMFVRKNRKIHKDAESAQSCTDSSGSFAKLNGLFDSPVKEYQQNIDSPKLYSNLLTSRKELPPNGDTKSMVMDHRGQPPELAALPTPESTPVLHQKTLQAMKSHSEKAHGHGASRKETPQFFPSSPPPHSPLSHGHIPSAIVLPNATHDYNTSFSNSNAHKAEKKLQNIDHPLTKSSSKRDHRRSVDSRNTLNDLLKHLNDPNSNPKAIMGDIQMAHQNLMLDPMGSMSEVPPKVPNREASLYSPPSTLPRNSPTKRVDVPTTPGVPMTSLERQRGYHKNSSQRHSISAMPKNLNSPNGVLLSRQPSMNRGGYMPTPTGAKVDYIQGTPVSVHLQPSLSRQSSYTSNGTLPRTGLKRTPSLKPDVPPKPSFVPQTPSVRPLNKYTY

SEQ ID NO: 778285 - protein, 998 aa, Homo sapiens
MRVFLLCAYILLLMVSQLRAVSFPEDDEPLNTVDYHYSRQYPVFRGRPSGNESQHRLDFQLMLKIRDTLYIAGRDQVYTVNLNEMPKTEVIPNKKLTWRSRQQDRENCAMKGKHKDECHNFIKVFVPRNDEMVFVCGTNAFNPMCRYYRLSTLEYDGEEISGLARCPFDARQTNVALFADGKLYSATVADFLASDAVIYRSMGDGSALRTIKYDSKWIKEPHFLHAIEYGNYVYFFFREIAVEHNNLGKAVYSRVARICKNDMGGSQRVLEKHWTSFLKARLNCSVPGDSFFYFDVLQSITDIIQINGIPTVVGVFTTQLNSIPGSAVCAFSMDDIEKVFKGRFKEQKTPDSVWTAVPEDKVPKPRPGCCAKHGLAEAYKTSIDFPDETLSFIKSHPLMDSAVPPIADEPWFTKTRVRYRLTAISVDHSAGPYQNYTVIFVGSEAGMVLKVLAKTSPFSLNDSVLLEEIEAYNHAKCSAENEEDKKVISLQLDKDHHALYVAFSSCIIRIPLSRCERYGSCKKSCIASRDPYCGWLSQGSCGRVTPGMLAEGYEQDTEFGNTAHLGDCHGVRWEVQSGESNQMVHMNVLITCVFAAFVLGAFIAGVAVYCYRDMFVRKNRKIHKDAESAQSCTDSSGSFAKLNGLFDSPVKEYQQNIDSPKLYSNLLTSRKELPPNGDTKSMVMDHRGQPPELAALPTPESTPVLHQKTLQAMKSHSEKAHGHGASRKETPQFFPSSPPPHSPLSHGHIPSAIVLPNATHDYNTSFSNSNAHKAEKKLQNIDHPLTKSSSKRDHRRSVDSRNTLNDLLKHLNDPNSNPKAIMGDIQMAHQNLMLDPMGSMSEVPPKVPNREASLYSPPSTLPRNSPTKRVDVPTTPGVPMTSLERQRGYHKNSSQRHSISAMPKNLNSPNGVLLSRQPSMNRGGYMPTPTGAKVDYIQGTPVSVHLQPSLSRQSSYTSNGTLPRTGLKRTPSLKPDVPPKPSFVPQTPSVRPLNKYTY

SEQ ID NO: 778286 - protein, 127 aa, Homo sapiens
VCVCVWVCICVCVGTCMFGCVGVCVGVCICVCGHVCVHTCALRFRRATGGTEEENNRKKSRRKSHLKASQEFISRVKSSRSAQSLKAHLDVEEELTSGERLCPRGAVGIQRPARQSSSCDLGPWASP

SEQ ID NO: 778287 - protein, 126 aa, Homo sapiens
MPKRKPGLAIANQHLSRFLPAVNCSLAWASMPCLLLSARTWPGYSACGGIPGPEWQLGGPAVRNSKHGFGPGVPSPLPSTLLRLMIWGDASLTTATQVPAPCLLPVLLNALLGIRLKKTPGVEYSV

SEQ ID NO: 778288 - protein, 133 aa, Homo sapiens
CRNTERAGCRNTERAGCRNTERAGCRNTEGAGCRNREGRLQECTEGRLQEHREGRLQERTEGRLQERTEGRLQECTEGRLQHLRNRHGEEIPKREADKPVMASTGGFASLSWWRGLPFAGRVGGEEDPSTCLF

SEQ ID NO: 778289 - protein, 60 aa, Homo sapiens
MLAGNAQRGGEMTRMPGGQGAGPEAGRPAAAETGRLGTEPTCCPMLLTLSCAMRGYMVRL

SEQ ID NO: 778290 - protein, 280 aa, Homo sapiens
MQAKYSSTRDMLDDDGDTTMSLHSQASATTRHPEPRRTEHRAPSSTWRPVALTLLTLCLVLLIGLAAWGLLFFQYYQLSNTGQDTISQMEERLGNTSQELQSLQVQNIKLAGSLQHVAEKLCRELYNKAGAHRCSPCTEQWKWHGDNCYQFYKDSKSWEDCKYFCLSENSTMLKINKQEDLEFAASQSYSEFFYSYWTGLLRPDSGKAWLWMDGTPFTSELFHIIIDVTSPRSRDCVAILNGMIFSKDCKELKRCVCERRAGMVKPESLHVPPETLGEGD

SEQ ID NO: 778291 - protein, 280 aa, Homo sapiens; identical to SEQ ID NO: 778290

SEQ ID NO: 778292 - protein, 250 aa, Homo sapiens
MSGVLPPQEHRAPSSTWRPVALTLLTLCLVLLIGLAAWGLLFFQYYQLSNTGQDTISQMEERLGNTSQELQSLQVQNIKLAGSLQHVAEKLCRELYNKAGAHRCSPCTEQWKWHGDNCYQFYKDSKSWEDCKYFCLSENSTMLKINKQEDLEFAASQSYSEFFYSYWTGLLRPDSGKAWLWMDGTPFTSELFHIIIDVTSPRSRDCVAILNGMIFSKDCKELKRCVCERRAGMVKPESLHVPPETLGEGD

SEQ ID NO: 778293 - protein, 112 aa, Homo sapiens
HLSLSLLMPSANLTGPLLQPFLEVCLRRSREGISQRQHVSLRSGWKSVEAGWGRAGMGTRLQVRAFLIHAEPWALDGTTQACMLARLVQRGESSILHGTAVAFLKLTLDTRS

SEQ ID NO: 778294 - protein, 135 aa, Homo sapiens
GNYFEDPINSIIFIKGKKILEYEVLYYIFSIIITCSKLNLYNTSASEIIMTLTATVQVLLSSSELKDHVLFGDNFPPTMPYVNGCKSFICTACHDVICPLLGANANANSRTSVKQWDMGINWSYKQSLVCSYIWV

SEQ ID NO: 778295 - protein, 123 aa, Homo sapiens
GFRDRGATSASRGARGPRPPSSLLPGLPAGGACGGFRKGGLISWGHTWNRVGEFRWNRSRMGVNGPWKGAEVGGCGARDKWEGNGLSDLPWGATPRRDGLRSSAFKAIKATILLHSRKLCVGS

SEQ ID NO: 778296 - protein, 77 aa, Homo sapiens
QEAPNPLTPFQSRWRPWPPDSPSLLCAQLSGDSRAESDLGPFPEPMKRSSLGNSTHLTTSAATDASKSKPRLQPDPL

SEQ ID NO: 778297 - protein, 67 aa, Homo sapiens
EGMEKTPWDLPISLKEKDKSREQEAISRILDTLGLRWFVNKEKCFLKLADCIFHLGYDDLVSSRRKR

SEQ ID NO: 778298 - protein, 240 aa, Homo sapiens
MSPLLFGAGLVVLNLVTSARSQKTEPLSGSGDQPLFRGADRYDFAIMIPPGGTECFWQFAHQTGYFYFSYEVQRTVGMSHDRHVAATAHNPQGFLIDTSQGVRGQINFSTQETGFYQLCLSNQHNHFGSVQVYLNFGVFYEGPETDHKQKERKQLNDTLDAIEDGTQKVQNNIFHMWRYYNFARMRKMADFFLIQSNYNYVNWWSTAQSLVIILSGILQLYFLKRLFNVPTTTDTKKPRC

SEQ ID NO: 778299 - protein, 137 aa, Homo sapiens
LIGPPHPGCRADGATQGSDSEGPFSTVSRLSLGSLDLDGHVNLVPAGTRAPRLPPFHSPGFDVGKGPQGQGPRGLCTDWVWQLTPVILALGRLRWEGHLRLGVQDQAGQHSKIPLLFIYLNLFSNLKNAIKRMCIVW

SEQ ID NO: 778300 - protein, 109 aa, Homo sapiens
FFWEVFLDIGFPILIITAAAAAAKTYIECIRHHYKSLAYVNSQQFNEVDYYYSHFTDEEIVAQIYLSKSTMNIEQGQTWWVTPIIPALWEAKAGRSLEVSSSRLACTKW

SEQ ID NO: 778301 - protein, 88 aa, Homo sapiens
KGIPDSGGSWRAEGHQQALWTQPLSLDPAWPTKPRAASQGPRAGSRTSSCTLEGVRGAHCVACARWRGWRGTEGWSSGEDQQIPGHTG

SEQ ID NO: 778302 - protein, 117 aa, Homo sapiens
FKLPFGSEGAIAGRWKSRYCESRSGLLPVSSPEAKETHRCGCRYVSLLSSNGCPDPDLVLKFGPVDSTRGFLLWHIRLTEIVSLPSHVNISYGDFFSALRHYAACEQRLGKWWSLVA

SEQ ID NO: 778303 - protein, 128 aa, Homo sapiens
QAARSAVTAAALYWPNYVADGLPDFFFSSYPDSLVVGAVFLFPFYRWENEGPERLPHQNPVAEAERGWQVHRVVWLWGSEPFCIAGPLHAWLFQDRGEQRGGGRGVAEGYDCGWVLPSPSVAMGLGRV

SEQ ID NO: 778304 - protein, 102 aa, Homo sapiens
ERERWRELPGLSGGRTWGWVWGVQAMDDWSWAEATVKIPVNRAKLSLVTLTADDSTRSRLRDSVSRGKDSPAEAVALPRPPGQHSVEVEAKPMVSPLPATPC

SEQ ID NO: 778305 - protein, 77 aa, Homo sapiens
LARLREGENVRGPLRCGSASYGPPADNKAQWGLGTGGGQPCPPVLDIRRLVSGVLQPPPNPCTTGVPFLRPPKYGAS

SEQ ID NO: 778306 - protein, 101 aa, Homo sapiens
ARSEARGRGDRGCAPFSGRWDPGGGGSLWRGLLRLRWLHCMCQARVGLQGAAGAGRSSPHTSHSRQRCPLYSRQPGRRDLRVQPPECPWLFSGLSYLFKPF

SEQ ID NO: 778307 - protein, 946 aa, Homo sapiens
MSWLRITAMAPPYVATIVFTSQGAQPLVWVKDPLQLTSNPLGPPEPWSSRSSHLPWESPHAPAPPAAPGDFDYLGPSASSQMSALPQEPTENLAPFLKELDSAGELPLGPEPFLAAHQDLNDKRTPEERLPEVVPLLNRDQNQALVQLPRLKWVQTTDLDRAAGHQADEILVPLDSKVSRPTKFVVSPKNLKKDLAERWSLPEIVGIPHQLSKPQRQKQTLPDDYLSMDTLYPGSLPPELRVNADEPPGPPEQVGLSQFHLEPKSQNPETLEDIQSSSLQEEAPAQLLQLPQEVEPSTQQEAPALPPESSMESLAQTPLNHEVTVQPPGEDQAHYNLPKFTVKPADVEVTMTSEPKNETESTQAQQEAPIQPPEEAEPSSTALRTTDPPPEHPEVTLPPSDKGQAQHSHLTEATVQPLDLELSITTEPTTEVKPSPTTEETSAQPPDPGLAITPEPTTEIGHSTALEKTRAPHPDQVQTLHRSLTEVTGPPTKLESSQDSLVQSETAPEEQKASTSTNICELCTCGDETLSCVGLSPKQRLRQVPVPEPDTYNGIFTTLNFQGNYISYLDGNVWKAYSWTEKLILSENYLTELPKDSFEGLLSLQYLDLSCNKIRYIERHTFESLPFLQYINLGCNLITELSLGTFQAWHGMQFLHNLILNRNPLTTVEDPYLFELPALKYLDMGTTHITLTTLKNILTMTVELEKLILPSHMACCLCQFKNSIEAVCKTVKLHCNTACLTNSIHCPEEASVGNPEGAFMKMLQARKQHMSTQLTIESEAPSDSSGINLSGFGGDQLEIQLTEQLRSLIPNEDVRKFMSHVIRTLKMECSETHVQGSCAKLMLRTGLLMKLLSEQQEAKALNVEWDTDQQKTNYINENMEQNEQKEQKSSELMKEVPGDDYKNKLIFAISVTVILIILIIIFCLIEVNSHKRASEKYKDNPSISGA

SEQ ID NO: 778308 - protein, 126 aa, Homo sapiens
LKGEWEFRGQKIDPREYVVPTHSFQPWKNKPRVAFTPSLITRWFLFLGAVEMSWVLFGRCLLWRAGNLWSHRLCDLLFSHLLTLPQLNGLLLVFSVPPLFPHWSLCAGCFSCLEYVSLGGPSSSFT

SEQ ID NO: 778309 - protein, 116 aa, Homo sapiens
RAGFPLTQLVSMGRGRSPWRKRKNRRHGTKEAQETRGLEKEAKASRARSWWSEPKEGEPRAASVKPHKGHGGTQPELIAQPGWSGNQVNGACCRQPFSLSNTGVFPQPGKCYSIFL

SEQ ID NO: 778310 - protein, 73 aa, Homo sapiens
MSMATGKNLQSIPKKTQHYFLLCFLLKFSLTISSCLICSLKLSWAGTLPSEPLAVLTVVAPVPCRASRGGTEL

SEQ ID NO: 778311 - protein, 300 aa, Homo sapiens
PQEGEHPPNEMESKRPRLLEEADKQKKTVRVGLNAPSMLRKNQLGFLRFANYCRIARELRVSCMQRKKVQIHSWDPSSLASDRFNRILANTNTDQLFTVNQVEAGGSKYGIITMRGLTTPELRVYPHKTLYVPNRKVNSMCWASLNHLDSHLLLCFVGLADTPSCAVLLPASLFIGSFPGMRRPGMLCSFQIPDAWSCAWSLSIHAYHSFSTGLSQQVLLTNVVTGHQQSFGTSSDVLAQQFAIMTPLLFNGCRSGEIFGIDLRCGNQGSGWKAICLSHDSAVTSLQILQDGQFLVSSDM

SEQ ID NO: 778312 - protein, 102 aa, Homo sapiens
TSIQIQEIQRAPVRYFTRSSPRHIIIRFSKVIIKEKMFKAARKKSQVTHQTNSRPLRNPTSQRDWGPIFKTFFLRQCLTSVAQAAVQWHNLNSLQSQTPGLR

SEQ ID NO: 778313 - protein, 109 aa, Homo sapiens
MRPPQPCGTDPCPLCDEAKEVLKPYENRQPYKDQKLPGTRRRRSPSSPSHPHMASQSGKRYNLTLNQVLSFDYDMGLDAPKTISSDCGAFYCLRMFKSPDMTCCFYPKQ

SEQ ID NO: 778314 - protein, 115 aa, Homo sapiens
MLWFQGNSMQLARSSFGLFLRNCSASKTTLPVLTLFTKDPCPLCDEAKEVLKPYENRFILQEVNITLPENSVWYERYKFDIPVFHLNGQFLMMHRVNTSKLEKQLLKLEQQSTGG

SEQ ID NO: 778315 - protein, 278 aa, Homo sapiens
RVTSQKPTRRAVGGSWRTVPGWVLEALGPRKRLQTLQRCLAHGGCLWCFMKNISRYLTDIKPLPPNIKDRLIKIMSMQGQITDSNISEILHPEVQTLDLRSCDISDAALLHLSNCRKLKKLNLNASKGNRVSVTSEGIKAVASSCSYLHEASLKRCCNLTDEGVVALALNCQLLKIIDLGGCLSITDVSLHALGKNCPFLQCVDFSATQVSDSGVIALVSGPCAKKLEEIHMGHCVNLTDGAVEAVLTYCPQIRILLFHGCPLITGSFPKKFGAIKKR

SEQ ID NO: 778316 - protein, 289 aa, Homo sapiens
RVTSQKPTRRAVGGSWRTVPGWVLEALGPRKRLQTLQRCLAHGGCLWCFMKNISRYLTDIKPLPPNIKDRLIKIMSMQGQITDSNISEILHPEVQTLDLRSCDISDAALLHLSNCRKLKKLNLNASKGNRVSVTSEGIKAVASSCSYLHEASLKRCCNLTDEGVVALALNCQLLKIIDLGGCLSITDVSLHALGKNCPFLQCVDFSATQVSDSGVIALVSGPCAKKLEEIHMGHCVNLTDGAVEAVLTYCPQIRILLFHGCPLITDHSREVLEQLVGPNKLKQVTWTVY

SEQ ID NO: 778317 - protein, 227 aa, Homo sapiens
MLPRLVSNSGAQVIHPPQPLKMLGLQILHPEVQTLDLRSCDISDAALLHLSNCRKLKKLNLNASKGNRVSVTSEGIKAVASSCSYLHEASLKRCCNLTDEGVVALALNCQLLKIIDLGGCLSITDVSLHALGKNCPFLQCVDFSATQVSDSGVIALVSGPCAKKLEEIHMGHCVNLTDGAVEAVLTYCPQIRILLFHGCPLITDHSREVLEQLVGPNKLKQVTWTVY

SEQ ID NO: 778318 - protein, 249 aa, Homo sapiens
  misc_feature (2)..(3): Xaa can be any naturally occurring amino acid
  misc_feature (8)..(8): Xaa can be any naturally occurring amino acid
RXXRAARXARANISRYLTDIKPLPPNIKDRLIKIMSMQGQITDSNISEILHPEVQTLDLRSCDISDAALLHLSNCRKLKKLNLNASKGNRVSVTSEGIKAVASSCSYLHEASLKRCCNLTDEGVVALALNCQLLKIIDLGGCLSITDVSLHALGKNCPFLQCVDFSATQVSDSGVIALVSGPCAKKLEEIHMGHCVNLTDGAVEAVLTYCPQIRILLFHGCPLITDHSREVLEQLVGPNKLKQVTWTVY

SEQ ID NO: 778319 - protein, 261 aa, Homo sapiens
AGDVTKTYASRGGRELADGPWLGSGGPGTAEEASDAAAMPRPRRVSQLLDLCLWCFMKNISRYLTDIKPLPPNIKDRLIKIMSMQGQITDSNISEILHPEVQTLDLRSCDISDAALLHLSNCRKLKKLNLNASKGNRVSVTSEGIKAVASSCSYLHEASLKRCCNLTDEGVVALALNCQLLKIIDLGGCLSITDVSLHALGKNCPFLQCVDFSATQVSDSGVIALVSGPCAKKLEEIHMGHCVIDKVESVGLVGGTSSSLS

SEQ ID NO: 778320 - protein, 296 aa, Homo sapiens
AGDVTKTYASRGGRELADGPWLGSGGPGTAEEASDAAAMPRPRRVSQLLDLCLWCFMKNISRYLTDIKPLPPNIKDRLIKIMSMQGQITDSNISEILHPEVQTLDLRSCDISDAALLHLSNCRKLKKLNLNASKGNRVSVTSEGIKAVASSCSYLHEASLKRCCNLTDEGVVALALNCQLLKIIDLGGCLSITDVSLHALGKNCPFLQCVDFSATQVSDSGVIALVSGPCAKKLEEIHMGHCVNLTDGAVEAVLTYCPQIRILLFHGCPLITDHSREVLEQLVGPNKLKQVTWTVY

SEQ ID NO: 778321 - protein, 365 aa, Homo sapiens
RVTSQKPTRRAVGGSWRTVPGWVLEALGPRKRLQTLQRCLAHGGSVSSWILMLRKDFISLKRNWEVTSKMAKWEQLQSAAPSKIDAEDGRFLHFQLDATGLEWLIKLHNVVGGSDFFLFRCLWCFMKNISRYLTDIKPLPPNIKDRLIKIMSMQGQITDSNISEILHPEVQTLDLRSCDISDAALLHLSNCRKLKKLNLNASKGNRVSVTSEGIKAVASSCSYLHEASLKRCCNLTDEGVVALALNCQLLKIIDLGGCLSITDVSLHALGKNCPFLQCVDFSATQVSDSGVIALVSGPCAKKLEEIHMGHCVNLTDGAVEAVLTYCPQIRILLFHGCPLITDHSREVLEQLVGPNKLKQVTWTVY

SEQ ID NO: 778322 - protein, 281 aa, Homo sapiens
AGDVTKTYASRGGRELADGPWLGSGGPGTAEEASDAAAMPRPRRVSQLLDLCLWCFMKNISRYLTDIKPLPPNIKDRLIKIMSMQGQITDSNISEILHPEVQTLDLRSCDISDAALLHLSNCRKLKKLNLNASKGNRVSVTSEGIKAVASSCSYLHEASLKRCCNLTDEGVVALALNCQLLKIIDLGGCLSITDVSLHALGVSDSGVIALVSGPCAKKLEEIHMGHCVNLTDGAVEAVLTYCPQIRILLFHGCPLITDHSREVLEQLVGPNKLKQVTWTVY

SEQ ID NO: 778323 - protein, 101 aa, Homo sapiens
RVTSQKPTRRAVGGSWRTVPGWVLEALGPRKRLQTLQRCLAHGGSVSSWILMLRKDFISLKRNWEVTSKMAKWEQLQSAAPSKIDAEDGRFLHFQLRCYWT

SEQ ID NO: 778324 - protein, 111 aa, Homo sapiens
MGEGGYRLTGWRDVSQAPSPLSSGAHCRLLLFPVCCETDHRPAQRSPRRVPCLCPPRRRHPPRSFTSCTFSGSRSHIHPTWRSPHDVPGSVLAPAAALGNRIGKRSPRVDA

SEQ ID NO: 778325 - protein, 111 aa, Homo sapiens; identical to SEQ ID NO: 778324

SEQ ID NO: 778326 - protein, 231 aa, Homo sapiens
EEEGEKMASMDYSTYSQAAAQQGYSAYNTQPTQGYAQTTQAYGQQSYGTYGQPIDVSYTQAQTTAIYGQTAYATSYGQPPTGYTTPTAPQAYSQPVQGYGTGAYDTTTATVTTTQASYAAQSAYGTQPAYPAYGQQPVATAPTRPQNGNKPTETSQPQSSTGGYNQPSLGYGQSNCSYPQVPGSYSMQPVTAPPSYPPTSYSSTQPTSYDQSSYSQQNTYGKPSSYGQQSS

SEQ ID NO: 778327 - protein, 113 aa, Homo sapiens
PVCEDLLFSSMQKYDLLARIVSLYRFLCIICIYPMIFIECFLCNRQNFRCLLMNDKLAISQCSSHPISQQLLTQLISPSLKNIPQLFLGNHTCSLSPCLSDCAVSVSFASSSS

SEQ ID NO: 778328 - protein, 223 aa, Homo sapiens
MTRWSSYLLGWTTFLLYSYESSGGMHEECVFPFTYKGSVYFTCTHIHSLSPWCATRAVYNGQWKYCQSEDYPRCIFPFIYRGKAYNSCISQGSFLGSLWCSVTSVFDEKQQWKFCETNEYGGNSLRKPCIFPSIYRNNVVSDCMEDESNKLWCPTTENMDKDGKWSFCADTRISALVPGFPCHFPFNYKNKNYFNCTNKGSKENLVWCATSYNYDQDHTWVYC

SEQ ID NO: 778329 - protein, 177 aa, Homo sapiens
MTRWSSYLLGWTTFLLYSYESSGDYPRCIFPFIYRGKAYNSCISQGSFLGSLWCSVTSVFDEKQQWKFCETNEYGGNSLRKPCIFPSIYRNNVVSDCMEDESNKLWCPTTENMDKDGKWSFCADTRISALVPGFPCHFPFNYKNKNYFNCTNKGSKENLVWCATSYNYDQDHTWVYC

SEQ ID NO: 778330 - protein, 223 aa, Homo sapiens; identical to SEQ ID NO: 778328

SEQ ID NO: 778331 - protein, 242 aa, Homo sapiens
GHVTVLRPWRARLRPYRPHRSAGHLAKTHRPQPRASPVAAARPQSHRQVQAQRGRAYGAEPLARAVGESVRPSVRPSGRRSSRQALRPRPLVSPHPEPPGGAGLAAAAMSMGLEITGTALAVLGWLGTIVCLRVAHVAVSAFIGSNIITSQNIWEGLWMNCVVQSTGQMQCKVYDSLLALPQDLQAAAPSSWWPILLGRLRGCQVALVGARATNCVQDDTGQRPRSPSWQAVLVPFLAALFT

SEQ ID NO: 778332 - protein, 93 aa, Homo sapiens
RHERTPAGPPQVHQPTRKSQRGLAGKDLSLQPPLQEEPRDPRIPDKEAGGVPCCDPETACSLTLHFHETLSLPLLQQKPSAGGERVGSVGDGL

SEQ ID NO: 778333 - protein, 119 aa, Homo sapiens
MLSYRAPCSLRIAILYSTPGCHSQAEHKTKPTALDVPVSGATTTFCWVQPHLGELGPGLGLWPRREQPDGVKLRPSVWELQWRGTEGLGVGGFGFATESQLLGQDSPREWFPWPGCQNG

SEQ ID NO: 778334 - protein, 162 aa, Homo sapiens
PSMGSLMYHKTRIITEDLPTLITFIGFLTMPVIPATREAEVGESLEPGRQMQTSQKNTLRKRRVVIVDPETNKEMSVQEAYKKGLIDYETFKELCEQECEWEEITITGSDGSTRVVLVDRKTGSQYDIQDAIDKGLVDRKFFDQYRSGSLSLTQFADMISLK

SEQ ID NO: 778335 - protein, 283 aa, Homo sapiens
GTFAPTSPASEAGELDQQPPGASESPSPGLPRSPERWDAGLGSRQRNMAPWTLWRCCQRVVGWVPVLFITFVVVWSYYAYVVELCVYHVDERTICNGIAPEKDVDGFHIINIGRLCLDQHSLIPATASAVWEIIKRTGIQTFGKNVVVAGRSKNVGMPIAMLLHTDGEHERPGGDATVTIAHRYTPKEQLKIHTQLADIIIVAAGIPKLITSDMVKEGAAVIDVGINYVHDPVTGKTKLVGDVDFEAVKKKAGFITPVPGGVGPMTVAMLLKNTLLAAKKIIY

SEQ ID NO: 778336 - protein, 170 aa, Homo sapiens
MLAGCGAQSPGHTARLHILRGPGTWVLAPPPADPALCQFRPRSWEPLFIPLCVSAGTWLGSATCCPASPGEGGARPPAARTGVAGGGAPVRKPGIRGHDGAGPRLLAAPRPPWPSAGVGQKHSTLRKGTGRARECVPGLSEQRCEDQQREEIPSSYPDGRMKTAERSSTR

SEQ ID NO: 778337 - protein, 165 aa, Homo sapiens
MGMPAICWLGAGPSRQATLHASTSSEGPGLGSWPRPLRTRHSVSSVPGPGNRSLSHSACLPEPGWEALLAALPARVRAEPGLQPRGLESREVEPQSGSRGSAAMTVPVRGFSLLRGRLGRAPALGRSTAPSVRAPGEPGSAFRGFRSSGVRPQREREKKDTNGLI

SEQ ID NO: 778338 - protein, 289 aa, Homo sapiens
MAKHIQKEIQRGVESWVSLGNRRPHLSIILVGDNPASHTYVRNKIRAASAVGICSELILKPKDVSQEELLDVTDQLNMDPRVSGILVQLPLPDHVDERTICNGIAPEKDVDGFHIINIGRLCLDQHSLIPATASAVWEIIKRTGIQTFGKNVVVAGRSKNVGMPIAMLLHTDGEHERPGGDATVTIAHRYTPKEQLKIHTQLADIIIVAAGIPKLITSDMVKEGAAVIDVGINYVHDPVTGKTKLVGDVDFEAVKKKAGFITPVPGGVGPMTVAMLLKNTLLAAKKIIY

SEQ ID NO: 778339 - protein, 277 aa, Homo sapiens
MGMPAICWLGAGPSRQATLHASTSSEGPGLGSWPRPLRTRHSVSSVPGPGNRSLSHSACLPEPGWEALLAALPARVRAEPGLQPRGLESREVEPQSGSRGSAAMTVPVRGFSLLRGRLGRAPALGRSTAPSVRAPGEPGSAFRGFRSSGVRTSREKRFHLPHEAIIISGTEMAKHIQKEIQRGVESWVSLGNRRPHLSIILVGDNPASHTYVRNKIRAASAVGICSELILKPKDVSQEELLDVTDQLNMDPRVSGILVQLPLPEAVQLCSGFEMLGI

SEQ ID NO: 778340 - protein, 181 aa, Homo sapiens
MGMPAICWLGAGPSRQATLHASTSSEGPGLGSWPRPLRTRHSVSSVPGPGNRSLSHSACLPEPGWEALLAALPARVRAEPGLQPRGLESREVEPQSGSRGSAAMTVPVRGFSLLRGRLGRAPALGRSTAPSVRAPGEPGSAFRGFRSSGVRTSREKRFHLPEVATVCLPTCPHPQSSFLYI

SEQ ID NO: 778341 - protein, 182 aa, Homo sapiens
MGMPAICWLGAGPSRQATLHASTSSEGPGLGSWPRPLRTRHSVSSVPGPGNRSLSHSACLPEPGWEALLAALPARVRAEPGLQPRGLESREVEPQSGSRGSAAMTVPVRGFSLLRGRLGRAPALGRSTAPSVRAPGEPGSAFRGFRSSGVRYEGCGRRVRSRWRWEVGGGAGGARARGAQGS

SEQ ID NO: 778342 - protein, 450 aa, Homo sapiens
MGMPAICWLGAGPSRQATLHASTSSEGPGLGSWPRPLRTRHSVSSVPGPGNRSLSHSACLPEPGWEALLAALPARVRAEPGLQPRGLESREVEPQSGSRGSAAMTVPVRGFSLLRGRLGRAPALGRSTAPSVRAPGEPGSAFRGFRSSGVRHEAIIISGTEMAKHIQKEIQRGVESWVSLGNRRPHLSIILVGDNPASHTYVRNKIRAASAVGICSELILKPKDVSQEELLDVTDQLNMDPRVSGILVQLPLPDHVDERTICNGIAPEKDVDGFHIINIGRLCLDQHSLIPATASAVWEIIKRTGIQTFGKNVVVAGRSKNVGMPIAMLLHTDGEHERPGGDATVTIAHRYTPKEQLKIHTQLADIIIVAAGIPKLITSDMVKEGAAVIDVGINYVHDPVTGKTKLVGDVDFEAVKKKAGFITPVPGGVGPMTVAMLLKNTLLAAKKIIY

SEQ ID NO: 778343 - protein, 106 aa, Homo sapiens
MAKHIQKEIQRGVESWVSLGNRRPHLSIILVGDNPASHTYVRNKIRAASAVGICSELILKPKDVSQEELLDVTDQLNMDPRVSGILVQLPLPEAVQLCSGFEMLGI

SEQ ID NO: 778344 - protein, 1193 aa, Homo sapiens
MCEVMPTISEDGRRGSALGPDEAGGELERLMVTMLTERERLLETLREAQDGLATAQLRLRELGHEKDSLQRQLSIALPQEFAALTKELNLCREQLLEREEEIAELKAERNNTRLLLEHLECLVSRHERSLRMTVVKRQAQSPGGVSSEVEVLKALKSLFEHHKALDEKVRERLRMALERVAVLEEELELSNQETLNLREQLSRRRSGLEEPGKDGDGQTLANGLGPGGDSNRRTAELEEALERQRAEVCQLRERLAVLCRQMSQLEEELGTAHRELGKAEEANSKLQRDLKEALAQREDMEERITTLEKRYLSAQREATSLHDANDKLENELASKESLYRQSEEKSRQLAEWLDDAKQKLQQTLQKAETLPEIEAQLAQRVAALNKAEERHGNFEERLRQLEAQLEEKNQELQRARQREKMNDDHNKRLSETVDKLLSESNERLQLHLKERMGALEEKNSLSEEIANMKKLQDELLLNKEQLLAEMERMQMEIDQLRGRPPSSYSRSLPGSALELRYSQAPTLPSGAHLDPYVAGSGRAGKRGRWSGVKEEPSKDWERSAPAGSIPPPFPGELDGSDEEEAEGMFGAELLSPSGQADVQTLAIMLQEQLEAINKEIKLIQEEKETTEQRAEELESRVSSSGLDSLGRYRSSCSLPPSLTTSTLASPSPPSSGHSTPRLAPPSPAREGTDKANHVPKEEAGAPRGEGPAIPGDTPPPTPRSARLERMTQALALQAGSLEDGGPPRGSEGTPDSLHKAPKKKSIKSSIGRLFGKKEKGRMGPPGRDSSSLAGTPSDETLATDPLGLAKLTGPGDKDRRNKRKHELLEEACRQGLPFAAWDGPTVVSWLELWVGMPAWYVAACRANVKSGAIMANLSDTEIQREIGISNPLHRLKLRLAIQEMVSLTSPSAPASSRTSTGNVWMTHEEMESLTATTKPETKEISWEQILAYGDMNHEWVGNDWLPSLGLPQYRSYFMESLVDARMLDHLNKKELRGQLKMVDSFHRVSLHYGIMCLKRLNYDRKDLERRREESQTQIRDVMVWSNERVMGWVSGLGLKEFATNLTESGVHGALLALDETFDYSDLALLLQIPTQNAQARQLLEKEFSNLISLGTDRRLDEDSAKSFSRSPSWRKMFREKDLRGVTPDSAEMLPPNFRSAAAGALGSPGLPLRKLQPEGQTSGSSRADGVSVRTYSC

SEQ ID NO: 778345 - protein, 141 aa, Homo sapiens
MRGEAAPSPFSCPVAGPKSSFFVRKEGRGDSLLQASPPVPLSSAPPRPVAGPPGHLRAGSPLPPPCLVSPGPHRPPCCGRVRAPGVGGAEWRFPFSSGSGVCMGESSFHDAAGRRGVGAGGRWGSPRPRLSVGLPAPGVTQ

SEQ ID NO: 778346 - protein, 120 aa, Homo sapiens
MGLCATQLRPAASGRRSPGSSAGGVPSPSPVSRVPGASPPPVLWPCPCPGGRGRRMALPLLLWLRGLHGRILFPRCRWATWRGGRGTVGEPSPPTLGRPPRPRRHSVITGKENCFKKLTC

SEQ ID NO: 778347 - protein, 1053 aa, Homo sapiens [sequence omitted]

SEQ ID NO: 778348 - protein, 1053 aa, Homo sapiens [sequence omitted]

SEQ ID NO: 778349 - protein, 1062 aa, Homo sapiens
MTVVKRQAQSPGGVSSEVEVLKALKSLFEHHKALDEKVRERLRMALERVAVLEEELELSNQETLNLREQLSRRRSGLEEPGKDGDGQTLANGLGPGGDSNRRTAELEEALERQRAEVCQLRERLAVLCRQMSQLEEELGTAHRELGKAEEANSKLQRDLKEALAQREDMEERITTLEKRYLSAQREATSLHDANDKLENELASKESLYRQSEEKSRQLAEWLDDAKQKLQQTLQKAETLPEIEAQLAQRVAALNKAEERHGNFEERLRQLEAQLEEKNQELQRARQREKMNDDHNKRLSETVDKLLSESNERLQLHLKERMGALEEKNSLSEEIANMKKLQDELLLNKEQLLAEMERMQMEIDQLRGRPPSSYSRSLPGSALELRYSQAPTLPSGAHLDPYVAGSGRAGKRGRWSGVKEEPSKDWERSAPAGSIPPPFPGELDGSDEEEAEGMFGAELLSPSGQADVQTLAIMLQEQLEAINKEIKLIQEEKETTEQRAEELESRVSSSGLDSLGRYRSSCSLPPSLTTSTLASPSPPSSGHSTPRLAPPSPAREGTDKANHVPKEEAGAPRGEGPAIPGDTPPPTPRSARLERMTQALALQAGSLEDGGPPRGSEGTPDSLHKAPKKKSIKSSIGRLFGKKEKGRMGPPGRDSSSLAGTPSDETLATDPLGLAKLTGPGDKDRRNKRKHELLEEACRQGLPFAAWDGPTVVSWLELWVGMPAWYVAACRANVKSGAIMANLSDTEIQREIGISNPLHRLKLRLAIQEMVSLTSPSAPASSRTSTGNVWMTHEEMESLTATTKPETKEISWEQILAYGDMNHEWVGNDWLPSLGLPQYRSYFMESLVDARMLDHLNKKELRGQLKMVDSFHRVSLHYGIMCLKRLNYDRKDLERRREESQTQIRDVMVWSNERVMGWVSGLGLKEFATNLTESGVHGALLALDETFDYSDLALLLQIPTQNAQARQLLEKEFSNLISLGTDRRLDEDSAKSFSRSPSWRKMFREKDLRGVTPDSAEMLPPNFRSAAAGALGSPGLPLRKLQPEGQTSGSSRADGVSVRTYSC

SEQ ID NO: 778350 - protein, 141 aa, Homo sapiens; identical to SEQ ID NO: 778345

SEQ ID NO: 778351 - protein, 1053 aa, Homo sapiens [sequence omitted]

SEQ ID NO: 778352 - protein, 499 aa, Homo sapiens
MTVVKRQAQSPGGVSSEVEVLKALKSLFEHHKALDEKVRERLRMALERVAVLEEELELSNQETLNLREQLSRRRSGLEEPGKDGDGQTLANGLGPGGDSNRRTAELEEALERQRAEVCQLRERLAVLCRQMSQLEEELGTAHRELGKAEEANSKLQRDLKEALAQREDMEERITTLEKRYLSAQREATSLHDANDKLENELASKESLYRQSEEKSRQLAEWLDDAKQKLQQTLQKAETLPEIEAQLAQRVAALNKAEERHGNFEERLRQLEAQLEEKNQELQRARQREKMNDDHNKRLSETVDKLLSESNERLQLHLKERMGALEEKNSLSEEIANMKKLQDELLLNKEQLLAEMERMQMEIDQLRGRPPSSYSRSLPGSALELRYSQAPTLPSGAHLDPYVAGSGRAGKRGRWSGVKEEPSKDWERSAPAGSIPPPFPGELDGSDEEEAEGMFGAELLSPSGQADVQTLAIMLQEQLEAINKEIKLIQEEKCAWCGNP

SEQ ID NO: 778353 - protein, 170 aa, Homo sapiens
MSEPGKGDDCLELESSMAESRLRAPDLGVSRCLGKCQKNSPGARKHPFSGKSFYLDLPAGKNLQFLTGAIQQLGGVIEGFLSKEVSYIVSSRREVKAESSGKSHRGCPSPSPSEVRVETSAMVDPKGSHPRPSRKPVDSVPLSRGKELLQKAIRNQVSWGKMGQSRWSPA

SEQ ID NO: 778354 - protein, 605 aa, Homo sapiens
MHVQQLSLASLCVKKQQPKKPEGTCPAAESRTRKVARLKAPFLKIEDESRKFRPFHHQFKSFPEISFLGPKDASPFEAPTTLGSMHHTRESKDGEPSPRSAAHTMPRRKKGYCECCQEAFEELHVHLQSAQHRSFALEAHLYAEVDRIIAQLSHSFADIPFQAGLPRWSGSPASDCDPLCPETLHPHQPSHPRAASPRIRKEDSCQASGIPEQDGTVDSTQAPAERAGTGEVPGPIASCQDLGVSVDVFVDPPGYQCPGALLANASCLALVLWNSPLAQTWHFLATSGRFSSPVAVLRRRVGASWPQASFFVPIAPNPCGTRTTSGKRLPSLPLTGHESRLLASLQPLCHSQTCLSLPDPFPWQPTDRPAEFWATQPSWLGKGWPPGPEDSECTATGPVSQEAGQLLSCPTAPGWPSAPLYSATSVQPSGAPVESRSTSLLQPLPASAGASCSRCLWAPQPLQVPCLPVSQPWSQPQPQPQPHAGRELLLRVPKVLWLFTGPGSSRLKGHRYNLLLCWVLHTRPGLTRTQEGQNPRTSPKELEGGPGLAFEVQQAAVTLSSMELTEPPLPLARSLGENLGWGLPSPTPASCHVPDQAESTVGLPS

SEQ ID NO: 778355 - protein, 537 aa, Homo sapiens
MKADASPFEAPTTLGSMHHTRESKDGEPSPRSAAHTMPRRKKGYCECCQEAFEELHVHLQSAQHRSFALEAHLYAEVDRIIAQLSHSFADIPFQAGLPRWSGSPASDCDPLCPETLHPHQPSHPRAASPRIRKEDSCQASGIPEQDGTVDSTQAPAERAGTGEVPGPIASCQDLGVSVDVFVDPPGYQCPGALLANASCLALVLWNSPLAQTWHFLATSGRFSSPVAVLRRRVGASWPQASFFVPIAPNPCGTRTTSGKRLPSLPLTGHESRLLASLQPLCHSQTCLSLPDPFPWQPTDRPAEFWATQPSWLGKGWPPGPEDSECTATGPVSQEAGQLLSCPTAPGWPSAPLYSATSVQPSGAPVESRSTSLLQPLPASAGASCSRCLWAPQPLQVPCLPVSQPWSQPQPQPQPHAGRELLLRVPKVLWLFTGPGSSRLKGHRYNLLLCWVLHTRPGLTRTQEGQNPRTSPKELEGGPGLAFEVQQAAVTLSSMELTEPPLPLARSLGENLGWGLPSPTPASCHVPDQAESTVGLPS

SEQ ID NO: 778356 - protein, 605 aa, Homo sapiens; identical to SEQ ID NO: 778354

SEQ ID NO: 778357 - protein, 219 aa, Homo sapiens
MAESRLRAPDLGVSRCLGKCQKNSPGARKHPFSGKSFYLDLPAGKNLQFLTGAIQQLGGVIEGFLSKEVSYIVSTSPGALSPCLPALVPTPAPAPAPCWQRAAPTSPQGAWLFTGPGSSRLKGHRYNLLLCWVLHTRPGLTRTQEGQNPRTSPKELEGGPGLAFEVQQAAVTLSSMELTEPPLPLARSLGENLGWGLPSPTPASCHVPDQAESTVGLPS

SEQ ID NO: 778358 - protein, 605 aa, Homo sapiens; identical to SEQ ID NO: 778354

SEQ ID NO: 778359 - protein, 187 aa, Homo sapiens
MSEPGKGDDCLELESSMAESRLRAPDLGVSRCLGKCQKNSPGARKHPFSGKSFYLDLPAGKNLQFLTGAIQQLGGVIEGFLSKEVSYIVSSRREVKAESSGKSHRGCPSPSPSEVRVETSAMVDPKGSHPRPSRKPVDSVPLSRGKELLQKAIRNQGSISGGGSGGSSSLLTNARSWGVRILHVDEW

SEQ ID NO: 778360 - protein, 410 aa, Homo sapiens
MKADASPFEAPTTLGSMHHTRESKDGEPSPRSAAHTMPRRKKGYCECCQEAFEELHVHLQSAQHRSFALEAHLYAEVDRIIAQLSHSFADIPFQAGLPRWSGSPASDCDPLCPETLHPHQPSHPRAASPRIRKEDSCQASGHESRLLASLQPLCHSQTCLSLPDPFPWQPTDRPAEFWATQPSWLGKGWPPGPEDSECTATGPVSQEAGQLLSCPTAPGWPSAPLYSATSVQPSGAPVESRSTSLLQPLPASAGASCSRCLWAPQPLQVPCLPVSQPWSQPQPQPQPHAGRELLLRVPKVLWLFTGPGSSRLKGHRYNLLLCWVLHTRPGLTRTQEGQNPRTSPKELEGGPGLAFEVQQAAVTLSSMELTEPPLPLARSLGENLGWGLPSPTPASCHVPDQAESTVGLPS

SEQ ID NO: 778361 - protein, 764 aa, Homo sapiens
MSEPGKGDDCLELESSMAESRLRAPDLGVSRCLGKCQKNSPGARKHPFSGKSFYLDLPAGKNLQFLTGAIQQLGGVIEGFLSKEVSYIVSSRREVKAESSGKSHRGCPSPSPSEVRVETSAMVDPKGSHPRPSRKPVDSVPLSRGKELLQKAIRNQNMMMHVQQLSLASLCVKKQQPKKPEGTCPAAESRTRKVARLKAPFLKIEDESRKFRPFHHQFKSFPEISFLGPKDASPFEAPTTLGSMHHTRESKDGEPSPRSAAHTMPRRKKGYCECCQEAFEELHVHLQSAQHRSFALEAHLYAEVDRIIAQLSHSFADIPFQAGLPRWSGSPASDCDPLCPETLHPHQPSHPRAASPRIRKEDSCQASGIPEQDGTVDSTQAPAERAGTGEVPGPIASCQDLGVSVDVFVDPPGYQCPGALLANASCLALVLWNSPLAQTWHFLATSGRFSSPVAVLRRRVGASWPQASFFVPIAPNPCGTRTTSGKRLPSLPLTGHESRLLASLQPLCHSQTCLSLPDPFPWQPTDRPAEFWATQPSWLGKGWPPGPEDSECTATGPVSQEAGQLLSCPTAPGWPSAPLYSATSVQPSGAPVESRSTSLLQPLPASAGASCSRCLWAPQPLQVPCLPVSQPWSQPQPQPQPHAGRELLLRVPKVLWLFTGPGSSRLKGHRYNLLLCWVLHTRPGLTRTQEGQNPRTSPKELEGGPGLAFEVQQAAVTLSSMELTEPPLPLARSLGENLGWGLPSPTPASCHVPDQAESTVGLPS

SEQ ID NO: 778362 - protein, 802 aa, Homo sapiens
MVRSRGGGFRNVTSRGDDCLELESSMAESRLRAPDLGVSRCLGKCQKNSPGARKHPFSGKSFYLDLPAGKNLQFLTGAIQQLGGVIEGFLSKEVSYIVSSRREVKAESSGKSHRGCPSPSPSEVRVETSAMVDPKGSHPRPSRKPVDSVPLSRGKELLQKAIRNQGSISGGGSGGSSSLLTNARSWGVRILHVDEMMMHVQQLSLASLCVKKQQPKKPEGTCPAAESRTRKVARLKAPFLKIEDESRKFRPFHHQFKSFPEISFLGPKDASPFEAPTTLGSMHHTRESKDGEPSPRSAAHTMPRRKKGYCECCQEAFEELHVHLQSAQHRSFALEAHLYAEVDRIIAQLSHSFADIPFQAGLPRWSGSPASDCDPLCPETLHPHQPSHPRAASPRIRKEDSCQASGIPEQDGTVDSTQAPAERAGTGEVPGPIASCQDLGVSVDVFVDPPGYQCPGALLANASCLALVLWNSPLAQTWHFLATSGRFSSPVAVLRRRVGASWPQASFFVPIAPNPCGTRTTSGKRLPSLPLTGHESRLLASLQPLCHSQTCLSLPDPFPWQPTDRPAEFWATQPSWLGKGWPPGPEDSECTATGPVSQEAGQLLSCPTAPGWPSAPLYSATSVQPSGAPVESRSTSLLQPLPASAGASCSRCLWAPQPLQVPCLPVSQPWSQPQPQPQPHAGRELLLRVPKVLWLFTGPGSSRLKGHRYNLLLCWVLHTRPGLTRTQEGQNPRTSPKELEGGPGLAFEVQQAAVTLSSMELTEPPLPLARSLGENLGWGLPSPTPASCHVPDQAESTVGLPS

SEQ ID NO: 778363 - protein, 179 aa, Homo sapiens
GYCECCQEAFEELHVVSPFPIKQLLPECPEGACSLGMSPSYAISMLLWLSSRARAWAGRSASVSPSPQASSNALCSSPPPAASSECPAPELCPGSPSICRSGQDHCSAQPQLCRHPFPGWPPQVSATLAGTTVSALSSVALWVGRDPQVGGCWDQTVMFSSFLTFLSPYPQSCLFWGWP

SEQ ID NO: 778364 - protein, 150 aa, Homo sapiens
MSGDVAEVSRAARLLHGSRGTGTGSSAALWAAGRAATSESRMGLPRSGRAPLGSAEGVCRARDLEPGPDPSWLLSGLLPLPPFHPSPAGCPAGPSAAVAFSELRLRRRCHSCLQPRRAGQVMQRVPRDLPPPPTPFSPGSTPQFPPLRVS

SEQ ID NO: 778365 - protein, 30 aa, Homo sapiens
FNPDVCWDRNNPEPWNKLGPNDQYKFCSVN

SEQ ID NO: 778366 - protein, 71 aa, Homo sapiens
MTSVPLGTRSQFRYDSVSPKACDSNFSSIEISGPLETTHPSKPCAPGGNPALQAVTQGGFQSSGEKSAMWC

SEQ ID NO: 778367 - protein, 116 aa, Homo sapiens
MVQRREFHPGVNLPGLPCALQESRSETHAGVWWWACGSGHRLGLHRTHVVPARVLWAQKRPCLRASRTRQSWALRALGPVSVCREPPVATRISPREDSGRDRGRPPGGPWTAAGAP

SEQ ID NO: 778368 - protein, 107 aa, Homo sapiens
PPCHDPIPGRPPPTSAASHTLLPQPSAFSAEPTHQVCAYLRLAVPEDPHPRRFQAKTLSHPLRLCTAIGASPHRGKGLNEFTHSIARYPAFTRLYRLMGYKDEQSLH

SEQ ID NO: 778369 - protein, 173 aa, Homo sapiens
MISKPCKSKGKEHSAKQRRPHNSLSSNFTTRFQPHRNTTEERATEPELGRGWAHMHRGRPTCTAGGAHGTLVTSSPGSRAGEGRREERGEEAQDPGTSPGSPGGEGRREERGEEAQDPGTSPGSPGGEGRREERGEEAQDPGTSPGSPAGKGRREERGEEAQDPGTTGARVDT

SEQ ID NO: 778370 - protein, 269 aa, Homo sapiens
AAVPLPGDPPHALCPAYQEKEEVGSCWNDSRWSLLCQEEGTWFLAGIRDFPSGCLRPRAFFPLQTHGPWISHVTRGAYLEDQLAWDWGPDGEETETQTCPPHTEHGACGLRLEAAPVGVLWPWLAEVHVAGDRVCTGILLAPGWVLAATHCVLRPGSTTVPYIEVYLGRAGASSLPQGHQVSRLVISIRLPQHLGLRPPLALLELSSRVEPSPSALPICLHPAGIPPGASCWVLGWKEPQDRVPVAAAVSILTQRICDCLYQGILPPGT

SEQ ID NO: 778371 - protein, 41 aa, Homo sapiens
MGNVPPKAETPLRCILENWDQLDSHMLRNKRLIFFCSTTWP

SEQ ID NO: 778372 - protein, 103 aa, Homo sapiens
QDYADMAVRRQDKLADSCSFLSLNNSSHSFLKALPFSCSPSVGVFVYTSLARKALLSGFPLPPPLLPALSPAFPSSFLLSLPPFLPVPFFPSLCPSPFLPLLM

SEQ ID NO: 778373 - protein, 113 aa, Homo sapiens
AFSSVFRAGLPAASAPEGPVGGGAQILRALPQGSHVGHCENPVSPSPRFVLALEAGPVTPFCRLRRRSGSWVLCAKPGSEDRSPAVWPSSKPRGASRDHTGLSPCTSVSQELI

SEQ ID NO: 778374 - protein, 142 aa, Homo sapiens
MEELDRQKIGGFWREVGVASDQSLVLTAPKRVEGLFLTLSGSNLTVKVAYNSSGSCEIEKIVGSEIDSTGKFAFPGKCSCPVMAGGTRLCTQLGLIVPHAVPCTVPHAVPCTVLCAVPCTGPQCCSLNYSLCCSPCCSLHCS

SEQ ID NO: 778375 - protein, 152 aa, Homo sapiens
MEELDRQKIGGFWREVGVASDQSLVLTAPKRVEGLFLTLSGSNLTVKVAYNSSGSCEIEKIVGSEIDSTGKFAFPGHREIHVLDTDYEGYAILRVSLMWRGRNFRVLKYFTRSLEDKDRLGFWKFRELTADTGLYLAARPGRCAELLKEELI

SEQ ID NO: 778376 - protein, 182 aa, Homo sapiens
MEELDRQKIGGFWREVGVASDQSLVLTAPKRVEGLFLTLSGSNLTVKVAYNSSGSCEIEKIVGSEIDSTGKFAFPGHREIHVLDTDYEGYAILRVSLMWRGRNFRVLKYFSKLGPGGLCPAAALPGTARPAPLCPTARSLEDKDRLGFWKFRELTADTGLYLAARPGEPRGLGVEAGLGPVG

SEQ ID NO: 778377 - protein, 133 aa, Homo sapiens
GTLLPFSSGSCEIEKIVGSEIDSTGKFAFPGHREIHVLDTDYEGYAILRVSLMWRGRNFRVLKYFSKLGPGGLCPAAALPGTARPAPLCPTARSLEDKDRLGFWKFRELTADTGLYLAARPGRCAELLKEELI

SEQ ID NO: 778378 - protein, 134 aa, Homo sapiens
MELDPADPGFEVRPPQTSPPTPWPALEGHREIHVLDTDYEGYAILRVSLMWRGRNFRVLKYFSKLGPGGLCPAAALPGTARPAPLCPTARSLEDKDRLGFWKFRELTADTGLYLAARPGEPRGLGVEAGLGPVG

SEQ ID NO: 778379 - protein, 114 aa, Homo sapiens
ACRYFDEGHGSCPFGGNGFYKHVYPDGRREEPQRQKVGTSSRYPAQGRNHFWELIEERENSSPFDNDEEEVVTFELGELLLMLLAAVGDDELTDSEDESDLFHEELEDFYDLDL

SEQ ID NO: 778380 - protein, 118 aa, Homo sapiens
FIDFEQVEMIRDSESLNEMELAHSSFSEMQTAVSDMGLWRMQVFAMARLRFLKLKRQTKVLLTLLLVFGIAIFPLIVENIMYAMLNEKIDWEFKNELYFLSPGQLPQEPRTSLLIINN

SEQ ID NO: 778381 - protein, 142 aa, Homo sapiens
PGVVSLGVLALWAGVGTWGGVRWGRRTSSLQAARAGLEGSGLQSQRPHTASVQSFAHRSPTPPAAARDRRRSLGNSGRRANSGALKCPLPPRGTSWITWRRCHFLYPVPQAFSLFNSVCPGLPLGSFSLSWDLIKRLLFFFF

SEQ ID NO: 778382 - protein, 187 aa, Homo sapiens
LNKKGFGEPVLPRPPSLIQNECGQGEQASEKNECISEDMGDEDKEERQESRASDWHSKTKDFQESSIKSLKEKLLLEEEPTTSHGQSSQGIVEETSEEGNSVPASQSVAALTSKRSLVLMPESSAEEITVCPETQLSSSETFDLEREVSPGSRDILDGVRTNNGDKEVGNKEDAETGNVAYIYLLIQ

SEQ ID NO: 778383 - protein, 313 aa, Homo sapiens
MMGSWKHCLFSASLISALIFVFVYNTELWENKRFLRAALSNASLLAEACHQIFEGKVFYPTENALKTTLDEATCYEYMVRSHYVTETLSEEEAGFPLAYTVTIHKDFGTFERLFRAIYMPQNVYCVHLDQKATDAFKGAVKQLLSCFPNAFLASKKESVVYGGISRLQADLNCLEDLVASEVPWKYVINTCGQDFPLKTNREIVQYLKGFKGKNITPGVLPPDHAVGRTKYVHQELLNHKNSYVIKTTKLKTPPPHDMVIYFGTAYVALTRDFANFVLQDQLALDLLSWSKDTYSPDEHFWVTLNRIPGMYVS

SEQ ID NO: 778384 - protein, 313 aa, Homo sapiens; identical to SEQ ID NO: 778383

SEQ ID NO: 778385 - protein, 313 aa, Homo sapiens; identical to SEQ ID NO: 778383

SEQ ID NO: 778386 - protein, 205 aa, Homo sapiens
MMGSWKHCLFSASLISALIFVFVYNTELWENKRFLRAALSNASLLAEACHQIFEGKVFYPTENALKTTLDEATCYEYMVRSHYVTETLSEEEAGFPLAYTVTIHKDFGTFERLFRAIYMPQNVYCVHLDQKATDAFKGAVKQLLSCFPNAFLASKKESVVYGGISRLQADLNCLEDLVASEVPWKYVINTCGQDFPSRFVFSCIN

SEQ ID NO: 778387 - protein, 104 aa, Homo sapiens
SERFLLRRLVWLGRLAGRKVTKEQRSVGFAVASVPSSISCLQAGLPQRFSCLDQLVSKLLRSFLGQRPGCPENVASLETFSHELVFSGLSLQRSGLCARCCHLL

SEQ ID NO: 778388 - protein, 1386 aa, Homo sapiens [sequence omitted]

SEQ ID NO: 778389 - protein, 1412 aa, Homo sapiens
MPEGAQGLSLSKPSPSLGCGRRGEVCDCGTVCETRTAPAAPTMASPRGSGSSTSLSTVGSEGDPAPGPTPACSASRPEPLPGPPIRLHLSPVGIPGSARPSRLERVAREIVETERAYVRDLRSIVEDYLGPLLDGGVLGLSVEQVGTLFANIEDIYEFSSELLEDLENSSSAGGIAECFVQRSEDFDIYTLYCMNYPSSLALLRELSLSPPAALWLQERQAQLRHSLPLQSFLLKPVQRILKYHLLLQELGKHWAEGPGTGGREMVEEAIVSMTAVAWYINDMKRKQEHAARLQEVQRRLGGWTGPELSAFGELVLEGAFRGGGGGGPRLRGGERLLFLFSRMLLVAKRRGLEYTYKGHIFCCNLSVSESPRDPLGFKVSDLTIPKHRHLLQAKNQEEKRLWIHCLQRLFFENHPASIPAKAKQVLLENSLHCAPKSKPVLEPLTPPLGSPRPRDARSFTPGRRNTAPSPGPSVIRRGRRQSEPVKDPYVMFPQNAKPGFKHAGSEGELYPPESQPPVSGSAPPEDLEDAGPPTLDPSGTSITEEILELLNQRGLRDPGPSTHDIPKFPGDSQVPGDSETLTFQALPSRDSSEEEEEEEEGLEMDERGPSPLHVLEGLESSIAAEMPSIPCLTKIPDVPNLPEIPSRCEIPEGSRLPSLSDISDVFEMPCLPAIPSVPNTPSLSSTPTLSCDSWLQGPLQEPAEAPATRRELFSGSNPGKLGEPPSGGKAGPEEDEEGVSFTDFQPQDVTQHQGFPDELAFRSCSEIRSAWQALEQGQLARPGFPEPLLILEDSDLGGDSGSGKAGAPSSERTASRVRELARLYSERIQQMQRAETRASANAPRRRPRVLAQPQPSPCLPQEQAEPGEVRVCGGRGGPRWSSGPDSILFSHSGLLPAFGHVLVCELAFPLTCAQESVPLGPAVWVQAAIPLSKQGGSPDGQGLHVSNLPKQDLPGIHVSAATLLPEQGGSRHVQAPAATPLPKQEGPLHLQVPALTTFSDQGHPEIQVPATTPLPEHKSHMVIPAPSTAFCPEQGHCADIHVPTTPALPKEICSDFTVSVTTPVPKQEGHLDSESPTNIPLTKQGGSRDVQGPDPVCSQPIQPLSWHGSSLDPQGPGDTLPPLPCHLPDLQIPGTSPLPAHGSHLDHRIPANAPLSLSQELPDTQVPATTPLPLPQVLTDIWVQALPTSPKQGSLPDIQGPAAAPPLPEPSLTDTQVQKLTPSLEQKSLIDAHVPAATPLPERGGSLDIQGLSPTPVQTTMVLSKPGGSLASHVARLESSDLTPPHSPPPSSRQLLGPNAAALSRYLAASYISQSLARRQGPGGGAPAASRGSWSSAPTSRASSPPPQPQPPPPAARRLSYATTVNIHVGGGGRLRPAKAQVRLNHPALLASTQESMGLHRAQGAPDAPFHM

SEQ ID NO: 778390 - protein, 104 aa, Homo sapiens
QGCRSRVCRAGFRPDSELLMPVVLDILLVPLQFGVYRRVLHGSSYPIRARARSPLCWVSVPLLQRSSPPGCSAWPLPLGAWEWILEWIPGPLHLHLPQALELVP

SEQ ID NO: 778391 - protein, 58 aa, Homo sapiens
APSLITEFLTFSASSSPSSNQPAQSPQASLPAQPPTSSHMCNLVQMNKHSLGEERMPQ

SEQ ID NO: 778392 - protein, 39 aa, Homo sapiens
MDCMFTSPQNSQEILLSNAMIFGDGTFGRSLGSGEVMRV

SEQ ID NO: 778393 - protein, 308 aa, Homo sapiens
MAEPGHSHHLSARVRGRTERRIPRLWRLLLWAGTAFQVTQGTGPELHACKESEYHYEYTACDSTGSRWRVAVPHTPGLCTSLPDPVKGTECSFSCNAGEFLDMKDQSCKPCAEGRYSLGTGIRFDEWDELPHGFASLSANMELDDSAAESTGNCTSSKWVPRGDYIASNTDECTATLMYAVNLKQSGTVNFEYYYPDSSIIFEFFVQNDQCQPNADDSRWMKTTEKGWEFHSVELNRGNNVLYWRTTAFSVWTKVPKPVLVRNIAITGVAYTSECFPCKPGTYADKQGSSFCKLCPANSYSNKGETSC

SEQ ID NO: 778394 - protein, 143 aa, Homo sapiens
SDASVPSPAHIEKLDNEKLNPTRATATVASVSHPQGPSSCRQEKAPSPTGPALISGASPVHCAADGTVELKAGPSKNIPNPSASSKTDASVPVAVTPSPLTSWVAYTSECFPCKPGTYADKQGSSFCKLCPANSYSNKGETSC

SEQ ID NO: 778395 - protein, 400 aa, Homo sapiens
PAGELQRRAWSLPHPRGAREEAVVKATWVGGEDRGRRKDGRCWRSRREVTEASLASCILRLCTSLPFFSAFCQQEAAAAAPEPLLPLTQDNAMAEPGHSHHLSARVRGRTERRIPRLWRLLLWAGTAFQVTQGTGPELHACKESEYHYEYTACDSTGSRWRVAVPHTPGLCTSLPDPVKGTECSFSCNAGEFLDMKDQSCKPCAEGRYSLGTGIRFDEWDELPHGFASLSANMELDDSAAESTGNCTSSKWVPRGDYIASNTDECTATLMYAVNLKQSGTVNFEYYYPDSSIIFEFFVQNDQCQPNADDSRWMKTTEKGWEFHSVELNRGNNVLYWRTTAFSVWTKVPKPVLVRNIAITGVAYTSECFPCKPGTYADKQGSSFCKLCPANSYSNKGETSC

SEQ ID NO: 778396 - protein, 397 aa, Homo sapiens
PWWLVPCLFSRESRPHPVFMYGRPQAEMEQEAGELSRWQAAHQAAQDNENSAPILNMSSSSGSSGVHTSWNQGLPTIQHFPHSAEMLGSPLVSVEAPGQNVNEGGPQFSMPLPERGMSYCPQATLTPSRMIYCQRMSPPQQEMTIFSGPQLMPVGEPNIPRVARPFGGNLRMPPNGLPVSASTGIPIMSHTGNPPVPYPGLSTVPSDETLLGPTVPSTEAQAVLPSMAQMLPPQDAHDLGMPPAESQSLLVLGSQDSLVSQPDSQEGPFLPEQPGPAPQTVEKNSRPQEGTGRRGSSEARPYCCNYENCGKAYTKRSHLVSHQRKHTGERPYSCNWESCSWSFFRSDELRRHMRVHTRYRPYKCDQCSREFMRSDHLKQHQKTHRPGPSDPQANNNN

SEQ ID NO: 778397 - protein, 239 aa, Homo sapiens
PWWLVPCLFSRESRPHPVFMYGRPQAEMEQEAGELSRWQAAHQAAQDNENSAPILNMSSSSGSSGVHTSWNQGLPTIQHFPHSAEMLGSPLVSVEAPGQNVNEGGPQFSMPLPERARTCSTDSREELQASGRDCRRGSSEARPYCCNYENCGKAYTKRSHLVSHQRKHTGERPYSCNWESCSWSFFRSDELRRHMRVHTRYRPYKCDQCSREFMRSDHLKQHQKTHRPGPSDPQANNNN

SEQ ID NO: 778398 - protein, 184 aa, Homo sapiens
MVRYSLDPENPMKSCKSRGSNLRVHFKDTRETAQAIKGMHIRKATKYLKDVTLQKQCIPFRRYNGGVGKCAQAKQWGWTQGRWPKKSAEFLLHMFKNAEGNTELKGLDVDSLVIEYIQVNKAPKMLRRTYRAHGRINSYMSSPWHIEMILTEKEQIVPKPEKEVAQKKKISQKKLKKQKLMARK

SEQ ID NO: 778399 - protein, 438 aa, Homo sapiens
GVTVMLRRGHLAFRDVAIEFPQEEWKCLDPAQRTLYREVMVENYRNLVFLGICLPDLSVISMLEQRRDPRNLQSEVKIANNPGGRECIKGVNAESSSKLGSNAGNKSLKNQLGLTFQLHLSELQLFQAERNISGCKHVEKPINNNSLVSPLQKIYSSVKSHILNKYRNDFDDSPFLPQEQKAQIREKPCECNEHGKAFRVSSSLANNQVIHTADNPYKCNECDKVFSNSSNLVQHQRIHTGEKPYKCHECGKLFNRISLLARHQRIHTGEKPYKCHECGKVFTQNSHLANHHRIHTGEKPYKCNECGKVFNRNAHLARHQKIHSGEKPYKCKECGKAFSGGSGLTAHLVIHTGEKLYKCNKCGKVFNRNAHLTRHQRIHTGEKPYECKECGKVFRHKFCLTNHHRMHTGEQPYKCNECGRPRRVDHEVRRSRPSWLTR

SEQ ID NO: 778400 - protein, 354 aa, Homo sapiens
  misc_feature (36)..(36): Xaa can be any naturally occurring amino acid
MICLVQESMVSTDLDASAMSVSEIMITPAWVKQETXHEAEIRVVGVHVGRLLVSIEEVVHAELDINLRVGLKRDPRNLQSEVKIANNPGGRECIKGVNAESSSKLGSNAGNKSLKNQLGLTFQLHLSELQLFQAERNISGCKHVEKPINNNSLVSPLQKIYSSVKSHILNKYRNDFDDSPFLPQEQKAQIREKPCECNEHGKAFRVSSSLANNQVIHTADNPYKCNDVTRSSVTVQTLYNIKEFILERSLTSVMNVASSSIEFHSLHDIREYILERNLTNVMSVAKSSLKILTLQIITESTLERNLTNVMSVARSSTEMHTLHDIRKFIVERNLTNVRNVAKHFQGVQALLLIL

SEQ ID NO: 778401 - protein, 101 aa, Homo sapiens
PGEQRGAGGRGGVGGGVSLRRCGSKACWPEVTPGMCPVWDRAGCREERGSGCGGGGLLASCHRTLLPQERGNEWESSGRVCPLPQTPLSLWHEKGGIWLTR

SEQ ID NO: 778402 - protein, 118 aa, Homo sapiens
LTTGEGETIQALSNCHPKVGTKGELSVTGAQEAGLFIGICRSWGYGGGAATGPEPLPRAEKEEKCPGVASLPALLSPPSAFHWPNPPRSQFPSKEALKRWFGRIYPVTEGRVEEGHLD

SEQ ID NO: 778403 - protein, 197 aa, Homo sapiens
VAILWALSPLPVTLWHSSVQDNYSLETMAVKFHFYFKLCPLLLYKIGHKFPKEEKFIVKTESMYKIRQWEERKEPETGHSESWKGLENHSLTWLGLGRLIGSHVWKGPWRVYCPGQVQVGLPLSVQAPTLGQAQVSRTPRTLWTALRYVWAALSTVNTINLNFCTMLSLNSQRGRSLAAKSPAVPLPHSGTSKPLCP

SEQ ID NO: 778404 - protein, 60 aa, Homo sapiens
VPWLEASQGPQGFLSGCQSKWWLPLALRGSVAQLPPGPPAAQAAQPALLGAFRGCALAAV

SEQ ID NO: 778405 - protein, 86 aa, Homo sapiens
HLRVCAFFIGVNAESHAIKRVVPPQHSQSQPGHRQICYLPRKLHLVTSTLNYPQNSARNHRWRRASYLLKVKPILLARFPYCKTFL

SEQ ID NO: 778406 - protein, 423 aa, Homo sapiens
FKTGKEEDEARSRRVTKVDFQQRCPAEHFPALFFSSFEEKYSDPYVKLSLYVADENRELAVVQTKTIKKTLNPKWNEEFYFRVNPSNHRLLFEVFDENRLTRDDFLGQVDVPLSHLPTEDPTMERPYTFKDFLLRPRSHKSRVKGFLRLKMAYMPKNGGQDEENSDQRDDMEHGWEVVDSNDSASQHQEELPPPPLPPGWEEKVDNLGRTYYVNHNNRTTQWHRPSLMDVSSESDNNIRQINQEAAHRRFRSRRHISEDLEPEPSEGGDVPEPWETISEEVTYRWRIYSAGSAPTTGLPRISDQPSGAVRGTKQKASDHSRLQWGTVQLFDSKRTLLKVEVMQCHRRSCRTGTIYHCQCPSWESAFIKLSRVVRNQRHQWPMYIPRRVCLQAGTEDKMLGAHILCHHNNRTKWTRPIMQLQKI

SEQ ID NO: 778407 - protein, 110 aa, Homo sapiens
WIAPLCIMIGLPQMVSVRDVCWRTLATESLNWVGRICPPCGQAPSSQPGAWKKGESWLSVPELGCSSPALGCQNSRFSGLWTLGLVRVVSGVFDLGLGMTTFPTILKQLT

SEQ ID NO: 778408 - protein, 121 aa, Homo sapiens
MLAPGHPTWIPWISPTPLLYNAPERLTPPPWPCLSSQPHKIFFSTSVSYLNQYFKLPTHFGQKPELPLSLSTTSPLHHINHKSHVLSFLGVLVFRRFLCNAACLASATTMAPYCTHVHSAA

SEQ ID NO: 778409 - protein, 67 aa, Homo sapiens
LEHQTPSSSAFGLSHLDQWFARGSRAFGHRLKDTLSASLLLGFWDWDWFPSSSACRQPIMGFHLVIV

SEQ ID NO: 778410 - protein, 106 aa, Homo sapiens
MATCVYTVGYAGTVSLLAALCPKVTLAPLLPFSLGCILLLLLAGFLQHHEVLRVLCPEVRAPATEIVKRRLWVSVVTSTTLGQKPIPSPQRGKSLPFSINIAHQCL

SEQ ID NO: 778411 - protein, 146 aa, Homo sapiens
MFSRPFRKHGVVPLAMYMRICKKGEIVDIKGTGTVQKGMPHKCYHGKTGKVYNVTQHAVGIAVNKFKGKILAKRINVRIEHIKHSKSQDSFLKRVKENDQKKKEAKEKGTWVQLKHQPAPPREAHFVRTNGKEPEQLEPIPYEFMA

SEQ ID NO: 778412 - protein, 126 aa, Homo sapiens
MRKERKTVSESKDIENKEEKERKYTSGTHLIGPMNCSKIVLHKKDNLLYIILLDNKIIGGPIQENRWYVCCLSPIAFFFFEMESCSIVQAGVQWHNLSSPQATPPRFKPFSGLSLPSSWDYRRAPP

SEQ ID NO: 778413 - protein, 107 aa, Homo sapiens
SPSSAPKAQGLLLVLLHPPLEPGIVSLPQGQTPQNARQTALSLSRDIESAMSPGNSTTNHNLWNRAGHTEDSAAISSPRAGVGGYSQVIALCQGPGCSIQRPASGQS

SEQ ID NO: 778414 - protein, 36 aa, Homo sapiens
CDLIGSRSNLLQSLGWVPRTKLHTRAKAGLGCSTRT

SEQ ID NO: 778415 - protein, 114 aa, Homo sapiens
MLSSSAVSSSSEEPARCGLEGTGNPQGHPEALIFVSHGAGEHSGRYEELARMLMGLDLLVFAHDHEALIFVSHGAGEHSGRYEELARMLMGLDLLVFAHDHGECPRVPSELAGP

SEQ ID NO: 778416 - protein, 313 aa, Homo sapiens
METGPEDPSSMPEESSPRRTPQSIPYQDLPHLVNADGQYLFCRYWKPTGTPKALIFVSHGAGEHSGRYEELARMLMGLDLLVFAHDHVGHGQSEGERMVVSDFHVFVRDVLQHVDSMQKDYPGLPVFLLGHSMGGAIAILTAAERPGHFAGMVLISPLVLANPESATTFKVLAAKVLNLVLPNLSLGPIDSSVLSRNKTEVDIYNSDPLICRAGLKVCFGIQLLNAVSRVERALPKLTVPFLLLQGSADRLCDSKGAYLLMELAKSQDKTLKIYEGAYHVLHKELPEVTNSVFHEINMWVSQRTATAGTASPP

SEQ ID NO: 778417 - protein, 303 aa, Homo sapiens
MPEESSPRRTPQSIPYQDLPHLVNADGQYLFCRYWKPTGTPKALIFVSHGAGEHSGRYEELARMLMGLDLLVFAHDHVGHGQSEGERMVVSDFHVFVRDVLQHVDSMQKDYPGLPVFLLGHSMGGAIAILTAAERPGHFAGMVLISPLVLANPESATTFKVLAAKVLNLVLPNLSLGPIDSSVLSRNKTEVDIYNSDPLICRAGLKVCFGIQLLNAVSRVERALPKLTVPFLLLQGSADRLCDSKGAYLLMELAKSQDKTLKIYEGAYHVLHKELPEVTNSVFHEINMWVSQRTATAGTASPP

SEQ ID NO: 778418 - protein, 313 aa, Homo sapiens; identical to SEQ ID NO: 778416

SEQ ID NO: 778419 - protein, 313 aa, Homo sapiens; identical to SEQ ID NO: 778416

SEQ ID NO: 778420 - protein, 313 aa, Homo sapiens; identical to SEQ ID NO: 778416

SEQ ID NO: 778421 - protein, 313 aa, Homo sapiens; identical to SEQ ID NO: 778416

SEQ ID NO: 778422 - protein, 277 aa, Homo sapiens
MQTRFRRIFPWKDASTKRMPEFIHFSPLKPYKGREWEKAGSEHVLETHLLPVGHGQSEGERMVVSDFHVFVRDVLQHVDSMQKDYPGLPVFLLGHSMGGAIAILTAAERPGHFAGMVLISPLVLANPESATTFKVLAAKVLNLVLPNLSLGPIDSSVLSRNKTEVDIYNSDPLICRAGLKVCFGIQLLNAVSRVERALPKLTVPFLLLQGSADRLCDSKGAYLLMELAKSQDKTLKIYEGAYHVLHKELPEVTNSVFHEINMWVSQRTATAGTASPP

SEQ ID NO: 778423 - protein, 277 aa, Homo sapiens; identical to SEQ ID NO: 778422

SEQ ID NO: 778424 - protein, 240 aa, Homo sapiens
MLMGLDLLVFAHDHVGHGQSEGERMVVSDFHVFVRDVLQHVDSMQKDYPGLPVFLLGHSMGGAIAILTAAERPGHFAGMVLISPLVLANPESATTFKVLAAKVLNLVLPNLSLGPIDSSVLSRNKTEVDIYNSDPLICRAGLKVCFGIQLLNAVSRVERALPKLTVPFLLLQGSADRLCDSKGAYLLMELAKSQDKTLKIYEGAYHVLHKELPEVTNSVFHEINMWVSQRTATAGTASPP

SEQ ID NO: 778425 - protein, 339 aa, Homo sapiens
METGPEDPSSMPEESSPRRTPQSIPYQDLPHLVNADGQYLFCRYWKPTGTPKALIFVSHGAGEHSGRYEELARMLMGLDLLVFAHDHVGHGQSEGERMVVSDFHVFVRDVLQHVDSMQKDYPGLPVFLLGHSMGGAIAILTAAERPGHFAGMVLISPLVLANPESATTFKDYSRILKHLMEKASRMLKFWIPRPFWVLAAKVLNLVLPNLSLGPIDSSVLSRNKTEVDIYNSDPLICRAGLKVCFGIQLLNAVSRVERALPKLTVPFLLLQGSADRLCDSKGAYLLMELAKSQDKTLKIYEGAYHVLHKELPEVTNSVFHEINMWVSQRTATAGTASPP

SEQ ID NO: 778426 - protein, 329 aa, Homo sapiens
MPEESSPRRTPQSIPYQDLPHLVNADGQYLFCRYWKPTGTPKALIFVSHGAGEHSGRYEELARMLMGLDLLVFAHDHVGHGQSEGERMVVSDFHVFVRDVLQHVDSMQKDYPGLPVFLLGHSMGGAIAILTAAERPGHFAGMVLISPLVLANPESATTFKDYSRILKHLMEKASRMLKFWIPRPFWVLAAKVLNLVLPNLSLGPIDSSVLSRNKTEVDIYNSDPLICRAGLKVCFGIQLLNAVSRVERALPKLTVPFLLLQGSADRLCDSKGAYLLMELAKSQDKTLKIYEGAYHVLHKELPEVTNSVFHEINMWVSQRTATAGTASPP

SEQ ID NO: 778427 - protein, 283 aa, Homo sapiens
METGPEDPSSMPEESSPRRTPQSIPYQDLPHLVNADGQYLFCRYWKPTGTPKALIFVSHGAGEHSGRYEELARMLMGLDLLVFAHDHVGHGQSEGERMVVSDFHVFVRDVLQHVDSMQKDYPGLPVFLLGHSMGGAIAILTAAERPGHFAGMVLISPLVLANPESATTFKVDIYNSDPLICRAGLKVCFGIQLLNAVSRVERALPKLTVPFLLLQGSADRLCDSKGAYLLMELAKSQDKTLKIYEGAYHVLHKELPEVTNSVFHEINMWVSQRTATAGTASPP

SEQ ID NO: 778428 - protein, 145 aa, Homo sapiens
MKVLAAKVLNLVLPNLSLGPIDSSVLSRNKTEVDIYNSDPLICRAGLKVCFGIQLLNAVSRVERALPKLTVPFLLLQGSADRLCDSKGAYLLMELAKSQDKTLKIYEGAYHVLHKELPEVTNSVFHEINMWVSQRTATAGTASPP

SEQ ID NO: 778429 - protein, 313 aa, Homo sapiens; identical to SEQ ID NO: 778416

SEQ ID NO: 778430 - protein, 131 aa, Homo sapiens
LRKIENKDRERAAGGGFEVDIYNSDPLICRAGLKVCFGIQLLNAVSRVERALPKLTVPFLLLQGSADRLCDSKGAYLLMELAKSQDKTLKIYEGAYHVLHKELPEVTNSVFHEINMWVSQRTATAGTASPP

SEQ ID NO: 778431 - protein, 272 aa, Homo sapiens
METGPEDPSSMPEESSPRRTPQSIPYQDLPHLVNADGQYLFCRYWKPTGTPKALIFVSHGAGEHSGRYEELARMLMGLDLLVFAHDHVGHGQSEGERMVVSDFHVFVRDVLQHVDSMQKDYPGLPVFLLGHSMGGAIAILTAAERPGHFAGMVLISPLVLANPESATTFKDYSRILKHLMEKASRMLKFWIPRPFWVSNSPLRLPWCAHSSGWRLWESRSSSHLVDLDNVIHLGAGPAMTPSFPTASSSCRLNGPCSTVLLSFMHNQPTSSA

SEQ ID NO: 778432 - protein, 313 aa, Homo sapiens
MPEESSPRRTPQSIPYQDLPHLVNADGQYLFCRYWKPTGTPKALIFVSHGAGEHSGRYEELARMLMGLDLLVFAHDHVGHGQSEGERMVVSDFHVFVRDVLQHVDSMQKDYPGLPVFLLGHSMGGAIAILTAAERPGHFAGMVLISPLVLANPESATTFKVLAAKVLNLVLPNLSLGPIDSSVLSRNKTEVDIYNSDPLICRAGLKVCFGIQLLNAVSRVERALPKLTVPFLLLQGSADRLLLTGHGGLYCLCEVSPRSLQQTLSDTVRVPTRYSNRRVRIITTRYRNKQWVSKQAENSVPHIVDAPMSVKLG

SEQ ID NO: 778433 - protein, 313 aa, Homo sapiens; identical to SEQ ID NO: 778416

SEQ ID NO: 778434 - protein, 313 aa, Homo sapiens; identical to SEQ ID NO: 778416

SEQ ID NO: 778435 - protein, 313 aa, Homo sapiens; identical to SEQ ID NO: 778416

SEQ ID NO: 778436 - protein, 313 aa, Homo sapiens; identical to SEQ ID NO: 778416

SEQ ID NO: 778437 - protein, 277 aa, Homo sapiens; identical to SEQ ID NO: 778422

SEQ ID NO: 778438 - protein, 240 aa, Homo sapiens; identical to SEQ ID NO: 778424

SEQ ID NO: 778439 - protein, 313 aa, Homo sapiens; identical to SEQ ID NO: 778416

SEQ ID NO: 778440 - protein, 313 aa, Homo sapiens; identical to SEQ ID NO: 778416

SEQ ID NO: 778441 - protein, 241 aa, Homo sapiens
METGPEDPSSMPEESSPRRTPQSIPYQDLPHLVNADGQYLFCRYWKPTGTPKALIFVSHGAGEHSGRYEELARMLMGLDLLVFAHDHVGHGQSEGERMVVSDFHVFVRDVLQHVDSMQKDYPGLPVFLLGHSMGGAIAILTAAERPGHFAGMVLISPLVLANPESATTFKVLAAKVLNLVLPNLSLGPIDSSVLSRNKTEIYEGAYHVLHKELPEVTNSVFHEINMWVSQRTATAGTASPP

SEQ ID NO: 778442 - protein, 93 aa, Homo sapiens
GLEAPPALPQATAGQAGTGLTQGPRSGHSANAFQKTEALGLDLPFSGANNHPSPALGLHFFPAISGVHHPPREYFPLLNGTCCYLREASLVQI

SEQ ID NO: 778443 - protein, 106 aa, Homo sapiens
QLRLGTRPGCDQSFRAEALGLACPSQVPIPPQPCPWPHFFPAISGVHHPPREYFPLLNGTCCYLRRLLSANMTLVRALPPLKPCRRCNVGVLGPQRRGHFPPGPPT

SEQ ID NO: 778444 - protein, 112 aa, Homo sapiens
VSTVGSVWREGFSSIHSGMCVSRRILQCPRRDVCVSRRILQSPRRDVCGEKDSPVSTAGCVWREGFSGVHGRTCVARRILQCPRRDVCGDGFSSVHSRTCMARRILRCPRWD

SEQ ID NO: 778445 - protein, 122 aa, Homo sapiens
TSNFMPLSSDLVPLSLFQIQGPSCFPSSRHTLFSFSLHKFQLFHQQTQAVQGRKCPTGPEADQFGKETNQKLSISCLGSVFLFLFFLKQSLTLSPRLECNGMILAQSNLRLPGSSDPPASAS

SEQ ID NO: 778446 - protein, 105 aa, Homo sapiens
DVIPTFYCILWVGSEQETKTLRKLETRKTLESQLYAFFNMVSDFFSPTHFPLSQSKFYPDVNMKRPVFVHSLLLWFSFVPQKVLVLCFKTQVMKGKQLGYSGETA

SEQ ID NO: 778447 - protein, 31 aa, Homo sapiens
MFSSIPGLYLLASLLEPIPLSFTPVPPPWCF

SEQ ID NO: 778448 - protein, 245 aa, Homo sapiens
SGFSTCAGLNGLQEHSRPEELMVTHRREPKKLALLRLETLRLGPRDRSAVSEGSGDPASPGLFPWRRRLLPWDNMFKRMAEFGPDSGGRVKGVTIVKPIVYGNVARYFGKKREEDGHTHQWTVYVKPYRNEDMSAYVKKIQFKLHESYGNPLRVVTKPPYEITETGWGEFEIIIKIFFIDPNERPVTLYHLLKLFQSDTNAMLGKKTVVSEFYDEMIFQDPTAMMQQLLTTSRQLTLGAYKHETE

SEQ ID NO: 778449 - protein, 149 aa, Homo sapiens
VGCRFHRVAQAGLKLLTSSDPSASASPGAGITGMSHRTQRGQDNFASWRRGGPQMSPSPPSCLFLQNTFSLKPSWVAPYPHASALGCGECGGPPCSSAPFGVMSCAAELTTPPPPVPPPGVTGNCSLPGPAPTQLPYPWAPASASSHVD

SEQ ID NO: 778450 - protein, 116 aa, Homo sapiens
KRMKLHWQFSQGGPIQNRKSKRCLELQENSDLEFGFQLVLQKCSGQHWSITNVLEEPRVLTHRGHFRLPLCYCVAPAATLPAVHVGLFGVWGTRLVGPQEELFISYSIFMEFIERC

SEQ ID NO: 778451 - protein, 118 aa, Homo sapiens
WTVDPSKADSPSGSASVFRTWYVMDLRELSLPAASHSSHSLPLFSTQYFPKPILVKETNGLYILKSEMKFSVFILTTLSAASDTASHLLLLGTLSHVAFGTPVPLGSPCVSSDAFSLL

SEQ ID NO: 778452 - protein, 104 aa, Homo sapiens
MLPLINSFFQQGFSKRLLHKATVLGKEGSGMSSTGGEISVALMWAPLERHALERDGVAMASSSVGSHSAGARPKSAPVKLSAIPSVPSASWAAALRRGKTHPNF

SEQ ID NO: 778453 - protein, 70 aa, Homo sapiens
TSVKAGPWLLTGHSQPLPMAGNPDLKGEQEAKKANWEGGGPVAHLLALGWMSEQEAAASSGQVEEGQAGS

SEQ ID NO: 778454 - protein, 40 aa, Homo sapiens
LPIIYILLYENPKGAHLHMPLYSSPSPSSDKSLVAQQSPQ

SEQ ID NO: 778455 - protein, 119 aa, Homo sapiens
LSQALGRQRGRESFFVPTPCCLADERSYQGLGLSAGVKVRVPRSASTHLAFLFLAPSWPKYFSIVALITLTEVSFPRPFEEQNSHTLLSLNPLSPASSGLPLSMGHLELVSTAEQTRNK

SEQ ID NO: 778456 - protein, 310 aa, Homo sapiens
AAQRAQRSAGSAGGGGTRFPGLQRSAQRSSLRRWQLRRRRRGDAVGLVGRRCPGLFLRTKNKLNSSQNDYKSSRRSSLPPELLIGNDIRGRLQRNIKNLDPIHLRHPKKRPSIFPGRKHTLSLGVLRPPDSCSLVAASLAGVRKMATNFLVGEKIWFHKFKYGDAERRFYEQMNGPVAGASLQEASMILHDIARARENIPKSLAGSLGPGASSGPSGDHSELVVRIASLEVDNQRDLAERAGEELARPLGHSPADPAHVSHAPSGAPGKKLATPAEDDEDDDIDLFGSDNEATQLRHYHEERLQQYAEKK

SEQ ID NO: 778457 - protein, 166 aa, Homo sapiens
MATNFLVGEKIWFHKFKYGDAERRFYEQMNGPVAGASLQEASMILHDIARARENIPKSLAGSLGPGASSGPSGDHSELVVRIASLEVDNQRDLAERAGEELARPLGHSPADPAHVSHAPSGAPGKKLATPAEDDEDDDIDLFGSDNEATQLRHYHEERLQQYAEKK

SEQ ID NO: 778458 - protein, 176 aa, Homo sapiens
KRTPAQPQDMIMRKPHHLDKILATPSRTLDVPISTHSLTPQSQTSTKFHHLHPLRALTSVLQAKFWPLPSHLDHHIWYPGLQFPSHTGLTLTDASHSCVECNFSTMHNILPAPFTLRTKSEFLSLEFEALCEVAQPLPHLTSHSCAPSTHGISQPPGQTLNLHSSTRKGLCVFLAL

SEQ ID NO: 778459 - protein, 43 aa, Homo sapiens
KLTVSKTDIPGNNCKHKIFRYNDNIRKGSYIGWMQWLMPKIPA

SEQ ID NO: 778460 - protein, 420 aa, Homo sapiens
MSPPPLLQPLLLLLPLLNVEPSGATLIRIPLHRVQPGRRILNLLRGWREPAELPKLGAPSPGDKPIFVPLSNYRDVQYFGEIGLGTPPQNFTVAFDTGSSNLWVPSRRCHFFSVPCWLHHRFDPKASSSFQANGTKFAIQYGTGRVDGILSEDKLTIGGIKGASVIFGEALWEPSLVFAFAHFDGILGLGFPILSVEGVRPPMDVLVEQGLLDKPVFSFYLNRDPEEPDGGELVLGGSDPAHYIPPLTFVPVTVPAYWQIHMERVKVGPGLTLCAKGCAAILDTGTSLITGPTEEIRALHAAIGGIPLLAGEYIILCSEIPKLPAVSFLLGGVWFNLTAHDYVIQTTRNGVRLCLSGFQALDVPPPAGPFWILGDVFLGTYVAVFDRGDMKSSARVGLARARTRGADLGWGETAQAQFPG

SEQ ID NO: 778461 - protein, 497 aa, Homo sapiens
MSPPPLLQPLLLLLPLLNVEPSGATLIRIPLHRVQPGRRILNLLRGWREPAELPKLGAPSPGDKPIFVPLSNYRDVQYFGEIGLGTPPQNFTVAFDTGSSNLWVPSRRCHFFSVPCWLHHRFDPKASSSFQANGTKFAIQYGTGRVDGILSEDKLTIGGIKGASVIFGEALWEPSLVFAFAHFDGILGLGFPILSVEGVRPPMDVLVEQGLLDKPVFSFYLNRDPEEPDGGELVLGGSDPAHYIPPLTFVPVTVPAYWQIHMERVKVGPGLTLCAKGCAAILDTGTSLITGPTEEIRALHAAIGGIPLLAGEYIILCSEIPKLPAVSFLLGGVWFNLTAHDYVIQVGGHHHDAIVTSYDWFERVELRDVTRKGRGHRNISFPCDGSLLANIKEPEGGGDGRAPRQMAVLVAATPSCRLVALQTTRNGVRLCLSGFQALDVPPPAGPFWILGDVFLGTYVAVFDRGDMKSSARVGLARARTRGADLGWGETAQAQFPG

SEQ ID NO: 778462 - protein, 398 aa, Homo sapiens
MRPQDTWVHTQVPSDVSTTAAATPAAAAASAECGAFRGHTDPPIFVPLSNYRDVQYFGEIGLGTPPQNFTVAFDTGSSNLWVPSRRCHFFSVPCWLHHRFDPKASSSFQANGTKFAIQYGTGRVDGILSEDKLTIGGIKGASVIFGEALWEPSLVFAFAHFDGILGLGFPILSVEGVRPPMDVLVEQGLLDKPVFSFYLNRDPEEPDGGELVLGGSDPAHYIPPLTFVPVTVPAYWQIHMERVKVGPGLTLCAKGCAAILDTGTSLITGPTEEIRALHAAIGGIPLLAGEYIILCSEIPKLPAVSFLLGGVWFNLTAHDYVIQTTRNGVRLCLSGFQALDVPPPAGPFWILGDVFLGTYVAVFDRGDMKSSARVGLARARTRGADLGWGETAQAQFPG

SEQ ID NO: 778463 - protein, 523 aa, Homo sapiens
MRPQDTWVHTQVPSDVSTTAAATPAAAAASAECGAFRGHTDPHPSSSSPTWTQDPEPTEGMERTSRAPQVGGPIPWGQAHLRTSLELQGCESQPHTALTPAPLSQTLRLLSSFAIRCSILGKLGWERLHKTSLLPLTLAPPISGSRPGDATSSVCPAVSFYVGELRLNGGEGRRRGWTSASQRLLRNCSFIMPSQVRKSKGQRHWGDSLPHDTFLTSNLGLHHRFDPKASSSFQANGTKFAIQYGTGRVDGILSEDKLTIGGIKGASVIFGEALWEPSLVFAFAHFDGILGLGFPILSVEGVRPPMDVLVEQGLLDKPVFSFYLNRDPEEPDGGELVLGGSDPAHYIPPLTFVPVTVPAYWQIHMERVKVGPGLTLCAKGCAAILDTGTSLITGPTEEIRALHAAIGGIPLLAGEYIILCSEIPKLPAVSFLLGGVWFNLTAHDYVIQTTRNGVRLCLSGFQALDVPPPAGPFWILGDVFLGTYVAVFDRGDMKSSARVGLARARTRGADLGWGETAQAQFPG

SEQ ID NO: 778464 - protein, 139 aa, Homo sapiens
MTVERVELRDVTRKGRGHRNISFPCDGSLLANIKEPEGGGDGRAPRQMAVLVAATPSCRLVALQTTRNGVRLCLSGFQALDVPPPAGPFWILGDVFLGTYVAVFDRGDMKSSARVGLARARTRGADLGWGETAQAQFPG

SEQ ID NO: 778465 - protein, 420 aa, Homo sapiens; identical to SEQ ID NO: 778460

SEQ ID NO: 778466 - protein, 387 aa, Homo sapiens
MSPPPLLQPLLLLLPLLNVEPSGATLIRIPLHRVQPGRRILNLLRGWREPAELPKLGAPSPGDKPIFVPLSNYRDVQYFGEIGLGTPPQNFTVAFDTGSSNLWVPSRRCHFFSVPCWLHHRFDPKASSSFQANGTKFAIQYGTGRVDGILSEDKLTIGGIKGASVIFGEALWEPSLVFAFAHFDGILGLGFPILSVEGVRPPMDVLVEQGLLDKPVFSFYLNRDPEEPDGGELVLGGSDPAHYIPPLTFVPVTVPAYWQIHMERVKVGPGLTLCAKGCAAILDTGTSLITGPTEEIRALHAAIGGIPLLAGETTRNGVRLCLSGFQALDVPPPAGPFWILGDVFLGTYVAVFDRGDMKSSARVGLARARTRGADLGWGETAQAQFPG

SEQ ID NO: 778467 - protein, 411 aa, Homo sapiens
MSPPPLLQPLLLLLPLLNVEPSGATLIRIPLHRVQPGRRILNLLRGWREPAELPKLGAPSPGDKPIFVPLSNYRDVQYFGEIGLGTPPQNFTVAFDTGSSNLWVPSRRCHFFSVPCSSSSFQANGTKFAIQYGTGRVDGILSEDKLTIGGIKGASVIFGEALWEPSLVFAFAHFDGILGLGFPILSVEGVRPPMDVLVEQGLLDKPVFSFYLNRDPEEPDGGELVLGGSDPAHYIPPLTFVPVTVPAYWQIHMERVKVGPGLTLCAKGCAAILDTGTSLITGPTEEIRALHAAIGGIPLLAGEYIILCSEIPKLPAVSFLLGGVWFNLTAHDYVIQTTRNGVRLCLSGFQALDVPPPAGPFWILGDVFLGTYVAVFDRGDMKSSARVGLARARTRGADLGWGETAQAQFPG

SEQ ID NO: 778468 - protein, 393 aa, Homo sapiens
MRPQDTWVHTQVPSDVSTTAAATPAAAAASAECGAFRGHTDPHPSSSSPTWTQDPEPTEGMERTSRAPQVGGPIPWGQAHLRTSLELQGWLHHRFDPKASSSFQANGTKFAIQYGTGRVDGILSEDKLTIGGIKGASVIFGEALWEPSLVFAFAHFDGILGLGFPILSVEGVRPPMDVLVEQGLLDKPVFSFYLNRDPEEPDGGELVLGGSDPAHYIPPLTFVPVTVPAYWQIHMERVKVGPGLTLCAKGCAAILDTGTSLITGPTEEIRALHAAIGGIPLLAGEYIILCSEIPKLPAVSFLLGGVWFNLTAHDYVIQTTRNGVRLCLSGFQALDVPPPAGPFWILGDVFLGTYVAVFDRGDMKSSARVGLARARTRGADLGWGETAQAQFPG

SEQ ID NO: 778469 - protein, 100 aa, Homo sapiens
GGSWAPPCVSFWAVELSALKPEEVVVQGGVALAPRPLGTSFRFESHLMEGGIGPLGVPPVSAKLRAISRGEQGELPRQWVDSPPLGVGRKSSWGAVTSLS

SEQ ID NO: 778470 - protein, 330 aa, Homo sapiens
MLSLKLPRLFSIDQIPQVFHEQGILFGYRHPQSSATACILSLFQMTNETLNIWTHLLPFWFFAWRFVTALYMTDIKNDSYSWPMLVYMCTSCVYPLVSSCAHTFSSMSKNARHICYFLDYGAVNLFSLGSAIAYSAYTFPDALMCTTFHDYYVALAVLNTILSTGLSCYSRFLEIQKPRLCKVIRVLAFAYPYTWDSLPIFYRLFLFPGESAQNEATSYHQKHMIMTLLASFLYSAHLPERLAPGRFDYIGHSHQLFHVCVILATHMQMEAILLDKTLRKEWLLATSKPFSFSQIAGAILLCIIFSLSNIIYFSAALYRIPKPELHKKET

SEQ ID NO: 778471 - protein, 330 aa, Homo sapiens; identical to SEQ ID NO: 778470

SEQ ID NO: 778472 - protein, 369 aa, Homo sapiens
MLSLKLPRLFSIDQIPQVFHEQGILFGYRHPQSSATACILSLFQMTNETLNIWTHLLPFCLFSMILVEGTKANQMEIDSRRTDLANEGELSSPWSCFGRFFAWRFVTALYMTDIKNDSYSWPMLVYMCTSCVYPLVSSCAHTFSSMSKNARHICYFLDYGAVNLFSLGSAIAYSAYTFPDALMCTTFHDYYVALAVLNTILSTGLSCYSRFLEIQKPRLCKVIRVLAFAYPYTWDSLPIFYRLFLFPGESAQNEATSYHQKHMIMTLLASFLYSAHLPERLAPGRFDYIGHSHQLFHVCVILATHMQMEAILLDKTLRKEWLLATSKPFSFSQIAGAILLCIIFSLSNIIYFSAALYRIPKPELHKKET

SEQ ID NO: 778473 - protein, 115 aa, Homo sapiens
MSATQYTYNALECVNYEALLETRHSSIGRYLGMVRYNLVSYQSSESIVRSFDYRTLSPPFLATHQLRRNLIYVPAFSTLNSSKTLSIFSFVALLIKVQYFMVFSGITEMRMQNNF

SEQ ID NO: 778474 - protein, 134 aa, Homo sapiens
VAEHGTLMRAQERETTCCGNPVSSHISQAIIQMIVEDMHPYNYFSTPAFQRFMQIVAPDYRLPSETYFFTKAVPQLYDCVREKIFLTLENVQSQKIHLTVDIWTHDPSTDYFIVTVHWVSLETASFLNNGRIPD

SEQ ID NO: 778475 - protein, 71 aa, Homo sapiens
DPVNKSGGKAKKKKWSKGKVRDKLNNLVLFDKATYDKLCKEVPNYKLITPAVVSERLKIRGSLARAALQEL

SEQ ID NO: 778476 - protein, 68 aa, Homo sapiens
GYVRLKIRISKTWDEVRVESLMKMGQYYARKVAPAMALGEIKRGHKSCKNKDVGLTLEIPKSVTMKNV

SEQ ID NO: 778477 - protein, 83 aa, Homo sapiens
FLLVIKEPTKQNRRQRPMPLSVRQSVTWEFQMSGSYRTCWERCIEPRDQPRGTNGPRGRSFEPQLREELDAGRGSGLVDCTFI

SEQ ID NO: 778478 - protein, 160 aa, Homo sapiens
GTLEAMEGLVSHSKECGPGPQGGEGMAPHPEVSHRGVIRPVSAAVRRKDAVREEKVERRMAVQSTPGHASYHLPHYSSTENDCCYMTHWLTKEGAVCKQKQPTQGLQPSKDSAQPATPKAKKSQVHAHQSQHTWTQTMTVENEEQELGSRNNSASNVGIT

SEQ ID NO: 778479 - protein, 69 aa, Homo sapiens
GPRRGGRARGPRGGGAWMDPRVAWIQPEQKGPANALWMQIWETSQGVGRGGSGFASYFCLNSPALDTAA

SEQ ID NO: 778480 - protein, 170 aa, Homo sapiens
MEISMPPPQIYVEKTLAIIKPDIVDKEEEIQDIILRSGFTIVQRRKLRLSPEQCSNFYVEKYGKMFFPNLTAYMSSGPLVAMILARHKAISYWLELLGPNNSLVAKETHPDSLRAIYGTDDLRNALHGSNDFAAAEREIRFMFPEVIVEPIPIGQAAKDYLNLHIIANSA

SEQ ID NO: 778481 - protein, 110 aa, Homo sapiens [sequence omitted]

SEQ ID NO: 778482 - protein, 68 aa, Homo sapiens
VWGGPLLRSACAFPRPRPMHLPFRRSEHLFFHAQDDLVLSLAGTPCYLPSTGLVTEKAVPWNSSPAVG

SEQ ID NO: 778483 - protein, 121 aa, Homo sapiens
MGRGKESHRADPPDLGPSCTEAPGMQSRGRRVGSPRLLTAQTLPLQRWTWRAHLFTCVPASRTESQVATSWPEPVSRPACGQVDMGLPMVSACLSLIANNTRIAPAAILYTLFGKLSAHFF

SEQ ID NO: 778484 - protein, 179 aa, Homo sapiens
MAEEKGGKQVLEESAFEEMERDFQGVLHELSGDKSLEKFRIEYERLHAVMKKSYDNEKRLMAKCRELNAEIVVNSAKVATALKLSQDDQTTIASLKKEIEKAWKMVDSAYDKEQKAKETILALKEEIVNLTKLVEQGSGLSMDQHSNIRDLLRFKEEVTKERDQLLSEVVKLRESLAQT

SEQ ID NO: 778485 - protein, 722 aa, Homo sapiens
MAVDGTLVYIRVTLLLLWLGVFLSISGYCQAGPSQHFTSPEVVIPLKVISRGRSAKAPGWLSYSLRFGGQKHVVHMRVKKLLVSRHLPVFTYTDDRALLEDQLFIPDDCYYHGYVEAAPESLVVFSACFGGFRGVLKISGLTYEIEPIRHSATFEHLVYKINSNETQFPAMRCGLTEKEVARQQLEFEEAENSALEPKSAGDWWTHAWFLELVVVVNHDFFIYSQSNISKVQEDVFLVVNIVDSMYKQLGTYIILIGIEIWNQGNVFPMTSIEQVLNDFSQWKQISLSQLQHDAAHMFIKNSLISILGLAYVAGICRPPIDCGVDNFQGDTWSLFANTVAHELGHTLGMQHDEEFCFCGERGCIMNTFRVPAEKFTNCSYADFMKTTLNQGSCLHNPPRLGEIFMLKRCGNGVVEREEQCDCGSVQQCEQDACCLLNCTLRPGAACAFGLCCKDCKFMPSGELCRQEVNECDLPEWCNGTSHQCPEDRYVQDGIPCSDSAYCYQKRCNNHDQHCREIFGKDAKSASQNCYKEINSQGNRFGHCGINGTTYLKCHISDVFCGRVQCENVRDIPLLQDHFTLQHTHINGVTCWGIDYHLRMNISDIGEVKDGTVCGPGKICIHKKCVSLSVLSHVCLPETCNMKGICNNKHHCHCGYGWSPPYCQHRGYGGSIDSGPASAKRGVFLPLIVIPSLSVLTFLFTVGLLMYLRQCSGPKETKAHSSG

SEQ ID NO: 778486 - protein, 132 aa, Homo sapiens
PWTSPASCMFERCPLWRPPALVAAGPVVWHVQRPGLENGSWMSPSCFTFASHGRSDVSDTSDHTEHVAKACFVCSFPPVLRGYQEIRHDSRGPVHTARRSPAWPPGAPSRAGVSTGWSLWRSACRRVSQAVP

SEQ ID NO: 778487 - protein, 235 aa, Homo sapiens
GEACWWTIHPASKQRSEGEKVRVGDDLILVSVSSERYLHLSYGNGSLHVDAAFQQTLWSVAPISSGSEAAQGYLIGGDVLRLLHGHMDECLTVPSGEHGEEQRRTVHYEGGAVSVHARSLWRLETLRVAWSGSHIRWGQPFRLRHVTTGKYLSLMEDKNLLLMDKEKADVKSTAFTFRSSKEKLDVGVRKEVDGMGTSEIKYGDSVCYIQHVDTGLWLTYQSVDVKSVRMGSIQR

SEQ ID NO: 778488 - protein, 172 aa, Homo sapiens
MTTTTADLTERCSVQVVVCITVLVHRMLVTTEASDSHLTDEDPELKATAELAQCLPLNHHITVGHFTNDALKSGHPAERMELNPFPTNCLRYAQCARGTADTQRQPSPRVHQDPSPAILHSFHLLMNMGRSTSFSSLLIDVTQTLLHSTVMLSRHALGTQQQLWNIPTCQGA

SEQ ID NO: 778489 - protein, 102 aa, Homo sapiens
FLTRASGARLLHFWGKRLQCTPRAPCWVADTGNLGLFVFCLCGSVCLEDPAIFSISNTHRLIMGPKILVWSARGPPVLTVGLGGRPGLILTTCVYCVSFPSR

SEQ ID NO: 778490 - protein, 120 aa, Homo sapiens
ITHGPDFNPASHLAPNATEPHDCISLIHIASSPFPHISILPIPNLDHTWFIDGSSSKPNQFSPAKAGYAVMSHTSIIEAAALPPSTTSQQAKLIALTRVLSLAKGMHINIYTDFKYAFHI

SEQ ID NO: 778491 - protein, 92 aa, Homo sapiens
AWENRMALDMILAKKGGVCVMIKTQCCTFIPNNTAPSGSITRALQGLTALSNELAKNSGVNDPFSGWLERWFGKWKGIIASILTSLAAVIGV

SEQ ID NO: 778492 - protein, 370 aa, Homo sapiens
RRARREPRRLRQPELPARRRLRRPPPSKPGRGASPAAMWSCSWFNGTGLVEELPACQDLQLGLSLLSLLGLVVGVPVGLCYNALLVLANLHSKASMTMPDVYFVNMAVAGLVLSALAPVHLLGPPSSRWALWSVGGEVHVALQIPFNVSSLVAMYSTALLSLDHYIERALPRTYMASVYNTRHVCGFVWGGALLTSFSSLLFYICSHVSTRALECAKMQNAEAADATLVFIGYVVPALATLYALVLLSRVRREDTPLDRDTGRLEPSAHRLLVATVCTQFGLWTPHYLILLGHTVIISRGKPVDAHYLGLLHFVKDFSKLLAFSSSFVTPLLYRYMNQSFPSKLQRLMKKLPCGDRHCSPDHMGVQQVLA

SEQ ID NO: 778493 - protein, 392 aa, Homo sapiens
GALLIRACGFAEKRSSAQVLTRALVATSVPPCCSPTVARPTAPRGLGHKVKGRGASPAAMWSCSWFNGTGLVEELPACQDLQLGLSLLSLLGLVVGVPVGLCYNALLVLANLHSKASMTMPDVYFVNMAVAGLVLSALAPVHLLGPPSSRWALWSVGGEVHVALQIPFNVSSLVAMYSTALLSLDHYIERALPRTYMASVYNTRHVCGFVWGGALLTSFSSLLFYICSHVSTRALECAKMQNAEAADATLVFIGYVVPALATLYALVLLSRVRREDTPLDRDTGRLEPSAHRLLVATVCTQFGLWTPHYLILLGHTVIISRGKPVDAHYLGLLHFVKDFSKLLAFSSSFVTPLLYRYMNQSFPSKLQRLMKKLPCGDRHCSPDHMGVQQVLA

SEQ ID NO: 778494 - protein, 146 aa, Homo sapiens
MTNNSGSKAELVVGGKYKLVRKIGSGSFGDVYLGITTTNGEDVAVKLESQKVKHPQLLYESKLYTILQGGVGIPHMHWYGQEKDNNVLVMDLLGPSLEDLFNFCSRRFTMKTVLMLADQMISRIEYVHTKNFLHRDIKPDNFLMGT

SEQ ID NO: 778495 - protein, 181 aa, Homo sapiens
RSREEENEHHGPSMPALIAPEDSPHCDLFPGASYLMTQIPGTQTESRAEELSPAALSPSLEPIRCSHQPISLLGSFLTEESPDKEIDQNSQQEESRLRKGTVSSQGTEVVFASASVTPPRTPDSAPPSPAEAYPITPASVSARPPVAFPRRETSCAARAPETASAPLSMDDPSPCGTSEMC

SEQ ID NO: 778496 - protein, 90 aa, Homo sapiens
MRTQPCDHISLPGRLGNVASPRTKEGGAATGEHTAQHPLVVPDHQVRPDTAGQPGSKDNETWSWFIGDEWNLFPEEPEKAKSLLCGKTGV

SEQ ID NO: 778497 - protein, 81 aa, Homo sapiens
DPRVAAEDEALSNIAREAHGWSESHYPQQTNTGTETQTLHVLTYKWELNNENTWTQEEEQHTLGPVEREHSGVRESIRINS

SEQ ID NO: 778498 - protein, 110 aa, Homo sapiens
SNFPDRAQAALKAAAAILRQFALSAIPIIGSVGTITSFSSPPLLCISHPVGLVGAPTSPTGRRQGGQICTAQEASLHSHGRSRWDEGVVCFLVSYQSKRVNAIYPRVQAG

SEQ ID NO: 778499 - protein, 111 aa, Homo sapiens
PGVPGQRPPRRRKVPPQALQRGRSRSPRGPASSISNRPGVPRVPPRPPEGAQKAQTPRPAPLPALSWRQSPGLRGRPSLYPCERVGDPGRLSGFPQPCSQLPGSAGFGLAD

SEQ ID NO: 778500 - protein, 342 aa, Homo sapiens
MNADFLLPYYTAQSGSSMSMFNTTMGKLQRQLYKGEYDIFKYAPIFESDFIQITKRGEVIDVHNRVRMVTMGIARTSPILPLPDVMLLARPATGCEEYAGHGQATKRKKRKAAKNLELTRLLPLRFVRISVQDHEKQQLRLKFATGRSCYLQLCPALDTRDDLFAYWEKLIYLLRPPMESNSSTCGIPAEDMMWMPVFQEDRRSLGAVNLQGKGDQDQVSIQSLHMVSEVCGATSAAYAGGEGLQNDFNKPTNVLNASIPKTSTELAEEPATGGIKEAAAAGAAAGAATGTVAGALSVAAANSAPGQVSAAIAGAATIGAGGNKGNMALAGTASMAPNSTKV

SEQ ID NO: 778501 - protein, 111 aa, Homo sapiens
LCCWMRTLVPSSKSPALASGQMPVPALSSLSMALGRLLWVVLIGLHPPGPEAHGESWPRQKWRMQCQHDTSGAWRLAPGLHLAASSPGLCPNPGECCPQKPGTFQPWSSLV

SEQ ID NO: 778502 - protein, 694 aa, Homo sapiens
MAKINTQYSHPSRTHLKVKTSDRDLNRAENGLSRAHSSSEETSSVLQPGIAMETRGLADSGQGSFTGQGIARLSRLIFLLRRWAARHVHHQDQGPDSFPDRFRGAELKEVSSQESNAQANVGSQEPADRGRSAWPLAKCNTNTSNNTEEEKKTKKKDAIVVDPSSNLYYRWLTAIALPVFYNWYLLICRACFDELQSEYLMLWLVLDYSADVLYVLDVLVRARTGFLEQGLMVSDTNRLWQHYKTTTQFKLDVLSLVPTDLAYLKVGTNYPEVRFNRLLKFSRLFEFFDRTETRTNYPNMFRIGNLVLYILIIIHWNACIYFAISKFIGFGTDSWVYPNISIPEHGRLSRKYIYSLYWSTLTLTTIGETPPPVKDEEYLFVVVDFLVGVLIFATIVGNVGSMISNMNASRAEFQAKIDSIKQYMQFRKVTKDLETRVIRWFDYLWANKKTVDEKEVLKSLPDKLKAEIAINVHLDTLKKVRIFQDCEAGLLVELVLKLRPTVFSPGDYICKKGDIGKEMYIINEGKLAVVADDGVTQFVVLSDGSYFGEISILNIKGSKSGNRRTANIRSIGYSDLFCLSKDDLMEALTEYPEAKKALEEKGRQILMKDNLIDEELARAGADPKDLEEKVEQLGSSLDTLQTRFARLLAEYNATQMKMKQRLSQLESQVKGGGDKPLADGEVPGDATKTEDKQQ

SEQ ID NO: 778503 - protein, 625 aa, Homo sapiens
METRGLADSGQGSFTGQGIARLSRLIFLLRRWAARHVHHQDQGPDSFPDRFRGAELKEVSSQESNAQANVGSQEPADRGRRKKTKKKDAIVVDPSSNLYYRWLTAIALPVFYNWYLLICRACFDELQSEYLMLWLVLDYSADVLYVLDVLVRARTGFLEQGLMVSDTNRLWQHYKTTTQFKLDVLSLVPTDLAYLKVGTNYPEVRFNRLLKFSRLFEFFDRTETRTNYPNMFRIGNLVLYILIIIHWNACIYFAISKFIGFGTDSWVYPNISIPEHGRLSRKYIYSLYWSTLTLTTIGETPPPVKDEEYLFVVVDFLVGVLIFATIVGNVGSMISNMNASRAEFQAKIDSIKQYMQFRKVTKDLETRVIRWFDYLWANKKTVDEKEVLKSLPDKLKAEIAINVHLDTLKKVRIFQDCEAGLLVELVLKLRPTVFSPGDYICKKGDIGKEMYIINEGKLAVVADDGVTQFVVLSDGSYFGEISILNIKGSKSGNRRTANIRSIGYSDLFCLSKDDLMEALTEYPEAKKALEEKGRQILMKDNLIDEELARAGADPKDLEEKVEQLGSSLDTLQTRFARLLAEYNATQMKMKQRLSQLESQVKGGGDKPLADGEVPGDATKTEDKQQ

SEQ ID NO: 778504 - protein, 102 aa, Homo sapiens
RLETHSVVKMLSPKMLKKKRGKCERKISWVPSRWELLRANLPSILFKSSICSQRQMHILIASFGKTYQKLKRMQPSVSHLPVTSKPPIGGLALSCLRLSGRN

SEQ ID NO: 778505 - protein, 33 aa, Homo sapiens
HCHCLACHPAPHCALGGLNEGGEGCAGEEARGD

SEQ ID NO: 778506 - protein, 119 aa, Homo sapiens
QAQKAKLDGAWLEGDLSLADKDVTAKDSKFKMPKFKMPSFGVSAPGKSIKALVDVSAPKVEADLSLPSMQGDLKTTDLSIQPASTDLKVQADQVDVKLPEGHLPEGAGLKGHLPKVEMP

SEQ ID NO: 778507 - protein, 268 aa, Homo sapiens
MEMKKKINLELRNRSPEEVTELVLDNCLCVNGEIEGLNDTFKELEFLSMANVELSSLARLPSLNKLRKLELSDNIISGGLEVLAEKCPNLTYLNLSGNKIKDLSTVEALQNLKNLKSLDLFNCEITNLEDYRESIFELLQQITYLDGFDQEDNEAPDSEEEDDEDGDEDDEEEEENEAGPPEGYEEEEEEEEEEDEDEDEDEDEAGSELGEGEEEVGLSYLMKEEIQDEEDDDDYVEEGEEEEEEEEGGLRGEKRKRDAEDDGEEEDD

SEQ ID NO: 778508 - protein, 273 aa, Homo sapiens
MEMKKKINLELRNRSPEEVTELVLDNCLCVNGEIEGLNDTFKELEFLSMANVELSSLARLPSLNKLRKLELSDNIISGGLEVLAEKCPNLTYLNLSGNKIKDLSTVEALQNLKNLKSLDLFNCEITNLEDYRESIFELLQQITYLDGFDQEDNEAPDSEEEDDEDGDEDDEEEEENEAGPPEGYEEEEEEEEEEDEDEDEDEDEAGSELGEGEEEVGLSYLMKEEIQDEEDDDDYVEEGEEEEEEASRKKESSARLPSPNIRTMERKKMTRSF

SEQ ID NO: 778509 - protein, 268 aa, Homo sapiens; identical to SEQ ID NO: 778507

SEQ ID NO: 778510 - protein, 141 aa, Homo sapiens
MEMKKKINLELRNRSPEEDGFDQEDNEAPDSEEEDDEDGDEDDEEEEENEAGPPEGYEEEEEEEEEEDEDEDEDEDEAGSELGEGEEEVGLSYLMKEEIQDEEDDDDYVEEGEEEEEEEEGGLRGEKRKRDAEDDGEEEDD

SEQ ID NO: 778511 - protein, 268 aa, Homo sapiens; identical to SEQ ID NO: 778507

SEQ ID NO: 778512 - protein, 268 aa, Homo sapiens; identical to SEQ ID NO: 778507

SEQ ID NO: 778513 - protein, 240 aa, Homo sapiens
MEMKKKINLELRNRSPEEVTELVLDNCLCVNGEIEGLNDTFKELEFLSMANVELSSLARLPSLNKLRKLELSDNIISGGLEVLAEKCPNLTYLNLSGNKIKDLSTVEALQNLKNLKSLDLFNCEITNLEDYRESIFELLQQITYLDGFDQEDNEAPDSEEEDDEDGDEDDEEEEENEAGPPEGYEEEEEEEEEEDEDEDEDEDEAGSELGEGEEEVGLSYLMKEEIQVNTHFLPALKINF

SEQ ID NO: 778514 - protein, 268 aa, Homo sapiens; identical to SEQ ID NO: 778507

SEQ ID NO: 778515 - protein, 253 aa, Homo sapiens
MEMKKKINLELRNRSPEEVTELVLDNCLCVNGEIEGLNDTFKELEFLSMANVELSSLARLPSLNKLRKLELSDNIISGGLEVLAEKCPNLTYLNLSGNKIKDLSTVEALQNLKNLKSLDLFNCEITNLEDYRESIFELLQQITYLDGFDQEDNEAPDSEEEDDEDGDEDDEEEEENEAGPPEGYEEEEEEEEEEDEDEDEDEDEAGSELGEGEEEVGLSYLMKEEIQKKEVFEGRRGNEMLKTMERKKMTRSF

SEQ ID NO: 778516 - protein, 268 aa, Homo sapiens; identical to SEQ ID NO: 778507

SEQ ID NO: 778517 - protein, 218 aa, Homo sapiens
MEMKKKINLELRNRSPEELELSDNIISGGLEVLAEKCPNLTYLNLSGNKIKDLSTVEALQNLKNLKSLDLFNCEITNLEDYRESIFELLQQITYLDGFDQEDNEAPDSEEEDDEDGDEDDEEEEENEAGPPEGYEEEEEEEEEEDEDEDEDEDEAGSELGEGEEEVGLSYLMKEEIQDEEDDDDYVEEGEEEEEEEEGGLRGEKRKRDAEDDGEEEDD

SEQ ID NO: 778518 - protein, 268 aa, Homo sapiens; identical to SEQ ID NO: 778507

SEQ ID NO: 778519 - protein, 164 aa, Homo sapiens
MEMKKKINLELRNRSPEEVTELVLDNCLCVNGEIEGLNDTFKELEFLSMANVELSSLARLPSLNKLRKLELSDNIISGGLEVLAEKCPNLTYLNLSGNKIKDLSTVEALQNLKNLKSLDLFNCEITNLEDYRESIFELLQQITYLQKDNIFLLLLKTEIPCSSS

SEQ ID NO: 778520 - protein, 150 aa, Homo sapiens [sequence omitted]

SEQ ID NO: 778521 - protein, 94 aa, Homo sapiens
NTSTSSGRVLVFPLPSPQIGGRARLHSGPGLCPGFPQSRAGRQGGRRRVSGQETSRKSGSRLFASPIEVRSAGRYGSQRELRRGGFGGGMKVRL

SEQ ID NO: 778522 - protein, 187 aa, Homo sapiens
PRLSPPISSDRWTCSPPLGARSMSRFPAVAGRAPRRQEEGERSRDLQEERLSAVCIADREEKGCTSQEGGTTPTFPIQKQRKKIIQAVRDNSFLIVTGNTGSGKTTQLPKYLYEAGFSQHGMIGVTQPRKVAAISVAQRVAEEMKCTLGSKVGYQVRFDDCSSKETAIKYMTDGCLLKHILGDPNLT

SEQ ID NO: 778523 - protein, 104 aa, Homo sapiens
ANLTREALAEPHVCLVGGPVCCELESACLAKDPIWPRPKCSHKLGTLLQKWPSLRTVAVPPDSPRCHLRIKGRAGSWVRGLMRVIPEHWEAKVGGSLKPRSSIT

SEQ ID NO: 778524 - protein, 264 aa, Homo sapiens
ERKEGQGKEGGSGPAVVKKQEVKKVVNPLFEKRPKNFDIGQDIQPKRDLTSFVNGPHYIRLQRQRAILCKWLKVPPEINQFTQALDHQTAALLLQLAHKYRSETKQEKKQRLLALAKKKAAGKGGIPTKRPPVLRAGVNTITTLLENKKAQPVVIAHDVDPIELVVFLPALCHKMRVPYCIIKGEARLGRLVHRKTCTTVAFIQVNSEDKGALAKLVGAIRTDYNDRYNEIRRHWGGNVLGPKSVACIGKLEKAKAQELATKLG

SEQ ID NO: 778525 - protein, 108 aa, Homo sapiens
PGLESSASLAASSLRLRLLLERVAGLLLDPRGHCDRQGAFSTSTASPGTEGKALLYLSLTFCSGADPTLPGAANFVLVPGPSSPGMWAEHQPGHQEAKFQGLSLSLSV

SEQ ID NO: 778526 - protein, 108 aa, Homo sapiens; identical to SEQ ID NO: 778525

SEQ ID NO: 778527 - protein, 132 aa, Homo sapiens
MAHIERHHARSRANTTAQKNRDKQEETNKRRKIRRKRLKERTARKERRHTKDRRTKKREKTTKTERTQKTTTGKEKRTATQKQDKGEDTRRTGQINKAIEGQTDEEDDEHTKRHKRRTHNHTRHRERMRSNE

SEQ ID NO: 778528 - protein, 102 aa, Homo sapiens
VGKTASGSRKSEWDIPIFGLHPGCLYCGHLWEEMSSVKRSLKQEIVTQFHCSAAEGDIAKLTGILSHSPSLLNETSENGWTALMYAARNGHPEIVQFLLEKG

SEQ ID NO: 778529 - protein, 495 aa, Homo sapiens
VGKTASGSRKSEWDIPIFGLHPGCLYCGHLWEEMSSVKRSLKQEIVTQFHCSAAEGDIAKLTGILSHSPSLLNETSENGWTALMYAARNGHPEIVQFLLEKGCDRSIVNKSRQTALDIAVFWGYKHIANLLATAKGGKKPWFLTNEVEECENYFSKTLLDRKSEKRNNSDWLLAKESHPATVFILFSDLNPLVTLGGNKESFQQPEVRLCQLNYTDIKDYLAQPEKITLIFLGVELEIKDKLLNYAGEVPREEEDGLVAWFALGIDPIAAEEFKQRHENCYFLHPPMPALLQLKEKEAGVVAQARSVLAWHSRYKFCPTCGNATKIEEGGYKRLCLKEDCPSLNGVHNTSYPRVDPVVIMQVIHPDGTKCLLGRQKRFPPGMFTCLAGFIEPGETIEDAVRREVEEESGVKVGHVQYVACQPWPMPSSLMIGCLALAVSTEIKVDKNEIEDARWFTREQVLDVLTKGKQQAFFVPPSRAIAHQLIKHWIRINPNL

SEQ ID NO: 778530 - protein, 301 aa, Homo sapiens
VGKTASGSRKSEWDIPIFGLHPGCLYCGHLWEEMSSVKRSLKQEIVTQFHCSAAEGDIAKLTGILSHSPSLLNETSENGWTALMYAARNGHPEIVQFLLEKGCDRSIVNKSRQTALDIAVFWGYKHIANLLATAKGGKKPWFLTNEVEECENYFSKTLLDRKSEKRNNSDWLLAKESHPATVFILFSDLNPLVTLGGNKESFQQPEVRLCQLNYTDIKDYLAQPEKITLIFLGVELEIKDKLLNYAGEVPREEEDGLVAWFALGIDPIAAEEFKQRHENCYFLHPPMPALLQLKEKEAGKK

SEQ ID NO: 778531 - protein, 495 aa, Homo sapiens; identical to SEQ ID NO: 778529

SEQ ID NO: 778532 - protein, 477 aa, Homo sapiens
VGKTASGSRKSEWDIPIFGLHPGCLYCGHLWEEMSSVKRSLKQEIVTQFHCSAAEGDIAKLTGILSHSPSLLNETSENGWTALMCDRSIVNKSRQTALDIAVFWGYKHIANLLATAKGGKKPWFLTNEVEECENYFSKTLLDRKSEKRNNSDWLLAKESHPATVFILFSDLNPLVTLGGNKESFQQPEVRLCQLNYTDIKDYLAQPEKITLIFLGVELEIKDKLLNYAGEVPREEEDGLVAWFALGIDPIAAEEFKQRHENCYFLHPPMPALLQLKEKEAGVVAQARSVLAWHSRYKFCPTCGNATKIEEGGYKRLCLKEDCPSLNGVHNTSYPRVDPVVIMQVIHPDGTKCLLGRQKRFPPGMFTCLAGFIEPGETIEDAVRREVEEESGVKVGHVQYVACQPWPMPSSLMIGCLALAVSTEIKVDKNEIEDARWFTREQVLDVLTKGKQQAFFVPPSRAIAHQLIKHWIRINPNL

SEQ ID NO: 778533 - protein, 130 aa, Homo sapiens
VGKTASGSRKSEWDIPIFGLHPGCLYCGHLWVSRSSGELVVSLPPLGAVTTSLGSLVPALPCVALLSCVAEPRSGLVGAGAGATDAFAGAPATGRRCGGTEVVEFPAQAEMGKRKRYLGCDFTSKEGISQ

SEQ ID NO: 778534 - protein, 64 aa, Homo sapiens
MCSKLHVSVGVGGETWSRWPGGRERDGTTVLLPLHWLLGPKALSLPRVFLPCNAPGLCKLSVPS

SEQ ID NO: 778535 - protein, 84 aa, Homo sapiens
MPRPLADLQLVVQDQHEARPHPHAFEGVGPHTLEKGLAPLISEDLPPTVDGARVHDVSSFAPGLHHRPPPHCVEGLGEHASHGR

SEQ ID NO: 778536 - protein, 141 aa, Homo sapiens
SGFTASSRPRVSPRVGSQPHPDPACHREWVHTLIPTPRVTASGFTRSSRPRVSPRVGSQPHPDPACHREWIHTLIPTPRVTASGFTRSSRPRVSPRVGSQPHPDPACHREWIHTLIPTPHVHVFNEHCARRSAVNMPQHPI

SEQ ID NO: 778537 - protein, 100 aa, Homo sapiens
VLEVAGVAMRTGPRSRQHYFGRSRINHDNRDSVFNSAAVDTGPWCWNPIQGQEQHGVTEHRLAFMSLYHFFFLPLTLPATCGDVEPFICRCLLRNRRKGS

SEQ ID NO: 778538 - protein, 75 aa, Homo sapiens
YWVTPVKDKGSGNQVWKGRSSHSSAGLSNTCESRGAEEEQLPVSSEEHQENVESWKPKEDSNSSRRVTSSVDQVK

SEQ ID NO: 778539 - protein, 519 aa, Homo sapiens
MSYPQFGYPYSSAPQFLMATNSLSTCCESGGRTLADSGPAASAQAPVYCPVYESRLLATARHELNSAAALGVYGGPYGGSQGYGNYVTYGSEASAFYSLNSFDSKDGSGSAHGGLAPAAAAYYPYEPALGQYPYDRYGTMDSGTRPKNATRESTSTLKAWLNEHRKNPYPTKGEKIMLAIITKMTLTQVSTWFANARRRLKKENKVTWPPRNKCADEKRPYAEGEEEEGGEEEAREEPLKSSKNAEPVGKEEKELELSDLDDFDPLEAEPPACELKPPFHSLDGGLERVPAAPDGPVKEASGALRMSLAAGGGAALDEDLERARSCLRSAAAGPEPLPGAEGGPQVCEAKLGFVPAGASAGLEAKPRIWSLAHTATAAAAAATSLSQTEFPSCMLKRQGPAAPAAVSSAPATSPSVALPHSGALDRHQDSPVTSLRNWVDGVFHDPILRHSTLNQAWATAKGALLDPGPLGRSLGAGANVLTAPLARAFPPAVPQDAPAAGAARELLALPKAGGKPFCA

SEQ ID NO: 778540 - protein, 261 aa, Homo sapiens
AAASSGRPGAAELGGGAGAAAVTSVLGMYAAAGPYAGAPNYSAFLPYAADLSLFSQMGSQYELKDNPGVHPATFAAHTAPAYYPYGQFQYGDPGRPKNATRESTSTLKAWLNEHRKNPYPTKGEKIMLAIITKMTLTQVSTWFANARRRLKKENKVTWGARSKDQEDGALFGSDTEGDPEKAEELRQIFQTGVKDKYDNDVKDSHPSLSAERGFFGPELASRWPGLCRRLQWLRLSGSVNAPTCLCLFPPFSVYRVVSDCK

SEQ ID NO: 778541 - protein, 127 aa, Homo sapiens
PPPRRADRGPRSWAAGQARLQGAPHGKPKIWSLAETATSPDGAPKASPPPPAGHPGAHGPSAGAPLQHPAFLPSHGLYTCHIGKFSNWTNSAFLAQGSLLNMRSFLGVGAPHAAPHGPHLPAPPPPQ

SEQ ID NO: 778542 - protein, 378 aa, Homo sapiens
AAASSGRPGAAELGGGAGAAAVTSVLGMYAAAGPYAGAPNYSAFLPYAADLSLFSQMGSQYELKDNPGVHPATFAAHTAPAYYPYGQFQYGDPGRPKNATRESTSTLKAWLNEHRKNPYPTKGEKIMLAIITKMTLTQVSTWFANARRRLKKENKVTWGARSKDQEDGALFGSDTEGDPEKAEDDEEIDLESIDIDKIDEHDGDQSNEDDEDKAEAPHAPAAPSALARDQGSPLAAADVLKPQDSPLGLAKEAPEPGSTRLLSPGAAAGGLQGAPHGKPKIWSLAETATSPDGAPKASPPPPAGHPGAHGPSAGAPLQHPAFLPSHGLYTCHIGKFSNWTNSAFLAQGSLLNMRSFLGVGAPHAAPHGPHLPAPPPPQ

SEQ ID NO: 778543 - protein, 103 aa, Homo sapiens
TLVAQAGVQWHNLGSLQPPPPGFMRFSCLSLLSSWDYRHVPPHAANFVLLVETGFLYVGQAGLEVGSSGDLPASASQSAGITGVSTAPGFNRYFYKQIIYKYG

SEQ ID NO: 778544 - protein, 674 aa, Homo sapiens
MQTSSSRSVHLSEWQKNYFAITSGICTGPKADAYRAQILRIQYAWANSEISQVCATKLFKKYAEKYSAIIDSDNVESGLNNYAENILTLAGSQQTDSDKWQSGLSINNVFKMSSVQKMMQAGKKFKDSLLEPALASVVIHKEATVFDLPKFSVCGSSQESDSLPNSAHDRDRTQDFPESNRLKLLQNAQPPMVTNTARTCPTFSAPVGESATAKFHVTPLFGNVKKENHSSAKENIGLNVFLSNQSCFPAACENPQRKSFYGSGTIDALSNPILNKACSKTEDNGPKEDSSLPTFKTAKEQLWVDQQKKYHQPQRASGSSYGGVKKSLGASRSRGILGKFVPPIPKQDGGEQNGGMQCKPYGAGPTEPAHPVDERLKNLEPKMIELIMNEIMDHGPPVNWEDIAGVEFAKATIKEIVVWPMLRPDIFTGLRGPPKGILLFGPPGTGKTLIGKCIASQSGATFFSISASSLTSKWVGEGEKMVRALFAVARCQQPAVIFIDEIDSLLSQRGDGEHESSRRIKTEFLVQLDGATTSSEDRILVVGATNRPQEIDEAARRRLVKRLYIPLPEASARKQIVINLMSKEQCCLSEEEIEQIVQQSDAFSGADMTQLCREASLGPIRSLQTADIATITPDQVRPIAYIDFENAFRTVRPSVSPKDLELYENWNKTFGCGK

SEQ ID NO: 778545 - protein, 674 aa, Homo sapiens; identical to SEQ ID NO: 778544

SEQ ID NO: 778546 - protein, 674 aa, Homo sapiens; identical to SEQ ID NO: 778544

SEQ ID NO: 778547 - protein, 674 aa, Homo sapiens; identical to SEQ ID NO: 778544

SEQ ID NO: 778548 - protein, 45 aa, Homo sapiens
LSHRGVAVSVDPSRALAQGLLSSLPILSTLSFRLSSFLVFSLPLS

SEQ ID NO: 778549 - protein, 99 aa, Homo sapiens
PYLIMLKGCTNLPLPENKELTSSMLELSHLVIVSQLMKIRVDKEMQWQILFQEEPAVWLQDSDRHTASSYRHVQGQPLLQTAISPRSQPSWSHLHMVTE

SEQ ID NO: 778550 - protein, 52 aa, Homo sapiens
MGLEMPLGSKGLESGASEICLVLYFTVAELVSSLPDQVLCNIPSPFLKQKSF

SEQ ID NO: 778551 - protein, 102 aa, Homo sapiens
AKEKPSVLPLSENLKALGLIRRGKKSYTEVAKIYGKNKSSIQVIVKEEKEIRASVGVATQTVKVTATVQDGCFVKTEKTLNGWVEDMNRKHVLITTSCTRKH

SEQ ID NO: 778552 - protein, 477 aa, Homo sapiens
TQPTARSLTSLLGTMSTCSRQFTSSSSMKGSCGIGGGIGGGSSHISSVLAGGSCRAPSTYRGGLSVSSSCFSSGGAYRLGGGYGGGFSSSSSFGSGFGGGYGGGLGAGFGGGLGGGFAGGDGLLVGSEKVTMQNLNDSLVSYLDKVRALEEANADLEVKIHDWYQWQRPAEIKDYSPYFKTIEDLRNKILTATVDNANVLLQIDNARLAADDFRTKRVCSGMRQSEPAHECGGRHQWHAPGAGVLDELTLARADLEMQIESLKEELAYLKKNHEEEMNALRGQVGGDVNVEMDDAPGVDLSHILNEMRDQYEKMAEKNHKDAEERFFTKTEKLNHEVATNSELVQSGKSEISELWHTMQNLEIELQSQLSMLGMVPGPVVHPELAGREWPHSLILDSLSLPSQKASLENSLEETKGRYCVQLAQIQEMIGSVEEQLAQLCCEMEQQNQEYKILLDVKMRLEQEIATYRCLLEGEDAQ

SEQ ID NO: 778553 - protein, 487 aa, Homo sapiens
TQPTARSLTSLLGTMSTCSRQFTSSSSMKGSCGIGGGIGGGSSHISSVLAGGSCRAPSTYRGGLSVSSSCFSSGGAYRLGGGYGGGFSSSSSFGSGFGGGYGGGLGAGFGGGLGGGFAGGDGLLVGSEKVTMQNLNDSLVSYLDKVRALEEANADLEVKIHDWYQWQRPAEIKDYSPYFKTIEDLRNKILTATVDNANVLLQIDNARLAADDFRTKRVCSGGPEHPVSPKYETELNLRMSVGADINGMRQVLEVLDELTLARADLEMQIESLKEELAYLKKNHEEEMNALRGQVGGDVNVEMDDAPGVDLSHILNEMRDQYEKMAEKNHKDAEERFFTKTEKLNHEVATNSELVQSGKSEISELWHTMQNLEIELQSQLSMLGMVPGPVVHPELAGREWPHSLILDSLSLPSQKASLENSLEETKGRYCVQLAQIQEMIGSVEEQLAQLCCEMEQQNQEYKILLDVKMRLEQEIATYRCLLEGEDAQ

SEQ ID NO: 778554 - protein, 120 aa, Homo sapiens
MALSRPHHVSNDPALFCLHSLSSSQFSSGSQSSRDRDLLQPPNPHQDHGCARWQGGVHPRAGPSHQELRLPSPAQAQEAPCVDTDPTRRSPLLPPKHFTPGPCFTLTPSWQSIQLHYLSC

SEQ ID NO: 778555 - protein, 445 aa, Homo sapiens
TQPTARSLTSLLGTMSTCSRQFTSSSSMKGSCGIGGGIGGGSSHISSVLAGGSCRAPSTYRGGLSVSSSCFSSGGAYRLGGGYGGGFSSSSSFGSGFGGGYGGGLGAGFGGGLGGGFAGGDGLLVGSEKVTMQNLNDSLVSYLDKVRALEEANADLEVKIHDWYQWQRPAEIKDYSPYFKTIEDLRNKILTATVDNANVLLQIDNARLAADDFRTKRVCSGMRQSEPAHECGGRHQWHAPGAGVLDELTLARADLEMQIESLKEELAYLKKNHEEEMNALRGQVGGDVNVEMDDAPGVDLSHILNEMRDQYEKMAEKNHKDAEERFFTKTEKLNHEVATNSELVQSGKSEISELWHTMQNLEIELQSQLSIKPSLENSLEETKGRYCVQLAQIQEMIGSVEEQLAQLCCEMEQQNQEYKILLDVKMRLEQEIATYRCLLEGEDAQ

SEQ ID NO: 778556 - protein, 72 aa, Homo sapiens
LNDSLVSYLDKVRALEEANADLEVKIHDWYQWQRPAEIKDYSPYFKTIEDLRNKVGEWAAEGAIPASSFWEQ

SEQ ID NO: 778557 - protein, 101 aa, Homo sapiens
AHRHACFESPKFFLLLLFFISFSQQTQMFFRHVESQEAQTWCPSTSSDKSPLSWPSITHRSNRDKNCHPSNHIRTSHALLEASELSQMPFPAPPPLCPPSP

SEQ ID NO: 778558 - protein, 68 aa, Homo sapiens
MSQHPLGLAHSIFCLSGGLCFFSLAHDSSNSGPWQQCHGKHGHRCRPQNRMAGLSDEAVAQICRNWQV

SEQ ID NO: 778559 - protein, 165 aa, Homo sapiens
MTKTDRMPRWAERLFPANVAHSVYIILEDSVVDPQNQTMTTFTWNINHARPMVVEERCVYCVNSDNSGWTEIRREAWVSSSLCGVSRAVWEFGLAQFKSNVTKTLKGFEYILAKLQGEAASKTLIKTAREAKEKAKETALAATEKAKDLASKAATKKQQQQQQFV

SEQ ID NO: 778560 - protein, 76 aa, Homo sapiens
STIVVWGAELVVRQIVVVACCGGGYRRRRSLRWVWTDCPGKDAPHPSSSLLHGGLDTGVGGASCLLACLPLDWGQS

SEQ ID NO: 778561 - protein, 155 aa, Homo sapiens
PDLVIHPPCDSQSAGITDVSHLCPAKPGDTFSGQFVLGEPQGYGVMEYKAGGCYEGEVSHGMREGHGFLVDRDGQVYQGSFHDNKRHGPGQMLFHACGARWEEPVRVTATTRLPLLRVDSVRVSPRNGDKYDGDWVRDRRQGHGVLRCADGSTYK

SEQ ID NO: 778562 - protein, 558 aa, Homo sapiens
GPSSEASSLPAESWAPEGLPTTAPGCAIATSSQPPAQTRDSPSMAPEMDQFYRSTMAIYKSIMEQFNPALENLVYLGNNYLRAFHALSEAAEVYFSAIQKIGERALQSPTSQILGEILVQMSDTQRHLNSDLEVVVQTFHGGLLQHMEKNTKLDMQFIKDSRQHYELEYRHRAANLEKCMSELWRMERKRDKNVREMKESVNRLHAQMQAFVSESQRAAELEEKRRYRFLAEKHLLLSNTFLQFFGRARGMLQNRVLLWKEQSEASRSPSRAHSPGLLGPALGPPYPSGRLTPTCLDMPPRPLGEFSSPRSRHGSGSYGTEPDARPASQLEPDRRSLPRTPSASSLYSGSAQSSRSNSFGERPGGGGGARRVRALVSHSEGANHTLLRFSAGDVVEVLVPEAQNGWLYGKLEGSSASGWFPEAYVKALEEGPVNPMTPVTPMTSMTSMSPMTPMNPGNELPSRSYPLRGSHSLDDLLDRPGNSTPSRVPSRAPSPAPPPLPSSRRSSMGSTAVATDVKKLMSSEQYPPQELFPRGTNPFATVKLRPTITNDRSAPLIR

SEQ ID NO: 778563 - protein, 105 aa, Homo sapiens [sequence omitted]

SEQ ID NO: 778564 - protein, 572 aa, Homo sapiens
GPSSEASSLPAESWAPEGLPTTAPGCAIATSSQPPAQTRDSPSMAPEMDQFYRSTMAIYKSIMEQFNPALENLVYLGNNYLRAFHALSEAAEVYFSAIQKIGERALQSPTSQILGEILVQMSDTQRHLNSDLEVVVQTFHGGLLQHMEKNTKLDMQFIKDSRQHYELEYRHRAANLEKCMSELWRMERKRDKNVREMKESVNRLHAQMQAFVSESQRAAELEEKRRYRFLAEKHLLLSNTFLQFFGRARGMLQNRVLLWKEQSEASRSPSRAHSPGLLGPALGPPYPSGRLTPTCLDMPPRPLGEFSSPRSRHGSGSYGTEPDARPASQLEPDRRSLPRTPSASSLYSGSAQSSRSNSFGERPGGGGGARRVRALVSHSEGANHTLLRFSAGDVVEVLVPEAQNGWLYGKLEGSSASGWFPEAYVKALEEGPVNPMTPVTPMTSMTSMSPMTPMNPGNELPSRSYPLRGSHSLDDLLDRPGNSIAPSEYWDGQSRSRTPSRVPSRAPSPAPPPLPSSRRSSMGSTAVATDVKKLMSSEQYPPQELFPRGTNPFATVKLRPTITNDRSAPLIR

SEQ ID NO: 778565 - protein, 548 aa, Homo sapiens
GPSSEASSLPAESWAPEGLPTTAPGCAIATSSQPPAQTRDSPSMAPEMDQFYRSTMAIYKSIMEQFNPALENLVYLGNNYLRAFHALSEAAEVYFSAIQKIGERALQSPTSQILGEILVQMSDTQRHLNSDLEVVVQTFHGGLLQHMEKNTKLDMQFIKDSRQHYELEYRHRAANLEKCMSELWRMERKRDKNVREMKESVNRLHAQMQAFVSESQRAAELEEKRRYRFLAEKHLLLSNTFLQFFGRARGMLQNRVLLWKEQSEASRSPSRAHSPGLLGPALGPPYPSGRLTPTCLDMPPRPLGEFSSPRSRHGSGSYGTEPDARPASQLEPDRRSLPRTPSASSLYSGSAQSSRSNSFGERPGGGGGARRVRALVSHSEGANHTLLRFSAGDVVEVLVPEAQNGWLYGKLEGSSASGWFPEAYVKALEEGPVNPMTPVTPMTSMTSMSPMTPMNPGNELPSRSYPLRGSHSLDDLLDRPGNSIAPSEYWDGQSRSRTPSRVPSRAPSPAPPPLPSSRRSSMGSTAVATDVKGHKSFCHCQASSHHHQ

SEQ ID NO: 778566 - protein, 83 aa, Homo sapiens
QMVPIGRLTQDTGSGRQPVRAGSQPLQKPGIAGQELFQRPPLTPNQRVLTKGFQERGLGPAKHLGAAVEKGETIIRHDAKNEL

SEQ ID NO: 778567 - protein, 114 aa, Homo sapiens [sequence omitted]

SEQ ID NO: 778568 - protein, 86 aa, Homo sapiens
PLGHGVCLRGRGPDRGHDGHPRARCCPAAPADDALAEEGEAWARGRATLILSPWGDHTSRSLAADPSHPCLCGPAHLGNTPRNKVP

SEQ ID NO: 778569 - protein, 165 aa, Homo sapiens
NSRWIKDFNVRPKTIKTIKENLFKTIQDIGMGKDFVTITPKAMATKAKIDKWDLITLKSFCRAKETVIRVNRQPTECEKIFAIYPSGKRLISRIYKELKQIYKKKTTPSKSGQTSQMKTFTQPLYADTSTVQISVNILVSRDSNRKIVSASLLPTHFKHIQLVEM

SEQ ID NO: 778570 - protein, 188 aa, Homo sapiens
PVPALSAYWIPGAWAGAWALLPPWPLRPLEAEREPLADPRLVPSTADTRKVARASLSRTDGRPPTQAGAMDKFRMLFQHFQSSSESVMNGICLLLAAVTVKLYSSFDFNCPCLVHYNALYGLGLLLTPPLALFLCGLLANRQSVVMVEEWRRPAGHRRKDPGIIRYMCSSVLQRALAAPLVWILLALL

SEQ ID NO: 778571 - protein, 112 aa, Homo sapiens
RIKLDSYISPYIKINSRLIKYSNVKTYKIPRRKPRKTLLNISLDKEFMTKSSEANETKIIIGKWDLSKLKIFCTAKEIINRVNRQPTEQEKIFTNYVSNEVLISRIYMEPNK

SEQ ID NO: 778572 - protein, 87 aa, Homo sapiens
MLGALPEVVGFDSVLNDSLHHSHRHSPPAGPHYPYYLPTQQTAPDDASAAASPALPAPPAGAPDQRPHALQAGHTPRRPLGLPAGAM

SEQ ID NO: 778573 - protein, 106 aa, Homo sapiens
CAGQVSGRPHREPLAAFGLLHRKSSSCMVLGIPVSWLGLGADRNGTVLWLITYGSRPCACGGVSAPSLWFWQWRGCGAASCVPPHRIYECAPGAPAADKIGTITLG

SEQ ID NO: 778574 - protein, 124 aa, Homo sapiens
EALRQGEVSGKSYGNVQEQRLAFLGNVQGFRQILIGTGAIPFSAVISIVRFFLSGSNFHSTIRYSLLSTNLICHTLCHHTLLLIFRISCLQIPGIFQALLSQRMCVMTPLLYKTHTHIYFKNPP

SEQ ID NO: 778575 - protein, 71 aa, Homo sapiens
TSGQLLAAAGSKEQRRQGRMGGPDKPDGVELSQADALGLFCLPRDHLESQRLWARGQQAGSLAGPVDSRPG

SEQ ID NO: 778576 - protein, 117 aa, Homo sapiens
MGPQCCTPISGPAPPPLTPALILKGGNIHPKLPQFTSVTWWPVSGVSNGSSVAVCITIASRGCSAHLCPPPDCQDSLLPPCHFTQSAAVAAAVTPQTRTPASRASPGLALLCLSGLP

SEQ ID NO: 778577 - protein, 78 aa, Homo sapiens
AAARAGPCGAQVRSREGLDNPDREPDPCSDRRKQYLEEKLERESIPRIAERWTTDRIDGVSPIPDTIGSTSMNSTNCK

SEQ ID NO: 778578 - protein, 53 aa, Homo sapiens
MACLENEGLNQISVGLRDVGAGTGCEDSSFPSLVTSSAGCGSTQLSSGHLFLD

SEQ ID NO: 778579 - protein, 69 aa, Homo sapiens
HTPASPPESWDQSGCRGSQSGPPSASLPCLQMSSHGCVRPRPDSPSLWSYWVQGPPSTPESKAWPGLSD

SEQ ID NO: 778580 - protein, 72 aa, Homo sapiens
MSLLAAPVEQVFGGTGQELPGGVPHMTPTRQNAGLGLLGWGCWAAGRTHAPTAAATTLPPGQAPTPPGPRLK

SEQ ID NO: 778581 - protein, 78 aa, Homo sapiens
LPPELDVGGGGAWGLGLGRWALLWPARVGPGEAALQELCGQLERYLGAAAHGCGCATVRDALFAANGRAADCESPREF

SEQ ID NO: 778582 - protein, 36 aa, Homo sapiens
ACAAAPYGYEPCLVSVSCVTDLFNLVLLPAFIATQL

SEQ ID NO: 778583 - protein, 95 aa, Homo sapiens
RGWAVGHPQLLVSVIRACRTPCPEPQPRWVHLGSMERDSHSLQRASDGGRGRFHVPGARMQQEKRGKMRPRPTSARSTSEEEFPPEDPTTRMSQS

SEQ ID NO: 778584 - protein, 183 aa, Homo sapiens
MCHNLIMWLRKLLWNNRWSSPIFQRTVKTSRKIQGTWKEFIHKPGKERNWIWKANEEHHRLLKGAPFKLNLHPRDYFDANPYFSEESLPPIKKEEKKKTISNTFKPSSPGKKPGGMKAGTFDPYPSHSADPYVAKLANISGKDDKIFHPPSGPKSRPVESIMTLNVRRALNSKNYKTSSVPSY

SEQ ID NO: 778585 - protein, 183 aa, Homo sapiens; identical to SEQ ID NO: 778584

SEQ ID NO: 778586 - protein, 150 aa, Homo sapiens
GPELAGRTEPPGLMAQKPLSTAAAERMNLVGQDEIWKYRLKAESEARQNWPQNWGFLTTPFEELIKCEEDLPTPKPKIELPERFRIRPVTPVEKYIKVFPSPPVPQTTQGFIGWRSAVPGLNKCLELDDAIRSCKGAFARELCWPKQGVH

SEQ ID NO: 778587 - protein, 46 aa, Homo sapiens
GGQKFPWSWAEAQAGEQCQGDCREWAFCRRVEGDRRVCQLSARMTV

SEQ ID NO: 778588 - protein, 135 aa, Homo sapiens
RESISERDPGPTRQVSAQQPEHCGRVSAFEPRPVREGTQESSVSPACPPTKFTKHSLSHQVVTTPCVQEAIYFERPLWAVDEAFAKSFLLVKQMGLLGCYTLGTRVLATKETLSLPSPCLTKLWVQTSQQAGAGL

SEQ ID NO: 778589 - protein, 259 aa, Homo sapiens
MSHWAPEWKRAEANPRDLGASWDVRGSRGSGWSGPFGHQGPRAAGSREPPLCFKIKNNMVGVVIGYSGSKIKDLQHSTNTKIQIINGESEAKVRIFGNREMKAKAKAAIETLIRKQESYNSESSVDNAASQTPIGRNLGRNDIVGEAEPLSNWDRIRAAVVECEKRKWADLPPVKKNFYIESKATSCMSEMQVINWRKENFNITCDDLKSGEKRLISKPTCRFKDAFQQYPDLLKANKGRDCKANANSVTGMANYSTRN

SEQ ID NO: 778590 - protein, 106 aa, Homo sapiens
GDGWWEDRQVPESLSCPCSWGAEMLPRDGWGNGKETVWIPRSQLAFQLCLSAPCTRSVTPTHTVSVGHEKRPVSAAASEPRVGFNKWKEPRGEMAKACEMQTSGEE

SEQ ID NO: 778591 - protein, 32 aa, Homo sapiens
MKQKNLTSSGFLPLVWYSSHKSNLETAKSDWQ

SEQ ID NO: 778592 - protein, 530 aa, Homo sapiens
MLLWPLLLLLLLLPTLALLRQQRSQDARLSWLAGLQHRVAWGALVWAATWQRRRLEQSTLHVHQSQQQALRWCLQGAQRPHCSLRRSTDISTFRNHLPLTKASQTQQEDSGEQPLPPTSNQDLGEASLQATLLGLAALNKAYPEVLAQGRTARVTLTSPWPRPLPWPGNTLGQVGTPGTKDPRALLLDALRSPGLRALEAGTAVELLDVFLGLETDGEELAGAIAAGNPGAPLRERAAELREALEQGPRGLALRLWPKLQVVVTLDAGGQAEAVAALGALWCQGLAFFSPAYAASGGVLGLNLQPEQPHGLYLLPPGAPFIELLPVKEGTQEEAASTLLLAEAQQGKEYELVLTDRASLTRCRLGDVVRVVGAYNQCPVVRFICRLDQTLSVRGEDIGEDLFSEALGRAVGQWAGAKLLDHGCVESSILDSSAGSAPHYEVFVALRGLRNLSEENRDKLDHCLQEASPRYKSLRFWGSVGPARVHLVGQGAFRALRAALAACPSSPFPPAMPRVLRHRHLAQCLQERVVS

SEQ ID NO: 778593 - protein, 530 aa, Homo sapiens; identical to SEQ ID NO: 778592

SEQ ID NO: 778594 - protein, 555 aa, Homo sapiens
MLLWPLLLLLLLLPTLALLRQQRSQDARLSWLAGLQHRVAWGALVWAATWQRRRLEQSTLHVHQSQQQALRWCLQGAQRPHCSLRRSTGSHQSCLKLLGNWLPEAFLFVIGAIDISTFRNHLPLTKASQTQQEDSGEQPLPPTSNQDLGEASLQATLLGLAALNKAYPEVLAQGRTARVTLTSPWPRPLPWPGNTLGQVGTPGTKDPRALLLDALRSPGLRALEAGTAVELLDVFLGLETDGEELAGAIAAGNPGAPLRERAAELREALEQGPRGLALRLWPKLQVVVTLDAGGQAEAVAALGALWCQGLAFFSPAYAASGGVLGLNLQPEQPHGLYLLPPGAPFIELLPVKEGTQEEAASTLLLAEAQQGKEYELVLTDRASLTRCRLGDVVRVVGAYNQCPVVRFICRLDQTLSVRGEDIGEDLFSEALGRAVGQWAGAKLLDHGCVESSILDSSAGSAPHYEVFVALRGLRNLSEENRDKLDHCLQEASPRYKSLRFWGSVGPARVHLVGQGAFRALRAALAACPSSPFPPAMPRVLRHRHLAQCLQERVVS

SEQ ID NO: 778595 - protein, 611 aa, Homo sapiens
TREWARDIVTQLLCARPTLSETLPIRKQSSVQPTKLLRALQLTSGRGRICTQELLGDAAVATAAAAAAAANIGPAQAAAVPGCQAVLACWPPAPSGMGGPGLGSHLAAAEAGAEHAPCAPEPAAGPEVVSTGSPAPPLFPQKEHRVSPVLPETLGKLASCGVSVVIGAIDISTFRNHLPLTKASQTQQEDSGEQPLPPTSNQDLGEASLQATLLGLAALNKAYPEVLAQGRTARVTLTSPWPRPLPWPGNTLGQVGTPGTKDPRALLLDALRSPGLRALEAGTAVELLDVFLGLETDGEELAGAIAAGNPGAPLRERAAELREALEQGPRGLALRLWPKLQVVVTLDAGGQAEAVAALGALWCQGLAFFSPAYAASGGVLGLNLQPEQPHGLYLLPPGAPFIELLPVKEGTQEEAASTLLLAEAQQGKEYELVLTDRASLTRCRLGDVVRVVGAYNQCPVVRFICRLDQTLSVRGEDIGEDLFSEALGRAVGQWAGAKLLDHGCVESSILDSSAGSAPHYEVFVALRGLRNLSEENRDKLDHCLQEASPRYKSLRFWGSVGPARVHLVGQGAFRALRAALAACPSSPFPPAMPRVLRHRHLAQCLQERVVS

SEQ ID NO: 778596 - protein, 120 aa, Homo sapiens
KGHPCVLGSTASPFLLFRLDQTLSVRGEDIGEDLFSEALGRAVGQWAGAKLLDHGCVESSILGEPPHRLLPTILELPFNSYLPCQGTARKEISLLYYSYKSPSLHLTLIHPAAVSTHFLS

SEQ ID NO: 778597 - protein, 487 aa, Homo sapiens [sequence omitted]

SEQ ID NO: 778598 - protein, 530 aa, Homo sapiens; identical to SEQ ID NO: 778592

SEQ ID NO: 778599 - protein, 474 aa, Homo sapiens
MLLWPLLLLLLLLPTLALLRQQRSQDARLSWLAGLQHRVAWGALVWAATWQRRRLEQSTLHVHQSQQQALRWCLQGAQRPHCSLRRSTDISTFRNHLPLTKASQTQQEDSGEQPLPPTSNQDLGEASLQATLLGLAALNKAYPEVLAQGRTARVTLTSPWPRPLPWPGNTLGQVGTPGTKDPRALLLDALRSPGLRALEAGTAVELLDVFLGLETDGEELAGAIAAGNPGAPLRERAAELREALEQGPRGLALRLWPKLQVVVTLDAGGQAEAVAALGALWCQGLAFFSPAYAASGGVLGLNLQPEQPHGLYLLPPGAPFIELLPVKEGTQEEAASTLLLAEAQQGKEYELVLTDRASLTRCRLGDVVRVVGAYNQCPVVRFICRLDQTLSVRGEDIGEDLFSEALGRAVGQWAGAKLLDHGCVESSILEWGRTDRAEDTRLGSCPFTGSMCAHGVYSQIPLRALLPTTRCLWR

SEQ ID NO: 778600 - protein, 499 aa, Homo sapiens
MLLWPLLLLLLLLPTLALLRQQRSQDARLSWLAGLQHRVAWGALVWAATWQRRRLEQSTLHVHQSQQQALRWCLQGAQRPHCSLRRSTDISTFRNHLPATLLGLAALNKAYPEVLAQGRTARVTLTSPWPRPLPWPGNTLGQVGTPGTKDPRALLLDALRSPGLRALEAGTAVELLDVFLGLETDGEELAGAIAAGNPGAPLRERAAELREALEQGPRGLALRLWPKLQVVVTLDAGGQAEAVAALGALWCQGLAFFSPAYAASGGVLGLNLQPEQPHGLYLLPPGAPFIELLPVKEGTQEEAASTLLLAEAQQGKEYELVLTDRASLTRCRLGDVVRVVGAYNQCPVVRFICRLDQTLSVRGEDIGEDLFSEALGRAVGQWAGAKLLDHGCVESSILDSSAGSAPHYEVFVALRGLRNLSEENRDKLDHCLQEASPRYKSLRFWGSVGPARVHLVGQGAFRALRAALAACPSSPFPPAMPRVLRHRHLAQCLQERVVS

SEQ ID NO: 778601 - protein, 164 aa, Homo sapiens
KGHPCVLGSTASPFLLFRLDQTLSVRGEDIGEDLFSEALGRAVGQWAGAKLLDHGCVESSILDSSAGSAPHYEVFVALRGLRNLSEENRDKLDHCLQEASPRYKSLRFWGSVGPARVHLGGVLSQVLPHRPAPPRGHLAPPSGTSPDGESLARVSDSVSPDICP

SEQ ID NO: 778602 - protein, 101 aa, Homo sapiens
MESQLPAAVTHSFMYFLRGLSLPSLPHSPALGFLGWLPNKPLAPRFLPQGLLWGNGSGPRPSHSPTELQDFPPTFCSGPGKAACAHRSLGGLVAHPRPAPT

SEQ ID NO: 778603 - protein, 43 aa, Homo sapiens
SSSVPGSVNFTATLAHSVPACAVADMPSPRNTSHTHTREGRMQ

SEQ ID NO: 778604 - protein, 114 aa, Homo sapiens
MRVSSISMITFICSWKLCLPPYATAIQRLASLSLKVWRVSDLQDSQEGKPTEIPTDKVFCPLVPTRKPRLGLGQQPNSSLEADLMVDVFSHLSKIGEDYFALNKLTAKKKFKKT

SEQ ID NO: 778605 - protein, 121 aa, Homo sapiens
MCCVHTFVCECICVCLCVDSWCVCLRVEVSGRAWGTLRNLVPAAPSSPSFSLGTEEALFSPAHLLSASSQLSCCSALKQTFFPRCICLYLFTPCVHLKAPGLVGWCSHAAHRRDTGFHSLL

SEQ ID NO: 778606 - protein, 180 aa, Homo sapiens
GSRARAASRERAGSVAAPCGRSRRPGLTTRRKTRGLWQLQRDRVGWAPGPPGLQRERPAVQAAGRARPEAEARRDTRLRPKRPGWVGLAAAASPVLKRQPGRCILPGVCKTPAQGIPPIPALKASLLGALLGKPTRLGGPLMGMWSRPSSTPEAEGPPGFRRKPTSTLDASWRMIALSGD

SEQ ID NO: 778607 - protein, 105 aa, Homo sapiens
MWFPFIFKEPAFLVEQHYFLLFVLNSLILLLVCSFSSVRGSVSTTPILLSHPQSSSTEVSQLCEAASYQNLHKDLHHLCLVPALGLLWCPMWDTCGHLLGPEVQR

SEQ ID NO: 778608 - protein, 121 aa, Homo sapiens
MQRNSAFQEHGTRRAPTSSLVHNGPLKLNIQRIQTAAELLKVFSLNCLCFKAKKKEEDKTRREKNTVWCGARPAPLKKSGPRRRKAFRKNQLRVGARAAGPRGEVYGCNRGPKGAVFQRGN

SEQ ID NO: 778609 - protein, 197 aa, Homo sapiens
CPIAELSEGHLRKAEPTRTLGGISASENARWQPKSVALALWRSVFQGGDERGRRIRGSKDAGRSEVTCNHGTKNLVVYNKCSLLSHARGHKEKGVVSAMLPLNFKASPSRSNDSCSVRQYFHFNFHSSEPVWELSQTLSTKIQSGITGTVISAPSSTRITPAMPLDEDPSKLCRRSLKCWECNEVFQDETSRGTHFQ

SEQ ID NO: 778610 - protein, 82 aa, Homo sapiens
STATSPPPLAPPVALDKRVGFSLSMGFFGGDVTSFEPFPLNMLLLHGRDRGRGETLSPPPSSGPSTARPLASLASVPSDAGR

SEQ ID NO: 778611 - protein, 112 aa, Homo sapiens
AASGERAVLGGRPGEPPGSPSPFPGPRGDTPSPPPGPPRGPNCGSGGPGQPKGKWGYPTARQRGWGQTREPEVGDVRQSPAGRFQRGDPGLQGTPLRGSYPASAHCQCYVAA

SEQ ID NO: 778612 - protein, 254 aa, Homo sapiens
MATAGNPWGWFLGYLILGVAGSLVSGSCSQIINGEDCSPHSQPWQAALVMENELFCSGVLVHPQWVLSAAHCFQNSYTIGLGLHSLEADQEPGSQMVEASLSVRHPEYNRPLLANDLMLIKLDESVSESDTIRSISIASQCPTAGNSCLVSGWGLLANGRMPTVLQCVNVSVVSEEVCSKLYDPLYHPSMFCAGGGQDQKDSCNGDSGGPLICNGYLQGLVSFGKAPCGQVGVPGVYTNLCKFTEWIEKTVQAS

SEQ ID NO: 778613 - protein, 254 aa, Homo sapiens; identical to SEQ ID NO: 778612

SEQ ID NO: 778614 - protein, 282 aa, Homo sapiens
MATAGNPWGWFLGYLILGVAGSLVSGSCSQIINGEDCSPHSQPWQAALVMENELFCSGVLVHPQWVLSAAHCFQNSYTIGLGLHSLEADQEPGSQMVEASLSVRHPEYNRPLLANDLMLIKLDESVSESDTIRSISIASQCPTAGNSCLVSGWGLLANGELTGVCLPSSRRSSAQSRGLTQSSAVPGRMPTVLQCVNVSVVSEEVCSKLYDPLYHPSMFCAGGGQDQKDSCNGDSGGPLICNGYLQGLVSFGKAPCGQVGVPGVYTNLCKFTEWIEKTVQAS

SEQ ID NO: 778615 - protein, 159 aa, Homo sapiens
MVEASLSVRHPEYNRPLLANDLMLIKLDESVSESDTIRSISIASQCPTAGNSCLVSGWGLLANGRMPTVLQCVNVSVVSEEVCSKLYDPLYHPSMFCAGGGQDQKDSCNGDSGGPLICNGYLQGLVSFGKAPCGQVGVPGVYTNLCKFTEWIEKTVQAS

SEQ ID NO: 778616 - protein, 159 aa, Homo sapiens
MATAGNPWGWFLGYLILGVAGSLVSGSCSQIINGEDCSPHSQPWQAALVMENELFCSGVLVHPQWVLSAAHCFQNSYTIGLGLHSLEADQEPGSQMVEASLSVRHPEYNRPLLANDLMLIKLDESVSESDTIRSISIASQCPTAGNSCLVSGWGLLANG

SEQ ID NO: 778617 - protein, 237 aa, Homo sapiens
MATAGNPWGWFLGYLILGVAGSLVSGSCSQIINGEDCSPHSQPWQAALVMENELFCSGVLVHPQWVLSAAHCFQNSYTIGLGLHSLEADQEPGSQMVEASLSVRHPEYNRPLLANDLMLIKLDESVSESDTIRSISIASQCPTAGNSCLVSGWGLLANGRMPTVLQCVNVSVVSEEVCSKLYDPLYHPSMFCAGGGQDQKDSCNGDSGGPLICNGYLQGLVSFGKPLLPQTQRSNAT

SEQ ID NO: 778618 - protein, 127 aa, Homo sapiens
MKLTPKYILRKEFRNICSQPLLPQAQESRPPAPPPSNQGYRSPAPPPSDPGVQTPQPLLPQTQESSPSSLRPRSPDPPAPPPSDPGVQAPNPSSLRLRGPSPQPLLPQTQRSRSQPLLPQTQRSNAT

SEQ ID NO: 778619 - protein, 80 aa, Homo sapiens
RGEENGLLNYRGGPQGLCPQRMMYKVGLEQLSLSSNHGAQDSEQTAGIPTTGQGLYTAILLQPTRLLTASRIQTGKRRGQ

SEQ ID NO: 778620 - protein, 783 aa, Homo sapiens
DVPGTLMEPGRGAGPAGMAEPRAKAARPGPQRFLRRSVVESDQEEPPGLEAAEAPGPQPPQPLQRRVLLSEDAPPLAERARGRPAAPAPAALVAQPGAPGAPADAGPEPVGTQEPGPDPIAAAVETAPAPDGGPREEAAATVRKEDEGAAEAKPEPGRTRRDEPEEEEDDEDDLKAVATSLDGRFLKFDIELGRGSFKTVYKGLDTETWVEVAWCELQDRKLTKLERQRFKEEAEMLKGLQHPNIVRFYDFWESSAKGKRCIVLVTELMTSGTLKTYLKRFKVMKPKVLRSWCRQILKGLLFLHTRTPPIIHRDLKCDNIFITGPTGSVKIGDLGLATLKRASFAKSVIGTPEFMAPEMYEEHYDESVDVYAFGMCMLEMATSEYPYSECQNAAQIYRKVTCGIKPASFEKVHDPEIKEIIGECICKNKEERYEIKDLLSHAFFAEDTGVRVELAEEDHGRKSTIALRLWVEDPKKLKGKPKDNGAIEFTFDLEKETPDEVAQEMIESGFFHESDVKIVAKSIRDRVALIQWRRERIWPALQPKEQQDVGSPDKARGPPVPLQVQVTYHAQAGQPGPPEPEEPEADQHLLPPTLPTSATSLASDSTFDSGQGSTVYSDSQSSQQSVMLGSLADAAPSPAQCVCSPPVSEGPVLPQSLPSLGAYQQPTAAPPPLAQPTPLPQVLAPQPVVPLQPVPPHLPPYLAPASQVGAPAQLKPLQMPQAPLQPLAQVPPQMPPIPVVPPITPLAGIDGLPPALPDLPTATVPPVPPPQYFSPAVILPSLA

SEQ ID NO: 778621 - protein, 105 aa, Homo sapiens
MQPGHAALNDASHACICPAPRPGSVSYLRGRGCSPAVPIGWEVLAAAPSPGWQQGAVQLCLGCSCWGGWRCFAPLPLQPAHLLTLVSPPPPGQGVWQGTWGPFVS

SEQ ID NO: 778622 - protein, 110 aa, Homo sapiens
GAAIGESCILGPATSLLLVKMQKLRPGTTHLTPSGLGFRPLTIFFQLQEQQHLEDPNLLSSSTRPQQSPTWKGTEPAWGFPGTFLTEHWKDPFIPSCPPGGTPRPEVEQR

SEQ ID NO: 778623 - protein, 68 aa, Homo sapiens
VHVACCCGNILCHCFNKYRKNEAKRREVIMNGLNSLFLVVSINDTILGGENLRVLPMLMQTPFDPAIP

SEQ ID NO: 778624 - protein, 153 aa, Homo sapiens
PRRQRPQEVEALAGGRAGAVGVGRRGGRGLRGGGRGVGGSSLLESPTSAPGRRGGLSETPLRTLLSRYRRNCDPAANTASPMHRLDCGTALPKPTDTSDAKAPDSQRKEPTVHTQRKKGSEALAKSGRGQPAANNPTHTTHPAPKHQRDRPNQ

SEQ ID NO: 778625 - protein, 80 aa, Homo sapiens
FMGQVSTKQTRMLCEPQSSAHKVPGLECPAVTLTSDEPAWKRTDLWRRGSGPQEQAWRGAEGKVAMAGFMEGRRPGAWFG

SEQ ID NO: 778626 - protein, 36 aa, Homo sapiens
MTREEMAESVWGAQAARLFCTKTKGENSAHETLGRL

SEQ ID NO: 778627 - protein, 101 aa, Homo sapiens
RTVTATVPGDGSLRLGEVGALCDCAVRVGAETSPGQAVTRTVSGGRDSRRVRQEEETSDRSPGTQHGIPASGVHGRCAESSISGRPQYCQAGRNPSHEDRP

SEQ ID NO: 778628 - protein, 127 aa, Homo sapiens
SPTMSSFQRVYVSHTPETPIKSETSVRSSPVSLTSSPPALMNPPVCASYSPTMPTFQPQSVPGSQGSPPSSPLSLCYSPDSTTCLYPNLWKSPVCPSYFPTSPTFQQESVAGTEKSPPNSPISLRYS

SEQ ID NO: 778629 - protein, 166 aa, Homo sapiens [sequence omitted]

SEQ ID NO: 778630 - protein, 105 aa, Homo sapiens
MGTEKGDHVPTHLLPSPDFTSGSATRQGAVWQLWGSAPHLSLSKMPFRLSVRSPMAVAMYIRVTWDAVKSPDTHIPAPLPLRARAGGLGTGLMASTLHSPSNFET

SEQ ID NO: 778631 - protein, 105 aa, Homo sapiens
MSLFGLLLLTSALAGQRQGTQAESNLSSKFQFSSNKEQNGVQDPQHERIITVSTNGSIHSPRFPHTYPRNTVLVWRLVAVEENVWIQLTFDERFGLEDPEDDICK

SEQ ID NO: 778632 - protein, 37 aa, Homo sapiens
MDTGEARTLARLETLARARDTGEARDTGEARTLARLE

SEQ ID NO: 778633 - protein, 132 aa, Homo sapiens
MNTSGCSAMKWKSIDSPLGTDLCASKTHALSAGNLYSSSSSPCQHQHSTFPFLLRFESQSQLQLVPLPSETPPGNTSSQITPARTSNDYEYSTWVCRLARTKRTDYYTRSGYGGEICPLQTMTVVAGKGLVK

SEQ ID NO: 778634 - protein, 49 aa, Homo sapiens
MCYNKTMVLIYDERGDVPPRFLFKEGLVSSADGIPVNRDLSGASDLEKA

SEQ ID NO: 778635 - protein, 41 aa, Homo sapiens
MEDRDLINSPAIRGAHAGAPHWPNPSGRQKARKPANLSQVI

SEQ ID NO: 778636 - protein, 116 aa, Homo sapiens
MKKTSGFRRGKGELPWGSVSSPGKVGAGAGSESEDHASSQPRRHDPDKGFDRLRRAAGRHRTETMRRILSLPKSGVDDRDEKNRLSCGQSSGDSWLSVDDEPFDSDTKILLSNIIT

SEQ ID NO: 778637 - protein, 42 aa, Homo sapiens
TAPLNQLMRCLRKYQSRTPSPLLHSVPSEIVFDFEPGPVFRG

SEQ ID NO: 778638 - protein, 117 aa, Homo sapiens
CSSPSGETASHLLSSHSLCFDIYFFAMFSYLALTHLSQSSPRASSSTNSPLANPVPSQRQWNWHCSPWFTYIFHAHTCHIYCDTLLHSLLPCLSPPSRLKASVTTGTTWYEMITHAC

SEQ ID NO: 778639 - protein, 122 aa, Homo sapiens [sequence omitted]

SEQ ID NO: 778640 - protein, 419 aa, Homo sapiens
MWPGNAWRAALFWVPRGRRAQSALAQLRGILEGELEGICGAGTWKSERVITSRQGPHIRVDGVSGGILNFCANNYLGLSSHPEVIQAGLQALEEFGAGLSSVRFICGTQSIHKNLEAKIARFHQREDAILYPSCYDANAGLFEALLTPEDAVLSDELNHASIIDGIRLCKAHKYRYRHLDMADLEAKLQEAQKHRLRLVATDGAFSMDGDIAPLQEICCLASRYGALVFMDECHATGFLGPTGRGTDELLGVMDQVTIINSTLGKALGGASGGYTTGPGPLVSLLRQRARPYLFSNSLPPAVVGCASKALDLLMGSNTIVQSMAAKTQRFRSKMEAAGFTISGASHPICPVMLGDARLASRMADDMLKRGIFVIGFSYPVVPKGKARIRVQISAVHSEEDIDRCVEAFVEVGRLHGALP

SEQ ID NO: 778641 - protein, 113 aa, Homo sapiens
PRQAGALGRGRSDVAWERLARRTLLGAPRPPRTVSAGPAAWHSGGGVGDARLASRMADDMLKRGIFVIGFSYPVVPKGKARIRVQISAVHSEEDIDRCVEAFVEVGRLHGALP

SEQ ID NO: 778642 - protein, 445 aa, Homo sapiens
MWPGNAWRAALFWVPRGRRAQSALAQLRGILEGELEGICGAGTWKSERVITSRQGPHIRVDGVSGGPGTVIFPGLPLPHLSCCIHLLSFTSGILNFCANNYLGLSSHPEVIQAGLQALEEFGAGLSSVRFICGTQSIHKNLEAKIARFHQREDAILYPSCYDANAGLFEALLTPEDAVLSDELNHASIIDGIRLCKAHKYRYRHLDMADLEAKLQEAQKHRLRLVATDGAFSMDGDIAPLQEICCLASRYGALVFMDECHATGFLGPTGRGTDELLGVMDQVTIINSTLGKALGGASGGYTTGPGPLVSLLRQRARPYLFSNSLPPAVVGCASKALDLLMGSNTIVQSMAAKTQRFRSKMEAAGFTISGASHPICPVMLGDARLASRMADDMLKRGIFVIGFSYPVVPKGKARIRVQISAVHSEEDIDRCVEAFVEVGRLHGALP

SEQ ID NO: 778643 - protein, 239 aa, Homo sapiens
MADLEAKLQEAQKHRLRLVATDGAFSMDGDIAPLQEICCLASRYGALVFMDECHATGFLGPTGRGTDELLGVMDQVTIINSTLGKALGGASGGYTTGPGPLVSLLRQRARPYLFSNSLPPAVVGCASKALDLLMGSNTIVQSMAAKTQRFRSKMEAAGFTISGASHPICPVMLGDARLASRMADDMLKRGIFVIGFSYPVVPKGKARIRVQISAVHSEEDIDRCVEAFVEVGRLHGALP

SEQ ID NO: 778644 - protein, 419 aa, Homo sapiens
MWPGNAWRAALFWVPRGRRAQSALAQLRGILEGELEGICGAGTWKSERVITSRQGPHIRVDGVSGGILNFCANNYLGLSSHPEVIQAGLQALEEFGAGLSSVRFICGTQSIHKNLEAKIARFHQREDAILYPSCYDANAGLFEALLTPEDAVLSDELNHASIIDGIRLCKAHKYRYRHLDMADLEAKLQEAQKHRLRLVATDGAFSMDGDIAPLQEICCLASRYGALVFMDECHATGFLGPTGRGTDELLGVMDQVTIINSTLGKALGGASGGYTTGPGPLVSLLRQRARPYLFSNSLPPAVVGCASKALDLLMGSNTIVQSMAAKTQRFRSKMEAAGFTISGASHPICPVMLGDARLASRMADDMLKRGIFVIGFSYPVVPKGKARIRVQISAVHSEEDIDRCVEAFVEVGRLHWAGT

SEQ ID NO: 778645 - protein, 250 aa, Homo sapiens
MWPGNAWRAALFWVPRGRRAQSALAQLRGILEGELEGICGAGTWKSERVITSRQGPHIRVDGVSGGILNFCANNYLGLSSHPEVIQAGLQALEEFGAGLSSVRFICGTQSIHKNLEAKIARFHQREDAILYPSCYDANAGLFEALLTPEDAVLSDELNHASIIDGIRLCKAHKYRYRHLDMADLEAKLQEAQKHRLRLVATDGAFSMDGDIAPLQEICCLASRYGALVFMDECHATGFLGPTGRVGPCGT

SEQ ID NO: 778646 - protein, 481 aa, Homo sapiens
MWPGNAWRAALFWVPRGRRAQSALAQLRGILEGELEGICGAGTWKSERVITSRQGPHIRVDGVSGGILNFCANNYLGLSSHPEVIQAGLQALEEFGAGLSSVRFICGTQSIHKNLEAKIARFHQREDAILYPSCYDANAGLFESRALVQPGTETRGPQREAQNTLPLYPEERPGWQYSFLICWSPGQGRSPGWLNDGSTLTASLQALLTPEDAVLSDELNHASIIDGIRLCKAHKYRYRHLDMADLEAKLQEAQKHRLRLVATDGAFSMDGDIAPLQEICCLASRYGALVFMDECHATGFLGPTGRGTDELLGVMDQVTIINSTLGKALGGASGGYTTGPGPLVSLLRQRARPYLFSNSLPPAVVGCASKALDLLMGSNTIVQSMAAKTQRFRSKMEAAGFTISGASHPICPVMLGDARLASRMADDMLKRGIFVIGFSYPVVPKGKARIRVQISAVHSEEDIDRCVEAFVEVGRLHGALP

SEQ ID NO: 778647 - protein, 167 aa, Homo sapiens [sequence omitted]

SEQ ID NO: 778648 - protein, 80 aa, Homo sapiens
RMITPLHSSLGVRARLWFVCLFICLLKLFCRAEGTIPESDAREDKEDKISTTFSKALRRMQHPSRHHEAPRIWSSCFFRE

SEQ ID NO: 778649 - protein, 235 aa, Homo sapiens
SRAPVPAAEIGQPRRRWHSSGQRRLRELEPQQPPASPGPADSPRNQPKDAGRGRRRRHGVLPPSRPSPATWSSPRPRPSQTHQNETRRLLAASHTARSLPAGCAGMDGPRNQQRPGCGCGGVTGRGAQSFEDHKKRRGFQSSKELLGSYGKKFCSRGSRCVLSRKTGRARIAVPWEDAGTSYVLCAGYDGRYHDNAHVSSTVLLALLGTRITDHPEEGPGPSSDTATGAVRPLRM

SEQ ID NO: 778650 - protein, 86 aa, Homo sapiens
EKQRSPKSISLRGQWTQLCDCPVLCGSVEGPVMGHRATHSQLHPSPSLALFPYTETGWGLLIWPEALLWALKTGAISLPEDLEAAC

SEQ ID NO: 778651 - protein, 120 aa, Homo sapiens
LLRGGTIPHPLSPFSTCSSLAFALTRSTVTTPLCPHLAWLPSSTECSRVSIFFWLKDTPFCGLLQVTFQGFRPCFAGYPPSANPAVGLLLSEQISRGWGKRVSCLPIWFGSMSLLKSHVK

SEQ ID NO: 778652 - protein, 83 aa, Homo sapiens
TQVWSSDKKNEQGYSQGSTGIWRLLGPREAVEALKETGWSSRHIQDRALRTPKDPTAGSLSRSEDAGGKSTWEGAGMGLAQVG

SEQ ID NO: 778653 - protein, 72 aa, Homo sapiens
MFCYFCQFFILLFQAGNFIVLLFNFFMKFLIFLKFERPPGQVANIDVLNGIAKEVEAQAPDLGKHKGRKKNE

SEQ ID NO: 778654 - protein, 191 aa, Homo sapiens
SGWGWAPAHLWSSLRRKDVFEDALETISISSHSDMATSSLHFASCDTQQAPRQRGASTVSSSSSTKVDLKSGLEECAVALNLFLSNKFTDALELLRPWAKESMYHALGYSTIVVLQAVLTFEQQDIQNGISAMKDALQTCQKYRKKYTVVESFSSLLSRGSLEQLSERKCMAEICYAECLLQKAALTFVAG

SEQ ID NO: 778655 - protein, 203 aa, Homo sapiens
MALVCWVGSFGFASKALRDSVCRFYIGLCSLTWRSVGGAYGSSHSDMATSSLHFASCDTQQAPRQRGASTVSSSSSTKVDLKSGLEECAVALNLFLSNKFTDALELLRPWAKESMYHALGYSTIVVLQAVLTFEQQDIQNGISAMKDALQTCQKYRKKYTVVESFSSLLSRGSLEQLSERKCMAEICYAECLLQKAALTFVAG

SEQ ID NO: 778656 - protein, 263 aa, Homo sapiens
QTFLLSPNSMLKRFFLLKVTYLFPQECQDGGYGGLVHWFSNCYVPRSILGISSNADSGVLGPGLRLCIYSKPPGDADTDLPWSSKGLVESASSPDLSAPRPALTLVPSEPLSSLLSTGVRVTTCSCRGDKMRETIFKTCNNASSQKIEAVQRYCSLSCFLGNSTSTWSGGGSRAGGRGHDITTPVHSVSWLLSTLWKYFSQGCWRNIRSFRNLGAFEIYAKTFKLDSFHFLGVIFIFNVTYHKRKERDENNFSCRDFLTEDGS

SEQ ID NO: 778657 - protein, 273 aa, Homo sapiens
METVFEEMDEESTGGVSSSKEEIVLGQRLHLSFPFSIIFSTVLYCGEVAFGLYMFEIYRKANDTFWMSFTISFIIVGAILDQIILMFFNKDLRRNKAALLFWHILLLGPIVRCLHTIRNYHKWLKNLKQEKEETQVSITKRNTMLEREIAFSIRDNFMQQKAFKYMSVIQAFLGSVPQLILQMYISLTIREWPLNRALLMTFSLLSVTYGAIRCNILAIQISNDDTTIKLPPIEFFCVVMWRFLEVISRVVTLAFFIASLKLKSLPVLLIIYF

SEQ ID NO: 778658 - protein, 112 aa, Homo sapiens
MVLRPYFENHLLRLCLTGWVPHHQLCPSGPHGPPFVDEGTSSGLRNLVRVTPGARIPAGPRTQVSQPQARPLTLSLRVWDPPRPTLLCPDPGTAAVCSPARDQWPGVHSPHD

SEQ ID NO: 778659 - protein, 101 aa, Homo sapiens
DLSSLQPLPPEFKRFSCLSHLSSWDYRCTPPHRRTFVFLVETVFHHVGWAGLELLTSGDPPTLAYQNAGIAGVSHRAQPQTTVFVECFLLETEHLWPVAGE

SEQ ID NO: 778660 - protein, 122 aa, Homo sapiens
ESMCKLSMISPFWDESHTTQFSLQQNAATRVSCFCPGKPTRDSVPRVYTGGGSHRHPVLGSCQIPQSQLTGKQMFTINHIVNLRKAKHLCQYMELLRSLIPKCQPRVNLISRFFFILFHFYK

SEQ ID NO: 778661 - protein, 348 aa, Homo sapiens
MNDPNSCVDNATVCSGASCVVPESNFNNILSVVLSTVLTILLALVMFSMGCNVEIKKFLGHIKRPWGICVGFLCQFGIMPLTGFILSVAFDILPLQAVVVLIIGCCPGGTASNILAYWVDGDMDLSVSMTTCSTLLALGMMPLCLLIYTKMWVDSGSIVIPYDNIGTSLVALVVPVSIGMFVNHKWPQKAKIILKIGSIAGAILIVLIAVVGGILYQSAWIIAPKLWIIGTIFPVAGYSLGFLLARIAGLPWYRCRTVAFETGMQNTQLCSTIVQLSFTPEELNVVFTFPLIYSIFQLAFAAIFLGFYVAYKKCHGKNKAEIPESKENGTEPESSFYKANGGFQPDEK

SEQ ID NO: 778662 - protein, 348 aa, Homo sapiens; identical to SEQ ID NO: 778661

SEQ ID NO: 778663 - protein, 201 aa, Homo sapiens
MCLLSSSAASDLAATSLTAHPCHPPLPRQPQPQLILSGSPSIGTVPPPAVGHTSLLPVNPPAISTTTSDLSAREDATPSASTGHLSVFPAFQVKIPAVPSEQTSQSFSEASHRVLPGGGPRCSRDFGAGVAGHLGLGIFGVGFGSPALLQSVVDENSCCLLYVVEDQLCDVEQAFRAEHLGQHQSGSGTGCRHCPQRPAAL

SEQ ID NO: 778664 - protein, 201 aa, Homo sapiens; identical to SEQ ID NO: 778663

SEQ ID NO: 778665 - protein, 201 aa, Homo sapiens; identical to SEQ ID NO: 778663

SEQ ID NO: 778666 - protein, 201 aa, Homo sapiens; identical to SEQ ID NO: 778663

SEQ ID NO: 778667 - protein, 201 aa, Homo sapiens; identical to SEQ ID NO: 778663

SEQ ID NO: 778668 - protein, 201 aa, Homo sapiens; identical to SEQ ID NO: 778663

SEQ ID NO: 778669 - protein, 201 aa, Homo sapiens; identical to SEQ ID NO: 778663

SEQ ID NO: 778670 - protein, 107 aa, Homo sapiens
MQTLSSTTSGTLIRFSSSCTSKFVSATPWGGSTGSPPSLPVPGGLSGFPKESRWDFLQRCCARRGCRMHVAGGSHSGHCVFSGTCLLPRYGRLKRCRCCCDQHEVSL

SEQ ID NO: 778671 - protein, 66 aa, Homo sapiens
PRLARQAFYVLSHLILTVTDEVGILLHLTDRFPKAIKELVRLSDRTRPSPRFSDAQPHPLTAISHG

SEQ ID NO: 778672 - protein, 115 aa, Homo sapiens
TGKMAAGGGGGSSKASSSSASSAGALESSLDRKFQSVTNTMESIQGLSSWCIENKKHHSTIVYHWMKWLRRSAYPHRLNLFYLANDVIQNCKRKNAIIFRESFADVLPEAAALVK

SEQ ID NO: 778673 - protein, 121 aa, Homo sapiens
MASGTCYGAAVAQSTRSCWRGAWPLTHEVGHRLGTEGGLCSCPRTRMCDEGSGVAGYWGKVGLLFWCQESQVPTWEKRKVDSHGIQIPPGGCPEGSTFDPEPHPDDLTDKAPKSLCCSGSG

SEQ ID NO: 778674 - protein, 72 aa, Homo sapiens
PSSLGSESCARELLPHSSGSHTPEFVPPLLNILWTPPFLPSWVEESFLLVHFHFILKNSKERGLLFVGMNHL

SEQ ID NO: 778675 - protein, 173 aa, Homo sapiens
MSPSAFSLLSSHPTPSQPPPSSEPPSPSQYTALKCVPRRRTFTTRCTLNSLGPAVREQGIEMLTCSSQVSGSLELAWELLRSSRYSRKLPIHASACGSEAGSSQKIAPSCCKAHHCHLPATASLFHSPNPLYWQALIWNYTGDGILENPSDFSRMQGDHGRGTSLQGTAGANC

SEQ ID NO: 778676 - protein, 61 aa, Homo sapiens
PRGSDEGISCMIEGPCGSDEGRSSCMVEGPRGSDEGRPLHMVEGLCSSDNGRSSCMVEGPG

SEQ ID NO: 778677 - protein, 199 aa, Homo sapiens
KGHPTWVLLHLPTHKDFNLCCQWLFSGLWAPPQLCPCCTVYPLAFLACGSEQSRSPIPISRAPPPPPPPSWSLYRARREVGTWQVIQDRHLKSRSQNLRLGQVVPKPSSSAPLRGAKNQTGPSPQPRRSRLLLPTDRHMSSFAEDSFPSQTPALGACQGPLPSWLDLDTPGMLRLLYLLQLPHLTGGSLYATSESRCIS

SEQ ID NO: 778678 - protein, 224 aa, Homo sapiens
AFLRLSRRAAGLLLLPPRAPAAMFNRAVSRLSRKRPPSDIHDSDGSSSSSHQSLKSTAKWAASLENLLEDPEGVKRFREFLKKEFSEENVLFGLACEDFKKMQDKTQMQEKAQGDLHDLSVQQGLITGQRGGAVSAQREDPGRTDPLMFQKLQDQIFNLMKYDSYSRFLKSDLCLKHKRTEEEEDRLCLMLKLQLKELPEFITHEPPKSRDWAALRSKGMSSQD

SEQ ID NO: 778679 - protein, 109 aa, Homo sapiens
MSPCEVISRSEWVMFADTPRLSMPFLCLLSTAVEYLSWTLVMVCLVCSLPSNSSAIPQLQLSFPNMDLIKALSSLTASLSPGLPALLAILLAAPPLGTITAPFTLPCRL

SEQ ID NO: 778680 - protein, 148 aa, Homo sapiens
EAPAPPKAEAKAKALKAKKAVLNGVHSHKKKIHTSPTFRRPKTLRLRRQPEYPRKSTPRKNKLDHYAIIKFPLTTESAMKKIEDNNTLVFIVVVKANKHQIKQAVKYLYDIDVAKVNTLIRPDGEKKAYVRLAPDYDALDVVNKIGII

SEQ ID NO: 778681 - protein, 163 aa, Homo sapiens
MGGLATPDPSQACSLIHEMELGQGGHRKALQTVKCSAYVGVPVASPEPVGNTLQSRPGPGRTPSCASRPWPQGPHLGQQEQGAAGAGVRVALPQVEELGRHDGGREEAQAQEAGDGDERYILEGCGRARAGVPQTRAPGQPPPLGSVPDPRRDNSSLGPPQRS

SEQ ID NO: 778682 - protein, 32 aa, Homo sapiens
MVELLDLYQMEDEAYSSLAEATTELYQYLLQP

SEQ ID NO: 778683 - protein, 105 aa, Homo sapiens [sequence omitted]

SEQ ID NO: 778684 - protein, 113 aa, Homo sapiens
ATRQLYGYCPSWALNWEYRKKGIMEEIVNCDADIISLQEVETEQYFTLFLPALKERGYDGFFSPKSRAKIMSEQERKHVDGCAIFFKTEKFTLVQKHTVEFNQVAMANSAVQA

SEQ ID NO: 778685 - protein, 309 aa, Homo sapiens
MPPHLTNFCIFCRDGVLLCCPRLVLNSWVQAIHPPQPPTVLGLQTFTLVQKHTVEFNQVAMANSDGSEAMLNRVMTKDNIGVAVVLEVHKELFGAGMKPIHAADKQLLIVANAHMHWDPEYSDVKLIQTMMFVSEVKNILEKASSRPGSPTADPNSIPLVLCADLNSLPDSGVVEYLSNGGVADNHKDFKELRYNECLMNFSCNGKNGSSEGRITHGFQLKSAYENNLMPYTNYTFDFKGVIDYIFYSKTHMNVLGVLGPLDPQWLVENNITGCPHPHIPSDHFSLLTQLELHPPLLPLVNGVHLPNRR

SEQ ID NO: 778686 - protein, 354 aa, Homo sapiens
ATRQLYGYCPSWALNWEYRKKGIMEEIVNCDADIISLQEVETEQYFTLFLPALKERGYDGFFSPKSRAKIMSEQERKHVDGCAIFFKTEKFTLVQKHTVEFNQVAMANSDGSEAMLNRVMTKDNIGVAVVLEVHKELFGAGMKPIHAADKQLLIVANAHMHWDPEYSDVKLIQTMMFVSEVKNILEKASSRPGSPTADPNSIPLVLCADLNSLPDSGVVEYLSNGGVADNHKDFKELRYNECLMNFSCNGKNGSSEGRITHGFQLKSAYENNLMPYTNYTFDFKGVIDYIFYSKTHMNVLGVLGPLDPQWLVENNITGCPHPHIPSDHFSLLTQLELHPPLLPLVNGVHLPNRR

SEQ ID NO: 778687 - protein, 309 aa, Homo sapiens; identical to SEQ ID NO: 778685

SEQ ID NO: 778688 - protein, 249 aa, Homo sapiens
MANSDGSEAMLNRVMTKDNIGVAVVLEVHKELFGAGMKPIHAADKQLLIVANAHMHWDPEYSDVKLIQTMMFVSEVKNILEKASSRPGSPTADPNSIPLVLCADLNSLPDSGVVEYLSNGGVADNHKDFKELRYNECLMNFSCNGKNGSSEGRITHGFQLKSAYENNLMPYTNYTFDFKGVIDYIFYSKTHMNVLGVLGPLDPQWLVENNITGCPHPHIPSDHFSLLTQLELHPPLLPLVNGVHLPNRR

SEQ ID NO: 778689 - protein, 309 aa, Homo sapiens; identical to SEQ ID NO: 778685

SEQ ID NO: 778690 - protein, 243 aa, Homo sapiens
ISRGNSVTIRCQGTLEAQEYRLVKEGSPEPWDTQNPLEPKNKARFSIPSMTEHHAGRYRCYYYSPAGWSEPSDPLELVVTGFYNKPTLSALPSPVVTSGENVTLQCGSRLRFDRFILTEEGDHKLSWTLDSQLTPSGQFQALFPVGPVTPSHRWMLRCYGSRRHILQVWSEPSDLLEIPVSGAADNLSPSQNKSDSGTASHLQDYAVENLIRMGMAGLILVVLGILIFQDWHSQRSPQAAAGR

SEQ ID NO: 778691 - protein, 200 aa, Homo sapiens
ISRGNSVTIRCQGTLEAQEYRLVKEGSPEPWDTQNPLEPKNKARFSIPSMTEHHAGRYRCYYYSPAGWSEPSDPLELVVTGFYNKPTLSALPSPVVTSGENVTLQCGSRLRFDRFILTEEGDHKLSWTLDSQLTPSGQFQALFPVGPVTPSHRWMLRCYGSRRHILQVWSEPSDLLEIPVSGAADNLSPSQNKSDSGTGE

SEQ ID NO: 778692 - protein, 112 aa, Homo sapiens
VQDSVRAGPRQGLGHGKISNRAGARPVTGPESGQGPEQCKARVGPGISGSGPGENQGKFSSREWPGPGQVQGRAMTGPGAALGQGQGHSKVRVRAKARVGTGQEIWHDQGQC

SEQ ID NO: 778693 - protein, 138 aa, Homo sapiens
MLEKWRETEEARGLLTRTQPTASGPPCSHAHSQLLLDRLKGNLARRGGVGRASLETVLWRPGETAFYPQHWGEQASIPAFACRPSSFPLKAYPAAPALRNALLSYQLWERQDRLASGRRGRHCLPSGPGPHRYPQLQD

SEQ ID NO: 778694 - protein, 118 aa, Homo sapiens
ACESSKLPLCISLSLSSSRTQGHTPAGSYSFIPTSLQSAPGCHLLKSEALLLSGAIEEHHSILNSTSYGPKGFRDSMTPPSLTKLSKFPTLHLPAPPGYLCSVELSMSHLFTNLWSKV

SEQ ID NO: 778695 - protein, 92 aa, Homo sapiens
MEERENKVIWESKMKGFETSEEECVYLFSLVTSSSALSTSSSQASPGRFITALVPHIWSLTELLLFENSSECLLHFTLSSPSQWLWLKFTLQ

SEQ ID NO: 778696 - protein, 110 aa, Homo sapiens
PASAARSRGSQPCLPFHTSPQAEGAGSGLGHPRKGLPQCSGGLKGSSSAARVGAEAKGAPRPRRRLERARAARAASMLSPLTTMLRTSLSHHMSGRKEEPLARLCLLPAL

SEQ ID NO: 778697 - protein, 101 aa, Homo sapiens
HKGSCLPRDLRAEGQTRQGKMTADRAEEAASRLQAPGKPPQLYPLHRWRAENGLGQGAALPSPVRPVFSLQPTERENGEVVGGNKAHTTQLTWAGQARAGR

SEQ ID NO: 778698 - protein, 106 aa, Homo sapiens
MDSSGYEDGLGVLFVFVFVFFEIGSRCVIQAGLELLGSRDPPTSASRVAGTTGMSHPTWLVWGFFVGFTFFLSELFEGRIQEAQTICQLWLKIFISFPASTVPNTE

SEQ ID NO: 778699 - protein, 36 aa, Homo sapiens
LHASGMILVKTNPINSGPPPAQNSSHTSIIIMMEPK

SEQ ID NO: 778700 - protein, 43 aa, Homo sapiens
LKEPHTYRGPSAVHGDTGQPRRGKTTLPFENMVVPMYQDKVQG

SEQ ID NO: 778701 - protein, 112 aa, Homo sapiens
TISQFCIILWFTRGEGPQLLLESTWEGHLWTPSLCLPFLPPSSFLEGWCLISEALDISSSSSFRLFRAFGRRAFLLPTLTASCGKMSQHYYLITRVFLQLIKDLPAPDKESG

SEQ ID NO: 778702 - protein, 245 aa, Homo sapiens
SGESREVGSTSCGKELPTVRLLNLLGQPSCGKERQPSCRKELPASGLLRAVLPLNKALLHLAKPPFVRNTSSPWTQDKNSGPAWRTDIQTWSKLDCKGPTSEMDAVCKRGNLWKDVLLQLLKMQHAAQVLLQTTDNSEVNTQSGKPSGGETREHQAEKAGRSFFRELVCLPEKLARHSSIDRFLQLELISLECSESYPSRDLVRNQSMHRFNMGSAQQPVSKLSVKVCRDQQGVGDFSLNPPLEP

SEQ ID NO: 778703 - protein, 70 aa, Homo sapiens
ARSGLGPGQSRRSAFMSAWGGRKSVLCPSPPGMDSGVYGCGDSPGLTQARVSTTGPRISLTWRRPFCDGS

SEQ ID NO: 778704 - protein, 38 aa, Homo sapiens
TFSAFVTLKSKFSLYDLAFAYSFKLILSHSPSYIIPQT

SEQ ID NO: 778705 - protein, 83 aa, Homo sapiens
ALEDPEGAGWVCCAHSGWHWVNPQETCGQGTNGHPLYAHHVFRLSKQFFKVDVSIPILQMRKLRLRYVEEHALTRTANKRQKR

SEQ ID NO: 778706 - protein, 355 aa, Homo sapiens
ETTTKPQATSAPSPAPKQSFLFGTQNTSPSSPAAPAASSASPMFKPIFTAPPKSEKEGLTPPGPSVSATAPSSSSLPTTTSTTAPTFQPVFSSMGPPASVPLPAPFFKQTTTPATAPTTTAPLFTGLASATSAVAPITSASPSTDSASKPAFGFGINSVSSSSVSTTTSTATAASQPFLFGAPQASAASFTPAMGSIFQFGKPPALPTTTTVTTFSQSLPTAVPTATSSSAADFSGFGSTLATSAPATSSQPTLTFSNTSTPTFNIPFGSSAKSPLPSYPGANPQPAFGAAEGQPPGAAKPALTPSFGSSFTFGNSAARPVWTKPDWFRSDRGWQCDPSATWGPAPVGEADRSGR

SEQ ID NO: 778707 - protein, 122 aa, Homo sapiens
DPTPRATQRPELEARGSGGCRAVSFAGPPPPLLKGRGALRACGCSEDGEAETHSEDGPGSPQASVPRALPSPGSPPGSSASPAPRAHFPTRFLESGWETRRQTLPSSALLGPQTPERRSGSP

SEQ ID NO: 778708 - protein, 91 aa, Homo sapiens
DALLQPELGLFSHWEKGCGSEELGCRNFGVYKGRRELSQKSLFAGRREMQPGGTAGPCGRQRPGLLKSASQTHLAASRRPLRAQLFLPAAS

SEQ ID NO: 778709 - protein, 105 aa, Homo sapiens
MELGATQSLSSGVGGLAGRHRGLDGWASHSSVCVSCAQTLCVSSPSHTDSPIGLTCFLFVALMVSSEGGCVGGCMCGVCMCVYACVWRVCACVCVCMCACVCMFV

SEQ ID NO: 778710 - protein, 103 aa, Homo sapiens
WDRGGTLLASSQLLGLRWDALGDLWILCSVEETWEMPFCDLWIPWEKTLSKFGPQEELFIQCLVYLSLFTALKLGIQFQLLSRLVTLEILPCILNLAKSKVNQ

SEQ ID NO: 778711 - protein, 976 aa, Homo sapiens
MEKQKPFALFVPPRSSSSQVSAVKPQTLGGDSTFFKSFNKCTEDDFEFPFAKTNLSKNGENIDSDPALQKVNFLPVLEQVGNSDCHYQEGLKDSDLENSEGLSRVYSKLYKEAEKIKKWKVSTEAELRQKESKLQENRKIIEAQRKAIQELQFGNEKVSLKLEEGIQENKDLIKENNATRHLCNLLKETCARSAEKTKKYEYEREETRQVYMDLNNNIEKMITAFEELRVQAENSRLEMHFKLKEDYEKIQHLEQEYKKEINDKEKQVSLLLIQITEKENKMKDLTFLLEESRDKVNQLEEKTKLQSENLKQSIEKQHHLTKELEDIKVSLQRSVSTQKALEEDLQIATKTICQLTEEKETQMEESNKARAAHSFVVTEFETTVCSLEELLRTEQQRLEKNEDQLKILTMELQKKSSELEEMTKLTNNKEVELEELKKVLGEKETLLYENKQFEKIAEELKGTEQELIGLLQAREKEVHDLEIQLTAITTSEQYYSKEVKDLKTELENEKLKNTELTSHCNKLSLENKELTQETSDMTLELKNQQEDINNNKKQEERMLKQIENLQETETQLRNELEYVREELKQKRDEVKCKLDKSEENCNNLRKQVENKNKYIEELQQENKALKKKGTAESKQLNVYEIKVNKLELELESAKQKFGEITDTYQKEIEDKKISEENLLEEVEKAKVIADEAVKLQKEIDKRCQHKIAEMVALMEKHKHQYDKIIEERDSELGLYKSKEQEQSSLRASLEIELSNLKAELLSVKKQLEIEREEKEKLKREAKENTATLKEKKDKKTQTFLLETPEIYWKLDSKAVPSQTVSRNFTSVDHGISKDKRDYLWTSAKNTLSTPLPKAYTVKTPTKPKLQQRENLNIPIEESKKKRKMAFEFDINSDSSETTDLLSMVSEEETLKTLYRNNNPPASHLCVKTPKKAPSSLTTPGSTLKFGAIRKMREDRWAVIAKMDRKKKLKEAEKLFV

SEQ ID NO: 778712 - protein, 171 aa, Homo sapiens
NKRNEKRNSLNEPRGRMEKLKREAKENTATLKEKKDKKTQTFLLETPEIYWKLDSKAVPSQTVSRNFTSVDHGISKDKRDYLWTSAKNTLSTPLPKSMVSEEETLKTLYRNNNPPASHLCVKTPKKAPSSLTTPGSTLKFGAIRKMREDRWAVIAKMDRKKKLKEAEKLFV

SEQ ID NO: 778713 - protein, 171 aa, Homo sapiens; identical to SEQ ID NO: 778712

SEQ ID NO: 778714 - protein, 869 aa, Homo sapiens
MEKQKPFALFVPPRSSSSQVSAVKPQTLGGDSTFFKSFNKCTEDDFEFPFAKTNLSKNGENIDSDPALQKVNFLPVLEQVGNSDCHYQEGLKDSDLENSEGLSRVYSKLYKEAEKIKKWKVSTEAELRQKESKLQENRKIIEAQRKAIQELQFGNEKVSLKLEEGIQENKDLIKENNATRHLCNLLKETCARSAEKTKKYEYEREETRQVYMDLNNNIEKMITAFEELRVQAENSRLEMHFKLKEDYEKIQHLEQEYKKEINDKEKQVSLLLIQITEKENKMKDLTFLLEESRDKVNQLEEKTKLQSENLKQSIEKQHHLTKELEDIKVSLQRSVSTQKALEEDLQIATKTICQLTEEKETQMEESNKARAAHSFVVTEFETTVCSLEELLRTEQQRLEKNEDQLKILTMELQKKSSELEEMTKLTNNKEVELEELKKVLGEKETLLYENKQFEKIAEELKGTEQELIGLLQAREKEVHDLEIQLTAITTSEQYYSKEVKDLKTELENEKLKNTELTSHCNKLSLENKELTQETSDMTLELKNQQEDINNNKKQEERMLKQIENLQETETQLRNELEYVREELKQKRDEVKCKLDKSEENCNNLRKQVENKNKYIEELQQENKALKKKGTAESKQLNVYEIKVNKLELELESAKQKFGEITDTYQKEIEDKKISEENLLEEVEKAKVIADEAVKLQKEIDKRCQHKIAEMVALMEKHKHQYDKIIEERDSELGLYKSKEQEQSSLRASLEIELSNLKAELLSVKKQLEIEREEKEKLKREAKENTATLKEKKDKSMVSEEETLKTLYRNNNPPASHLCVKTPKKAPSSLTTPGSTLKFGAIRKMREDRWAVIAKMDRKKKLKEAEKLFV

SEQ ID NO: 778715 - protein, 869 aa, Homo sapiens; identical to SEQ ID NO: 778714

SEQ ID NO: 778716 - protein, 173 aa, Homo sapiens
SFNISQYSFPRPSVPFSPQEKLKREAKENTATLKEKKDKKTQTFLLETPEIYWKLDSKAVPSQTVSRNFTSVDHGISKDKRDYLWTSAKNTLSTPLPKSMVSEEETLKTLYRNNNPPASHLCVKTPKKAPSSLTTPGSTLKFGAIRKMREDRWAVIAKMDRKKKLKEAEKLFV

SEQ ID NO: 778717 - protein, 269 aa, Homo sapiens
MEKQKPFALFVPPRSSSSQVSAVKPQTLGGDSTFFKSFNKCTEDDFEFPFAKTNLSKNGENIDSDPALQKVNFLPVLEQVGNSDCHYQEGLKDSDLENSEGLSRVYSKLYKEAEKIKKWKVSTEAELRQKESKLQENRKIIEAQRKAIQELQFGNEKVSLKLEEGIQENKDLIKENNATRHLCNLLKETCARSAEKTKKYEYEREETRQVYMDLNNNIEKMITAFEELRVQAENSRLEMHFKLKEDYEKIQHLEQEYKKEINDKEKQVF

SEQ ID NO: 778718 - protein, 204 aa, Homo sapiens
MEKQKPFALFVPPRSSSSQVSAVKPQTLGGDSTFFKSFNKCTEDDFEFPFAKTNLSKNGENIDSDPALQKVNFLPVLEQVGNSDCHYQEGLKDSDLENSEGLSRVYSKLYKEAEKIKKWKVSTEAELRQKESKLQENRKIIEAQRKAIQELQFGNEKVSLKLEEGIQENKDLIKENNATRHLCNLLKETCARSAEKTKKLPAMS

SEQ ID NO: 778719 - protein, 171 aa, Homo sapiens; identical to SEQ ID NO: 778712

SEQ ID NO: 778720 - protein, 976 aa, Homo sapiens; identical to SEQ ID NO: 778711

SEQ ID NO: 778721 - protein, 112 aa, Homo sapiens
LYLIIPCLSLPFLFAPQEKLKREAKENTATLKEKKDKSMVSEEETLKTLYRNNNPPASHLCVKTPKKAPSSLTTPGSTLKFGAIRKMREDRWAVIAKMDRKKKLKEAEKLFV

SEQ ID NO: 778722 - protein, 211 aa, Homo sapiens
SRVRPEQRGRARRAWPEPPLPGVSSAEPRAPRAGISARSPPLPAPSLSPACKVFCLSSELAEAATFHSRRRGPGSSGRAGQRSARRAAPRCAPPPTMSEDSRGDSRAESAKDLEKQLRLRVCVLSELQKTERDYVGTLEFLVSVSVPGRRRGTSRAARGAGPGVAAGRTRGIVCAGTRDGSGHHRRGNPRVDSAFAGAVTPAGIRWCPETH

SEQ ID NO: 778723 - protein, 103 aa, Homo sapiens [sequence omitted]

SEQ ID NO: 778724 - protein, 177 aa, Homo sapiens
MSADFCSSCMTRPLFSVTSWVRRRFCSFSIRIVCCCHPGKEVNVRAGQRGPEEDVGRARLAPAAASNSPTHRATSCTLGSSRPSGWGLPAGPKSALALLWPRRHWRSCTGCSRCWYQSRPRHHLQTLQQHHLLLLQLLHLLQQAAVHAAGDGEPPTSLRARGASRTSRVHLQGPAGQ

SEQ ID NO: 778725 - protein, 179 aa, Homo sapiens
MTTDERKLFNHLKSPHLKYWVPFIWFGNLATKARNEGRIRDSVDLQSLMTEMNRYRSWCSLLFGYDWVGIPLVYTQVAEQLINPFGEDDDDFETNWCIDRNLQVSLLAVDEMHMSLPKMKKDIYWDDSAARPPYTLAAADYCIPSFLGSTVQMGRSRFKPVPWAEVSNPIRMVGALFQG

SEQ ID NO: 778726 - protein, 130 aa, Homo sapiens
MLNKFQYTFVLGFYVTLVVNRWWNQFVNLPWPDRLMFLISSSVHGSDEHGRLLRRTLMRYVNLTSLLIFRSVSTAVYKRFPTMDHVVEAESHYVAYAGLELLASSNLPTIASQRAGISGVSHHTWPALES

SEQ ID NO: 778727 - protein, 241 aa, Homo sapiens
MFLISSSVHGSDEHGRLLRRTLMRYVNLTSLLIFRSVSTAVYKRFPTMDHVVEAGFMTTDERKLFNHLKSPHLKYWVPFIWFGNLATKARNEGRIRDSVDLQSLMTEMNRYRSWCSLLFGYDWVGIPLVYTQVAEQLINPFGEDDDDFETNWCIDRNLQVSLLAVDEMHMSLPKMKKDIYWDDSAARPPYTLAAADYCIPSFLGSTVQMGKQMPKNEWKMEDIKIPLPQPQFQCAKSDPGG

SEQ ID NO: 778728 - protein, 145 aa, Homo sapiens
QNQKIWIIIYFCPPTSKKAENSAKSISVTNVSAVRNCFIISCYSTGFYVTLVVNRWWNQFVNLPWPDRLMFLISSSVHGSDEHGRLLRRTLMRYVNLTSLLIFRSVSTAVYKRFPTMDHVVEAGTMNGFSFHGLFSAETGPPEFL

SEQ ID NO: 778729 - protein, 141 aa, Homo sapiens
QNQKIWIIIYFCPPTSKKAENSAKSISVTNVSAVRNCFIISCYSTGFYVTLVVNRWWNQFVNLPWPDRLMFLISSSVHGSDEHGRLLRRTLMRYVNLTSLLIFRSVSTAVYKRFPTMDHVVEAERTGMKPILPSSFEMQSF

SEQ ID NO: 778730 - protein, 72 aa, Homo sapiens
MFLISSSVHGSDEHGRLLRRTLMRYVNLTSLLIFRSVSTAVYKRFPTMDHVVEAERTGMKPILPSSFEMQSF

SEQ ID NO: 778731 - protein, 220 aa, Homo sapiens
SRKVRAGIMAGARRRRRRLAELTVDEFLASGFDSKSEYSPEAETREAREAARSPDEPGGSPSASRRKGCASEHKDQLSRLKDRDPEFYKFLQENDQSQLNFSDSDSSEEEEEPFNSLPDVLEEASEDEDGAEEGEDGDRVPRGLKGKNCVPVTLAMVERWKQAAKQHLTPKLFHEVVQAFGAAVATTQGDQEIAEANKFQVRDSAVFNALVTFCIRDLIG

SEQ ID NO: 778732 - protein, 103 aa, Homo sapiens
RLRGGHHCVLGCQGKGGVRAVSRRALMTHPARKFCMLLWPQTPLLLSVPVRLLSSRWPGTAGKPSPARAWAAFSWWLEFPHSKTIWGILLKCLCKANVVAVAG

SEQ ID NO: 778733 - protein, 74 aa, Homo sapiens
PGQGWGGRGPAWPSGRAWTLGPEICCFCFLGSSPFPPPREGGKRMTVVVLFKKEKEAHAVSKPKAELLTSNISS

SEQ ID NO: 778734 - protein, 100 aa, Homo sapiens
MACVLIPISTCHVTLRKFLNYLSFYTLIYKMGLMLILTSKGCCIKLINICEVSRKSPGTLNTNFCCNLNRCPWSHFVLLLAIFLPQEHLRTHPPIPASLP

SEQ ID NO: 778735 - protein, 236 aa, Homo sapiens
DVYSITFLVDWHLCGQRNNTMFSKRLEKIPQVPLLFPFIFIILTNYSKMEGAVESQPSFFKTSQDIVTCTWVENCYSSFSRRPLEQMFCKHQSKNIISWTGMVAHTCNPSTLGGQGLCDFAKMHHQQRMAALGTDKELSDLLDFSAMFSPPVSSGKQWTNFFGKWTFYWLKVEDRSSSGSWGNGGHPSPSRNYGDGTPYDHMTSRDLGSHDDLSPPLSIPEYKVKPERGHTHLMGE

SEQ ID NO: 778736 - protein, 80 aa, Homo sapiens
LERTGGEQLGGRGGTPRAPVFEPSSGSGSHVRQDTDEVVLAAGLGGEPRKAGSTIPSRKTPNLPYVLLEGWQGLGDNGRL

SEQ ID NO: 778737 - protein, 126 aa, Homo sapiens
ERRVRETVRRDKTLLKEKRKRARKARLLVSSLMFLPRASMNPWHVLAPDILGTEPSSSPWIRPSTTHCPFLPLLGQKDSLVVPRCTRCFHAPGPLHMPFFQSGMSPFSPSFKLLSILWAAWADAGG

SEQ ID NO: 778738 - protein, 71 aa, Homo sapiens
SCPCSFWCLKILTIVVEPCICGKKLPVSGEDTEDIAGLFSENEELGKMRSSLIENTETYMSMRRPFAEYPV

SEQ ID NO: 778739 - protein, 49 aa, Homo sapiens
MLTKCYRNTAMPCHLHIACGCFHITMAGCRGTTETLGPKAKQMDYLTLN

SEQ ID NO: 778740 - protein, 512 aa, Homo sapiens
RCLTLAKREGDPISGESVRGEGEPAGQALRITHPVTLPCPPPPSEPLATMATSKLPVVPGEEENTILMAKERLEALRTAFESGDLPQAASHLQELLASTESIRLEVGVTGESGAGKSSLINALRGLEAEDPGAALTGVMETTMQPSPYPHPQFPDVTLWDLPGAGSPGCPADKYLKQVDFSRYDFFLLVSPRRCGAVETRLAAEILCQGKKFYFVRTKVDEDLAATRTQRPSGFREAAVLQEIRDHCAERLREAGVADPRIFLVSNLSPARYDFPTLVSTWEHDLPSHRRHAGLLSLPDISLEALQKKKAMLQEQVLKTALVLGVIQALPVPGLAAAYDDALLIHSLRGYHRSFGLDDDSLAKLAEQVGKQAGDLRSVIRSPLANEVSPETVLRLYSQSSDGAMRVARAFERGIPVFGTLVAGGISFGAVYTMLQGCLNEMAEDAQRVRIKALEDDEPQPEVSLEVASDNGVEKGGSGEGGGEEAPLSTCRKLGLLLKYILDSWKKHDSEEK

SEQ ID NO: 778741 - protein, 162 aa, Homo sapiens
RCLTLAKREGDPISGESVRGEGEPAGQALRITHPVTLPCPPPPSEPLATMATSKLPVVPGEEENTILMAKERLEALRTAFESGDLPQAASHLQELLASTESIRLEVGVTGESGAGKSSLINALRGLEAEDPGAALTGVMETTMQPPPCLTHKLSLNKIQITN

SEQ ID NO: 778742 - protein, 500 aa, Homo sapiens
MPRPRRCEWLPSPLQALRITHPVTLPCPPPPSEPLATMATSKLPVVPGEEENTILMAKERLEALRTAFESGDLPQAASHLQELLASTESIRLEVGVTGESGAGKSSLINALRGLEAEDPGAALTGVMETTMQPSPYPHPQFPDVTLWDLPGAGSPGCPADKYLKQVDFSRYDFFLLVSPRRCGAVETRLAAEILCQGKKFYFVRTKVDEDLAATRTQRPSGFREAAVLQEIRDHCAERLREAGVADPRIFLVSNLSPARYDFPTLVSTWEHDLPSHRRHAGLLSLPDISLEALQKKKAMLQEQVLKTALVLGVIQALPVPGLAAAYDDALLIHSLRGYHRSFGLDDDSLAKLAEQVGKQAGDLRSVIRSPLANEVSPETVLRLYSQSSDGAMRVARAFERGIPVFGTLVAGGISFGAVYTMLQGCLNEMAEDAQRVRIKALEDDEPQPEVSLEVASDNGVEKGGSGEGGGEEAPLSTCRKLGLLLKYILDSWKKHDSEEK

SEQ ID NO: 778743 - protein, 72 aa, Homo sapiens
NWVCEVLFSSGGKFILSCADDKTLHVWDYKNRQCMKTLNAYEHFVTSLDFHKTAPYVVTGSVAQTVKVWECR

SEQ ID NO: 778744 - protein, 163 aa, Homo sapiens
PAVFWNKCQFFLGASVFQSRSWLFSSKAGVSPGSTACWRRRILFRGSTGRFMEWPVSHSHCAGWQLFRGGAALSRFPWFSVSAVPVPAFVAVFLSQSSLCFFDDNAIHFSKTGYVWNWQFFFVRVLGFAEPVVPGYWTAVCSVLAMLHPVPLGAPCWSFETAF

SEQ ID NO: 778745 - protein, 68 aa, Homo sapiens
TTQPSSAGLSLPLSPHVASQAPPVFLLCHSWAQEPPQTATGHTRPLGSICPNHRMFQSNLCCSRGSGT

SEQ ID NO: 778746 - protein, 241 aa, Homo sapiens
MRGLGAARSGVADVDSWTLLGASALCRLVDAFGENLCSPQLQGQHAFLASSDQGGCSWVLHQNSSSGLSSSGRLTIIPAKTQVRVLTVLPSFLRVSVGCAESGPRCVRGCVHCHRSLYTSRRGPRAELGPRGPSRRAAMDPGLSCDHEGYPDELAVDPGLSRDHEEPSRNCDCFLNVEASAERGPWRTLAAENDAHSAAWPRLPIPSANSQDRIDGESPGETKLTLVTSPTGGSGTGPGPV

SEQ ID NO: 778747 - protein, 114 aa, Homo sapiens
RSRGADSLPSGVIAGGSAAFQGLFVERTEGNPEGGRQGSWPQVACVPCHQEHKAVGAQGSGQELPISELVLLGLEATDSGLAKAARAGKGMVAFGAGVEEGGQLVGPVSLEPVR

SEQ ID NO: 778748 - protein, 81 aa, Homo sapiens
PDVGGGWVLDVAEKSRGLGVVRAACRLRRCCQVAPVLHLTLWGCAACVSQCCVLKRQTGGKVEGSTRGVHCPLPAHGVPQT

SEQ ID NO: 778749 - protein, 55 aa, Homo sapiens
VGEQTRSEPVCFGARVKESAKQLSQFHVDMFIHIIFTALTSNKKRPESTWMCTEP

SEQ ID NO: 778750 - protein, 121 aa, Homo sapiens
MFGIQESIQRSGSSMKEEPLGSGMNAVRTWMQGAGVLDANTAAQSGVGLARAHFEKQPPSNLRKSNFFHFVLALYDRQGQPVEIERTAFVGFVEKEKEANSEKTNNGIHYRLQLLYSNGEA

SEQ ID NO: 778751 - protein, 110 aa, Homo sapiens
WSPYLLKPSSPTGSSWCPPCLHSGLQFPIVRIPFSSWQDSLLSPSRFSLSSMFFSVSGGCVLPLPCLAAGSRQVPPGLFVSSMTFQKHPATSLSYRDKCPFQSTDWSMPM

SEQ ID NO: 778752 - protein, 158 aa, Homo sapiens
MVTVHPETGSASSPITQHMSSGIMCAKNLYREGFEGMSDLKCVQDAKGGSFYRDHCPVLGEQNGNRNPGGLQIGDLVNIDLDLEIVQSLQHGHGGWTDGMFETLTTTGTVCGIDEDHDIVVQYPSGNRWTFNPAVLTKANIVRSGDAAQGAQRGTSQL

SEQ ID NO: 778753 - protein, 83 aa, Homo sapiens
NRCPRPTRRGSATLGLTWLGSATLGFPRLPLGLSAALRAPQPFWPSRGSQFSWYVLPAGISGLLEDPRPGEGMSQGHARSRPQ

SEQ ID NO: 778754 - protein, 104 aa, Homo sapiens
LEPGRWEVCSELKSHHCTPAWATEQDLVSKQKGKEKFLEFVKFFPVSHCLPCFLYQKCRPLISDGSYSKFSHYVGPMHMSSKLVSSFSFLLQCHFLIEPFSDLP

SEQ ID NO: 778755 - protein, 194 aa, Homo sapiens
RGYCGDRQSSLGAMLEPGATPQRYLGLVLGEPRRVVAALPESMRLDSNPHGFPWEMVICAAVAAFFAVLLFLWRSFRSVRSRLYVGREKKLAIMLSGLIEEKCKLLEKFSLVQKEYEDYEVASSLEDASFEKAAAEARSLEATCEKLNRSNSELEHEILCLEKELKEEKSKHSQQNELMADISKTIQPLADESE

SEQ ID NO: 778756 - protein, 174 aa, Homo sapiens
SPPPLSLPSSRGGVAAPAGGRMVATWGGRQLLPQGSGPPLTPGSPAPSVAQASRPAPPSPRKTSPGPPQPSASPSLPFSPLLAGCSRLLPVLAPSLSSVHRCPLGARASRLPWKLEAGTSSSGDRPLCLHSGQRGACLTDEQGSTLSPRQRRGPGSSLAQPLTEAGLETGALEK

SEQ ID NO: 778757 - protein, 112 aa, Homo sapiens
EPGKGLGLGQGQEQGRAGPGPWQSQGRSLTGPGSRPGPGQQQGQGLDKGRARDMAGPGLGPGPGHSEGRAKAKAGSGQVQGRSRERPAPSGAKAQPAQGKAGQWHHWAMTGQ

SEQ ID NO: 778758 - protein, 126 aa, Homo sapiens [sequence omitted]

SEQ ID NO: 778759 - protein, 69 aa, Homo sapiens
SQKQPPDNFAYISLARTSPRGCRWLENLIFILGGHVQLKVLLLFIEFGQEPAVCAMGGRRDQQSPLTWN

SEQ ID NO: 778760 - protein, 40 aa, Homo sapiens
MIWNTAAKARRPPITLRKTSIWGTHRTKKERMKQITRMLT

SEQ ID NO: 778761 - protein, 115 aa, Homo sapiens
PIIISQNTHFHLYLPNTIFCISKPLKLQSRSKYQWVYMKLLCHQKFTMERCYFWYPSCKTMMPVFFFLRQSLILSPRLESDGVISAHFNTHFTGSSNSPVSAPRVVGITGMCHDA

SEQ ID NO: 778762 - protein, 35 aa, Homo sapiens
MARKTAEERTHKHNRLITESTLLLLENSSPSEPTI

SEQ ID NO: 778763 - protein, 50 aa, Homo sapiens
RVGKIAGMRSEARWQPPPAGPSSWLEPKIPEAGSPTQGAQAPQARLLQPR

SEQ ID NO: 778764 - protein, 212 aa, Homo sapiens
MTLVILLVELGGSQARFPLFWRNFPITFACYAALLCLSASIIYPTTYLQFLSHGRSRDHAIAAIVFSGIACVAYATEVTWTRARPGEITDYMASELGLLKVLETFVACLIFVFINSPYVYHNRPALEWWVAVYALCFVLAALTILLSLGHCTNMLPIRFPSFLLGLALLSVLLYATALVLWPLYQFNEKYGVQPWQTRDVSCSDRNPYLQPQ

SEQ ID NO: 778765 - protein, 72 aa, Homo sapiens
SGTAVTNSHEGGSAFSNMSLSMGAPRHKSRSASRLVVAEVVFQHQPSSPAHQSWHSTQVNSKNPTDGVRSRI

SEQ ID NO: 778766 - protein, 157 aa, Homo sapiens
MGDIFLCKKVESPKKNLRESKQREEDDEDPDLIYVGVEHVHRDAEVLFVGMISNSKPVVSNILNRVTPGSKSRRKKGHFRQYPAHVSQPANHVTSMAKAIMPVSLSEGRSTDSPVTMKSSSEPGYKMSSPQVVSPNYSDSLPPGTQCLVGAMVSGGG

SEQ ID NO: 778767 - protein, 216 aa, Homo sapiens
TRKAQEEMISELRQQKFYLETQAGKLEAQNRKLEEQLEKISHQDHSDKNRLLELETRLREVSLEHEEQKLELKRQLTELQLSLQERESQLTALQAARAALESQLRQAKTELEETTAEAEEEIQALTAHRDEIQRKFDALRNSCTVITDLEEQLNQLTEDNAELNNQNFYLSKQLDEASGANDEIVQLRSEVDHLRREITEREMQLTSQKQVRRVNK

SEQ ID NO: 778768 - protein, 71 aa, Homo sapiens
LAWRGWTGFETRLWALLAPGQRFPSRLPIEITWEVNITYPGPQPRLIQGSVRSARILKNSQVTLTARDGNP

SEQ ID NO: 778769 - protein, 129 aa, Homo sapiens [sequence omitted]

SEQ ID NO: 778770 - protein, 743 aa, Homo sapiens
MVKSAYAVKGSLLGIFKMGLCKVLENTCHATMPLWQEDGLEASIEVFHLKVLYFGSTRHEFIKWWSGNIVCLCKPARFEEIENTANKELRHNGLCTKLKDLGFTVSLLLAARLSSLPGRKSPVNGLNVDRLNFVYRVGGHRREDTCKYLSPKYLFVNHSLLSFFFFPLEIQLGLLCKTHFFLLEGQIIVEKTQQIPHTILPQKDSKPLSIMENKFLYTFSNVLTCNILMLDLIFTSCLIIHLHLDRKSVFSSVIFSLKMSVKSKGHLLPFEKYSFSLNPLDISSLHICYFAITFSFMDYVVSRMVPCGSKSSQEMNGVKIPKLEVVLVFISYRGKIILCPYAEIHEADFFLYTRSDELEMTAWMAALRLAIYDSQEKVCTNLGCVSWVRGWAVSCISLSFFRSLFQDVTAILHPPTFLAEKVAWPWVCGNNFCPAPSSSFPYILPETDGYSIPVHFPNKEVQLLAWIEKPRQCDDVLIKINIYLQAFPLSLRGVLVTKEVQVAAVFALGEFSEARVIPQPVNGDKLQAADWAAVVGREECVIPCQRLMGIVSVVVIFPILCSHFDRGCGLSQTWILFPRTPVASWIKCKRSFLGTPIPNSTMSVRRILSTFLTYAFPWLSLWSPNGYSLCCMLFSCKALKILISFLFLSSIEIYLEIYFKSALKSLCRLYREFCVIIIREVIKVQVYFNIYIENTINQMHINTPTQYPSLLSLHDRSSCESKPGKTWPLKLYIICTQSLNDLH

SEQ ID NO: 778771 - protein, 184 aa, Homo sapiens
VPKAACGPAITPWVLSHLAVGVRWWKGTLREAPGGELSLGRGRPRGQCGVDGARKNPERSQATRHRFRRIVRSHLSRRLRSRRLLFPGAASLEALPGGEAPTRAPYVPPSAALRTTRMSRCLGLEPVTPPLRTGLQSNKYFAGQRCRPRVLRREVLSLEPTKTCPQDSLSLPDCVPPDGAFRLF

SEQ ID NO: 778772 - protein, 135 aa, Homo sapiens
MAGQRAARQACAFRQTLTKTSQTNEHGVRNMAESRPQIPDMAVGERRPGLHLRRARASSELLCGQGGLIHPCIPTPSPVQKHLLNEHMNDNMNEITVYCPIPGVYEKQRERNSKILLHRSSLPCSTPGLTTALGP

SEQ ID NO: 778773 - protein, 34 aa, Homo sapiens
GVCHIFASFNDTFVHVTDLSGKEIICRVTGRMKV

SEQ ID NO: 778774 - protein, 187 aa, Homo sapiens
MDSLLMNRRKFLYQFKNVRWAKGRRETYLCYVVKRRDSATSFSLDFGYLRNKNGCHVELLFLRYISDWDLDPGRCYRVTWFTSWSPCYDCARHVADFLRGNPNLSLRIFTARLYFCEDRKAEPEGLRRLHRAGVQIAIMTFKGAKGPSAQAQCSSPHSGLRCGMNELVGKLEGKKWAGILVHLWSRN

SEQ ID NO: 778775 - protein, 145 aa, Homo sapiens
MDSLLMNRRKFLYQFKNVRWAKGRRETYLCYVVKRRDSATSFSLDFGYLRNKNGCHVELLFLRYISDWDLDPGRCYRVTWFTSWSPCYDCARHVADFLRGNPNLSLRIFTARLYFCEDRKAEPEGLRRLHRAGVQIAIMTFKAPV

SEQ ID NO: 778776 - protein, 198 aa, Homo sapiens [sequence omitted]

SEQ ID NO: 778777 - protein, 145 aa, Homo sapiens; identical to SEQ ID NO: 778775

SEQ ID NO: 778778 - protein, 97 aa, Homo sapiens
MSLSVNHEKYDDKRSRSSAMTSCNIICLEHPCVKVIHDNFVYRGRTHDQQSMPSSGTQKTVDGPSGETVGVMGGGSPEHHPCLYWAAVLWAGSFPEL

SEQ ID NO: 778779 - protein, 230 aa, Homo sapiens
MSGALDVLQMKEEDVLKFLAAGTHLGSTNLDFQMEQYIYKRKSDGVYIINLKRTWEKLLLAACAVVAIENPAHVSVKSSRNTGQRAVLKFAAATGATPIAGRFTPGTFTNEIQAAFWEPRLLVVTDPRADHQPLTEASYVNLPTIALCNTDSPLCCVDIAIPCNSKGAHSVGLMWWMLAWEVLRMHGTISREHPWEVMPDLYFYRDPGEIEKEEQAAAEKAVTEEEFQGE

SEQ ID NO: 778780 - protein, 175 aa, Homo sapiens
RPAEEGEGARSARCSRVLSRRSRDRPVCARGAGSRGTDGRARASARGVRVRVGGPGRREVRAGGPRGSRTDTSAHTPGGAFEAALPRPDGERHCLPAQRSLAPRLPPRRLLLLGTASPSAAPGRAGGGGGGGGTRGAALCAARLGAAAQPPDRGPGARCTFRPHEEERRLKDCEP

SEQ ID NO: 778781 - protein, 101 aa, Homo sapiens
KKQPTLIPSSTVQRPQALQETELVLYKHWKLPPGGDSCPQYLPKPQAGPCVQVTRRGLGQGVWPVEPLCHLGGHEQLVVVSRVGRIGFPVLGDSSSPCLLC

SEQ ID NO: 778782 - protein, 138 aa, Homo sapiens
SFPPGNTTRLHFPATLQLGETHETSPCQWNVNGSASNFLAHENSSIFSIFFFSFFVFFRRSLALVAEAGVQWRDLGSLQPPPPGFKQFSYLSLPSSWDYRHVPQCLANFVFLVETGFLHVCQAGLKLPTSGNQPASAS

SEQ ID NO: 778783 - protein, 131 aa, Homo sapiens [sequence omitted]

SEQ ID NO: 778784 - protein, 106 aa, Homo sapiens
MDHTQRYVQTDVQTLRHMHTAHVLADGHPCIQQGTHHPLAHSGVRHILNILRHACHAGHTLQHTDRIPTHAQLASYDAHTLQTNMHRFSCLSHDSQMVGFSQRAAI

SEQ ID NO: 778785 - protein, 122 aa, Homo sapiens
ISQTSGSDRGGRLPGAPRPTCRLPRPSPAHSCQAPDRSPGGTRSERPRSPAAWSPARCSGWPSQTRRRKPPPTKARAGRRWRRLWRPRQRWPQLNIFFSKAYHSFSFAAAISSIIICCGWVK

SEQ ID NO: 778786 - protein, 107 aa, Homo sapiens
VTLRITSGRFGSQPDPVRHSISSSSVHIELPRAKMNMTQSPLLSGNSVVGLRGHVSQLQTEFWGGKCCRGGRQLVEGRGVTTEPPRSLGRLHGAGEKPAGVEGQGGG

SEQ ID NO: 778787 - protein, 110 aa, Homo sapiens
VTCLVRLLAGSHTMMDGPWRLERLTQWLLLLSAITLILDQLAAAVMDSVTMDMCVSVLWELSRGTSLRDGNRCWWPGKYPHYSTSGGSLEAGSEFAKWKRHRGTRWISMG

SEQ ID NO: 778788 - protein, 494 aa, Homo sapiens
SFSSTWGRRMAAAVADEAVARDVQRLLVQFQDEGGQLLGSPFDVPVDITPDRLQLVCNALLAQEDPLPLAFFVHDAEIVSSLGKTLESQAVETEKVLDIIYQPQAIFRVRAVTRCTSSLEGHSEAVISVAFSPTGKYLASGSGDTTVRFWDLSTETPHFTCKGHRHWVLSISWSPDGKKLASGCKNGQILLWDPSTGKQVGRTLAGHSKWITGLSWEPLHANPECRYVASSSKDGSVRIWDTTAGRCERILTGHTQSVTCLRWGGDGLLYSASQDRTIKVWRAHDGVLCRTLQGHGHWVNTMALSTDYALRTGAFEPAEASVNPQDLQGSLQELKERALSRYNLVRGQGPERLVSGSDDFTLFLWSPAEDKKPLTRMTGHQALINQVLFSPDSRIVASASFDKSIKLWDGRTGKYLASLRGHVAAVYQIAWSADSRLLVSGSSDSTLKVWDVKAQKLAMDLPGHADEVYAVDWSPDGQRVASGGKDKCLRIWRR

SEQ ID NO: 778789 - protein, 333 aa, Homo sapiens
DRPARKSDEAAAAVSDEAVARDVQRLLVQFQDEGGQLLGSPFDVPVDITPDRLQLVCNALLAQEDPLPLAFFVHDAEIVSSLGKTLESQAVETEKVLDIIYQPQAIFRVRAVTRCTSSLEGHSEAVISVAFSPTGKYLASGSGDTTVRFWDLSTETPHFTCKGHRHWVLSISWSPDGKKLASGCKNGQILLWDPSTGKQVGRTLAGHSKWITGLSWEPLHANPECRYVASSSKDGSVRIWDTTAGRCERILTGHTQSVTCLRWEDGPNLAPDGHKLDQTGGDWSRPGTGPDDPAATGRYQQAQGSRNRAEGGTPGRKRRQRLKQRNPAPRANS

SEQ ID NO: 778790 - protein, 494 aa, Homo sapiens; identical to SEQ ID NO: 778788

SEQ ID NO: 778791 - protein, 540 aa, Homo sapiens
SLSPPRGDAGWRQQWRWVCVDGGGGRRRGALGPGSLRPERGEVGPFWAGDQTDSRPTCSLQDEAVARDVQRLLVQFQDEGGQLLGSPFDVPVDITPDRLQLVCNALLAQEDPLPLAFFVHDAEIVSSLGKTLESQAVETEKVLDIIYQPQAIFRVRAVTRCTSSLEGHSEAVISVAFSPTGKYLASGSGDTTVRFWDLSTETPHFTCKGHRHWVLSISWSPDGKKLASGCKNGQILLWDPSTGKQVGRTLAGHSKWITGLSWEPLHANPECRYVASSSKDGSVRIWDTTAGRCERILTGHTQSVTCLRWGGDGLLYSASQDRTIKVWRAHDGVLCRTLQGHGHWVNTMALSTDYALRTGAFEPAEASVNPQDLQGSLQELKERALSRYNLVRGQGPERLVSGSDDFTLFLWSPAEDKKPLTRMTGHQALINQVLFSPDSRIVASASFDKSIKLWDGRTGKYLASLRGHVAAVYQIAWSADSRLLVSGSSDSTLKVWDVKAQKLAMDLPGHADEVYAVDWSPDGQRVASGGKDKCLRIWRR

SEQ ID NO: 778792 - protein, 504 aa, Homo sapiens
SFSSTWGRRMAAAVADEAVARDVQRLLVQFQDEGGQLLGSPFDVPVDITPDRLQLVCNALLAQEDPLPLAFFVHDAEIVSSLGKTLESQAVETEKVLDIIYQPQAIFRVRAVTRCTSSLEGHSEAVISVAFSPTGKYRTAADSWRGYLASGSGDTTVRFWDLSTETPHFTCKGHRHWVLSISWSPDGKKLASGCKNGQILLWDPSTGKQVGRTLAGHSKWITGLSWEPLHANPECRYVASSSKDGSVRIWDTTAGRCERILTGHTQSVTCLRWGGDGLLYSASQDRTIKVWRAHDGVLCRTLQGHGHWVNTMALSTDYALRTGAFEPAEASVNPQDLQGSLQELKERALSRYNLVRGQGPERLVSGSDDFTLFLWSPAEDKKPLTRMTGHQALINQVLFSPDSRIVASASFDKSIKLWDGRTGKYLASLRGHVAAVYQIAWSADSRLLVSGSSDSTLKVWDVKAQKLAMDLPGHADEVYAVDWSPDGQRVASGGKDKCLRIWRR

SEQ ID NO: 778793 - protein, 276 aa, Homo sapiens [sequence omitted]

SEQ ID NO: 778794 - protein, 262 aa, Homo sapiens
MRAGSCWVPRSTCPWTSPRTGCSSCATRYWPRYLASGSGDTTVRFWDLSTETPHFTCKGHRHWVLSISWSPDGKKLASGCKNGQILLWDPSTGKQVGRTLAGHSKWITGLSWEPLHANPECRYVASSSKDGSVRIWDTTAGRCERILTGHTQSVTCLRWGGDGLLYSASQDRTIKVWRAHDGVLCRTLQGHGHWVNTMALSTDYALRTGAFEPAEASVNPQDLQGSLQELNERLLNRYNSCGQVQKAVSGRDYFSWGPQEKP

SEQ ID NO: 778795 - protein, 74 aa, Homo sapiens
PLVSELRPGLDMKVWQQTVRTPGENPDSCANPTVSGSTLDAQTQQTARRQVQDIRFGKNGSRGGGGGGGHARRA

SEQ ID NO: 778796 - protein, 87 aa, Homo sapiens
  misc_feature (24)..(24): Xaa can be any naturally occurring amino acid
GFSSPSTQSIKPWPLGGSGTPPEXRTITPSAPRRPGGLSGQPLWSVKEIEVHWKQQGPNSYSQPFSWNQQNMNPAGEGRTSYTRRPG

SEQ ID NO: 778797 - protein, 68 aa, Homo sapiens
SEALAANRLPKQSQPVYGSIDWEPSGSPRELVPSVPSNEQLTSSMGDSGKSQALSGGLATAQVPQGDV

SEQ ID NO: 778798 - protein, 87 aa, Homo sapiens
RGVSCVGLCVQGCVCIAVCVQGCVRAGVCACAHLFMFLCTCLHICVYRGVYRCVYVCMSVCASVCMSVCVCVCVRVGHAGMYVCMQV

SEQ ID NO: 778799 - protein, 87 aa, Homo sapiens; identical to SEQ ID NO: 778798

SEQ ID NO: 778800 - protein, 325 aa, Homo sapiens
MAQYKGTMREAGRAMHLLKKRERQREQMEVLKQRIAEETILKSQVDKRFSAHYDAVEAELKSSTVGLVTLNDMKARQEALVRERERQLAKRQHLEEQRLQQERQREQEQRRERKRKISCLSFALDDLDDQADAAEARRAGNLGKNPDVDTSFLPDRDREEEENRLREELRQEWEAQREKVKDEEMEVTFSYWDGSGHRRTVRVRKGNTVQQFLKKALQGLRKDFLELRSAGVEQLMFIKEDLILPHYHTFYDFIIARARGKSGPLFSFDVHDDVRLLSDATMEKDESHAGKVVLRSWYEKNKHIFPASRWEAYDPEKKWDKYTIR

SEQ ID NO: 778801 - protein, 325 aa, Homo sapiens; identical to SEQ ID NO: 778800

SEQ ID NO: 778802 - protein, 73 aa, Homo sapiens
LSGSPGSSHFPVVSAHILLRIFPPDTCTPGFALTHAPLLPRESFAFISGGVRFPCFLWHPVETRGTLALCGYS

SEQ ID NO: 778803 - protein, 71 aa, Homo sapiens
EATVPRKKGMEEQRVQFTLWLHFSPHGICQFESGRQEAKKLKGSGQPLKTGEIKTGIQKYRREALVNTPNS

SEQ ID NO: 778804 - protein, 194 aa, Homo sapiens
MSHPHAVNEIALSLNNKNPRTKALVLELLAAVCLVRGGHEIILAAFDNFKEVCKELHRFEKLMEYFRNEDSNIDFMVACMQFINIVVHSVEDMNFRVHLQYEFTKLGLEEFLQKSRHTESEKLQVQIQAYLDNVFDVGGLLEDAETKNVALEKVEELEEHVSHLTEKLLDLENENMMRVAELEKQLLQREKELE

SEQ ID NO: 778805 - protein, 112 aa, Homo sapiens
QPFPGRSSLFTLPCWGEGRASQGTWPHKGHSEMSPSGQGCQETAIALLEEGQETMTIDRSLQPLLGEFGCFFGLVLIFPGLTSVIQLDLQCWLKLLLETRARPGMWAPLASL

SEQ ID NO: 778806 - protein, 106 aa, Homo sapiens
LSPHPLILHVSKLLGSAFKIPEFTLSHPHCCSLPSSPSLAWSTTEPPAAPALPCPCTCQSEQRHPSRPCSLPHGFLPWTGLCGAGLPVWGLHVDFVHPASQDGSPR

SEQ ID NO: 778807 - protein, 55 aa, Homo sapiens
KRQAEKRGGCGRSEDSILEILDSKGNPPHFACTYGTPSKSSPRLPNTRSRHPLPA

SEQ ID NO: 778808 - protein, 35 aa, Homo sapiens
MVRVHSEKSAPHHKILENILHPSHPAVLSPQALLS

SEQ ID NO: 778809 - protein, 118 aa, Homo sapiens
MATRVPNLCHTPSLDAHILSNFGHQPNGTTVMFMHSTLCGFLEHQGVATPKALGTKNKQQTTHSLHVALPIIVTLNPGSTLESAGEVSKLLKPESYPRLPGDCIQGECCSCSPGGSPG

SEQ ID NO: 778810 - protein, 86 aa, Homo sapiens
MAPLGTWERAWAECIASAGAPLLLQPVLLSPVGDPAPPGASLPKGHTLLDANRQSKKGASKRAMETSHLLGKERVGQNHRAVSAVL

SEQ ID NO: 778811 - protein, 116 aa, Homo sapiens [sequence omitted]

SEQ ID NO: 778812 - protein, 81 aa, Homo sapiens
CLVKSWKLPKFLKSGDAAIVDMVPVQAQCVLRASQAIHLWVALLVRDMRQTVAVGVIKAVDKKAAGAGKVTKSAQKAQKAK

SEQ ID NO: 778813 - protein, 80 aa, Homo sapiens
EVHGLADVCAHIVADLAEVVATVFLHDMLDQQRPIAENLDSAIYGKAVILNCSAEGYPVPTIVWKFSKGAGVPQFQPIAL

SEQ ID NO: 778814 - protein, 113 aa, Homo sapiens
PWALGALAKTGEWASRVLLCEGQGKGVVARCLAEPSPFPTLSLTRPPVKGSEAQMSRAILNVRSCRPSATVTCASSAPQAPPLVSVTTGSPGGQMIAREFFGVRRFCCEKGED

SEQ ID NO: 778815 - protein, 58 aa, Homo sapiens
LKSKSPGGAKLCPACCCAFSCSGEACAAETMLGSQSNCAICYYKAYLGLGMVAHAYYP

SEQ ID NO: 778816 - protein, 55 aa, Homo sapiens
MASLCTRNTFLIMPCPVSEKDWRPHVRHWDRECTAKGQCLDFALCAWAWRILPLT

SEQ ID NO: 778817 - protein, 100 aa, Homo sapiens
CGVQEDEEVRGAENEEAGRDHVRRPGGPRRKEPRRPRRAQEEEAGMAQEEATAPSSDSSQLRIRPQQPRGILFSAIFTPTCCCLLCYSVFCNLRCLFNGE

SEQ ID NO: 778818 - protein, 105 aa, Homo sapiens
MSHHAWFTCKCVYVQFDATYRHQLPTCCSMQWAEPPTQNVAKNLQLSLFGRVLPKEGLASSLSASRRTCARRMEMSWCFSSDFYLEATRLSSGSPTSVAPALLFW

SEQ ID NO: 778819 - protein, 100 aa, Homo sapiens
SGDATAGPKEQGGGGQDPAAIAGHSAGGSDHAGERGLEEELDGWRRRRRRREVTVRPDLPPWAPDLGLGAGIRGSLSPSWAQRRVRTEIHARTLRGPVSC

SEQ ID NO: 778820 - protein, 112 aa, Homo sapiens
VLWIPGLLRRRLHPGVDDLRISPVCPTQPAAWSPKALSQNPRAVWRRPRVATGLKTEDPAPLSPQPGRPRLSPCSPHLDGTLHRRESPGLVSGSEFIQLPKIHVDMNVFSHN

SEQ ID NO: 778821 - protein, 106 aa, Homo sapiens
STRIAEHLGDSQSLGRMLADYRARGGRIQPKNSDPFAHSKDASSTSSGKSGSKNEGDEERGLILSDAVWSTKVDCLNPINHQRLCVLFSSSSAQSSNAPSACVSPW

SEQ ID NO: 778822 - protein, 202 aa, Homo sapiens
STRIAEHLGDSQSLGRMLADYRARGGRIQPKNSDPFAHSKDASSTSSGKSGSKNEGDEERGLILSDAVWSTKVDCLNPINHQRLCVLFSSSSAQSSNAPSACVSPWIVTMEFYGKNDLTLGIFLERYCFRPSYQCPSMFCDTPMVHHIRRFVHGQGCVQIILKELDSPVPGYQHTILTYSWCRICKQVTPVVALSNESWSMS

SEQ ID NO: 778823 - protein, 251 aa, Homo sapiens
STRIAEHLGDSQSLGRMLADYRARGGRIQPKNSDPFAHSKDASSTSSGKSGSKNEGDEERGLILSDAVWSTKVDCLNPINHQRLCVLFSSSSAQSSNAPSACVSPWIVTMEFYGKNDLTLGIFLERYCFRPSYQCPSMFCDTPMVHHIRRFVHGQGCVQIILKELDSPVPGYQHTILTYSWCRICKQVNRPYYYILFAIYFFICMFFFFPEEKVSYMVLDSLFVIELYLSLLFYLPVLYVQSSIRFLKIPS

SEQ ID NO: 778824 - protein, 102 aa, Homo sapiens
RVCRARPEVALRAQRMGAEQHTARGGVSGSAALPGAGGRKPAEETHVPWVRERGASSSLHPPSARALSRPRPLTMHLPSKKGPHACQGREPRPQGHSSLEES

SEQ ID NO: 778825 - protein, 119 aa, Homo sapiens
MSAFTDTCFPTTARKNHGPGVTVIRGRGCGLHPERVAAAGPGAEDPVPGCDAGELQPPALCGLNCLLAWKAQLAQHKSFNRFSPRGCQVSKPAVISSLEQGKEPWMEEEEIRTWSFPES

SEQ ID NO: 778826 - protein, 159 aa, Homo sapiens
MSAFTDTCFPTTARKNHGPGVTVIRGRGCGLHPERVAAAGPGAEDPVPGCDAGELQPPALCGLNCLLAWKAQLAQHKSFNRFSPRGCQVSKPAVISSLEQGKEPWMEEEEIRTWSFPEEVWQVATQPDSQQQHEDQHLSHTFLDKKDWTGNELHECNEL

SEQ ID NO: 778827 - protein, 180 aa, Homo sapiens
AAFTQCFEVQDCNARTSGPQTLPTATDTSDTRCGGRRSGSGAVPSASVAGTHLLQSRHCTGVLGGGSSRRLCGLSGAAELGWGTLQVVGPEQRLAPHLTALPRTPPSSGSLCRAPATVTTWTQIPAFPQQQGRTMAQGSLSFGDVAVGFTRKEWQQLDLEQRTLYQDVMLENYSHLLSVG

SEQ ID NO: 778828 - protein, 79 aa, Homo sapiens
KARLAVGEQTRGHEPVLLSCYCIPAFPQQQGRTMAQGSLSFGDVAVGFTRKEWQQLDLEQRTLYQDVMLENYSHLLSVG

SEQ ID NO: 778829 - protein, 77 aa, Homo sapiens
TSTQPPSARTWGPVDNSWLQVQSVLARRRYQGCPYGPKSPQPPWLSLGALGTGSVPKLADVGGLWSHQGARGLWCKG

SEQ ID NO: 778830 - protein, 138 aa, Homo sapiens
MAVFTYLVCPVLRRARGQRFLCASLANPLTFPGGSKQLLICFFQSLSLWKLSPAANYTKGQTLDQTQRATRGPIKFYHGVILFLTVTQAIGAVLFWAPIGFGRSQMRLFGTRSTENLSPFETTSPSGSAFPNSFGPLI

SEQ ID NO: 778831 - protein, 92 aa, Homo sapiens
GAATLALSVLCGCLRVSASVRPLSSRTPRRAATLSQEPEVPALAAWTASHRPIKENLKNNFLYDFLYGGVGLTAPRECGRGAEQKNSRSEMK

SEQ ID NO: 778832 - protein, 228 aa, Homo sapiens
MCIGPRAELFLVVNICLIQKKTLRKELEEEMTEAITEAAVASSEEVSEERDDLGPLELHDSGTFQQVVNLLDIIDSESAKTDTTGAGLDMRKTLASVIIMEKATTEPSVVINTLIRCLQVPEISTQRKVNIYNILQDIIQQEGELEEQCVQRLVAIASKEMREIPEMEGYMKAEVASDTLVALSRNHFSLVMYELQHHLKPLNLTDEFVIITLAKLANGNGRGLRALS

SEQ ID NO: 778833 - protein, 110 aa, Homo sapiens
RLGGNWDLNGGQEVLSRESGLVKVSVSSFSYFSLNKTLLYTPFKPSVSLNFYGHGTDKDPVFIYTKEKSCNICGAQRGAREVENAYFGVKPGPPYELNRVCYSFNRLNKL

SEQ ID NO: 778834 - protein, 46 aa, Homo sapiens
MCQPQGYDPGDPHKSMGVHVGGPPSASFSTASPKGTPGSSTTETQR

SEQ ID NO: 778835 - protein, 35 aa, Homo sapiens
MPGIPVHRNAHQVRIPLAPPRRSDGLASFGISHCV

SEQ ID NO: 778836 - protein, 121 aa, Homo sapiens [sequence omitted]

SEQ ID NO: 778837 - protein, 68 aa, Homo sapiens
PTESDGFSLCQVPRSSAAASSEGSYPEGTAALYDNLFRRAQSPEKTNNLGPQPVWGTTGTSYPQILTG

SEQ ID NO: 778838 - protein, 112 aa, Homo sapiens
CVDFCSDLLLFFQCSYNLSHLAGGDVNIFFVHQLNHLDEVVDVDLAIYVSFSAARNYGVSKKVTKKPVFFTVIVAVVGLLASIRKWRMGNGKSHWITPPYITAFGFVVLTRQ

SEQ ID NO: 778839 - protein, 82 aa, Homo sapiens
MVDLLSMSQNISPYKNPMRFIFFSPILREEKFSSESCRNIGDISKSQPIGGSHQCVLEGTNIELLNSYSRNYGAVVKSWLGA

SEQ ID NO: 778840 - protein, 106 aa, Homo sapiens
MPRSLFMEPGMVDLLSMSQNISPYKNPMRFIFFSPILREEKFSSESCRNIGDISKSQPIGGSHQCVLEGTNIELLNSYSRNYGAVVKSWLGAYENGEGKDGPSLQS

SEQ ID NO: 778841 - protein, 218 aa, Homo sapiens
MGCVYSCCLEVCCGEDEIVYPRMPGESTVCHREREKPITYHWYHWHPGHIYPRVASMEDYDEDLVQEASSEDVLGVHMVDKDTERDIEMKRQIRRLRELHLYSTWKKYQEAMKTSLGVPQCERDEGSLGKPLCPPRDLSETLPGSVNEKGYAFHQEDPLEEFIQNHLPEASKSEVSSLLPMQTTGIQTNGDLEDLEGAWPRQTQTPEEATEVHLMEGD

SEQ ID NO: 778842 - protein, 127 aa, Homo sapiens
HPSRRGPAGVVASWTSSPAGRDGGVGIAGAWYFPRASSQAREMPQCPTLESQEGENSEEKGDSSKEDPKETVALAFVRENPGAQNGLQNAQQQGKKKRKKKRLGLKAGEWGAMLVITGRTWREGGLG

SEQ ID NO: 778843 - protein, 189 aa, Homo sapiens
MAKVPELEDTFLQAQPAPQLSPGIQEDCCVQLLGKGLLVYPEETVYLAAEGQPGGEQGGGEKGEDPELPGAVKSEMHLNNGNFSSEEEDADNHDSKTKAADQYLSQKKTITQIVKDKKKQTQLTLQWLEENYIVCEGVCLPRCILYAHYLDFCRKEKLEPACAATFGKTIRQKFPLLTTRRLGTRGHSK

SEQ ID NO: 778844 - protein, 154 aa, Homo sapiens
LPAGPFCLLHPLSCHSLHFVLRQHQSACCICLLHHVLACLCVLLMLICPFSSSCFLIWITLTYSVESDHMASSPDFPWVPSAGNLLSRSQPPHSWHKGQPLTVLLPHCKSITDLHQCNEIIHAHTHVLLDTVSFVRARTHSSLYPVLFRVNGTL

SEQ ID NO: 778845 - protein, 108 aa, Homo sapiens
LLELTCKCMGGLLIKEVARKNQKTYRIYVDKCLSQERQIRIAEGELRMKPPFIQHSECSRQCNLIPSSFMTPDRYCYSLFILEKADSEKLKYLPQGTKVVSSNARVQA

SEQ ID NO: 778846 - protein, 75 aa, Homo sapiens
SGTGRRDGECGRRSPLADRSSCSGDPQVGKLGQNAERSRLLRAVRCQGSTAERRGLREGRGRRAKSVRSGLLKES

SEQ ID NO: 778847 - protein, 75 aa, Homo sapiens; identical to SEQ ID NO: 778846

SEQ ID NO: 778848 - protein, 75 aa, Homo sapiens; identical to SEQ ID NO: 778846

SEQ ID NO: 778849 - protein, 131 aa, Homo sapiens
PKCWDYRCEPPRPAYANNFYSLDIMDKFHEKHKPSKFPREQIENLNNFTLRTWSFPLGSPLSLTRERADFLSLSFSLLPVKPPLLNSSCVSVSKIFLARDDEPQVFTPDNVAASYWGPRPRYQGTAFIKTQ

SEQ ID NO: 778850 - protein, 228 aa, Homo sapiens
MEYEDQEREEGFVSPIRRLVFPKAGRRAACRSSVSRRPLHSMPLYPPDYLIDPQILLCDYLEKEVKFLGHLTWVTSSLNPSSRDELLQLLDTARQLKELPLKTTAEQDSILSLSARCLLLTWRDNEELILRIPTHEIAAASYLQDDALHLLVLKTGLGVDPVPAGVDASPGGAGRDPGPPGGAPEKRRVGTAERRHTICSLDWRMGWGGGAAEARAGGGGGGSLERQR

SEQ ID NO: 778851 - protein, 118 aa, Homo sapiens
AAAYYYYYCSEFKLLTMYGDMALLLALSLLVLWTSPAPTLSGTNDAEDCCLSVTQKPIPGYIVRNFHYLLIKDGCRVPAVVFTTLRGRQLCAPPDQPWVERIIQRLQRTSAKMKRRSS

SEQ ID NO: 778852 - protein, 74 aa, Homo sapiens
LPFTPWLGGASFELGMTMIQFFHYLLIKDGCRVPAVVFTTLRGRQLCAPPDQPWVERIIQRLQRTSAKMKRRSS

SEQ ID NO: 778853 - protein, 144 aa, Homo sapiens
HSQPHITHTLHFTPASQSPCSLTQILHTPRQLALTHSPLACLCSPSMALLLALSLLVLWTSPAPTLSGTNDAEDCCLSVTQKPIPGYIVRNFHYLLIKDGCRVPAVVFTTLRGRQLCAPPDQPWVERIIQRLQRTSAKMKRRSS

SEQ ID NO: 778854 - protein, 150 aa, Homo sapiens
HSQPHITHTLHFTPASQSPCSLTQILHTPRQLALTHSPLACLCSPSMALLLALSLLVLWTSPAPTLSGTNDAEDCCLSVTQKPIPGYIVRNFHYLLIKDGCRVPAVVFTTLRGRQLCAPPDQPWVERIIQRLQRTSAKASLALPGPVSSL

SEQ ID NO: 778855 - protein, 223 aa, Homo sapiens
MEEKQPQKTKEPSKEDEPQQKEMPTHLSLGAESKAEAKTPVLVETQTVDNANEKSEKPPENQKKLSDKDTVATKIKAWWRGTLVRRALLHAALSACIIQCWWRLILSKILKKRRQAALEAFSRKEWAAVTLQSQARMWRIRRRYCQVLNAVRNHPGLLEVPLLCFPGGSSRASTEYTSQASCISRLEILLDSGPCIVTEVYSLLNKGMKLVLFQKIKIKLFQG

SEQ ID NO: 778856 - protein, 36 aa, Homo sapiens
SHQGDGQGKYRYPHWMDGETEAQRKDVTCPRSWHER

SEQ ID NO: 778857 - protein, 131 aa, Homo sapiens
MCSRTWLPFLHHLSTHVYIGKIRDRSSHASKKGLTRVGFVVPPRSLDFILLGDGPKEGCEQRGIHKDGSSSTHFNHQCCTAIGDYTCSFVACERFDACTSEICFSDSSLSSSIAHMRRVSGQPIRQRGHLP

SEQ ID NO: 778858 - protein, 81 aa, Homo sapiens
GGLTIMLENKEEQVTSYVDGGRQRERMRAKQNGLPLIKPSDLMRLIHYHKNSAGKTRPHNSITSHWVPPMTCGNCGSYNSR

SEQ ID NO: 778859 - protein, 183 aa, Homo sapiens
SVAPGGAGACSSAATEPLGLARPLLALPDACDACWGQAAAVPSADRRAAPASRALHQLLPDKPNFCAGFGLAEPERRTARSPGGGQGGSASPRCPRDCGSGASAWAVAGWPPGSALQLRLGMPSVCEEQQVTVVGLAHPCVWAFTHIVKLCKQGCTGSSWYVSYERSYRCSGNLFQWKKMLRW

SEQ ID NO: 778860 - protein, 104 aa, Homo sapiens
TASESSASLDPCLVSPEVTEPRKDPQGARGPEGSLLPSPPPSQEREHPSSSMPFAECPPEGCLASPAAAPEDGPQTQSPRREPAPNAPGDIAAAFPAERDSSTP

SEQ ID NO: 778861 - protein, 122 aa, Homo sapiens
EEEFFLQHSSWVSSLVWVQCLIQLAVARVQNYLLQNCGNVVIKTSNFLRVLLKQSGWCGRDNIVCTSLSQREIYKVKANQISEAGTSPQMFASKQVVDLRDPLLSLSDCLLLWSVDQCSTSI

SEQ ID NO: 778862 - protein, 181 aa, Homo sapiens
TPVIPALWEAEAGRSRGQEIETILANKKQSAMPWDQDPEQSTGNYSEDEQNGKQKWREEGEAGRKREREKEEKNEKELQDEQENKRKRENEKQKQYPEKRLVSKSLMHTLWAKFKLNRCPTIQESLSLSFEFDMTHKQISQWFCKTRKKYNKEMSKRKHKKKHMRWRSLCCQGWSRTPALK

SEQ ID NO: 778863 - protein, 96 aa, Homo sapiens
PNPGIEFEFWLPRERYSPFQARVQALGWPLRQPQPRGVEPQPPAAPAVTPAQTPTLAPGEVGTARVGDEWGLRPVPLTAPPIPQTPAHPALTPAAA

SEQ ID NO: 778864 - protein, 242 aa, Homo sapiens
LPSAPNQCDLNCLAEGHAFYHSFGRVLDGTACSPGAQGVCVAGRCLSAGCDGLLGSGALEDRCGRCGGANDSCLFVQRVFRDAGAFAGYWNVTLIPEGARHIRVEHRSRNHLALMGGDGRYVLNGHWVVSPPGTYEAAGTHVVYTRDTGPQETLQAAGPTSHDLLLQVLLQEPNPGIEFEFWLPRERYSPFQARVQALGWPLRQPQPRGVEPQPPAAPAVTPAQTPTLAPDPCPPCPDTRGR

SEQ ID NO: 778865 - protein, 167 aa, Homo sapiens
QAPERSRAVLRGGAGPCSVGLKAARGSPRLWALERKPRKEAAQVTSPGSALSQGSSERPGALSRGLVPFEQSPALQGSGPPPPLLGPGLGSFPQTHPGDFCAPGAEPLLRAAGWAQARFLNVSEPLPPAKSTFQAPGALRETTPRQGVWRAAEEPGAWRSEKTCIFS

SEQ ID NO: 778866 - protein, 124 aa, Homo sapiens
SRGLVPLITICLVWRSHMCLSEMLGGQGQARSSLFHHLLLYRDLGAFDQHQISIISLSTIFPLWCYLQPFLSLRFFFFFLCLFFLFEMESCSVAQAGVQWRDLGSLQPPPSGFKQFSCLSLPSS

SEQ ID NO: 778867 - protein, 87 aa, Homo sapiens
MLLLYLGIEVIRLFFGTKGNLCQRKMPLSISVALTFPSAMMASYYLLLQTYVLRLEAIMNGILLFFCGSELLLEVLTLAAFSSMDTI

SEQ ID NO: 778868 - protein, 159 aa, Homo sapiens
AAGTVRNSRIGTEDGAARGDSGGKRLSSTPLEILFFLNGWYNATYFLLELFIFLYKGVLLPYPTANLVLDVVMLLLYLGIEVIRLFFGTKGNLCQRKMPLSISVALTFPSAMMASYYLLLQTYVLRLEAIMNGILLFFCGSELLLEVLTLAAFSSMDTI

SEQ ID NO: 778869 - protein, 110 aa, Homo sapiens
MLLLYLGIEVIRLFFGTKGNLCQRKMPLSISVALTFPSAMMASYYLLLQTYVLRLEAIMNGILLFFCGSELLLEVLTLAAFSRYCCWGPFLITRGLGSHPREGFTYSSEA

SEQ ID NO: 778870 - protein, 94 aa, Homo sapiens
CLPVFLTTCTIGLWKEVPIDNDVEHTLIAVVCVPRCRIYQIGGTRSRRYDSPGSCLCPLSSVSLDHQFAFSDASNSQNAVEASTVSCYHIQQLT

SEQ ID NO: 778871 - protein, 102 aa, Homo sapiens
MLLLYLGIEVIRLFFGKADHLEMTPWAVSDSTKGNLCQRKMPLSISVALTFPSAMMASYYLLLQTYVLRLEAIMNGILLFFCGSELLLEVLTLAAFSSMDTI

SEQ ID NO: 778872 - protein, 87 aa, Homo sapiens; identical to SEQ ID NO: 778867

SEQ ID NO: 778873 - protein, 136 aa, Homo sapiens
MARTKQTARKSTGGKAPRKQLATKAARKSAPSTGGVKKPHRYRPGTVALREIRRYQKSTELLIRKLPFQRLVREIAQDFKTDLRFQSAAIGALQEASEAYLVGLFEDTNLCAIHAKRVTIMPKDIQLARRIRGERA

SEQ ID NO: 778874 - protein, 136 aa, Homo sapiens; identical to SEQ ID NO: 778873

SEQ ID NO: 778875 - protein, 136 aa, Homo sapiens; identical to SEQ ID NO: 778873

SEQ ID NO: 778876 - protein, 106 aa, Homo sapiens [sequence omitted]

SEQ ID NO: 778877 - protein, 180 aa, Homo sapiens
FGGDGSTCEWSTERGGTASQESGAQPLQEALKVACESSASRGGSVEHRSRSESCLALSTTFQACSFGSFLARWLKTCCPQAEGGPYPWTPSSGRLQWRQLSLQVERCRDCFASTSFNTYFSFQQQSLPLRSRIHPGPEAAPEYHILTPLVCKTSACPQVQRSSHLNKRSLRSRRVIPTTF

SEQ ID NO: 778878 - protein, 32 aa, Homo sapiens
MIEPRSQIEPRSQIGPRSQIEPRSQIDRRSHV

SEQ ID NO: 778879 - protein, 104 aa, Homo sapiens
GVYDGARARGGPRVFSRRLLGVLSCPQVWLATSGRLCLPRGLRGAAGLLYDYPWGWRSIVGVGGWVVGWLSGGCIRRAARAGCLCGCGSLIGSLLSGVVVAVSV

SEQ ID NO: 778880 - protein, 104 aa, Homo sapiens; identical to SEQ ID NO: 778879

SEQ ID NO: 778881 - protein, 104 aa, Homo sapiens; identical to SEQ ID NO: 778879

SEQ ID NO: 778882 - protein, 104 aa, Homo sapiens; identical to SEQ ID NO: 778879

SEQ ID NO: 778883 - protein, 104 aa, Homo sapiens; identical to SEQ ID NO: 778879

SEQ ID NO: 778884 - protein, 104 aa, Homo sapiens; identical to SEQ ID NO: 778879

SEQ ID NO: 778885 - protein, 104 aa, Homo sapiens; identical to SEQ ID NO: 778879

SEQ ID NO: 778886 - protein, 104 aa, Homo sapiens; identical to SEQ ID NO: 778879

SEQ ID NO: 778887 - protein, 104 aa, Homo sapiens; identical to SEQ ID NO: 778879

SEQ ID NO: 778888 - protein, 104 aa, Homo sapiens; identical to SEQ ID NO: 778879

SEQ ID NO: 778889 - protein, 104 aa, Homo sapiens; identical to SEQ ID NO: 778879

SEQ ID NO: 778890 - protein, 104 aa, Homo sapiens; identical to SEQ ID NO: 778879

SEQ ID NO: 778891 - protein, 104 aa, Homo sapiens; identical to SEQ ID NO: 778879

SEQ ID NO: 778892 - protein, 104 aa, Homo sapiens; identical to SEQ ID NO: 778879

SEQ ID NO: 778893 - protein, 104 aa, Homo sapiens; identical to SEQ ID NO: 778879

SEQ ID NO: 778894 - protein, 104 aa, Homo sapiens; identical to SEQ ID NO: 778879

SEQ ID NO: 778895 - protein, 104 aa, Homo sapiens; identical to SEQ ID NO: 778879

SEQ ID NO: 778896 - protein, 104 aa, Homo sapiens; identical to SEQ ID NO: 778879

SEQ ID NO: 778897 - protein, 104 aa, Homo sapiens; identical to SEQ ID NO: 778879

SEQ ID NO: 778898 - protein, 104 aa, Homo sapiens; identical to SEQ ID NO: 778879

SEQ ID NO: 778899 - protein, 104 aa, Homo sapiens; identical to SEQ ID NO: 778879

SEQ ID NO: 778900 - protein, 104 aa, Homo sapiens; identical to SEQ ID NO: 778879

SEQ ID NO: 778901 - protein, 104 aa, Homo sapiens; identical to SEQ ID NO: 778879

SEQ ID NO: 778902 - protein, 104 aa, Homo sapiens; identical to SEQ ID NO: 778879

SEQ ID NO: 778903 - protein, 104 aa, Homo sapiens; identical to SEQ ID NO: 778879

SEQ ID NO: 778904 - protein, 104 aa, Homo sapiens; identical to SEQ ID NO: 778879

SEQ ID NO: 778905 - protein, 104 aa, Homo sapiens; identical to SEQ ID NO: 778879

SEQ ID NO: 778906 - protein, 104 aa, Homo sapiens; identical to SEQ ID NO: 778879

SEQ ID NO: 778907 - protein, 104 aa, Homo sapiens; identical to SEQ ID NO: 778879

SEQ ID NO: 778908 - protein, 104 aa, Homo sapiens; identical to SEQ ID NO: 778879

SEQ ID NO: 778909 - protein, 104 aa, Homo sapiens; identical to SEQ ID NO: 778879

SEQ ID NO: 778910 - protein, 104 aa, Homo sapiens; identical to SEQ ID NO: 778879

SEQ ID NO: 778911 - protein, 104 aa, Homo sapiens; identical to SEQ ID NO: 778879

SEQ ID NO: 778912 - protein, 95 aa, Homo sapiens
  misc_feature (84)..(84): Xaa can be any naturally occurring amino acid
MRSKTIRARAASKKVYFAEKVTSLGKDGHGPCLAESAGEDTDPGGHAEHEAAYAKPCMNLFGPRSDPCGGSNYDGTEEGKPRYXAQKGAPGQTWA

SEQ ID NO: 778913 - protein, 104 aa, Homo sapiens; identical to SEQ ID NO: 778879

SEQ ID NO: 778914 - protein, 104 aa, Homo sapiens; identical to SEQ ID NO: 778879

SEQ ID NO: 778915 - protein, 104 aa, Homo sapiens; identical to SEQ ID NO: 778879

SEQ ID NO: 778916 - protein, 104 aa, Homo sapiens; identical to SEQ ID NO: 778879

SEQ ID NO: 778917 - protein, 104 aa, Homo sapiens; identical to SEQ ID NO: 778879

SEQ ID NO: 778918 - protein, 104 aa, Homo sapiens; identical to SEQ ID NO: 778879

SEQ ID NO: 778919 - protein, 104 aa, Homo sapiens; identical to SEQ ID NO: 778879

SEQ ID NO: 778920 - protein, 104 aa, Homo sapiens; identical to SEQ ID NO: 778879

SEQ ID NO: 778921 - protein, 104 aa, Homo sapiens; identical to SEQ ID NO: 778879

SEQ ID NO: 778922 - protein, 104 aa, Homo sapiens; identical to SEQ ID NO: 778879

SEQ ID NO: 778923 - protein, 104 aa, Homo sapiens; identical to SEQ ID NO: 778879

SEQ ID NO: 778924 - protein, 104 aa, Homo sapiens; identical to SEQ ID NO: 778879

SEQ ID NO: 778925 - protein, 104 aa, Homo sapiens; identical to SEQ ID NO: 778879

SEQ ID NO: 778926 - protein, 104 aa, Homo sapiens; identical to SEQ ID NO: 778879

SEQ ID NO: 778927 - protein, 104 aa, Homo sapiens; identical to SEQ ID NO: 778879

SEQ ID NO: 778928 - protein, 104 aa, Homo sapiens; identical to SEQ ID NO: 778879

SEQ ID NO: 778929 - protein, 104 aa, Homo sapiens; identical to SEQ ID NO: 778879

SEQ ID NO: 778930 - protein, 104 aa, Homo sapiens; identical to SEQ ID NO: 778879

SEQ ID NO: 778931 - protein, 104 aa, Homo sapiens; identical to SEQ ID NO: 778879

SEQ ID NO: 778932 - protein, 209 aa, Homo sapiens
KFLQSYNSGEAPQLHCHFVRCCRPSSGKETMTDKTEKVAVDPETVFETSQECDSPSYQKRQRMALLARKQGAGDSLIAGSAMSKEKKLMTGHAIPPSQLDSQIDDFTGFSKDGMMQKPGSNAPVGGNVTSNFSGDDLECRGIASSPKSQQEINADIKCQVVKEIRCLGRKYEKIFEMLEGVQGPTAVRKTIFLNPSSREAARCIETRLC

SEQ ID NO: 778933 - protein, 272 aa, Homo sapiens
IVGGSAAPPGAWPWLVRLQLGGQPLCGGVLVAASWVLTAAHCFVGAPNELLWTVTLAEGSRGEQAEEVPVNRILPHPKFDPRTFHNDLALVQLWTPVSPGGSARPVCLPQEPQEPPAGTACAIAGWGALFEDGPEAEAVREARVPLLSTDTCRRALGPGLRPSTMLCAGYLAGGVDSCQGDSGGPLTCSEPGPRPREVLFGVTSWGDGCGEPGKPGVYTRVAVFKDWLQEQMSASSSREPSCRELLAWDPPQELQADAARLCAFYARLCPGS

SEQ ID NO: 778934 - protein, 108 aa, Homo sapiens
MYIDDCLRATLEVMEAPAESLSMRTYNVSAMSFTPEELAQEVLKHVPEFQITYNVDAVRQAIADGWPMNFDDSNARKDWGWKHDFDLPELVTAMLNFHGSESRVAQAN

SEQ ID NO: 778935 - protein, 673 aa, Homo sapiens
GKVFPAGRMEDEEGPEYGKPDFVLLDQVTMEDFMRNLQLRFEKGRIYTYIGEVLVSVNPYQELPLYGPEAIARYQGRELYERPPHLYAVANAAYKAMKHRSRDTCIVISGESGAGKTEASKHIMQYIAAVTNPSQRAEVERVKDVLLKSTCVLEAFGNARTNRNHNSSRFGKYMDINFDFKGDPIGGHIHSYLLEKSRVLKQHVGERNFHAFYQLLRGSEDKQLHELHLERNPAVYNFTHQGAGLNMTVHSALDSDEQSHQAVTEAMRVIGFSPEEVESVHRILAAILHLGNIEFVETEEGGLQKEGLAVAEEALVDHVAELTATPRDLVLRSLLARTVASGGRELIEKGHTAAEASYARDACAKAVYQRLFEWVVNRINSVMEPRGRDPRRDGKDTVIGVLDIYGFEVFPVNSFEQFCINYCNEKLQQLFIQLILKQEQEEYEREGITWQSVEYFNNATIVDLVERPHRGILAVLDEACSSAGTITDRIFLQTLDTHHRHHLHYTSRQLCPTDKTMEFGRDFRIKHYAGDVTYSVEGFIDKNRDFLFQDFKRLLYNSTDPTLRAMWPDGQQDITEVTKRPLTAGTLFKNSMVALVENLASKEPFYVRCIKPNEDKVAGKLDENHCRHQVAYLGLLENVRVRRAGFASRQPYSRFLLRYWHLTPITPWAIVPV

SEQ ID NO: 778936 - protein, 1026 aa, Homo sapiens
GKVFPAGRMEDEEGPEYGKPDFVLLDQVTMEDFMRNLQLRFEKGRIYTYIGEVLVSVNPYQELPLYGPEAIARYQGRELYERPPHLYAVANAAYKAMKHRSRDTCIVISGESGAGKTEASKHIMQYIAAVTNPSQRAEVERVKDVLLKSTCVLEAFGNARTNRNHNSSRFGKYMDINFDFKGDPIGGHIHSYLLEKSRVLKQHVGERNFHAFYQLLRGSEDKQLHELHLERNPAVYNFTHQGAGLNMTVHSALDSDEQSHQAVTEAMRVIGFSPEEVESVHRILAAILHLGNIEFVETEEGGLQKEGLAVAEEALVDHVAELTATPRDLVLRSLLARTVASGGRELIEKGHTAAEASYARDACAKAVYQRLFEWVVNRINSVMEPRGRDPRRDGKDTVIGVLDIYGFEVFPVNSFEQFCINYCNEKLQQLFIQLILKQEQEEYEREGITWQSVEYFNNATIVDLVERPHRGILAVLDEACSSAGTITDRIFLQTLDTHHRHHLHYTSRQLCPTDKTMEFGRDFRIKHYAGDVTYSVEGFIDKNRDFLFQDFKRLLYNSTDPTLRAMWPDGQQDITEVTKRPLTAGTLFKNSMVALVENLASKEPFYVRCIKPNEDKVAGKLDENHCRHQVAYLGLLENVRVRRAGFASRQPYSRFLLRYKMTCEYTWPNHLLGSDKAAVSALLEQHGLQGDVAFGHSKLFIRSPRTLVTLEQSRARLIPIIVLLLQKAWRGTLARWRCRRLRAIYTIMRWFRRHKVRAHLAELQRRFQAARQPPLYGRDLVWPLPPAVLQPFQDTCHALFCRWRARQLVKNIPPSDMPQIKAKVAAMGALQGLRQDWGCRRAWARDYLSSATDNPTASSLFAQRLKTLRDKDGFGAVLFSSHVRKVNRFHKIRNRALLLTDQHLYKLDPDRQYRVMRAVPLEAVTGLSVTSGGDQLVVLHARGQDDLVVCLHRSRPPLDNRVGELVGVLAAHCQGEGRTLEVRVSDCIPLSHRGVRRLISVEPRPEQPEPDFRCARGSFTLLWPSR

SEQ ID NO: 778937 - protein, 366 aa, Homo sapiens
MTCEYTWPNHLLGSDKAAVSALLEQHGLQGDVAFGHSKLFIRSPRTLVTLEQSRARLIPIIVLLLQKAWRGTLARWRCRRLRAIYTIMRWFRRHKVRAHLAELQRRFQAARQPPLYGRDLVWPLPPAVLQPFQDTCHALFCRWRARQLVKNIPPSDMPQIKAKVAAMGALQGLRQDWGCRRAWARDYLSSATDNPTASSLFAQRLKTLRDKDGFGAVLFSSHVRKVNRFHKIRNRALLLTDQHLYKLDPDRQYRVMRAVPLEAVTGLSVTSGGDQLVVLHARGQDDLVVCLHRSRPPLDNRVGELVGVLAAHCQGEGRTLEVRVSDCIPLSHRGVRRLISVEPRPEQPEPDFRCARGSFTLLWPSR

SEQ ID NO: 778938 - protein, 903 aa, Homo sapiens
GKVFPAGRMEDEEGPEYGKPDFVLLDQVTMEDFMRNLQLRFEKGRIYTYIGEVLVSVNPYQELPLYGPEAIARYQGRELYERPPHLYAVANAAYKAMKHRSRDTCIVISGESGAGKTEASKHIMQYIAAVTNPSQRAEVERVKDVLLKSTCVLEAFGNARTNRNHNSSRFGKYMDINFDFKGDPIGGHIHSYLLEKSRVLKQHVGERNFHAFYQLLRGSEDKQLHELHLERNPAVYNFTHQGAGLNMTVHSALDSDEQSHQAVTEAMRVIGFSPEEVESVHRILAAILHLGNIEFVETEEGGLQKEGLAVAEEALVDHVAELTATPRDLVLRSLLARTVASGGRELIEKGHTAAEASYARDACAKAVYQRLFEWVVNRINSVMEPRGRDPRRDGKDTVIGVLDIYGFEVFPVNSFEQFCINYCNEKLQQLFIQLILKQEQEEYEREGITWQSVEYFNNATIVDLVERPHRGILAVLDEACSSAGTITDRIFLQTLDTHHRHHLHYTSRQLCPTDKTMEFGRDFRIKHYAGDVTYSVEGFIDKNRDFLFQDFKRLLYNSTDPTLRAMWPDGQQDITEVTKRPLTAGTLFKNSMVALVENLASKEPFYVRCIKPNEDKVAGKLDENHCRHQVAYLGLLENVRVRRAGFASRQPYSRFLLRYKMTCEYTWPNHLLGSDKAAVSALLEQHGLQGDVAFGHSKLFIRSPRTLVTLEQSRARLIPIIVLLLQKATDNPTASSLFAQRLKTLRDKDGFGAVLFSSHVRKVNRFHKIRNRALLLTDQHLYKLDPDRQYRVMRAVPLEAVTGLSVTSGGDQLVVLHARGQDDLVVCLHRSRPPLDNRVGELVGVLAAHCQGEGRTLEVRVSDCIPLSHRGVRRLISVEPRPEQPEPDFRCARGSFTLLWPSR

SEQ ID NO: 778939 - protein, 140 aa, Homo sapiens
APRVRLGVRQRLPGEGVSPARLGCGLSGCTLTPRSAQVTGLSVTSGGDQLVVLHARGQDDLVVCLHRSRPPLDNRVGELVGVLAAHCQGEGRTLEVRVSDCIPLSHRGVRRLISVEPRPEQPEPDFRCARGSFTLLWPSR

SEQ ID NO: 778940 - protein, 1026 aa, Homo sapiens; identical to SEQ ID NO: 778936

SEQ ID NO: 778941 - protein, 1026 aa, Homo sapiens; identical to SEQ ID NO: 778936

SEQ ID NO: 778942 - protein, 725 aa, Homo sapiens
GKVFPAGRMEDEEGPEYGKPDFVLLDQVTMEDFMRNLQLRFEKGRIYTYIGEVLVSVNPYQELPLYGPEAIARYQGRELYERPPHLYAVANAAYKAMKHRSRDTCIVISGESGAGKTEASKHIMQYIAAVTNPSQRAEVERVKDVLLKSTCVLEAFGNARTNRNHNSSRFGKYMDINFDFKGDPIGGHIHSYLLEKSRVLKQHVGERNFHAFYQLLRGSEDKQLHELHLERNPAVYNFTHQGAGLNMTVHSALDSDEQSHQAVTEAMRVIGFSPEEVESVHRILAAILHLGNIEFVETEEGGLQKEGLAVAEEALVDHVAELTATPRDLVLRSLLARTVASGGRELIEKGHTAAEASYARDACAKAVYQRLFEWVVNRINSVMEPRGRDPRRDGKDTVIGVLDIYGFEVFPVNSFEQFCINYCNEKLQQLFIQLILKQEQEEYEREGITWQSVEYFNNATIVDLVERPHRGILAVLDEACSSAGTITDRIFLQTLDTHHRHHLHYTSRQLCPTDKTMEFGRDFRIKHYAGDVTYSVEGFIDKNRDFLFQDFKRLLYNSTDPTLRAMWPDGQQDITEVTKRPLTAGTLFKNSMVALVENLASKEPFYVRCIKPNEDKVAGKLDENHCRHQVAYLGLLENVRVRRAGFASRQPYSRFLLRYKMTCEYTWPNHLLGSDKAAVSALLEQHGLQGDVAFGHSKLFIRSPRTLVTLEQSRARLIPIIVLLL

SEQ ID NO: 778943 - protein, 317 aa, Homo sapiens
AEEGGPGAPRLLAVSASGYITELSVRCHRPRGPAQQMHRDARAQKASRGFPPRVPKSFPFNTSVVYKKTLFVEFTDHLFNIAKPRPPWMGLLGPTIQAEVYDTVVITLKNMASHPVSLHAVGVSYWKASDGTLNMMIRPVKRENRRWYKSSLVEAIPHVWQVLQRDMVHLASDPLMPLPTHIFLMWTWLQDLNLRTHWSPTSMYEQGVWRRQTDTDLAHHLYYLLAVIDERETFGTQKTTELLDAAIGMLHLLGAWPYIAHSTMGHVTQVLCQVLSTPAQHSPGSPQLRTRVLHSVHNSSASNRLATQSCNPGHGAS

SEQ ID NO: 778944 - protein, 60 aa, Homo sapiens
MCPGPGNQQDCRWRPIVGGPQMEAMVIAIVCPMHSHSRMYTEMSCGRLGTVAHACNSSTL

SEQ ID NO: 778945 - protein, 522 aa, Homo sapiens
MNAGWFTCLVHGCPQVLAHSRCSISACRLTECCPLQHGLGPCCWPPRGAGQPPLCAHLPGGPSSPCPSKAGPQDIPLFKAQNPGLHHYMGLGRKRMVFSLKHDSGTAVAQIMSSQNPRPLEPPNITSSQNAQPLEPQNKTFFGPRVIADGIKLKMRPSWIRITGILVTQQENTETDKEMATETEAEAEAEIGPMQPQLRNACSPQKLEETEKHPPLEPSEGARPCGALTSDHGNALLWLKAAQFVARCDGRPRKPIQVQKARCLGLPSSRRLRPPEFTSPACSGALGHLRGTMKGWGLVPRLLVLAEKTRAHPSTSQPQLPHLRNRHNSPHLSRLQQKLLEKMGERTWPTDPKWMHGELALTQPWPSPCCSPSSSPPHLPPTPHLPLTLPPNLFIPFPPGSRKVRLAQHRHTPEGVLCQLEKKEEWEERAGAPGAPGVDSNLPTEAQPCCSPAWRSPLLPKPTEATEVPRWKSEGHVALPCSSHPHPESRPRQVKGEHTARHPIISQDPVCSCSATGLCFSI

SEQ ID NO: 778946 - protein, 133 aa, Homo sapiens
SGPLGTHRSLIENNRNNNSSTAYYNFTGSLFYPPTSLRVLRVSLHHFRRCVGPTFFVATGFHGLHVIIGPTRCVGPTLGQPTVGEPRRHLGGPCLCQALPPCLLSTLLASQGNVGQRPSSHTKNGPTETSLVP

SEQ ID NO: 778947 - protein, 104 aa, Homo sapiens
SNGFPFKWRGGCRRDTMKRILETPGSNTDESAFFQNRAPHSGPHLSLGAQCSERAWLSGEKRQEHERATKSWSGRCGSSVWGTARESLLVTPAQPPAAGLAAGS

SEQ ID NO: 778948 - protein, 77 aa, Homo sapiens
AGAVDGKLYVCGGFHGADRHEVISKEILELDPWENQWNVVAINVLMHDSYDVCLVARMNPRDLIPPPSDLVEEGNEH

SEQ ID NO: 778949 - protein, 223 aa, Homo sapiens
MISYAASSETLSVKRQYPSFLRTIPNDKYQVETMVLLLQKFGWTWISLVGSSDDYGQLGVQALENQATGQGICIAFKDIMPFSAQVGDERMQCLMRHLAQAGATVVVVFSSRQLARVFFESVVLTNLTGKVWVASEAWALSRHITGVPGIQRIGMVLGVAIQKRAVPGLKAFEEAYARADKKAPRPCHKGSWCSSNQLCRECQAFMAHTMPKLKAFSMSSAYN

SEQ ID NO: 778950 - protein, 50 aa, Homo sapiens
ASALSITLIATSLTSAYSTRIILLTLTGQPRFPALTNINENNPTLLNPIK

SEQ ID NO: 778951 - protein, 135 aa, Homo sapiens
NRFPLPLLTVSSMRAGGLSILLTTVSMAYSTCSVSVWYTHVCKAGKLVEHLSLQTPCPPLYLDKPKPPHICRELSLGGRVLGAGSAQSGGSGQSAPIQKMRAWGSMVPVALLVLTNRLQPQTRSQWVDPKPHVLG

SEQ ID NO: 778952 - protein, 67 aa, Homo sapiens
SASASQNTGVIGMNHYARPRSSDFGYGPPRNSSSSMWVWGHEGLFSGGSKSPLPQHGKSQKLEFQVR

SEQ ID NO: 778953 - protein, 109 aa, Homo sapiens
RQDTSVQVLGRAPLPPPAASSASCRPPSSCQQSSVLPPRQPSPPPWGSLQKEAGREGRKAQVEEDEEGTPAASSSPAPQGGKGKEEQTLGSTLTSERVPVKKEGGEPSF

SEQ ID NO: 778954 - protein, 116 aa, Homo sapiens
PGSHASAYSAVLAQWQPAHVCTHTHPGMFSPCPFSCHSQGHVNTRWCPHLYPNHGPLHSHLNRQTHTRIYSPTAIQPSTESCPRAPISPTDAYTHSSHDVIMSSHTPSPGTYSLTH

SEQ ID NO: 778955 - protein, 125 aa, Homo sapiens
KTESCSVAQAGVQWPDLGSLQAPPPGFTPFSCLSWLFFQAPFLCPSLLLDSSNLQGLGAQSQASLLLQIPSIRQAQWLMPGIPALWEVKVGRSPEVRSSRSASPTWGNPNSTKHKKLAGHGGACL

SEQ ID NO: 778956 - protein, 136 aa, Homo sapiens
MVTLITEKLQSQSLDDLTCKAEAGPLQYSAETLNKSGRLFPLELNDQKSLEESPVEDRQSESQADTGPMNSSLPDGPVLLAGHNHGVYHGGSHSARAKGDKAWVQQAPWTPVESTGSSKGPQRTKRDGRVLVKNPR

SEQ ID NO: 778957 - protein, 113 aa, Homo sapiens
MSTHNESFSLGTRSTEFPSDSWETYDLKKLRNLCSSSRPSNYRVGFRGPGRNPGLPQRTWCVCGSAKLVPSSSPKDATGPGISGDHDSHAPHDFSLQNFLSSTCISPAKLRPG

SEQ ID NO: 778958 - protein, 60 aa, Homo sapiens
QLLSLEWSGGGRGRCCIHRVQTEPGMKGEARPWPSLYRGYHDARHAGREVKVAQSTCRTL

SEQ ID NO: 778959 - protein, 175 aa, Homo sapiens
RKGGAYAGKMEATTAGVGRLEEEALRRKERLKALREKTGRKDKEDGEPKTKHLREEEEEGEKHRELRLRNYVPEDEDLKKRRVPQAKPVAVEEKVKEQLEAAKPEPVIEEVDLANLAPRKPDWDLKRDVAKKLEKLKKRTQRAIAELIRERLKGQEDSLASAVDAATEQKTCDSD

SEQ ID NO: 778960 - protein, 158 aa, Homo sapiens
RKGGAYAGKMEATTAGVGRLEEEALRRKERLKALREKTGRKDKEDGEPKTKHLREEEEEGEKHRELRLRNYVPEDEDLKKRRVPQAKPVAVEEKVKEQLEKHKMYEVAAGPAGKCAAVDVEPPSKQKEKAASLKRDMPKVLHDSSKDSITVFVSNLPY

SEQ ID NO: 778961 - protein, 132 aa, Homo sapiens
VVAHARGWARQWSATRSPSDSCFPGVARDKEDGEPKTKHLREEEEEGEKHRELRLRNYVPEDEDLKKRRVPQAKPVAGKQAVPLHLCFLALSATLHLSRLCSLRITSSTRTGVGPAGRTLCYHLMADAHSRP

SEQ ID NO: 778962 - protein, 175 aa, Homo sapiens; identical to SEQ ID NO: 778959

SEQ ID NO: 778963 - protein, 175 aa, Homo sapiens; identical to SEQ ID NO: 778959

SEQ ID NO: 778964 - protein, 72 aa, Homo sapiens
PGFQRSLPATGLHDHCPMIDGLETVLFSLALMGLTGVNIPPGDVFSHLVLRLRDTGPVQRGCLPCPASSEAE

SEQ ID NO: 778965 - protein, 76 aa, Homo sapiens
SKVSEWTTTAPSDLPGYSTQIRIPSPQDLSSHSHPHHADGNSILLSAAAKHTLLSHPTPGPPGKSSGAHPQGTSRF

SEQ ID NO: 778966 - protein, 159 aa, Homo sapiens [sequence omitted]

SEQ ID NO: 778967 - protein, 50 aa, Homo sapiens
LRSTPASHWFEQQAPCTNSIMSIPARAAHSPAAFSSHSPTPWCWRVFPGT

SEQ ID NO: 778968 - protein, 351 aa, Homo sapiens
MDELVHDLASALEQTSEQNKLGELWEEMALSPRQQRRQLRKRRGRKRRSDFTHLAEHTCCYSEASESSLDEATKDCREVAPVTNFSDSDDTMVAKRHPALNAIVKSKQHSWHESDSFTENAPCRPLRRRRKVKRVTSEVAASLQQKLKVSDWSYERGCRFKSAKKQRLSRWKENTPWTSSGHGLCESAENRTFLSKTGRKERMECETDEQKQGSDENMSECETSSVCSSSDTGLFTNDEGRQGDDEQSDWFYEGECVPGFTVPNLLPKWAPDHCSEVERMDSGLDKFSDSTFLLPSRPAQRGYHTRLNRLPGAAARCLRKGRRRLVGKVIPLTVSLAQWGDNIPYGSCVSY

SEQ ID NO: 778969 - protein, 482 aa, Homo sapiens
MDELVHDLASALEQTSEQNKLGELWEEMALSPRQQRRQLRKRRGRKRRSDFTHLAEHTCCYSEASESSLDEATKDCREVAPVTNFSDSDDTMVAKRHPALNAIVKSKQHSWHESDSFTENAPCRPLRRRRKVKRVTSEVAASLQQKLKVSDWSYERGCRFKSAKKQRLSRWKENTPWTSSGHGLCESAENRTFLSKTGRKERMECETDEQKQGSDENMSECETSSVCSSSDTGLFTNDEGRQGDDEQSDWFYEGECVPGFTVPNLLPKWAPDHCSEVERMDSGLDKFSDSTFLLPSRPAQRGYHTRLNRLPGAAARCLRKGRRRLVGKETSINTLGTERISHIISDPRQKEKNKALASDFPHISACAHEFNPLSPLYSLDVLADASHRRCSPAHCSARQANVHWGPPCSRDIKRKRKPVATASLSSPSAVHMDAVEPTTPASQAPKSPSSEWLVRTSAAEKATDATTATFFKMPQEKSPGYS

SEQ ID NO: 778970 - protein, 477 aa, Homo sapiens
MDELVHDLASALEQTSEQNKLGELWEEMALSPRQQRRQLRKRRGRKRRSDFTHLAEHTCCYSEASESSLDEATKDCREVAPVTNFSDSDDTMVAKRHPALNAIVKSKQHSWHESDSFTENAPCRPLRRRRKVKRVTSEVAASLQQKLKVSDWSYERGCRFKSAKKQRLSRWKENTPWTSSGHGLCESAENRTFLSKTGRKERMECETDEQKQGSDENMSECETSSVCSSSDTGLFTNDEGRQGDDEQSDWFYEGECVPGFTVPNLLPKWAPDHCSEVERMDSGLDKFSDSTFLLPSRPAQRGYHTRLNRLPGAAARCLRKGRRRLVGKETSINTLGTERISHIISDPRQKDFWLPSAGKRERNQFNPLSPLYSLDVLADASHRRCSPAHCSARQANVHWGPPCSRDIKRKRKPVATASLSSPSAVHMDAVEPTTPASQAPKSPSSEWLVRTSAAEKATDATTATFFKMPQEKSPGYS

SEQ ID NO: 778971 - protein, 477 aa, Homo sapiens; identical to SEQ ID NO: 778970

SEQ ID NO: 778972 - protein, 351 aa, Homo sapiens; identical to SEQ ID NO: 778968

SEQ ID NO: 778973 - protein, 351 aa, Homo sapiens; identical to SEQ ID NO: 778968

SEQ ID NO: 778974 - protein, 365 aa, Homo sapiens
MDELVHDLASALEQTSEQNKLGELWEEMALSPRQQRRQLRKRRGRKRRSDFTHLAEHTCCYSEASESSLDEATKDCREVAPVTNFSDSDDTMVAKRHPALNAIVKSKQHSWHESDSFTENAPCRPLRRRRKVKRVTSEVAASLQQKLKVSDWSYERGCRFKSAKKQRLSRWKENTPWTSSGHGLCESAENRTFLSKTGRKERMECETDEQKQGSDENMSECETSSVCSSSDTGLFTNDEGRQGDDEQSDWFYEGECVPGFTVPNLLPKWAPDHCSEVERMDSGLDKFSDSTFLLPSRPAQRGYHTRLNRLPGAAARCLRKGRRRLVGKETSINTLGTERISHIISDPRQKDFWLPSAGKRERNQF

SEQ ID NO: 778975 - protein, 351 aa, Homo sapiens; identical to SEQ ID NO: 778968

SEQ ID NO: 778976 - protein, 351 aa, Homo sapiens; identical to SEQ ID NO: 778968

SEQ ID NO: 778977 - protein, 119 aa, Homo sapiens
FGSEVPAPSSPVLGYMRGVETTQVLSGLTTRTNSSFKHSSGFFLSEGHVVGIFFLNSEILRQQFFTKRSSSALFVTLLLLSQHLLQLHLQNCCFFAVVFVLEKPVTASAYLLCRAFNII

SEQ ID NO: 778978 - protein, 126 aa, Homo sapiens
YPPLYTQYIHHSTMYTPLSMYTPLYNEHTTLHTMYTPLSMYIPLYNEHTTLHTMYTPLCKQCTHHSTMNTPLYTQCTHHSTMNTPLYTPCTCHSTIYPPLYTQCIHHSTMNTPLYTPLYNVHTMLQ

SEQ ID NO: 778979 - protein, 102 aa, Homo sapiens
MMVIYTGGHIILTFLILPYTGNNEKMKFLNFKDISNWRPHIQPISWPVGGAKGLSRPLGEGFPFGPAGKQFSYPFSTHRWLCAMCCVLRRERQSLISIHTRD

SEQ ID NO: 778980 - protein, 227 aa, Homo sapiens
MVVRKRKRLQGREASVWSGQVPGSGPPAAMPSPRRSMEGRPLGVSASSSSSSPGSPAHGGGGGGSRFEFQSLLSSRATAVDPTCARLRASESPVHRRGSFPLAAAGPSQSPAPPLPEEDRMDLNPSFLGIALRSLLAIDLWLSKKLGVCAGESSSWGSVRPLMKLLEISGHGIPWLLGTLYCLCRSDSWAGREVLMNLLFALLLDLLLVALIKGLVRRRRPAHNQMD

SEQ ID NO: 778981 - protein, 117 aa, Homo sapiens
DAWVDGRVGCCTFLSGFLLLAGTQDGNIYQLDVRSPRAPVQVIHRSGAPVLSLLSVRDGFIASQGDGSCFIVQQDLDYVTELTGADCDPVYKVATWEKQIYTCCRDGLVRRYQLSDL

SEQ ID NO: 778982 - protein, 90 aa, Homo sapiens
THFREGAEEVGWWRRGRDGGAFEDSERLGASPQVNPGPEQSQRRRVVDVALRQGEPCLVQHINRGYFVNCRGIWREQGPEKEVQTRMVIL

SEQ ID NO: 778983 - protein, 95 aa, Homo sapiens
PLMQGQLAVLRIKSDWAQALRKDEGEAWLSCHPPGKPSLYGSLTCQGIGLDGIPEVTASEGFTVNEINKKSIHISCPKENASSKFLAPWRSCGPR

SEQ ID NO: 778984 - protein, 375 aa, Homo sapiens
MLVPCFLYSLQNRKPSLYGSLTCQGIGLDGIPEVTASEGFTVNEINKKSIHISCPKENASSKFLAPYTTFSRIHTKSITCLDISSRGGLGVSSSTDGTMKIWQASNGELRRVLEGHVFDVNCCRFFPSGLVVLSGGMDAQLKIWSAEDASCVVTFKGHKGGILDTAIVDRGRNVVSASRDGTARLWDCGRSACLGVLADCGSSINGVAVGAADNSINLGSPEQMPSEREVGTEAKMLLLAREDKKLQCLGLQSRQLVFLFIGSDAFNCCTFLSGFLLLAGTQDGNIYQLDVRSPRAPVQVIHRSGAPVLSLLSVRDGFIASQGDGSCFIVQQDLDYVTELTGADCDPVYKVATWEKQIYTCCRDGLVRRYQLSDL

SEQ ID NO: 778985 - protein, 375 aa, Homo sapiens; identical to SEQ ID NO: 778984

SEQ ID NO: 778986 - protein, 238 aa, Homo sapiens
MLVPCFLYSLQNRKPSLYGSLTCQGIGLDGIPEVTASEGFTVNEINKKSIHISCPKENASSKFLAPYTTFSRIHTKSITCLDISSRGGLGVSSSTDGTMKIWQASNGELRRVLEGHVFDVNCCRFFPSGLVVLSGGMDAQLKIWSAEDASCVVTFKGHKGGILDTAIVDRGRNVVSASRDGTARLWDCGRSACLGVLADCGSSINGVAVGAADNSINLGSPEQMPSKLIMICSIVLFS

SEQ ID NO: 778987 - protein, 409 aa, Homo sapiens
LTSGKGRKRWAGGGGVEMAAPLRIQSDWAQALRKDEGEAWLSCHPPGKPSLYGSLTCQGIGLDGIPEVTASEGFTVNEINKKSIHISCPKENASSKFLAPYTTFSRIHTKSITCLDISSRGGLGVSSSTDGTMKIWQASNGELRRVLEGHVFDVNCCRFFPSGLVVLSGGMDAQLKIWSAEDASCVVTFKGHKGGILDTAIVDRGRNVVSASRDGTARLWDCGRSACLGVLADCGSSINGVAVGAADNSINLGSPEQMPSEREVGTEAKMLLLAREDKKLQCLGLQSRQLVFLFIGSDAFNCCTFLSGFLLLAGTQDGNIYQLDVRSPRAPVQVIHRSGAPVLSLLSVRDGFIASQGDGSCFIVQQDLDYVTELTGADCDPVYKVATWEKQIYTCCRDGLVRRYQLSDL

SEQ ID NO: 778988 - protein, 116 aa, Homo sapiens
TCSEHVCEGMESFMQLHLLCPCSSFTPSSILGSFFLLLGILDTAIVDRGRNVVSASRDGTARLWDCGRSACLGVLADCGSSINGVAVGAADNSINLGSPEQMPSKLIMICSIVLFS

SEQ ID NO: 778989 - protein, 375 aa, Homo sapiens; identical to SEQ ID NO: 778984

SEQ ID NO: 778990 - protein, 374 aa, Homo sapiens
MKGRLAELSSPRKPSLYGSLTCQGIGLDGIPEVTASEGFTVNEINKKSIHISCPKENASSKFLAPYTTFSRIHTKSITCLDISSRGGLGVSSSTDGTMKIWQASNGELRRVLEGHVFDVNCCRFFPSGLVVLSGGMDAQLKIWSAEDASCVVTFKGHKGGILDTAIVDRGRNVVSASRDGTARLWDCGRSACLGVLADCGSSINGVAVGAADNSINLGSPEQMPSEREVGTEAKMLLLAREDKKLQCLGLQSRQLVFLFIGSDAFNCCTFLSGFLLLAGTQDGNIYQLDVRSPRAPVQVIHRSGAPVLSLLSVRDGFIASQGDGSCFIVQQDLDYVTELTGADCDPVYKVATWEKQIYTCCRDGLVRRYQLSDL

SEQ ID NO: 778991 - protein, 240 aa, Homo sapiens
MQLHLLCPCSSFTPSSILGSFFLLLGILDTAIVDRGRNVVSASRDGTARLWDCGRSACLGVLADCGSSINGVAVGAADNSINLGSPEQMPSEREVGTEAKMLLLAREDKKLQCLGLQSRQLVFLFIGSDAFNCCTFLSGFLLLAGTQDGNIYQLDVRSPRAPVQVIHRSGAPVLSLLSVRDGFIASQGDGSCFIVQQDLDYVTELTGADCDPVYKVATWEKQIYTCCRDGLVRRYQLSDL

SEQ ID NO: 778992 - protein, 168 aa, Homo sapiens
ALGNACCSCPCPRAPSPSPSPVAHHPCFGAMQLPPFDMWKDYFNLSQVVWALIASRGQRLETQEIEEPSPGPPLGQDQGLGAPGANGGLGTLCNFCKHNGESRHVYSSHQLKTPDGVVVCPILRHYVCPVCGATGDQAHTLKYCPLNGGQQSLYRRSGRNSAGRRVKR

SEQ ID NO: 778993 - protein, 101 aa, Homo sapiens
QNVAFGKDDVEGEELLPLNAAAVYAKTWGDGPGTVAHACNPSTVGGRGGQIMGSGVRDQPDQHGETPSLLKKKNTKISWVWWRVPVIPATQGAKARESLEP

SEQ ID NO: 778994 - protein, 107 aa, Homo sapiens
QQGLTLLLRLECGGTITAHCSLNLPGSSNPPTSASYVARITGMRHHVQLIFKFLVLGLAVLPRLVLNYSWAQVILPPQPSKVLELQTLGTTRMICILVMVVVVWVYT

SEQ ID NO: 778995 - protein, 108 aa, Homo sapiens
MREWAHMYLQSSVEAPLSYSPPLSQWPLLGSLSPKPQLTGKATESMQMPSLLSQPTPDNPVYGLSRLLASLGPPCLRAVSALSSILFKRVSSDGKKRESTQGIHGAPF

SEQ ID NO: 778996 - protein, 279 aa, Homo sapiens
MLSSEAAWVSQYKDITDVDEMKVPDCAETFMTLLLVITDRYKNLPTASRKLQFLELQKDLVDDFRIRLTQVMKEETRASLGFRYCAILNAVNYISTVLADWADNVFFLQLQQAALGVFAENNTLSKLQLGQLASMESSVFDDMINLLERLKHDMLTRQVDHVFREVKDAAKLYKKERWLSLPSQSEQAVMSLSSSACPLLLTLRDHLLQLEQQLCFSLFKIFWQMLVEKLDVYIYQEIILANHFNEGGAAQLQFDMTRNLFLCFLTIARDQKIILNSKL

SEQ ID NO: 778997 - protein, 110 aa, Homo sapiens
MTYRLPHSCGSVPISRPQVLVASTTVLELSEAFTLNCSHENGTKPSYTWLKDGKPLLNDSRMLLSPDQKVLTITRVLMEDDDLYSCMVENPISQGRSLPVGLVGRLSASR

SEQ ID NO: 778998 - protein, 102 aa, Homo sapiens
LHPPFKHPSTYRSSDISPAISHLPSLPHLISPIHLLSHFPIHPLSSPLPRPTPAYRTHSFLHSPIHAHLFIHFLHHPLIHSGGRCQEIGVCVCVRACVHLHT

SEQ ID NO: 778999 - protein, 110 aa, Homo sapiens
SAMSRCQICYLKHHPASAPRFPNVSQRSHLQNLFLKTHLTRESNREKVAFEPGRMNKSSLQKSSLQEQNDAVRKPPWETTLNWLTKLLRAEHCLGLLYSHLYKEKEAVMD

SEQ ID NO: 779000 - protein, 48 aa, Homo sapiens
MWGEILEMTLAPGDGILKQISARRDPVAMGHTFTGPELSVGFIYWDTG

SEQ ID NO: 779001 - protein, 120 aa, Homo sapiens
QAGLREASPAPAAMLRPEAVLDLASFLLQDGRLCLLHGCMTSLGWVCPGKVGVHWEPCHVSGPVLALPRVRDLGPPHWLGGAGWVEIHMCSLRPRVPGCPQQGLHPSLCAYSCAYEFGFV

SEQ ID NO: 779002 - protein, 89 aa, Homo sapiens
ESPSSPQQEAFVPAIRGAAFARGVRCFLESSLTGHIAEVRAGAGSRPPCAASLAPGNLQWLRPLGVRRLCRANLDLVLQFLLTIPNSTL

SEQ ID NO: 779003 - protein, 89 aa, Homo sapiens; identical to SEQ ID NO: 779002

SEQ ID NO: 779004 - protein, 130 aa, Homo sapiens
DIGDTTIQLSWSRGFDNHSPIAKYTLQARTPPAGKWKQVRTNPANIEGNAETAQVLGLTPWMDYEFRVIASNILGTGEPSGPSSKIRTREAAPSVAPSGLSGGGGAPGELIVNWTPMSREYQNGDGFGYL

SEQ ID NO: 779005 - protein, 111 aa, Homo sapiens
DIGDTTIQLSWSRGFDNHSPIAKYTLQARTPPAGKWKQVRTNPANIEGNAETAQVLGLTPWMDYEFRVIASNILGTGEPSGPSSKIRTREAGESPVCPKKLSSGQRPWHHL

SEQ ID NO: 779006 - protein, 297 aa, Homo sapiens
MAKVSELYDVTWEEMRDKMRKWREENSRNSEQIVEVGEELINEYASKLGDDIWIIYEQVMIAALDYGRDDLALFCLQELRRQFPGSHRVKRLTGMRFEAMERYDDAIQLYDRILQEDPTNTAARKRKIAIRKAQGKNVEAIRELNEYLEQFVGDQEAWHELAELYINEHDYAKAAFCLEELMMTNPHNHLYCQQYAEVKYTQGGLENLELSRKYFAQALKLNNRNMRALFGLYMSASHIASNPKASAKTKKDNMKYASWAASQINRAYQFAGRSKKETKYSLKAVEDMLETLQITQS

SEQ ID NO: 779007 - protein, 297 aa, Homo sapiens; identical to SEQ ID NO: 779006

SEQ ID NO: 779008 - protein, 262 aa, Homo sapiens
MAKVSELYDVTWEEMRDKMRKWREENSRNSEQIVEVGEELINEYASKLGDDIWIIYEQVMIAALDYGRDDLALFCLQELRRQFPGSHRVKRLTGMRFEAMERYDDAIQLYDRILQEDPTNTAARKRKIAIRKAQGKNVEAIRELNEYLEQFVGDQEAWHELAELYINEHDYAKAAFCLEELMMTNPHNHLYCQQYAEVKYTQGGLENLELSRKYFAQALKLNNRNMRALFGLYMFAGRSKKETKYSLKAVEDMLETLQITQS

SEQ ID NO: 779009 - protein, 262 aa, Homo sapiens; identical to SEQ ID NO: 779008

SEQ ID NO: 779010 - protein, 205 aa, Homo sapiens
CSRGQTVTWELSPALQVAFSSFSSSHALRAARKRKIAIRKAQGKNVEAIRELNEYLEQFVGDQEAWHELAELYINEHDYAKAAFCLEELMMTNPHNHLYCQQYAEVKYTQGGLENLELSRKYFAQALKLNNRNMRALFGLYMSASHIASNPKASAKTKKDNMKYASWAASQINRAYQFAGRSKKETKYSLKAVEDMLETLQITQS

SEQ ID NO: 779011 - protein, 204 aa, Homo sapiens
MAKVSELYDVTWEEMRDKMRKWREENSRNSEQIVEVGEELINEYASKLGDDIWIIYEQVMIAALDYGRDDLALFCLQELRRQFPGSHRVKRLTGMRFEAMERYDDAIQLYDRILQEDPTNTAARKRKIAIRKAQGKNVEAIRELNEYLEQFVGDQEAWHELAELYINEHDLQVEVRRKPNILLRLSKTCWKHCRSPSLKVSKTL

SEQ ID NO: 779012 - protein, 132 aa, Homo sapiens
MAKVSELYDVTWEEMRDKMRKWREENSRNSEQIVEVGEELINEYASKLGDDIWIIYEQVMIAALDYGRDDLALFCLQELRRQFPGSHRVKRLTGMRFEAMERYDDAIQLYDRILQEDPTNTGETPSLLKSKN

SEQ ID NO: 779013 - protein, 128 aa, Homo sapiens
MAKVSELYDVTWEEMRDKMRKWREENSRNSEQIVEVGEELINEYASKLGDDIWIIYEQVMIAALDYGRDDLALFCLQELRRQFPGSHRVKRLTGMRFEAMERYDDAIQLYDRILQEDPTNTDSRPVMG

SEQ ID NO: 779014 - protein, 315 aa, Homo sapiens
HVTASPRPLTPLPLGSGKMAKVSELYDVTWEEMRDKMRKWREENSRNSEQIVEVGEELINEYASKLGDDIWIIYEQVMIAALDYGRDDLALFCLQELRRQFPGSHRVKRLTGMRFEAMERYDDAIQLYDRILQEDPTNTAARKRKIAIRKAQGKNVEAIRELNEYLEQFVGDQEAWHELAELYINEHDYAKAAFCLEELMMTNPHNHLYCQQYAEVKYTQGGLENLELSRKYFAQALKLNNRNMRALFGLYMSASHIASNPKASAKTKKDNMKYASWAASQINRAYQFAGRSKKETKYSLKAVEDMLETLQITQS

SEQ ID NO: 779015 - protein, 273 aa, Homo sapiens
MAKVSELYDVTWEEMRDKMRKWREENSRNSEQIVEVGEELINEYASKLGDDIWIIYEQVMIAALDYGRDDLALFCLQELRRQFPGSHRVKRLTGMRFEAMERYDDAIQLYDRILQEDPTNTAARKRKIAIRKAQGKNVEAIRELNEYLEQFVGDQEAWHELAELYINEHDYAKAAFCLEELMMTNPHNHLYCQQYAEVKYTQGGLENLELSRKYFAQALKLNNRNMRALFGLYMSASHIASNPKASAKTKKDNMKYASWAASQINRAYQPATR

SEQ ID NO: 779016 - protein, 201 aa, Homo sapiens
MAKVSELYDVTWEEMRDKMRKWREENSRNSEQIVEVGEELINEYASKLGDDIWIIYEQVMIAALDYGRDDLALFCLQELRRQFPGSHRVKRLTGMRFEAMERYDDAIQLYDRILQEDPTNTAARKRKIAIRKAQGKNVEAIRELNEYLEQFVGDQEAWHELAELYINEHDYALNTQHFVELSIPKVDLKTSNFQESILHRH

SEQ ID NO: 779017 - protein, 201 aa, Homo sapiens; identical to SEQ ID NO: 779016

SEQ ID NO: 779018 - protein, 212 aa, Homo sapiens
MAKVSELYDVTWEEMRDKMRKWREENSRNSEQIVEVGEELINEYASKLGDDIWIIYEQVMIAALDYGRDDLALFCLQELRRQFPGSHRVKRLTGMRFEAMERYDDAIQLYDRILQEDPTNTAARKRKIAIRKAQGKNVEAIRELNEYLEQFVGDQEAWHELAELYINEHEIESDSHAHFLVHEYLTLFSYYKQLMRNRMKTFVYCLWSIYIM

SEQ ID NO: 779019 - protein, 123 aa, Homo sapiens
MAKVSELYDVTWEEMRDKMRKWREENSRNSEQIVEVGEELINEYASKLGDDIWIIYEQVMIAALDYGRDDLALFCLQELRRQFPGSHRVKRLTGMRFEAMESFGSRNGKTSKKITIADCGQLE

SEQ ID NO: 779020 - protein, 90 aa, Homo sapiens
SGARAVFRPGLVRGRLAASAYGVCWLRRLAHSLEGSARPCSLDIIFHTTPVRRLEELSRGWRDARGYCVDGGCASDTGSERKISYTANFR

SEQ ID NO: 779021 - protein, 80 aa, Homo sapiens
RQISLNASKQIMHLGPLGFLHCRASFGRYGFALGFPKDGMATENPLMRCLQKLELGLSGWVLGVLKQSESSEWVLEGDGF

SEQ ID NO: 779022 - protein, 112 aa, Homo sapiens
QGGHSFKQFILQARKTIGKISFLLSLAFLFNPIIFPTVWAEVQKLQTGTFCPFLFFSLPKVTLAIDGLGKNYHAPFPQSYFLSSILSYSLFFFALLLGSKDQEGRKSHLNGA

SEQ ID NO: 779023 - protein, 117 aa, Homo sapiens
QPTRLNATNTNTRVNHLGLRGCFCHCHCHHSHQAGCPRGSRTSPPTPPTVVTAGIQVICLETQQLAHLDSLTMVPDHPGAQRHTYSSHCCHHWGSKTDLPGVTVPSKTTASFNNCTL

SEQ ID NO: 779024 - protein, 185 aa, Homo sapiens
RREAGPRRGAMLRTEVPRLPRSTTAIVWSCHLMATASAMAGPSSETTSEEQLITQEPKEANSTTSQKQSKQRKRGRHGPRRCHSNCRGDSFATYFRRVLKQVHQGLSLSREAVSVMDSLVHDILDRIATEAGRLARSTKRQTITAWETRMAVRLLLPGQMGKLAESEGTKAVLRTSLYAIQQQRK

SEQ ID NO: 779025 - protein, 69 aa, Homo sapiens
LSVHRRISSQIQNLQFFQNEMSRDHKYHTTGINSHTGLLRTHLKTARRSAREQHRLYVYVMFQFLQLHK

SEQ ID NO: 779026 - protein, 69 aa, Homo sapiens
RQIESSRYQFHSSVEQPKRHRTHVKTACLYCKCSFQTAAPTLSYSAMLLPLSSLGAATATPVGQWGKLA

SEQ ID NO: 779027 - protein, 82 aa, Homo sapiens
LRHTITQSKALTLFNSMKAERGEEAAEEKCEASRGWLMRFKGRSHLHNVQIQGEAASAAGEAGASSPEDLAQIIDEGGRTKQ

SEQ ID NO: 779028 - protein, 126 aa, Homo sapiens
TLTSLSRPPGFPPPLLLPVLSFCRLRLLAYLWGLVLFLVFMETAWPQEAQAALSCKGRIMQATAALPLSHRALFLTRFIRDMVWQSLDPTVGLASGDRTNIPTPQRRTSGECKEPLSRGRQPAGCS

SEQ ID NO: 779029 - protein, 60 aa, Homo sapiens
ARSLFGATVHDGRIIVAAGVTDTGLTSSAEVYSITDNKWAPFEAFPQERSSLSLVSLVGT

SEQ ID NO: 779030 - protein, 244 aa, Homo sapiens
SCAFREKAKEFLVSKNEEMVQRQTIWTLLSIYIDGVQEVFETSYCLYPSHEKLLNDGFSMLLRACRESELRTVLSFLQAVLARIRSMHQQLCQELQRDNVDLFVQSSLSAKERHLAAVASALWRHFFSFLKSQRMSQVVPFSQLADAAADFTLLAMDMPSTAPSDFQPQPVISIIQLFGWDDIICPQVVARYLSHVLQNSTLCEALSHSGYVSFQALTVRSWIRCVLQMYIKNLSGPDDLLIDK

SEQ ID NO: 779031 - protein, 127 aa, Homo sapiens
PVLTVGRRRSMDKHSPCESVNLPALAVGRRRRPHKHSPCESVNLPVLTVGRRRSLDKHSPCESVNLPALAVGHRRSLDKHSPCESVNLPALAVGHRRSVDKHSPCESVNLPAFAVGRRRRPHKHSPC

SEQ ID NO: 779032 - protein, 102 aa, Homo sapiens
MLRHKTKRGHASLDCLKVFDGIPPPYDKKKRMVVPAALKVVRLKPTRKFALLGRQAQEVRWKYQAVTATLEEKRKEKAKIHYWKKKQLMRLRKQAEKNVKKN

SEQ ID NO: 779033 - protein, 107 aa, Homo sapiens
RLQPCTPDPRPQVQLRSHPRTRAGTWPVAQRNHPRPPEPCTGRQASGPGPPGLPAAPRNVMHWGGGGGGGGGGGNRGGAAAAALPQSRHIQKRRKMAPSRDRLLHFG

SEQ ID NO: 779034 - protein, 233 aa, Homo sapiens
GVRLPPHRLAPPLATCPARRAGAVPVRRPVYAGSFSQSFFVLRCEKRWDSSIKATSGKSVCRTDASRLTHRERLLRPAEKRGALTRARSSHSSVGLGGWRAGGGGRACAGSGRSCGTRRADCACALVAWLRRGRGHRAAPEVGRWLPPVPGQRPGVSPTHPLLSLRSAQRPGQGGAARPPRGAGCPPTRKGDARAPRPQAPPCAFAAPGPPRPTLAPALLSSRGGAAYSVRSP

SEQ ID NO: 779035 - protein, 106 aa, Homo sapiens
THSRDTRPFPHPLHRKEKEVRLGPCPQLPQAGKFTSTADRAGDNSSIRKTHKAIGLQRECSPSARSFSRTKPAEKAVSEYHARTTGSLFLGSGIYRLRCWSPTSLI

SEQ ID NO: 779036 - protein, 88 aa, Homo sapiens
TSYPLTDLGASTRILSTFLQNLGNKSETPSQNHNNNNRTTEMDDGSGKPTRQREARTERGTGSSAQCRYRGSLRLTTGHSSREVLVSS

SEQ ID NO: 779037 - protein, 244 aa, Homo sapiens
  misc_feature (101)..(102): Xaa can be any naturally occurring amino acid
DADAVTSLIPTIIRNPCGRHRRQTFRSLSNYCRTSVPTGAFRYKSLVYSTDTYVQCPTASREEAAPCAASDPMYDRVVTRLYTCGPSRFNTQAYVKTPRDXXRLSRWMLNSSRLHETAFLSPKRLFPYKECKEKFGKPNKRRGFSAGLWEIENNPTVQASDCPLASEKGSGDGPWPEPEAAEGDEDKPTHAGGGGDELGKPDDDKPTEEEKGPLKRSAGDPPEDAPKRPKEAAPDQEEEAEAER

SEQ ID NO: 779038 - protein, 138 aa, Homo sapiens
MLTLTRHRTRNASLDPKRLFPYKECKEKFGKPNKRRGFSAGLWEIENNPTVQASDCPLASEKGSGDGPWPEPEAAEGDEDKPTHAGGGGDELGKPDDDKPTEEEKGPLKRSAGDPPEDAPKRPKEAAPDQEEEAEAER

SEQ ID NO: 779039 - protein, 194 aa, Homo sapiens
AGVGHREVRHKACISTYGACRMCKSGAHCAVLPMYIVSYTPLAGIKKRIKPSTTVTDCVTLTRIHETAFLSPKRLFPYKECKEKFGKPNKRRGFSAGLWEIENNPTVQASDCPLASEKGSGDGPWPEPEAAEGDEDKPTHAGGGGDELGKPDDDKPTEEEKGPLKRSAGDPPEDAPKRPKEAAPDQEEEAEAER

SEQ ID NO: 779040 - protein, 184 aa, Homo sapiens
AQAGSAEPAMSAYGMPMYKSGDLVFAKLKGYAHWPARIEHMTQPNRYQVFFFGTHETAFLSPKRLFPYKECKEKFGKPNKRRGFSAGLWEIENNPTVQASDCPLASEKGSGDGPWPEPEAAEGDEDKPTHAGGGGDELGKPDDDKPTEEEKGPLKRSAGDPPEDAPKRPKEAAPDQEEEAEAER

SEQ ID NO: 779041 - protein, 66 aa, Homo sapiens
MGQHEPLTGVAGNMSPAGNITARGAVGGPPSHRMAMLLVLLRQCGPRTQASCLMAFICPSRNSEGG

SEQ ID NO: 779042 - protein, 86 aa, Homo sapiens
RRRVTPSDRFGFVTLRVPVSVYDDNRSVIYESCIPGIIACVDGSSCWMHLTNMIISGENARVYGDRNHRIGRSWKSSERMSHEDVS

SEQ ID NO: 779043 - protein, 275 aa, Homo sapiens
RSWGKGREGVVSPAGLGGALPGDGKFGSPSRLGCSLGEGVQRVAALGMGKEQELLEAARTGHLPAVEKLLSGKRLSSGFGGGGGGGSGGGGGGSGGGGGGLGSSSHPRLQSAQKSKHAMRADSVFLSICTRPAPRRRTSRVLLSYMPLLDEGQSVNVCRPALATQPLQPCCLLQLAHHGLSDRRFLSERTDGRLTNRGLTSPAPAYASCHLRGPGQGEMPSTSASLLTSTFTVALPPRTKEARSGHMNTGGPNGEPCPVPLVGSCLAMAHPKSVV

SEQ ID NO: 779044 - protein, 104 aa, Homo sapiens
TQSQFQPLLETREGADQIRKPRASAPQGGSWSMDAGAFLPGVWSSGNLHCEGAPSGGDAVSSRARLREPPAQSALDSRRRCVILPVSGQEAQGHDPVSGCGDEG

SEQ ID NO: 779045 - protein, 72 aa, Homo sapiens [sequence omitted]

SEQ ID NO: 779046 - protein, 147 aa, Homo sapiens
GSLQCAGLSALDGSFYLFIIIILRQNVALLPRLECNGAISAHCNLCLLGSSNSLTSASQIAGITGVGHNTRLIFVFLVETGFHHVDQTGLELLTSGDPPASASQSAGITGVSHCARPLVSFIINWQTLSVSLSSMSHSSKLIKPKRG

SEQ ID NO: 779047 - protein, 117 aa, Homo sapiens
PGVMAGEEGWRGRLGRAHRGYYQETPDSCRRGLVRWGLWESTELGATRRFHPHSVVCTFTGAIKTKDESQAGLGACLLRAPAPRPPGRAGSQPGFLLGTLWGGSCTGPPLAPCTQAP

SEQ ID NO: 779048 - protein, 131 aa, Homo sapiens
MDSVEKGAATSVSNPRGRPSRGRPPKLQRNSRGGQGRGVEKPPHLAALILARGGSKGIPLKNIKHLAGVPLIGWVLRAALDSGAFQRCACARVGGAAWAGVGRGSRAAGGAGASGATALGRGPSLMPGMCK

SEQ ID NO: 779049 - protein, 140 aa, Homo sapiens
  misc_feature (83)..(84): Xaa can be any naturally occurring amino acid
YGDDVRVRSNSGVVLVPGSGQILFIHLRSSWKWIHMRVMDRVWLTIFPGKRVGSDAEMGVGDELGSLVLSVVRLQVHIQHADXXPGERDEEGESLPHACTQAWVRMSFSKVLLYRLLHIILHLHLGNNELFPFFEMYLRR

SEQ ID NO: 779050 - protein, 87 aa, Homo sapiens
EDFDMCYWIDRNKKMGWGESQLSFKRKWNFIRKACARDKVSGEPLRMQRTQWSRGDYLGKESMRKNAELETTTGLKLSDEWSVRLDW

SEQ ID NO: 779051 - protein, 214 aa, Homo sapiens
MSLIHKEPSQNQYTKIGRVQWLMPVIIAVWEAKVEGSLESRSSRPCLCNRVIPAVSIKIIKTKLKETLLCSPLPLVHPCRPTRTFRRAAHTWGSHSAGLWLNSAFALVWTFGRAVHVWGSLSAGLWLNSAFALVGTFGKAVHAWGSLGAEGLWLSSTFASVWTFGRAVQKDSGSIVALHRFGPSGGWYTPGVVSVQDSGSIAPLHWFGPSGGQY

SEQ ID NO: 779052 - protein, 68 aa, Homo sapiens
MEGTLRQIKIRRQGVRYMGEINNELPRNKDLFVRVSPRKPPPSFPPPIVSELTEKLMQESVRDQSIIF

SEQ ID NO: 779053 - protein, 88 aa, Homo sapiens
RRHVAVRKYEEMREEASNIRPQYAILTPETWPRWRGDERQGVQHLLRAVNMEPDQYQMGSTKVFVKNPESVSVFEGQAEKERGRERKV

SEQ ID NO: 779054 - protein, 529 aa, Homo sapiens
TVSAPVVPQSAMQVIGIPPSIQQLVLQLVAGILHLGNISFCEDGNYARVESVDLLAFPAYLLGIDSGRLQEKLTSRKMDSRWGGRSESINVTLNVEQAAYTRDALAKGLYARLFDFLVEAINRAMQKPQEEYSIGVLDIYGFEIFQKNGFEQFCINFVNEKLQQIFIELTLKAEQEEYVQEGIRWTPIQYFNNKVVCDLIENKLSPPGIMSVLDDVCATMHATGGGADQTLLQKLQAAVGTHEHFNSWSAGFVIHHYVGSYDVSGFCERNRDVLFSDLIELMQTSEQAFLRMLFPEKLDGDKKGRPSTAGSKIKKQANDLVATLMRCTPHYIRCIKPNETKRPRDWEENRVKHQVEYLGLKENIRVRRAGFAYRRQFAKFLQRYAILTPETWPRWRGDERQGVQHLLRAVNMEPDQYQMGSTKVFVKNPESLFLLEEVRERKFDGFARTIQKAWRRHVAVRKYEEMREEASNILLNKKERRRNSINRNFVGDYLGLEERPELRQFLGKRERVDFADSVTKYDRRFKVRH

SEQ ID NO: 779055 - protein, 195 aa, Homo sapiens
TVSAPVVPQSAMQVIGIPPSIQQLVLQLVAGILHLGNISFCEDGNYARVESVDLLAFPAYLLGIDSGRLQEKLTSRKMDSRWGGRSESINVTLNVEQAAYTRDALAKGLYARLFDFLVEAINRAMQKPQEEYSIGVLDIYGFEIFQKNGFEQFCINFVNEKLQQIFIELTLKAEQVGGQAVRDGGSWGGGGVEGP

SEQ ID NO: 779056 - protein, 133 aa, Homo sapiens
SQAPGGIPGPEGEHQGAQSRLRLPPPVRQIPAEVRSPPPPPSPSPSSERPARPVCYEHPTPQPSALRYAILTPETWPRWRGDERQGVQHLLRAVNMEPDQYQMGSTKVFVKNPESVSVFEGQAEKERGRERKV

SEQ ID NO: 779057 - protein, 848 aa, Homo sapiens
TVSAPVVPQSAMQVIGIPPSIQQLVLQLVAGILHLGNISFCEDGNYARVESVDLLAFPAYLLGIDSGRLQEKLTSRKMDSRWGGRSESINVTLNVEQAAYTRDALAKGLYARLFDFLVEAINRAMQKPQEEYSIGVLDIYGFEIFQKNGFEQFCINFVNEKLQQIFIELTLKAEQEEYVQEGIRWTPIQYFNNKVVCDLIENKLSPPGIMSVLDDVCATMHATGGGADQTLLQKLQAAVGTHEHFNSWSAGFVIHHYVGSYDVSGFCERNRDVLFSDLIELMQTSEQAFLRMLFPEKLDGDKKGRPSTAGSKIKKQANDLVATLMRCTPHYIRCIKPNETKRPRDWEENRVKHQVEYLGLKENIRVRRAGFAYRRQFAKFLQRYAILTPETWPRWRGDERQGVQHLLRAVNMEPDQYQMGSTKVFVKNPESLFLLEEVRERKFDGFARTIQKAWRRHVAVRKYEEMREEASNILLNKKERRRNSINRNFVGDYLGLEERPELRQFLGKRERVDFADSVTKYDRRFKPIKRDLILTPKCVYVIGREKVKKGPEKGQVCEVLKKKVDIQALRGVSLSTRQDDFFILQEDAADSFLESVFKTEFVSLLCKRFEEATRRPLPLTFSDTLQFRVKKEGWGGGGTRSVTFSRGFGDLAVLKVGGRTLTVSVGDGLPKSSKPTRKGMAKGKPRRSSQAPTRAAPAPPRGMDRNGVPPSARGGPLPLEIMSGGGTHRPPRGPPSTSLGASRRPRARPPSEHNTEFLNVPDQGMAGMQRKRSVGQRPVPGVGRPKPQPRTHGPRCRALYQYVGQDVDELSFNVNEVIEILMEDPSGWWKGRLHGQEGLFPGNYVEKI

SEQ ID NO: 779058 - protein, 258 aa, Homo sapiens
TVSAPVVPQSAMQVIGIPPSIQQLVLQLVAGILHLGNISFCEDGNYARVESVDLLAFPAYLLGIDSGRLQEKLTSRKMDSRWGGRSESINVTLNVEQAAYTRDALAKGLYARLFDFLVEAINRAMQKPQEEYSIGVLDIYGFEIFQKNGFEQFCINFVNEKLQQIFIELTLKAEQEEYVQEGIRWTPIQYFNNKVVCDLIENKLSPPGIMSVLDDVCATMHATGGGADQTLLQKLQAAVGTHEHFNSWSAGFVIHHYY

SEQ ID NO: 779059 - protein, 316 aa, Homo sapiens
TVSAPVVPQSAMQVIGIPPSIQQLVLQLVAGILHLGNISFCEDGNYARVESVDLLAFPAYLLGIDSGRLQEKLTSRKMDSRWGGRSESINVTLNVEQAAYTRDALAKGLYARLFDFLVEAINRAMQKPQEEYSIGVLDIYGFEIFQKNGFEQFCINFVNEKLQQIFIELTLKAEQEEYVQEGIRWTPIQYFNNKVVCDLIENKLSPPGIMSVLDDVCATMHATGGGADQTLLQKLQAAVGTHEHFNSWSAGFVIHHYAGKVRPLPLPYPVPPRRPPGLQAVAPTLQHPGWKEPARTLIQGCRIPLSPASIHPLLTR

SEQ ID NO: 779060 - protein, 129 aa, Homo sapiens
PCWGLYENRNRVRADPRSPRPPSGLTPGNREASLSWLFGERAPRRAKLGPGALRRIRPAGSQPLPAPDAPTWRRCINGSESVGGRARQGETEPCAGSQRRPSTLRPYPARRHCSAVGSGVCLLREGRSH

SEQ ID NO: 779061 - protein, 31 aa, Homo sapiens
MALNVTIAVEQWAIPVGLLGPGWGAELFPWD

SEQ ID NO: 779062 - protein, 67 aa, Homo sapiens
VQIPSSWQTSDNMQIIRSHKDFTCMSTQMPSHIHMSRYPLVGKQVTICKLSEATKICFGGEPEQTRN

SEQ ID NO: 779063 - protein, 37 aa, Homo sapiens
EPCCLSVSVSKTAESLTIAGPWRERCHTSFLPPGGAR

SEQ ID NO: 779064 - protein, 47 aa, Homo sapiens
HRLPAALLTNSFLEKLHGSTHSHRPLRLQGRMPVFKSLLHNLPAVGL

SEQ ID NO: 779065 - protein, 94 aa, Homo sapiens
SDATARSISSRASLAIMGHIRSVSIFSVLLIPKHPAAQDLPVDDAIFMENICSKGLHKGGIDKHRVYRGQYWVEIIVNYAHGEFYHCSRRGVIF

SEQ ID NO: 779066 - protein, 120 aa, Homo sapiens [sequence omitted]

SEQ ID NO: 779067 - protein, 164 aa, Homo sapiens
RALTHRRLRRSRAGAPHAPDGRTAASGGAMASAAAGEAEETTRLRKPRFSFEENQILIREVRAHYPQLYGAQSRRVSVAERRRVWDGIAAKINGITSWKRTGQEVQKRWNDFKRRTKEKLARVPHSTQGAGPAAEDAFSAEEETIFAILGPGVAAPGAGAGAEE

SEQ ID NO: 779068 - protein, 279 aa, Homo sapiens
EFLPVNWHSPLHSTGVDVDLQRITLPSINRLRHFTNDTILDVFFYNSPTYCQTIVDTVASEMNRIYTLFLQRNPDFKGGVSIAGHSLGSLILFDILTNQKDSLGDIDSEKASYVQTEIFTEHTEFLLSEQDTTQILNSFSGTRHQLNGVFKRSRTRQAWLPGSKHFRHKDIVEFLAATQLNLPRHTGDLIWDCWGILGPGCHGEQYTPRDTTTTLKSRKESNCRFMVRVMGTYRPPHVRQPGSPCYVGSTGRRKLIQQRHSGIPEEPSPGNVDRRCGNT

SEQ ID NO: 779069 - protein, 112 aa, Homo sapiens [sequence omitted]

SEQ ID NO: 779070 - protein, 82 aa, Homo sapiens
SKSKKKTDAADKPRGFARGLDPERIIGATDSSGELMFLMKWKDSDEADLVLAKEASMKCPQIVIAFYEERLTWHSCPEDEAQ

SEQ ID NO: 779071 - protein, 137 aa, Homo sapiens [sequence omitted]

SEQ ID NO: 779072 - protein, 111 aa, Homo sapiens
LPLSSSPFPSSPSFPGTLPHPHVHPLLLGPPTAAVAHLCSALASPALCSLFFYYYYYTLSFRVHVTMCRLVTYVYMCHAGALHPLNRHLALGISPNAIPPPSPHPTTVPRV

SEQ ID NO: 779073 - protein, 94 aa, Homo sapiens
MIERACVPPSNVVTVADGGYRVMDGAADSAVQIIHRGQCLVPWDRGVGVSTRKNRTARHPETEPAVGRAGRAAGPGAPEAAEEAAPQRQEPVQP

SEQ ID NO: 779074 - protein, 50 aa, Homo sapiens
AIHRHLAIHRHLAINRHLAIHRHHIKIFSLIRSGIVRTEKGSLNHGAMKE

SEQ ID NO: 779075 - protein, 118 aa, Homo sapiens
NSRPRRRRRQKGGGEVEMRQEVEGRGRGSHELIITDKRCGVCGGSLSCIVYLCISLNFSRIKKLSIHGLVLPETHPMPASSQGEPSLHFHTHLTLLCTLNLESSKQGNPKPCWLLPTP

SEQ ID NO: 779076 - protein, 87 aa, Homo sapiens
SLFIGTSLFIGTSQFIGTSLFIGSHGHARSAWFQWRGGDKSLVGIDSKERGRGRNGDRQFFLSFSLKIYADMEWSLGRDIGSGNIIF

SEQ ID NO: 779077 - protein, 202 aa, Homo sapiens
MDWKAVAAQKLNLSSKKKKHRPSTSSAAEPPLFATSFSGILQTSPPPAPPCLLRAVNKVKDTPGLGKVKVMLRICSTLARDTSESSSFLKVDPRKKQITLYDPLTCGGQNAFQKRGNQVPPKMFAFDAVFPQDASQAEVCAGTVAEVIQSVVNGADGCVFCFGHAKLGKSYTMIGKDDSMQNLGIIPCAISWLFKLINERKE

SEQ ID NO: 779078 - protein, 151 aa, Homo sapiens
MLCPTTDSHTSLGTRICLQSDSLPSQHALPWPGQCCPHPHEGGVGAAHVPAVRSASHRSSSCGDKLLCAALSFSSCVLQKALELSGPQVAFRSVDNANSSDHRQPWQAGLSVTKEYAQQRHGKTTNHLGTLRKKTRWADSTVLWGHNAQGL

SEQ ID NO: 779079 - protein, 106 aa, Homo sapiens
KKTSTTIKKKQNLKTQYNNYLHSIYIVLGILSNLEMIQSIQEDVGRLYAVTMPIYIEDGNICRFWYQGRSWNQSPTVAKRQLYAENFTALPQFRLFNLGLGFCPSW

SEQ ID NO: 779080 - protein, 103 aa, Homo sapiens
MKMVVKEKLKSKKESESQRIPAEPDLKLGEGEKVCEEEIGDWAPYVPERVEFPGNSKSTVFSSKKCAIEIKCWLSAARNSKEDTWREQSMEQEERDLLEQENI

SEQ ID NO: 779081 - protein, 53 aa, Homo sapiens
RYCCFHSDCKTVAGPFSSYDWICSYGKITLTKESTMCKNGTVLIMAKSVFHCD

SEQ ID NO: 779082 - protein, 110 aa, Homo sapiens
LCIAWLGLINVPKSVFFSPALLATPDPLHSSQPVLTLLHPNPNPSSTAVGTSPKLKIRLLLVTLARVLSPTPLTVLRIPMAHTACPGPATAWGSGPVTHRALFPSAPCIL

SEQ ID NO: 779083 - protein, 61 aa, Homo sapiens
LPEELTFKRQTPLPPHPFPVPAHGAWVEPSICVLMRFEQASQVVLRGWSPGHTEKPSSGGR

SEQ ID NO: 779084 - protein, 82 aa, Homo sapiens
ACSACCRLPAGRRLSWEGSEGWQGALLCSLGGSPWLFCMPRAVLSVEIYVGDDRLRFRLHQPDFRWTVPFSASVNTVVKRLT

SEQ ID NO: 779085 - protein, 194 aa, Homo sapiens
MANSFAARIFTTLSDLQPNMANLKVIGIVIGKTDVKGFPDRKNIGSERYTFSFTIRDSPAHFVNAASWGNEDYIKSLSDSFRVGDCVIIENPLIQRKEIEREEKFSPATPSNCKLLLSENHSTVKVCSSYEVDTKLLSLIHLPVKESHDYYSLGDIVANGHSLNGRIINVLAAVKSVGEPKILYNFRPEKRPEV

SEQ ID NO: 779086 - protein, 40 aa, Homo sapiens
AGGPGVLLLGGYVGHEVHHPVAVAKFVVIPGNELDKMVFE

SEQ ID NO: 779087 - protein, 88 aa, Homo sapiens
AGGPGVLLLGGYVGHEVHHPVAVAKFVVIPGNESPHCWGVPSTLSPPPTESPSHRCHVAPLKGEGPKEPPPFHGPSIKVPWWSTQKKK

SEQ ID NO: 779088 - protein, 139 aa, Homo sapiens
FFSLKTYSFHHRIEIGEASIILQTNASPPHVHIVNRVIYKIHFHLRRLKNDLSTKNPFQVHRTCEYYLIWKKDSYVESSWISGWALNPKTSVPVSDIWRIRCDDRGRKWSNVATSQGSQATPTTTGSRKDSLLKPQRKL

SEQ ID NO: 779089 - protein, 93 aa, Homo sapiens
ERPVDSIALSWEQNLPGLCTFNPAGSQLSAVRRKAFTLQFPGDCSQDAWVSTTDSSAEGLLRGNFPPEKHRNETAMSPVGEDDRLFTCSSQNL

SEQ ID NO: 779090 - protein, 81 aa, Homo sapiens
  misc_feature (1)..(1): Xaa can be any naturally occurring amino acid
  misc_feature (3)..(4): Xaa can be any naturally occurring amino acid
  misc_feature (10)..(10): Xaa can be any naturally occurring amino acid
  misc_feature (13)..(13): Xaa can be any naturally occurring amino acid
  misc_feature (16)..(16): Xaa can be any naturally occurring amino acid
XRXXGARGAXEWXGGXVSPSQGPWRLMSWAPLGNHRKSAVLAVWNSHPKTYFELSKKVIVPTAFVPTSPCINSPQQHRARI

SEQ ID NO: 779091 - protein, 812 aa, Homo sapiens
KELSSCLAAGPREPVLGAGGPVLTMVPAWLWLLCVSVPQALPKAQPAELSVEVPENYGGNFPLYLTKLPLPREGAEGQIVLSGDSGKATEGPFAMDPDSGFLLVTRALDREEQAEYQLQVTLEMQDGHVLWGPQPVLVHVKDENDQVPHFSQAIYRARLSRGTRPGIPFLFLEASDRDEPGTANSDLRFHILSQAPAQPSPDMFQLEPRLGALALSPKGSTSLDHALERTYQLLVQVKDMGDQASGHQATATVEVSIIESTWVSLEPIHLAENLKVLYPHHMAQYLLQVRAQNSHGEDYAAPLELHVLVMDENDNVPICPPRDPTVSIPELSPPGTEVTRLSAEDADAPGSPNSHVVYQLLSPEPEDGVEGRAFQVDPTSGSVTLGVLPLRAGQNILLLVLAMDLAGAEGGFSSTCEVEVAVTDINDHAPEFITSQIGPISLPEDVEPGTLVAMLTAIDADLEPAFRLMDFAIERGDTEGTFGLDWEPDSGHVRLRLCKNLSYEAAPSHEVVVVVQSVAKLVGPGPGPGATATVTVLVERVMPPPKLDQESYEASVPISAPAGSFLLTIQPSDPISRTLRFSLVNDSEGWLCIEKFSGEVHTAQSLQGAQPGDTYTVLVEAQDTDEPRLSASAPLVIHFLKAPPAPALTLAPVPSQYLCTPRQDHGLIVSGPSKDPDLASGHGPYSFTLGPNPTVQRDWRLQTLNGSHAYLTLALHWVEPREHIIPVVVSHNAQMWQLLVRVIVCRCNVEGQCMRKVGRMKGMPTKLSAVGILVGTLVAIGIFLILIFTHWTMSRKKDPDQPADSVPLKATV

SEQ ID NO: 779092 - protein, 648 aa, Homo sapiens
KELSSCLAAGPREPVLGAGGPVLTMVPAWLWLLCVSVPQALPKAQPAELSVEVPENYGGNFPLYLTKLPLPREGAEGQIVLSGDSGKATEGPFAMDPDSGFLLVTRALDREEQAEYQLQVTLEMQDGHVLWGPQPVLVHVKDENDQVPHFSQAIYRARLSRGTRPGIPFLFLEASDRDEPGTANSDLRFHILSQAPAQPSPDMFQLEPRLGALALSPKGSTSLDHALERTYQLLVQVKDMGDQASGHQATATVEVSIIESTWVSLEPIHLAENLKVLYPHHMAQYLLQVRAQNSHGEDYAAPLELHVLVMDENDNVPICPPRDPTVSIPELSPPGTEVTRLSAEDADAPGSPNSHVVYQLLSPEPEDGVEGRAFQVDPTSGSVTLGVLPLRAGQNILLLVLAMDLAGAEGGFSSTCEVEVAVTDINDHAPEFITSQIGPISLPEDVEPGTLVAMLTAIDADLEPAFRLMDFAIERGDTEGTFGLDWEPDSGHVRLRLCKNLSYEAAPSHEVVVVVQSVAKLVGPGPGPGATATVTVLVERVMPPPKLDQESYEASVPISAPAGSFLLTIQPSDPISRTLRFSLVNDSEGWLCIEKFSGEVHTAQSLQGAQPGDTNFMDCPWECSKCQGVCPIIKPQRTGLGPMGLVKL

SEQ ID NO: 779093 - protein, 370 aa, Homo sapiens
KELSSCLAAGPREPVLGAGGPVLTMVPAWLWLLCVSVPQALPKAQPAELSVEVPENYGGNFPLYLTKLPLPREGAEGQIVLSGDSGKATEGPFAMDPDSGFLLVTRALDREEQAEYQLQVTLEMQDGHVLWGPQPVLVHVKDENDQVPHFSQAIYRARLSRGTRPGIPFLFLEASDRDEPGTANSDLRFHILSQAPAQPSPDMFQLEPRLGALALSPKGSTSLDHALERTYQLLVQVKDMGDQASGHQATATVEVSIIESTWVSLEPIHLAENLKVLYPHHMAQVHWSGGDVHYHLESHPPGPFEVNAEGNLYVTRELDREAQAEYLLQVRAQNSHGEDYAAPLELHVLVMDENDNVPICPKSKDRYFEG

SEQ ID NO: 779094 - protein, 853 aa, Homo sapiens
KELSSCLAAGPREPVLGAGGPVLTMVPAWLWLLCVSVPQALPKAQPAELSVEVPENYGGNFPLYLTKLPLPREGAEGQIVLSGDSGKATEGPFAMDPDSGFLLVTRALDREEQAEYQLQVTLEMQDGHVLWGPQPVLVHVKDENDQVPHFSQAIYRARLSRGTRPGIPFLFLEASDRDEPGTANSDLRFHILSQAPAQPSPDMFQLEPRLGALALSPKGSTSLDHALERTYQLLVQVKDMGDQASGHQATATVEVSIIESTWVSLEPIHLAENLKVLYPHHMAQVHWSGGDVHYHLESHPPGPFEVNAEGNLYVTRELDREAQAEYLLQVRAQNSHGEDYAAPLELHVLVMDENDNVPICPPRDPTVSIPELSPPGTEVTRLSAEDADAPGSPNSHVVYQLLSPEPEDGVEGRAFQVDPTSGSVTLGVLPLRAGQNILLLVLAMDLAGAEGGFSSTCEVEVAVTDINDHAPEFITSQIGPISLPEDVEPGTLVAMLTAIDADLEPAFRLMDFAIERGDTEGTFGLDWEPDSGHVRLRLCKNLSYEAAPSHEVVVVVQSVAKLVGPGPGPGATATVTVLVERVMPPPKLDQESYEASVPISAPAGSFLLTIQPSDPISRTLRFSLVNDSEGWLCIEKFSGEVHTAQSLQGAQPGDTYTVLVEAQDTDEPRLSASAPLVIHFLKAPPAPALTLAPVPSQYLCTPRQDHGLIVSGPSKDPDLASGHGPYSFTLGPNPTVQRDWRLQTLNGSHAYLTLALHWVEPREHIIPVVVSHNAQMWQLLVRVIVCRCNVEGQCMRKVGRMKGMPTKLSAVGILVGTLVAIGIFLILIFTHWTMSRKKDPDQPADSVPLKATV

SEQ ID NO: 779095 - protein, 714 aa, Homo sapiens
KELSSCLAAGPREPVLGAGGPVLTMVPAWLWLLCVSVPQALPKAQPAELSVEVPENYGGNFPLYLTKLPLPREGAEGQIVLSGDSGKATEGPFAMDPDSGFLLVTRALDREEQAEYQLQVTLEMQDGHVLWGPQPVLVHVKDENDQVPHFSQAIYRARLSRGTRPGIPFLFLEASDRDEPGTANSDLRFHILSQAPAQPSPDMFQLEPRLGALALSPKGSTSLDHALERTYQLLVQVKDMGDQASGHQATATVEVSIIESTWVSLEPIHLAENLKVLYPHHMAQYLLQVRAQNSHGEDYAAPLELHVLVMDENDNVPICPPRDPTVSIPELSPPGTEVTRLSAEDADAPGSPNSHVVYQLLSPEPEDGVEGRAFQVDPTSGSVTLGVLPLRAGQNILLLVLAMDLAGAEGGFSSTCEVEVAVTDIMITPPGATATVTVLVERVMPPPKLDQESYEASVPISAPAGSFLLTIQPSDPISRTLRFSLVNDSEGWLCIEKFSGEVHTAQSLQGAQPGDTYTVLVEAQDTDEPRLSASAPLVIHFLKAPPAPALTLAPVPSQYLCTPRQDHGLIVSGPSKDPDLASGHGPYSFTLGPNPTVQRDWRLQTLNGSHAYLTLALHWVEPREHIIPVVVSHNAQMWQLLVRVIVCRCNVEGQCMRKVGRMKGMPTKLSAVGILVGTLVAIGIFLILIFTHWTMSRKKDPDQPADSVPLKATV

SEQ ID NO: 779096 - protein, 145 aa, Homo sapiens
AGSCPGQPDVSCTLGSASVLCLHARAGARCGQLSDTLPRAGRSCALSSLYWKAWPSQGPPAPVHSATGVRALSFPPGPGRSGQEELSSFFGRIEGASPGCTEGRRWSRRGSVQAVPGWMLESQQHLSRWLLGSSTSLPGHRGPGI

SEQ ID NO: 779097 - protein, 114 aa, Homo sapiens
SVKGKRLQARRWTQRGGSVSTLGGGLSAGGTSPGSEVDSAKGERLQARRWAQGGRNVSRLGGGLSEGGTSPRSEVGSARGERLQARKWTQRRGNVSRLGGGLSEGGTSPGSEVD

SEQ ID NO: 779098 - protein, 104 aa, Homo sapiens
CIAEQAEVAHNDSHGIIMDLSPKEMFSLNCTSQSVCHGHTMFRWSKQNSQMVEMLRNTARVPVIWKHGSIVAPQPQLIWPALGAKHKDLWKLLIALNKIKFGKE

SEQ ID NO: 779099 - protein, 335 aa, Homo sapiens
MTTVTVTTEIPPRDKMEDNSALYESTSAHIIEETEYVKKIRTTLQKIRTQMFKDEIRHDSTNHKLDAKHCGNLQQGSDSEMDPSCCSLDLLMKKIKGKDLQLLEMNKENEVLKIKLQASREAGAAALRNVAQRLFENYQTQSEEVRKKQEDSKQLLQVNKLEKEQKLKQHVENLNQVAEKLEEKHSQITELENLVQRMEKEKRTLLERKLSLENKLLQLKSSATYGKSCQDLQREISILQEQISHLQFVIHSQHQNLRSVIQEMEGLKNNLKEQDKRIENLREKVNILEAQNKELKTQVALSSETPRTKVSKAVSTSELKTEGVSPYLMLIRLRK

SEQ ID NO: 779100 - protein, 335 aa, Homo sapiens; identical to SEQ ID NO: 779099

SEQ ID NO: 779101 - protein, 335 aa, Homo sapiens; identical to SEQ ID NO: 779099

SEQ ID NO: 779102 - protein, 105 aa, Homo sapiens
VSTSPTDPCHIQLKALWWLLTPPEIKPKLLTMHLRPMRPGPHQHANLISLTLPSSHPGLLLFLKQAWHSPASGPLHLLLPLPGTHFSPLFPPGLLLLLQDLVKCH

SEQ ID NO: 779103 - protein, 76 aa, Homo sapiens
RIPECRLDSYPCHPRSMLIHQLPVYTDSRTRETDSTEMRQQEVRRKSEKGEGQKRGAPTSEYKLSKALSGPYTMHV

SEQ ID NO: 779104 - protein, 96 aa, Homo sapiens
MPDQDKKVKTTEKSTDKQQEITIRDYSDLKRLRCLLNVQSSKQQLPAINFDSAQNSMTKSEPAIRAGGHRARGQWHESTEAVELENFSINYKNERT

SEQ ID NO: 779105 - protein, 37 aa, Homo sapiens
MPSVPQFPIEENSFPTHIVSSQEFHKVSSEHCAKGSF

SEQ ID NO: 779106 - protein, 72 aa, Homo sapiens
GVQTRHCQGGELEGSGRVSGNGAWKGGSTSMNTNTAIRKRDRPDQEWEQGRKWQVSPRVIEILDAHSNVSLT

SEQ ID NO: 779107 - protein, 159 aa, Homo sapiens [sequence omitted]

SEQ ID NO: 779108 - protein, 198 aa, Homo sapiens
AGLPGKQRSHRQEGSGPAASSTTREAEVAGETPLLWGISMDIIKGNLDGISKPASNSRIRPGSRSSNASLEVLSTEPGSFKVDTASNLNSGKEDHSESSNTENRRTSNDDKQESCSEKIKLAEEGSDEDLDLVQHQIISECSDEPKLKELDSQLQDAIQKMKKLDKILAKKQRREKEIKKQGLEMRIKLWEEIKVRII

SEQ ID NO: 779109 - protein, 112 aa, Homo sapiens
LTTVFEKEKKPKFEILLALLNDSTKQVRMSINNLTTDFDFASQSNWRYFTELILRPIEMSDEIPNQFQNIWLHLITLGKEFQKLVKGIYFNILENNSSSKTENLLNIFATSP

SEQ ID NO: 779110 - protein, 143 aa, Homo sapiens
MGLLTFRDIAIEFSLEEWQCLDCAQRNLYRDVMLENYRNLVSLGIAVSKPDLITCLEQNKESQNIKRNEMVAKRPDVQFSTSSVEGIIFSPLSAHGNLEADYLVIHRRVHCWAFYFVLSCLYLSFCEYHIVIVIAAFYYVLKL

SEQ ID NO: 779111 - protein, 103 aa, Homo sapiens
FPGRCKLVLTSEPPYVQFLLPSLLSPKTLTGSAPLLILVSVRILQMSPCCSPSLVLLHPLPSAPSFLVALSIIFCIHCLSPSNVSFLEAETSSVLLIFVLPKL

SEQ ID NO: 779112 - protein, 127 aa, Homo sapiens
SRTLKVNQRITVARGAFIQEKQLNLSKNSGLCELFFFLRQGLAQAGVHQHQHGSLQPLHPSSSDSRASASQFKRFSCLSLPSSSDSPASASRVADYRRHHARLISVFLGEMGFHHVAQTGLEFLTSI

SEQ ID NO: 779113 - protein, 208 aa, Homo sapiens
SGGHVDIYSASWGPNDDGKTVEGPGRLAQKAFEYGVKQGRQGKGSIFVWASGNGGRQGDNCDCDGYTDSIYTISISSASQQGLSPWYAEKCSSTLATSYSSGDYTDQRITSADLHNDCTETHTGTSASAPLAAGIFALALEAKPNLTWRDMQHLVVWTSEYDPLANNPGWKKNGAGLMVNSRFGSGLLNAKALVAFELNPGPGGACLS

SEQ ID NO: 779114 - protein, 106 aa, Homo sapiens
TLGHWVRGGGRARRTTFPIMPSTAVLTKQKRKSIPSPGSPAAPGEGGAGTADCVGDFALSSWSAVVFVCVLLSCTALVQPSVAFHETSIVRACENPVLCLQLDRFV

SEQ ID NO: 779115 - protein, 424 aa, Homo sapiens
MECALDAQSLISISLRKIHSSRTQRGGIKLHKNLLVSYVLRNARQLYLSERYAELYRRQQQQQQQQPPHHQHQHLAYAAPGMPASAADFGPLQLGGGGDAEARESAARHQLHQLHQLHQLHLQQQLHQHQHPAPRGCAAAAAAGAPAGVRGGRSRSCPGAPRSSRRTGAPHRGQPLEPLQPGPAPLPLPLPPPAPAALCPRDPRAPAACSAPPGAAPPAAAASPPASPAPASSPGFYRGAYPTPSDFGLHCSSQTTVLDLDTHVVTTVENGYLHQDCCASAHCPCCGQGAPGPGLASAAGCKRKYYPGQEEEEDDEEDAGGLGAEPPGGAPFAPCKRARFEDFCPDSSPDASNISNLISIFGSGFSGLVSRQPDSSEQPPPLNGQLCAKQALASLGAWTRAIVALPLGAELGASGGRRLMFYKL

SEQ ID NO: 779116 - protein, 405 aa, Homo sapiens
MECALDAQSLISISLRKIHSSRTQRGGIKLHKNLLVSYVLRNARQLYLSERYAELYRRQQQQQQQQPPHHQHQHLAYAAPGMPASAADFGPLQLGGGGDAEARESAARHQLHQLHQLHQLHLQQQLHQHQHPAPRGCAAAAAAGAPAGVRGGRSRSCPGAPRSSRRTGAPHRGQPLEPLQPGPAPLPLPLPPPAPAALCPRDPRAPAACSAPPGAAPPAAAASPPASPAPASSPGFYRGAYPTPSDFGLHCSSQTTVLDLDTHVVTTVENGYLHQDCCASAHCPCCGQGAPGPGLASAAGCKRKYYPGQEEEEDDEEDAGGLGAEPPGGAPFAPCKRARFEDFCPDSSPDASNISNLISIFGSGFSGLVSRQPDSSEQPPPLNGQLCAKQALASLGAWTRAIVAF

SEQ ID NO: 779117 - protein, 350 aa, Homo sapiens
MECALDAQSLISISLRKIHSSRTQRGGIKLHKNLLVSYVLRNARQLYLSERYAELYRRQQQQQQQQPPHHQHQHLAYAAPGMPASAADFGPLQLGGGGDAEARESAARHQLHQLHQLHQLHLQQQLHQHQHPAPRGCAAAAAAGAPAGVRGGRSRSCPGAPRSSRRTGAPHRGQPLEPLQPGPAPLPLPLPPPAPAALCPRDPRAPAACSAPPGAAPPAAAASPPASPAPASSPGFYRGAYPTPSDFGLHCSSQTTVLDLDTHVVTTVENGYLHQDCCASAHCPCCGQGAPGPGLASAAGCKRKYYPGQEEEEDDEEDAGGLGAEPPGGAPFAPCKRHSGLSWGRAGAGG

SEQ ID NO: 779118 - protein, 253 aa, Homo sapiens
VIIHRVLEKQEVEVFYPDFGNIGIVQKSSLRFLKCCYTKLPAQAIPCSLAWVRPVEEHWTSKAILQFQKLCGLKPLVGVVDEYVDGILNIFLCDTSSNEDVYFHHVLRTEGHAIVCRENISSKGFSELNPLALYTTSSGGPEDIVLTELGYPSQQHYFNEDRKISPQSKESELRILQDINDEKSLSHLKSESKEPLKDSEFESLKTCNKSFEEDPKWSNPEPNDLKEENEDEIPTGMPCLESVTIGDDIWDEN

SEQ ID NO: 779119 - protein, 107 aa, Homo sapiens
ISYYRVRQTFSLMGEWETGRLIIHILDLVGTTCDLCCIVFFVSPPPPLTILKCEELSTLTQGHSLYNLGAVGREGRMVEGQVMVESKHFTMLLKAFQDLDISLVLLS

SEQ ID NO: 779120 - protein, 352 aa, Homo sapiens
PRDRGRRGLEMSNQQMHRKTASLNSPVSCKEKPDRVEEPPDYSLHWPEGLKGEEIKKCGREGITLNKYNQQYHKLFKDVPLEEVVLKVCSCALQRDFLLQGRLYISPNWLCFHASLFGKDIKVVIPVVSVQMIKKHKMARLLPNGLAITTNTSQKYIFVSLLSRDSVYDLLRRVCTHLQPSSKKSLSVREFSGEPESLEVLIPEMKWRKVCPSSRSLSLPDNIPCIPPSSVDSTDSFFPSRKPPMSEKSRAQVASENGGRWAWPMPGWGPACPKKMPNCSPTAKNAVYEEDELEEEPRSTGELRLWDYRLLKVFFVLICFLVMSSSYLAFRISRLEQQLCSLSWDDPVPGHR

SEQ ID NO: 779121 - protein, 70 aa, Homo sapiens
QDKGLFNSSNCRGSLVPTISGELPEMLFLWKKYLTPYCRFLQDLLPGHVLILPGVPYFSARAAVMLLELG

SEQ ID NO: 779122 - protein, 353 aa, Homo sapiens
TALSRSEATEEGGNQQMHRKTASLNSPVSCKEKPDRVEEPPDYSLHWPEGLKGEEIKKCGREGITLNKYNQQYHKLFKDVPLEEVVLKVCSCALQRDFLLQGRLYISPNWLCFHASLFGKDIKVVIPVVSVQMIKKHKMARLLPNGLAITTNTSQKYIFVSLLSRDSVYDLLRRVCTHLQPSSKKSLSVREFSGEPESLEVLIPEMKWRKVCPSSRSLSLPDNIPCIPPSSVDSTDSFFPSRKPPMSEKSRAQVASENGGRWAWPMPGWGPACPKKMPNCSPTAKNAVYEEDELEEEPRSTGELRLWDYRLLKVFFVLICFLVMSSSYLAFRISRLEQQLCSLSWDDPVPGHR

SEQ ID NO: 779123 - protein, 72 aa, Homo sapiens
VVIPVVSVQMIKKHKMARLLPNGLAITTNTSQKVSALGPCSLVSLPLPALTAHSLTRAHSQVFISPHPAALQ

SEQ ID NO: 779124 - protein, 97 aa, Homo sapiens
MPMDNYSVYHRAFPCQVSCSAPKLSRKGGLEPFSGPKETTLERKLWGADSLCEPPAPSIYARRRTCRKRWLAEFLCQAGWKDWEPSPQGVTAAQGHW

SEQ ID NO: 779125 - protein, 57 aa, Homo sapiens
PGNEPFRVLIGFGGFPYLIPDPRTAHGFLSAFQFEEAVLCYVDSVSFRCLVLHFSDL

SEQ ID NO: 779126 - protein, 69 aa, Homo sapiens
SILTLPDLSGPHCRLCLPRCMTVPTQHRGPVVLKEPEKQQLYDIPASPKKEDSITPRRAPDLLRLTTLV

SEQ ID NO: 779127 - protein, 132 aa, Homo sapiens
VESAWFLQRRGLKWSGGCVWCLALDLHLDRDGLLSRLVNGELWGELSRDLLRRLLYLHLDLNLLRLLNLDLLFLLGLWLNTGGDWTGKFKQRPSHFSAVCVYAVPTLLVHHGSGGCLQGTHAHGVLGSRGIV

SEQ ID NO: 779128 - protein, 47 aa, Homo sapiens
MSLFLQTYTSYNQVHMFTSAGLNSVPSSPDLLLLLYFLFQFHLAYVL

SEQ ID NO: 779129 - protein, 65 aa, Homo sapiens
LCYQGRCSRAGGCIPRVDVGEMKKMAMTAVVTKTRGTLALETKAENKQKQESGRKLNTGADDQTE

SEQ ID NO: 779130 - protein, 72 aa, Homo sapiens
QVDQLDEECETRRVARQWDITLVSSERITRDTLSWGIVVMHLLVHGLSCADTACSAWKQYAYDVLGMAETVS

SEQ ID NO: 779131 - protein, 75 aa, Homo sapiens
IARAERSGIMVALGEPMRSSLFVAVSVYLTSKRTSGQEGGDSIRTVIIVVVFNKQTCHETCHRGPLFHISPKPHR

SEQ ID NO: 779132 - protein, 48 aa, Homo sapiens
GCCLGEGGSFMFTISILKVGTSRGYDSQREWQLTDAGKRDFQMYAFHA

SEQ ID NO: 779133 - protein, 191 aa, Homo sapiens
RVVPPLAPASPAPRCRHRGPWAESAGGPALNRRKDVPVRSEETSDSKTEGWSKNFKLLQSQLQVKKAALTQAKSQRTKQGTVLAPVIDYNEVAPQMTGQIVDTPPHVPAGLKDPVPSGFSAGEVLIPLADEYDPMFPNDCKKVVKRQRGRTKTAGAGKTEEIEEREERHKYRHDAREFSRSSDPDSDEDED

SEQ ID NO: 779134 - protein, 113 aa, Homo sapiens
MSVLVAGMPGKGSTEVRQVPWLPPGEQPAHRCPSQAPGWPPPRLLHPLFLLQPVPRAAQGQVPPGAQTYFLSSCPLPACLSPGPAGSPGSSHAPPHLPQHQVPRQLLPSRLHT

SEQ ID NO: 779135 - protein, 77 aa, Homo sapiens
SRNKVCSSPLDRQTNALVPSSDAETCLHYQTGQVSSAASPSTPTVAAKWGSWPQGGRKHLLGPVERRLIELEVVYVE

SEQ ID NO: 779136 - protein, 119 aa, Homo sapiens
MDLSSGPLGSSTICDISGCHAVGTLLQDQPGRSSWTVPAGKVVHGSDSPQSHDSYNLALSQPGRQQQMDPLSADAEPRRMGTYGQLQLHSTVKTADFHKSLSCASAYSPGGSPCQFTDV

SEQ ID NO: 779137 - protein, 98 aa, Homo sapiens
DALSRQLSGPKEQKVPALPVVKRKDMTSNPTTLRELSLSQMVCIFLPSRLPWPFSPQRGQVHYIMYLTMVPLPSFEELSGKMFGKNDVGRIKGLCRIF

SEQ ID NO: 779138 - protein, 106 aa, Homo sapiens
SSLPASRLGCEREPPGRSSLEVPVPTAWPHLMSHSPKVSFHSANLQEHRPGHWLSGPFKDQKVKHSPVGAGQLGRDLGLWVVKSQPWAHTCQPDVTDRLLGGLGLQ

SEQ ID NO: 779139 - protein, 86 aa, Homo sapiens
MCCDPALPQSPGHSCPLCYQLPSPNYTSLDLAIQKPKAILALGESRFIQGLYPNALGLEAVSSWSLPPGHLHQAADRVLEETAATT

SEQ ID NO: 779140 - protein, 189 aa, Homo sapiens
MGNLSCCIQGDSKKPSQRRVKRQPYSTTKVTSGSTFNENTRRYAVHTNQCRRPHGSRVKKKRYPQEDDFHHTVFSNLKDWTSFSPTLEASEESLVQQGQRRWREAVNVRVVQVDTSEAVNLLPMRTPYTNHYRGCPQHDITNEDATRGMAKEDAAKACPKRTPPTDRQRGRARESPRGGHRQEVNKSSA

SEQ ID NO: 779141 - protein, 496 aa, Homo sapiens
MAGEITETGELYSSYVGLVYMFNLIVGTGALTMPKAFATAGWLVSLVLLVFLGFMSFMTTTFVIEAMAAANAQLHWKRMENLKEEEDDDSSTASDSDVLIRDNYERAEKRPILSVQRRGSPNPFEITDRVEMGQMASMFFNKVGVNLFYFCIIVYLYGDLAIYAAAVPFSLMQVTCSATGNDSCGVEADTKYNDTDRCWGPLRRVDAYRIYLAIFTLLLGPFTFFDVQKTKYLQILTSLMRWIAFAVMIVLALIRIGHGQGEGHPPLADFSGVRNLFGVCVYSFMCQHSLPSLITPVSSKRHLTRLVFLDYVLILAFYGLLSFTAIFCFRGDSLMDMYTLNFARCDVVGLAAVRFFLGLFPVFTISTNFPIIAVTLRNNWKTLFHREGGTYPWVVDRVVFPTITLVPPVLVAFCTHDLESLVGITGAYAGTGIQYVIPAFLVYHCRRDTQLAFGCGVSNKHRSPFRHTFWVGFVLLWAFSCFIFVTANIILSETKL

SEQ ID NO: 779142 - protein, 496 aa, Homo sapiens; identical to SEQ ID NO: 779141

SEQ ID NO: 779143 - protein, 349 aa, Homo sapiens
MAGEITETGELYSSYVGLVYMFNLIVGTGALTMPKAFATAGWLVSLVLLVFLGFMSFMTTTFVIEAMAAANAQLHWKRMENLKEEEDDDSSTASDSDVLIRDNYERAEKRPILSVQRRGSPNPFEITDRVEMGQMASMFFNKVGVNLFYFCIIVYLYGDLAIYAAAVPFSLMQVTCSATGNDSCGVEADTKYNDTDRCWGPLRRVDAYRIYLAIFTLLLGPFTFFDVQKTKYLQILTSLMRWIAFAVMIVLALIRIGHWHRLRTCAKKLLMMAGIDDCYTSARGCTATLGNFAKATFDAISKTYSYLTPDLWKETVFTKSPYQEFTDHLVKTHTRVSVQRTQAPAVATT

SEQ ID NO: 779144 - protein, 134 aa, Homo sapiens
MAGEITETGELYSSYVGLVYMFNLIVGTGALTMPKAFATAGWLVSLVLLVFLGFMSFMTTTFVIEAMAAANAQLHWKRMENLKEEEDDDSSTASDSDVLIRDNYERAEKRPILSVRKSWGSRGPALPSGPQGSL

SEQ ID NO: 779145 - protein, 314 aa, Homo sapiens
MAGEITETGELYSSYVGLVYMFNLIVGTGALTMPKAFATAGWLVSLVLLVFLGFMSFMTTTFVIEAMAAANAQLHWKRMENLKEEEDDDSSTASDSDVLIRDNYERAEKRPILSVQRRGSPNPFEITDRVEMGQMASMFFNKVGVNLFYFCIIVYLYGDLAIYAAAVPFSLMQVTCSATGNDSCGVEADTKYNDTDRCWGPLRRVDAYRIYLAIFTLLLGPFTFFDVQKTKYLQILTSLMRWIDGPPGSVMGRAEEDASPAWPRSRCRCGGKLKLNSLYPTSATCMAPDAPGAGQVKVGVNFLCLPPHRSTRPT

SEQ ID NO: 779146 - protein, 496 aa, Homo sapiens; identical to SEQ ID NO: 779141

SEQ ID NO: 779147 - protein, 496 aa, Homo sapiens; identical to SEQ ID NO: 779141

SEQ ID NO: 779148 - protein, 104 aa, Homo sapiens
DPFLTPYTKINSRWIKDLNIRPKTIKTLEENLGNTIQDIGMGKDFMTKTPKAMATKAKIDKWDLIKLKSFCTAKETTIRVNRQPTEWKKIFAIYPSYKELISRI

SEQ ID NO: 779149 - protein, 232 aa, Homo sapiens
GQMGEEHGWGLRPSRQGERGVTVKEGLRLQRRSGSRDGSLSSEEGDYTCCDLVVKIKECKKSEDPTTPEPSPAAPSPAPRDGAGSPGLSEDCSESQQTPARSLTLQEALEVRKPQFISRSQERLKKLEHMVQQRKAQRKEDLRQKQSLLPIRTSKKQFTIPHPLSDNLFKPKERCISEKEMHMRSKRIYDNLPEVKKKKEEQRKRVILQSNRLRAEVFKKQLLDQLLQRNAV

SEQ ID NO: 779150 - protein, 241 aa, Homo sapiens
WSGSFPLENTELANVGANQVTVRKGEKDHTTHCHASDHANQLSIHIPGWSYRAGDYTCCDLVVKIKECKKSEDPTTPEPSPAAPSPAPRDGAGSPGLSEDCSESQQTPARSLTLQEALEVRKPQFISRSQERLKKLEHMVQQRKAQRKEDLRQKQSLLPIRTSKKQFTIPHPLSDNLFKPKERCISEKEMHMRSKRIYDNLPEVKKKKEEQRKRVILQSNRLRAEVFKKQLLDQLLQRNAV

SEQ ID NO: 779151 - protein, 249 aa, Homo sapiens
ERGPEAELPPKEERPCGGPRRGFASITITARRVGPPARALVWGTAGDSLCPKCRAEDTLFQAPPALANGAHPGRHQRSFACTEFSRNSSVVRLKVPEAHTGLCERRKYWVTHADDKETSFSPDTPLSGKSPLVFSSCVHLRVSQQCPDSIYYVDKSLSVPIEPPQIASPKMHRSVLSLNLNCSSHRLTADGVDGLVNREPISEALKQELLEGDQDLVGQRWNPGLQESHLKETPIPHQRKESISMEALT

SEQ ID NO: 779152 - protein, 244 aa, Homo sapiens
PSDDCLSRDLSEPTERRHQSFLKPRILFPGFLCPLQDVCASLQEDNGVQIESKFPKGDYTCCDLVVKIKECKKSEDPTTPEPSPAAPSPAPRDGAGSPGLSEDCSESQQTPARSLTLQEALEVRKPQFISRSQERLKKLEHMVQQRKAQRKEDLRQKQSLLPIRTSKKQFTIPHPLSDNLFKPKERCISEKEMHMRSKRIYDNLPEVKKKKEEQRKRVILQSNRLRAEVFKKQLLDQLLQRNAV

SEQ ID NO: 779153 - protein, 49 aa, Homo sapiens
MIWIPDLRNQNAPRFNSQTCLLYFAFYVNAFGNTIIGCADGGSKDLMVL

SEQ ID NO: 779154 - protein, 138 aa, Homo sapiens
VSPTSISVSPFLSVSVSPPLLSVSPPLPLSLSLPHFSVSVSPPLLSVSPPLLSLSLLYFSLSLPLPHFYLCLFPISISDCPPLLSASLPPFLSVSVSTPISVSVSPPISLHLCLSLLSLTPPLSPAPWTKPSGASAVP

SEQ ID NO: 779155 - protein, 462 aa, Homo sapiens
GLLPLTLCLPLPDQDRLALGTEEGLFVIHLRSNDIFQVGECRRVQQLTLSPSAGLLVVLCGRGPSVRLFALAELENIEVAGAKIPESRGCQVLAAGSILQARTPVLCVAVKRQVLCYQLGPGPGPWQRRIRELQAPATVQSLGLLGDRLCVGAAGGFALYPLLNEAAPLALGAGLVPEELPPSRGGLGEALGAVELSLSEFLLLFTTAGIYVDGAGRKSRGHELLWPAAPMGWGYAAPYLTVFSENSIDVFDVRRAEWVQTVPLKKVRPLNPEGSLFLYGTEKVRLTYLRNQLAEKDEFDIPDLTDNSRRQLFRTKSKRRFFFRVSEEQQKQQRREMLKDPFVRSKLISPPTNFNHLVHVGPANGRPGARDKSPAPEEKGRVARGSGPQRPHSFSEALRRPASMGSEGLGGDADPMKRKPWTSLSSESVSCPQGSLSPATSLMQVSERPRSLPLSPELESSP

SEQ ID NO: 779156 - protein, 111 aa, Homo sapiens
MANIHLYNNYAELQTGSIYSKPTQLSTSYSSHYITSFSHCLRRHYSPGGLPCMRRLNIPKLVLSYLTLTVALSHAGSRDFFSPLPLFSATHLLPPLLHRSTLLHPNQPPSM

SEQ ID NO: 779157 - protein, 62 aa, Homo sapiens
RVAEVARVTARLVTEQSLAPASPAQPPFISSDASKFKMQCHQKPLTQADGSATHSHPLGMGS

SEQ ID NO: 779158 - protein, 69 aa, Homo sapiens
VPRVFIDATQCWADTALSGIESRHEKFLSFQFSFTPHWVKGRISIWGSCAVNICQTLADVICLFDQEQI

SEQ ID NO: 779159 - protein, 107 aa, Homo sapiens
FNNKRNEVLIHATRVYLESIILSEGNQAQRPHVVPFHFYKISRIGKSVEIESRLMVASGCGGLGVTANGYEFSYWCDENVLELEIMMMFVYIICECTKSYLIVYFKE

SEQ ID NO: 779160 - protein, 88 aa, Homo sapiens
EPPPSDAMVSSCCGSVCSDQSCGQGPRPGELLPPQLLPDHLLQDHLLPPQLLHFQLLQAFLLYLQLLQTQLLQDHLLPPQLLHFQLLQ

SEQ ID NO: 779161 - protein, 73 aa, Homo sapiens
MVPGASADWQEDLGGGVELSQLPISTYSRARNRFPDGRRGSQVLSSTCPGCMQVMRSRDRAQTESGPGRRRRA

SEQ ID NO: 779162 - protein, 74 aa, Homo sapiens
LFLCGSWDSNGRQEILYICERKFLWPWDGQEPHVYLKSCDILVCSMGAPKVTFFQMPEDAIEKCVPSCNTLFKF

SEQ ID NO: 779163 - protein, 127 aa, Homo sapiens
RRTLSSFGGVPTSSSSAQALSPQGVPLQTRWRLRDWQVSVGPANLSGVSMKQAGLVSAPTSFSSCCLWPCILASERVQQLGSGWLPASQSNQKTSLNDEGALAQASACSCAHTRKHTHTTCTQESHQ

SEQ ID NO: 779164 - protein, 756 aa, Homo sapiens
MAAFGLLSYEQRPLKRPRLGPPDVYPQDPKQKEDELTAVNVKQGFNNQPAFTGDEHGSARNIVINPSKIGAYFSSILAEKLKLNTFQDTGKKKPQVNAKDNYWLVTARSQSAIHSWFSDLAGNKPLSILAKKVPILSKKEDVFAYLAKYSVPMVRATWLIKMTCAYYSAISEAKIKKRQAPDPNLEWTQISTRYLREQLAKISDFYHMASSTGDGPVPVPPEVEQAMKQWEYNEKLAFHMFQEGMLEKHEYLTWILDVLEKIRPMDDDLLKLLLPLMLQYSDEFVQSAYLSRRLAYFCARRLSLLLSDSPNLLAAHSPHMMIGPNNSSIGAPSPGPPGPGMSPVQLAFSDFLSCAQHGPLVYGLSCMLQTVTLCCPSALVWNYSTNENKSANPGSPLDLLQVAPSSLPMPGGNTAFNQQVRARIYEVEQQIKQRGRAVEVRWSFDKCQESTAGVTISRVLHTLEVLDRHCFDRTDSSNSMETLYHKIFWANQNKDNQEVAPNDEAVVTLLCEWAVSCKRSGKHRAMAVAKLLEKRQAEIEAERCGESEVLDEKESISSSSLAGSSLPVFQNVLLRFLDTQAPSLSDPNSECEKVEFVNLVLLFCEFIRHDVFSHDAYMCTLISRGDLSVTASTRPRSPVGENADEHYSKDHDVKMEEQSIMAHMGIDSGTTNIFDEVDKSDFKTDFGSEFPIFSPMPGESCENANTSLGRRMSVNCEKLVKREKPRELIFPSNYDLLRHLQYATHFPIPLVSHCFS

SEQ ID NO: 779165 - protein, 721 aa, Homo sapiens
MAAFGLLSYEQRPLKRPRLGPPDVYPQDPKQKEDELTAVNVKQGFNNQPAFTGDEHGSARNIVINPSKIGAYFSSILAEKLKLNTFQDTGKKKPQVNAKDNYWLVTARSQSAIHSWFSDLAGNKPLSILAKKVPILSKKEDVFAYLAKYSVPMVRATWLIKMTCAYYSAISEAKIKKRQAPDPNLEWTQISTRYLREQLAKISDFYHMASSTGDGPVPVPPEVEQAMKQWEYNEKLAFHMFQEGMLEKHEYLTWILDVLEKIRPMDDDLLKLLLPLMLQYSDEFVQSAYLSRRLAYFCARRLSLLLSDSPNLLAAHSPHMMIGPNNSSIGAPSPGPPGPGMSPVQLAFSDFLSCAQHGPLVYGLSCMLQTVTLCCPSALVWNYSTNENKSANPGSPLDLLQVAPSSLPMPGGNTAFNQQVRARIYEVEQQIKQRGRAVEVRWSFDKCQESTAGVTISRVLHTLEVLDRHCFDRTDSSNSMETLYHKIFWANQNKDNQEVAPNDEAVVTLLCEWAVSCKRSGKHRAMAVAKLLEKRQAEIEAERCGESEVLDEKESISSSSLAGSSLPVFQNVLLRFLDTQAPSLSDPNSECEKVEFVNLVLLFCEFIRHDVFSHDAYMCTLISRGDLSVTASTRPRSPVGENADEHYSKDHDVKMEIFSPMPGESCENANTSLGRRMSVNCEKLVKREKPRELIFPSNYDLLRHLQYATHFPIPLVSHCFS

SEQ ID NO: 779166 - protein, 34 aa, Homo sapiens
MQISTACVQASRGCRASRGPDQPDRGDNTFARGT

SEQ ID NO: 779167 - protein, 31 aa, Homo sapiens
MDVFVVCNHYGLNHGLRICPNNRNFVREGIN

SEQ ID NO: 779168 - protein, 83 aa, Homo sapiens
RLAGKQGKSWHWKTDATSVNFCSQAPNDHLMQQPNTQRSSNATAKHPVIIYWNRLIMQQYHVTVCAIDRTEHLMREAKTQGVS

SEQ ID NO: 779169 - protein, 144 aa, Homo sapiens
LPHPRPITEGDRAGQNQAWQPPGLCPMDAGVSAEQGPPLPVPALRCLGCCVTLVSFHADTCGHNVGVCWTSGPVLGAGHVATAGLAPAPGSGHSLSLPPTPTENLVAMREQESRKLDRAQTPDGGDPDPEHVGVSFGEARQGGC

SEQ ID NO: 779170 - protein, 79 aa, Homo sapiens
LNGRNLGPGSSGSQSQSPWPLRVIRRDPGRSVSASVLDQSLGAQRAAGDLGVWGGTTQQDQNLEGGSCPWWPAGHAGLP

SEQ ID NO: 779171 - protein, 33 aa, Homo sapiens
MQLEDTIYGPGTRASPDIETACTLIMEFPVSRT

SEQ ID NO: 779172 - protein, 146 aa, Homo sapiens
ISAHCNLLLTTTSSSLQPPPQCNLLLTATSSSLRPPPHCDLLLTATSYSLQPAPHYNLLLTATSSSLQPAPHYNLLLTATSSLLRPPPHCNLLLTATSSSLQPPPHCNLLFTTTSSSLQPPPHCNLLLTATCSFWVQGILLPQPPK

SEQ ID NO: 779173 - protein, 38 aa, Homo sapiens
MRRVIQVCEGQLDVQTEGTGAISGYPTTQFMTQVVIQG

SEQ ID NO: 779174 - protein, 133 aa, Homo sapiens
RPVTALGPVTEHPGPPPLRRAGRPRPVTTLDLSLSIQDLLAMQAGPTRSPLSDLAGSSLLLEKGVVSGTSHPHGQPCGSYHQSPDTVTSAQLQPSLGGGSGSSLDFLIVLGLDQGQGRFAPLSPSQAAAKENN

SEQ ID NO: 779175 - protein, 108 aa, Homo sapiens
STLTANPVEILLHLLYRESQGFEVKQYSHDHAAQGHTDGISLPVSGSQIYIQVNATLLMASLSPGQLCLETPLVSYTLQMPISFLPKLVLFGISWRAPPTTAQARRLT

SEQ ID NO: 779176 - protein, 52 aa, Homo sapiens
MEWKLQGREQKEGQRMTGDCGKQRITSYEHKHALIYPEGPTIEPGSEFLCKM

SEQ ID NO: 779177 - protein, 76 aa, Homo sapiens
GPSPLPASQNGARLPTSAAFGHRDPVPRSGEVGLGLGHLDCNWELCRTPGRFQTLNRSHRQGDLQFRGTTLGWPCI

SEQ ID NO: 779178 - protein, 121 aa, Homo sapiens
MVPSPLTSAATAPRGLAAKARRGCGDEGRGGRAAGGAPHIPPRGGGARGVRGRRACRGGQSRGRQVRERKRTGPGGRKPEQRRTIPGAAACGSATPRHRQLGQGGGREGGTGTPRDGSVGV

SEQ ID NO: 779179 - protein, 103 aa, Homo sapiens
VDAHHQAGPPGQGHEDQVPGGELSLLPPIKESEIIDFCLGGSLKDEVLKIMPVQKQTRAGQCTRFKAFVAIGDYNGHIGLGIKCSKEAATAIRRAIILAKLSI

SEQ ID NO: 779180 - protein, 210 aa, Homo sapiens
PAGSRAGWGSPGRAGSRRARPRRGGGGGSGGGGERRGCPGAMWTGGRRPGRLRRAASAADMEKLSALQEQKGELRKRLSYTTHKLEKLETEFDSTRHYLEIELRRAQEELEKVTEKLRRIQSNYMALQRINQELEDKLYRMGQHYEEEKRALSHEIVALNSHLLEAKVTIDKLSEDNELYRKDCNLAAQLLQCSQTYGRVHKVSELPSDF

SEQ ID NO: 779181 - protein, 85 aa, Homo sapiens
FRKQSDPLSLLIQCEKSADLLDDVLAVSSLLDTFRTPAHSHSLPQPTQNCNWKSKRIQKLAKAGQHFSQKVSASLKPADSQITII

SEQ ID NO: 779182 - protein, 130 aa, Homo sapiens
LEDLFGAFWTHSWGLYDLGQIPQPLQPCSNSTLLRELLRKCKVFSVCYYHIPITQMGQLRSAQRGKDACPAWHKSCVQISKQVYWVLVARGHPALLELCKVSSPSLLCRTQPENPAGSAQILSQQTQSTW

SEQ ID NO: 779183 - protein, 80 aa, Homo sapiens
SGDLLAASCLVSGQCKPGLWGLISGDLVSWGLVLAWSAWAGALVTRSRGAIQWRTGHMGPSQQTLVGVSSSVRSLSVGPW

SEQ ID NO: 779184 - protein, 106 aa, Homo sapiens
KLGHLSTDSAPVVDSRPNGVSSLALTPLHFLAVAGERMPLGRGAESLALEERGWEHLGDCLSQLQVNPGMGWGHRAGYQQSHTHMCVRTHTHTQAYSYIRTKCKFK

SEQ ID NO: 779185 - protein, 115 aa, Homo sapiens
TPSSFSSKRTYAGGWDLPQGLSKETRPRCNASAVDHTRARPKTPNHSPSSPASQTAGFSKPSFLLSVSSAELHVPLLLLPILPFFCPQNTSSYPSLVPGSLSPFFFFFFSLLLSL

SEQ ID NO: 779186 - protein, 66 aa, Homo sapiens
GGVNGPEAVKWPRTVVALHMGVPFIFFSISLVIALSMQGPNIITRHTGKRGPSRELTRSKTKTRIH

SEQ ID NO: 779187 - protein, 46 aa, Homo sapiens
MAHTAKIGQQHPKTRVFLSQLLPARASACDKHMTCLQPPSLGTTSF

SEQ ID NO: 779188 - protein, 51 aa, Homo sapiens
MAGAWQVSSSCYPFLVHSKTLLAALVGSRARRSDSAKGAWFIQHLGLSSVE

SEQ ID NO: 779189 - protein, 115 aa, Homo sapiens
HEDLLFVCHFFTLKFRDLSMLFCSCRSFILIVSISLRECTKMCYSSVDGHLSSFQVWVITKCCYELSRTYSGEHIHIHFSRPFHLKVKFRSRNLLRHIYSTLVDGNQLSKTDVLR

SEQ ID NO: 779190 - protein, 70 aa, Homo sapiens
TSCMSGGPALTATHPLVSLSEPAHQWVGHSAVTACSAGRYLQQDRAANARRRQGGGGRRSRGTRRCWSDR

SEQ ID NO: 779191 - protein, 59 aa, Homo sapiens
MSLTFRRPKTLRLRRQPRYPQKSTPRRNKLGHYAIIKFPLTTESAVKKIEENNMLVFTV

SEQ ID NO: 779192 - protein, 34 aa, Homo sapiens
LLPARSCPRCVWWLICGFLVEALKKSRSLVVHLS

SEQ ID NO: 779193 - protein, 76 aa, Homo sapiens
MGIVVSKIRRANETVRLESGVISPLTDEATLQKGSWSLLKDLKRITDSDVKGDLFVKELFWMLHLQKETFATYVAR

SEQ ID NO: 779194 - protein, 141 aa, Homo sapiens
LIMGDKKAGFSVFWADDGLDTGPILLQRSCDVEPNDTVDALYNRFLFPEGIKAMVEAVQLIADGKAPRIPQPEEGATYEGIQKKENAEISWDQSAEVLHNWIRGHDKVPGAWTEINGQMVTFYGSTLLNSSVPPGEPLEIK

SEQ ID NO: 779195 - protein, 130 aa, Homo sapiens
HLPGSSDSPASASRVAGTTGMRHHAWLIFVFLVKTGFHHVDQVGLELLTSSDPPALACQSGGITGVSPHAQPIQPISDYCPAHFAYVYDVSFSALLVSSLLFLCPFKSSSMKLSPTASATASAYTVLVLP

SEQ ID NO: 779196 - protein, 283 aa, Homo sapiens
TRIVQRLPVAVEGQWWRRKPKSMLMLMLVAAVTMWLRPLVTAQLCRSRTVRTGKVFNLIQDVQGDRLYFHPTTTRLIKHPCEKNIALYLGKQVFFTMDNFETSLLPFTIPTSMQVGVPEVTSAHFAGSLLLLVVDQKVYIYDYENNSWSMSLGIKHPVTHVSGDNCCYTGSLFCVHVSNLVFAYFRGDQISQTYIYYSNTGGFSFWKYHYDRQAEIIGSLGGIFHFFSLSQVAMLVVNHREGHVQVLRSPPQPEFGLSFDYNGTLDILIAPGQRGILLLWFEN

SEQ ID NO: 779197 - protein, 116 aa, Homo sapiens
EVSVAQGRGGNSSRKRGPTERTAALGEARLLPDASTRNMDLSLTKTVYRDKKPTQHKQSCLLLAFKIVRGVTLSATVSRLANPSLGPQMQTPEERPMPSAGPAILGPPRARQAPSL

SEQ ID NO: 779198 - protein, 156 aa, Homo sapiens
KSGANSGLHCTFPYQSDLPALLIHTFLSSILSSNTLKLIYASGLDGHYRKVQIVLSAQLSKLRVLLNTRLRSSKDMLEAALLFSETKLMSTTHCWAFLSLHICHNNLIFKKPTTDNNYNNYEKLALVGQAQWLMPVIPALWEAEVGGSPELRSLRP

SEQ ID NO: 779199 - protein, 208 aa, Homo sapiens
MGKQNSKLRPEMLQDLRENTEFSELELQEWYKGFLKDCPTGILNVDEFKKIYANFFPYGDASKFAEHVFRTFDTNSDGTIDFREFIIALSVTSRGRLEQKLMWAFSMYDLDGNGYISREEMLEIVQGHLQDGFSMMKMPEDESTPEKRTEKIFRQMDTNNDGKLSLEEFIRGAKSDRPSCVCCSATPAAPPVLRGARVPFPPSLHRPL

SEQ ID NO: 779200 - protein, 75 aa, Homo sapiens
LKEKVVGGRALQSSLCFLTAPVHLQRFFNGAEDHLLLDHRCLRRIKFYSLGIRPIFYSLANFSNFSFLLYKLMFS

SEQ ID NO: 779201 - protein, 134 aa, Homo sapiens
GPKITKLREESSWELLRANLPPVLFKVIPLLTEKNAYLIASFGKANQKLKRVQLFVSHLPVTWKPPPCPAFASSCPTFLGQTNVHFTYVDCFSCLSKMYKTKLCSDHLGHMSSGPLEAVLQVHILNLRKINFLN

SEQ ID NO: 779202 - protein, 199 aa, Homo sapiens
MGKVKVGVNGFGRIGRLVTRAAFNSVKVDIVAINDPFIDLNYMVYMFQYDSTHGKFHGTIKAENGKFVINGNPITIFQEQDPSKIKWGDAGAEYVVESTGVFTTMEKAGAHLQGGAKRVIISAPSADAPMFVMGMNHEKYDNNLKIVSCAPMFVMGVNHEKYDNSLKIISNASCTTNCLAPLAKVIHDNFGIVEGLMTT

SEQ ID NO: 779203 - protein, 66 aa, Homo sapiens
REEVPMASLPLLPRIGEEEEFSAKVGARVKQRQHIHMHWTGKWGYLKVVSKYGLRKEKETRLKRNK

SEQ ID NO: 779204 - protein, 129 aa, Homo sapiens
RSKSGRCGPGQGWAFAGGVLGPGEGQAVHREPLPGNSRLLSRGLGAAAGTAGKPPPAARRGRGFRWGSHRDLAAQGSAASARRWRSSLRDPGWLGPAVSAHARRRGLRTWVRAPCPPPTGPWPRAPRPC

SEQ ID NO: 779205 - protein, 131 aa, Homo sapiens
PFHLLVPPFLCPSIIHPSIHPSIHPSTHPPPTHPPAYPCCLSFLPSGLPSIHPSAHPPTHPLAHAPACPSFHLSFYPSIHPSILLTPPLTQSLLPSDSFMAHLRMGVLTCTTDEAHWELLPRGGALLPSLM

SEQ ID NO: 779206 - protein, 151 aa, Homo sapiens
RSQMVPGQAQPQSPEMLLLPLLLPVLGAGSLNKDPSYSLQVQRQVPVPEGLCVIVSCNLSYPRDGWDESTAAYGYWFKGWTSPKTGAPVATNNQSREVEMSTRDRFQLTGDPGKGSCSLVIRDAQREDEAWYFFRVERGSRVRHSFVNNLF

SEQ ID NO: 779207 - protein, 118 aa, Homo sapiens [sequence omitted]

SEQ ID NO: 779208 - protein, 191 aa, Homo sapiens
AGRSGLRDTLGWGTLWTGAPSGLRDALVCGTLGTGGHSGLGDPQGCGTLWSAGHSGLGDTLDWGTLRVAGRSGLGDPQGCGTLWTADPSPTPSLFCPIRPLCITWGYNRLALWLQLCFRVPGASNWVLQELRQSPCFAFILRACPASSREKPLRYDLYRNHTLSPLSVSQAGVQARSGLTAASTPWLKPPT

SEQ ID NO: 779209 - protein, 88 aa, Homo sapiens
GSGGPVLGSPGGLLGCMQWLRSARWMGRFLNPWALVMLWAMAVAVTRQPFVSRVVHTGVGSGYNRLGGPVSRPPVGACRRLPAVVVAA

SEQ ID NO: 779210 - protein, 358 aa, Homo sapiens
LGAFCVQQTCLPAPESPFATRSPKQIKIESSGAVTVLSTTCFHSEEGGQEATPTKAENPLTPTLSGFLESPLKYLDTPTKSLLDTPAKRAQAEFPTCDCVEQIVEKDEGPYYTHLGSGPTVASIRELMEERYGEKGKAIRIEKVIYTGKEGKSSRGCPIAKWVIRRHTLEEKLLCLVRHRAGHHCQNAVIVILILAWEGIPRSLGDTLYQELTDTLRKYGNPTSRRCGLNDDRTCACQGKDPNTCGASFSFGCSWSMYFNGCKYARSKTPRKFRLAGDNPKEEEVLRKSFQDLATEVAPLYKRLAPQAYQNQVTNEEIAIDCRLGLKEGRPFAGVTACMDFCAHAHKDQHNLYNGCTV

SEQ ID NO: 779211 - protein, 205 aa, Homo sapiens
GFTRAMGHLKSPTLSQVHSPLVTSPSANLKSPQTPSQMVPLPSANPPGPLKSPQVLGSSLSVRSPTGSPSRLKSPSMAVPSPGWVASPKTAMPSPGVSQNKQPPLNMNSSTTLSNMEQGTLPPSGPRSSSSAPPANPPSGLMNPSLPFTSSPDPTPSQNPLSLMMTQMSKYAMPSSTPLYHNAIKTIATSDDELLPDRPLLPPPP

SEQ ID NO: 779212 - protein, 147 aa, Homo sapiens
VSGRACHRDEAPRLKSPSMAVPSPGWVASPKTAMPSPGVSQNKQPPLNMNSSTTLSNMEQGTLPPSGPRSSSSAPPANPPSGLMNPSLPFTSSPDPTPSQNPLSLMMTQMSKYAMPSSTPLYHNAIKTIATSDDELLPDRPLLPPPP

SEQ ID NO: 779213 - protein, 38 aa, Homo sapiens
MSTPGQPHVRGVGGGKYQRQGDQVERPRHSQAEGGGGP

SEQ ID NO: 779214 - protein, 118 aa, Homo sapiens
NRDKALFQSILVQRNRQPHLQRPVLCTALTACALPSVQLGKSNHQATMPQLPDPPSSPQMSVFLLSPRDYEESYGLSCLKTYACVFTYTQAHTHAVLYIQLQEVRKALDPIPIPLGDL

SEQ ID NO: 779215 - protein, 187 aa, Homo sapiens
LPVAMGVFYVDTSRDTESLDFELQIVGVGVSAALPGRMEGASASILTFLLKELAKHQEFSLRLLSGPLSLRGEKFFRKVSSFLFIPRDHFTHPFFASRVDGTVERGNPALWLCLSSPTGTRATKATKDPTLSSVQASQLEEARRQRPRGHQEAFEPAERAWEHNAERRSNHCFSMGWESGVGRVVGI

SEQ ID NO: 779216 - protein, 134 aa, Homo sapiens
GRGGDRPTVLFGPPKGLLLLVRGAPLSSCARYETLSVSREGERRPPQVLFGPPRALLLRLAREGTPFIPHPETPSAPQARRRRPPQSSTPQGYVFCTPGRRKAGFPPCGSGWGHPSSFRIPKAPHLHPGRGTLR

SEQ ID NO: 779217 - protein, 69 aa, Homo sapiens
SKAMPNWFKLKRPFNLKSGHNSDQLSCQEVISADELPNNGKCLLMALQIISLKVAVMSPAESESCWEGH

SEQ ID NO: 779218 - protein, 111 aa, Homo sapiens
TVDISSAQWHCWEVLTVPIQGAGSRSLTADQGLGFPVDHRSKNLQGPASPPSPVFPTLARPSRCRNMQAPLQDCGRSVSLRLACVLAPLTTSSTGCHLQLPQDKGKAREDS

SEQ ID NO: 779219 - protein, 63 aa, Homo sapiens
MDVNPESPAKGCYLTPGDCREYQEVSGSDPEKVGNQPRASPAHSTTPVYFVPAFSSAQEKNPL

SEQ ID NO: 779220 - protein, 88 aa, Homo sapiens
RRCKVTPIAMAPLVPKAPGKAHFLDTGCVPRDARELPVAGGIQVDRLTQQHAVPRYIGQNLGTQAAQCTSIHHLSSPSSCFLHYSTSK

SEQ ID NO: 779221 - protein, 71 aa, Homo sapiens
SVNGQSRKTHRWWDRNSNSGRVTSETTMLFCLATEKTYVNVLCRLLAVHVSAPIMVNIFIGHHINPSAPIF

SEQ ID NO: 779222 - protein, 130 aa, Homo sapiens
MLSYLRAQLRKAEKCKLMKMIIVGPPRQGKSTLLEILQTGRAPQVVHGEATIRTTKWELQRPAGSRAKYVESVEFNVWDIGGPASMATVNQCFFTDKALYVVVWNLALGEEAVANLQFWLLNIEPRPHTT

SEQ ID NO: 779223 - protein, 86 aa, Homo sapiens
  misc_feature (9)..(9): Xaa can be any naturally occurring amino acid
SRRREWHRXALNGIERRCNGPEALNGPEALTGPRLPTVCSGFQSYNLPAYAPYLPCEVRSSGRGRLSTDMSHNHLLRGWGVAMYRA

SEQ ID NO: 779224 - protein, 96 aa, Homo sapiens
ASTNILGWNGFWGVGHGYISIRQVQQRKRKARTSGSLQDMILVMDYGVLTSQPWTSHGWLLVHGWLLVHGWLLVHGWPLVHGWLLVHGWLVRWNGI

SEQ ID NO: 779225 - protein, 273 aa, Homo sapiens
EASYGEVQENYKLSLEDRIQEQSTSPDTSLGSTTPSSHTLELVALDSEVLRDSLQCQDHLSPGVSSLCDDDPGSNKPLSSNLRRLLEAGSLKLDAAATANGRVESPVNVGSNLSFSPPSHHAQQLSVLARKLAEKQEQNDQYTPSNRFIWNQGKWLPNSTTTCSLSPDSAILKLKAAANAVLQDKSLTRTEETMRFESFSSPFSSQSASSTLAALSKKVSERSLTPGQEHPPPASSFLSLASMTSSAALLKEVAARAAGSLLAEKSSLLPEDP

SEQ ID NO: 779226 - protein, 155 aa, Homo sapiens
EASYGEVQENYKLSLEDRIQEQSTSPDTSLGSTTPSSHTLELVALDSEVLRDSLQCQDHLSPGVSSLCDDDPGSNKPLSSNLRRLLEAGSLKLDAAATANGRVESPVNVGSNLSFSPPLPFDPDISVRGSETQSAAIDTAAPALIYLYLPSHTRA

SEQ ID NO: 779227 - protein, 76 aa, Homo sapiens
SVSVLSVCPTLHGVAAVASVSVLSVCPTPRGVAAVASVSVLSVRPTLHGVAAVASVSVLSVCPTPRGVAAVASSAS

SEQ ID NO: 779228 - protein, 76 aa, Homo sapiens
EVYYSSRLVRGIQVAVCGAYCDKSMYPSCGYSGTVAFNACVIRISHIDISAQFVGTSNAIVTESRMDIMEGLYTEI

SEQ ID NO: 779229 - protein, 152 aa, Homo sapiens
WVFLGVTTSTASPRAESEGTCTWAASRVHTQAPHHGALLHSREHIRRVHREAHFHACDNTHISMWTRTAAHTNTSRVPPLLSTPTPAMYLHCCARHQPCTYTAVPDTSCVTALLPTAAPAMYPHCCAQQRKLCTRTAAHTSRVPPLLSTPTP

SEQ ID NO: 779230 - protein, 400 aa, Homo sapiens
MVNTRKSSLRLLGSKSPGPGPGPGAGAEPGATGGSSHFISSRTRSSKTRAASCPAAKAGGSGGAGVTLDEARKVEVDGSLSDSHVSPPAKRTLKQPDSVCKDKSKSRSTGQREEWNLSTGQARLTSQPGATLPNGHSGLSLRSHPLRGEKKGDGDLSCINGDMEVRKSCRSRKNRFESVNQSLLFDQLVNSTAEAVLQEMDNINIRRNRRSGEVERLRMWTDTEFENMDMYSRVKRRRKSLRRNSYGIQNHHEVSTEGEEEESQEEDGDIEVEEAEGEENDRPYNLRQRKTVDRYQAPPIVPAHQKKRENTLFDIHRSPARRSHIRRKKHAIHSSDTTSSDEERFERRKSKSMARARNRCLPMNFRAEDLASGILRERVKVGASLADVDPMNIDKSVSFV

SEQ ID NO: 779231 - protein, 414 aa, Homo sapiens
MVNTRKSSLRLLGSKSPGPGPGPGAGAEPGATGGSSHFISSRTRSSKTRAASCPAAKAGGSGGAGVTLDEARKVEVDGSLSDSHVSPPAKRTLKQPDSVCKDKSKSRSTGQREEWNLSTGQARLTSQPGATLPNGHSGLSLRSHPLRGEKKGDGDLSCINGDMEVRKSCRSRKNRFESVNQSLLFDQLVNSTAEAVLQEMDNINIRRNRRSGEVERLRMWTDTEFENMDMYSRVKRRRKSLRRNSYGIQNHHEVSTEGEEEARTSKLLPLEKISIESQEEDGDIEVEEAEGEENDRPYNLRQRKTVDRYQAPPIVPAHQKKRENTLFDIHRSPARRSHIRRKKHAIHSSDTTSSDEERFERRKSKSMARARNRCLPMNFRAEDLASGILRERVKVGASLADVDPMNIDKSVSFV

SEQ ID NO: 779232 - protein, 116 aa, Homo sapiens
APILPSLRKLPPQALPVFVFQSQPAFLAFLDLPRLQSLKAPVPPAFNTPHLHHPPCPAALLGFPRSCLPWLPPTQPRPCQIPLLDICLAQGTLPSKSLAQLSLYIYLRHSLIKVSI

SEQ ID NO: 779233 - protein, 108 aa, Homo sapiens
LAPCTVARGEARQEDCLKSGVQDWPGQYSENLSLQGQWGGAAGNNTHHHQTFRKQRNRDTTVRQPSPSMCSPEEVPLPGCSHLALCCWPAGEALVHAWIASWQSTHGT

SEQ ID NO: 779234 - protein, 100 aa, Homo sapiens
GELRDKQGGYSRDSNAQRGRGRGRAWSSQTLQPGHQWKLGALGACLSQLERKGEKVQPPLSHAQASHGWNLEVWEIPLAGVCPHKTWQRRERTSVESQDN

SEQ ID NO: 779235 - protein, 105 aa, Homo sapiens
ICLMTFFPLHTKFSFSPHKSSCIHSQPFLGFRWSVPEAIPGHRESERVLTVSRADVPLVVARTPRKIRKHHHNQESGGQLPSPAGPLGDTRYRAQARKVSLVKSQ

SEQ ID NO: 779236 - protein, 51 aa, Homo sapiens
MSVRFSSTSRRLGSCGGTGSVRLSSGGAGFGAGNTCGVPGIGSGFSCAFGG

SEQ ID NO: 779237 - protein, 108 aa, Homo sapiens
MSEAKDNGSRDEVLVPHKNCRKNTTVPGKKGEEKSLAPVFAEKLISPSRRGAKLKDRESHQENEDRNSELDQDEEDKESFCRGFPMSGCELETSCCVCHSTALGERFC

SEQ ID NO: 779238 - protein, 113 aa, Homo sapiens
MGSPFYCNGGYWLQRTECWRTMNEFHFRSAQLAVPGRQPQELFRRHRATSAWSSRRRSALVVGTIGPGHGRLQDPSCTKLPSPPAWFPFFMNRSMGHSQVGMHVFHRMGTTSS

SEQ ID NO: 779239 - protein, 34 aa, Homo sapiens
KGEYVLMGFNEQTVKCLDILSSHHSSLSVDEGAM

SEQ ID NO: 779240 - protein, 96 aa, Homo sapiens
YSCELEFVQRNGIAIPFQRTVNSVRDSENMKQELLTRKEHSGDQTSARASGEVTYASLFFPSCPRPSSPAMKRVLNLCPVEVPFGSQLEARAPFFK

SEQ ID NO: 779241 - protein, 146 aa, Homo sapiens
YCRCGVCGSLVDAGYCRCGARGSLVDAGYCRCGVCGSLVDAGYCHCGARGSLVDAGYCRCGARGSLVGADSIPDPRGSRLSGATAYRKVDNHRCGMFPLHCPPPAVSPPLPLWRHQARMQECCCESSFKTVKTSIKSSYSKPSVSY

SEQ ID NO: 779242 - protein, 408 aa, Homo sapiens
GGSGQAHAPSIATPGLWDAPPDRFRLAEPVGPGAAAAVLRPCAAGWGGLRCAEALVSAMIRQERSTSYQELSEELVQVVENSELADEQDKETVRVQGPGILPGLDSESASSSIRFSKACLKNVFSVLLIFIYLLLMAVAVFLVYRTITDFREKLKHPVMSVSYKEVDRYDAPGIALYPGQAQLLSCKHHYEVIPPLTSPGQPGDMNCTTQRINYTDPFSNQTVKSALIVQGPREVKKRELVFLQFRLNKSSEDFSAIDYLLFSSFQEFLQSPNRVGFMQACESAYSSWKFSGGFRTWVKMSLVKTKEEDGREAVEFRQETSVVNYIDQRPAAKKSAQLFFVVFEWKDPFIQKVQDIVTANPWNTIALLCGAFLALFKAAEFAKLSIKWMIKIRKRYLKRRGQATSHIS

SEQ ID NO: 779243 - protein, 272 aa, Homo sapiens
  misc_feature (261)..(261): Xaa can be any naturally occurring amino acid
  misc_feature (270)..(270): Xaa can be any naturally occurring amino acid
GGSGQAHAPSIATPGLWDAPPDRFRLAEPVGPGAAAAVLRPCAAGWGGLRCAEALVSAMIRQERSTSYQELSEELVQVVENSELADEQDKETVRVQGPGILPGLDSESASSSIRFSKACLKNVFSVLLIFIYLLLMAVAVFLVYRTITDFREKLKHPVMSVSYKEVDRYDAPGIALYPGQAQLLSCKHHYEVIPPLTSPGQPGDMNCTTQRINYTDPFSNQTVKSALIVQGPREVKKRELVFLQFRLNKSSEDFTHDTLFXSESEAKRSXSA

SEQ ID NO: 779244 - protein, 448 aa, Homo sapiens
GGSGQAHAPSIATPGLWDAPPDRFRLAEPVGPGAAAAVLRPCAAGWGGLRCAEALVSAMIRQERSTSYQELSEELVQVVENSELADEQDKETVRVQGPGILPGWRDQATLSLLEARCQAKSFRGLGCVKHQLWKKRKSSRGNGLDSESASSSIRFSKACLKNVFSVLLIFIYLLLMAVAVFLVYRTITDFREKLKHPVMSVSYKEVDRYDAPGIALYPGQAQLLSCKHHYEVIPPLTSPGQPGDMNCTTQRINYTDPFSNQTVKSALIVQGPREVKKRELVFLQFRLNKSSEDFSAIDYLLFSSFQEFLQSPNRVGFMQACESAYSSWKFSGGFRTWVKMSLVKTKEEDGREAVEFRQETSVVNYIDQRPAAKKSAQLFFVVFEWKDPFIQKVQDIVTANPWNTIALLCGAFLALFKAAEFAKLSIKWMIKIRKRYLKRRGQATSHIS

SEQ ID NO: 779245 - protein, 172 aa, Homo sapiens
MAVAVFLVYRTITDFREKLKHPVMSVSYKEVDRYDAPGIALYPGQAQLLSCKHHYEVIPPLTSPGQPGDMNCTTQRINYTDPFSNQTVKSALIVQGPREVKKRELVFLQFRLNKSSEDFSAIDYLLFSSFQEFLQRQVWLTTLTRGQLPKKVLNCFLWSLNGKILSSRKSKI

SEQ ID NO: 779246 - protein, 408 aa, Homo sapiens; identical to SEQ ID NO: 779242

SEQ ID NO: 779247 - protein, 307 aa, Homo sapiens
GGSGQAHAPSIATPGLWDAPPDRFRLAEPVGPGAAAAVLRPCAAGWGGLRCAEALVSAMIRQERSTSYQELSEELVQVVENSELADEQDKETVRVQGPGILPGLDSESASSSIRFSKACLKNVFSVLLIFIYLLLMAVAVFLVYRTITDFREKLKHPVMSVSYKEVDRYDAPGIALYPGQAQLLSCKHHYEVIPPLTSPGQPGDMNCTTQRINYTDPFSNQTVKSALIVQGPREVKKRELVFLQFRLNKSSEDFSAIDYLLFSSFQEFLQRQVWLTTLTRGQLPKKVLNCFLWSLNGKILSSRKSKI

SEQ ID NO: 779248 - protein, 318 aa, Homo sapiens
ALLFLFPWKLLAGLDSESASSSIRFSKACLKNVFSVLLIFIYLLLMAVAVFLVYRTITDFREKLKHPVMSVSYKEVDRYDAPGIALYPGQAQLLSCKHHYEVIPPLTSPGQPGDMNCTTQRINYTDPFSNQTVKSALIVQGPREVKKRELVFLQFRLNKSSEDFSAIDYLLFSSFQEFLQSPNRVGFMQACESAYSSWKFSGGFRTWVKMSLVKTKEEDGREAVEFRQETSVVNYIDQRPAAKKSAQLFFVVFEWKDPFIQKVQDIVTANPWNTIALLCGAFLALFKAAEFAKLSIKWMIKIRKRYLKRRGQATSHIS

SEQ ID NO: 779249 - protein, 142 aa, Homo sapiens
VPSSTETLTGFMQACESAYSSWMYSARTQHLELDLTTQFHGESLTEALWIPARRQLVTHIDQRPAAKKSAQLFFVVFEWKDPFIQKVQDIVTANPWNTIALLCGAFLALFKAAEFAKLSIKWMIKIRKRYLKRRGQATSHIS

SEQ ID NO: 779250 - protein, 110 aa, Homo sapiens
LQLQDKSLILYYVLEWLPLPLFVMALEDPLQPQDPVVVVLPSCPLSSRSPLLTLTLRLSTGTSRAYCSRNAVLQAYSGPEQLTSSSTPPFSLSLLPINMEGYVKLRALVH

SEQ ID NO: 779251 - protein, 69 aa, Homo sapiens
IAAPREARTNHAVTPRSRGRAFVHSLIHSPPPTLPERARSPRCGQVLPDVVFANALSCATAGMVGAGGP

SEQ ID NO: 779252 - protein, 108 aa, Homo sapiens
PCIHPSIHLPTHPPKLIYPLNHPSTYPPLPPSIPLLPIFPLIPSNYPSIHPAVHPTIHPLTNLSTHPRMHPSIHPSTHPFTHPPIHPLTCLSIHPPSPWLFHVFLQPA

SEQ ID NO: 779253 - protein, 103 aa, Homo sapiens
PCIHPSIHLPTHPPKLIYPLNHPSTYPPLPPSIPLLPIFPLIPSNYPSIHPAVHPTIHPLTNLSTHEWRGEQGKADSNRNVVRPIREGQEKKNPYNRSAVKKT

SEQ ID NO: 779254 - protein, 131 aa, Homo sapiens
RYPVFIDATSVTKLKCISFKGEVTLVVDERVPDRGSRRYGPWSIVPIPSSNEEIRLVDDAFGKICHMVSDGSWVVHVQAAKLLGSMEQVSSHFLEQTLDKKLMSDLRRKRTAHERAKELYSSGEFSSGRKW

SEQ ID NO: 779255 - protein, 109 aa, Homo sapiens
SARTPLMPWAGGPKGQAGRPMWAAAPGPDTQLADTQHWPAAAETHGGRLTHNTRTGTLTRGTGMLAHTLATASTRSSHAGARRHTRLGQHILADSLVGMHSSHSNTHQF

SEQ ID NO: 779256 - protein, 56 aa, Homo sapiens
QGFPEIAIHVFLQPWLSPCVYKYISLLSAPVRPLSHTKAAIPPPPAHPRFAMMQPG

SEQ ID NO: 779257 - protein, 48 aa, Homo sapiens
MRKGTLPTYELTFLTLCHLVMTAQEHKPGAAASGRWLRHVKVEGCCTL

SEQ ID NO: 779258 - protein, 78 aa, Homo sapiens
SLFIGHLDTAARNNGIGPLSPAWCLIGCWGSGCAKLDGTFETQPPTSFLRRGDRSPDTQGFGYSHRERGLPHGADEYL

SEQ ID NO: 779259 - protein, 45 aa, Homo sapiens
DAWIDARMDGWMDGWIIGWMDNWMDEWTGGCMDGWMDGQVDAWVD

SEQ ID NO: 779260 - protein, 115 aa, Homo sapiens
MYGDIFNATGGPEAAVGSALAPGATVKAEGALPLELATARGMRDGAATKPDLPTYLAALLPAAALGWRSSSSSSVASCAIRPSPRCPRPLAARRPRALEDAAGVLGTEPRPPGAP

SEQ ID NO: 779261 - protein, 94 aa, Homo sapiens
MFMSPFRTAPRYAVLAWWGSLCRFRGATCHTHSAAYSHMATSSCGNTASVVFGRVTTYPAMTVDKENCHSCSESLQLVFCAPRGPAFTPSAVTG

SEQ ID NO: 779262 - protein, 106 aa, Homo sapiens [sequence omitted]

SEQ ID NO: 779263 - protein, 200 aa, Homo sapiens
GDWLSLLVFIFLPCWMLPALEHWTASSLAFGRLDLHQWFARGSQTFCHRLKAALSASLLLRFGTRTGFLAPQLAGGLLWDFTLWIMVIMEANVRRAKQRRTLSHLRKNLEKSPGYIFVNKWCPRTDFQLNSTRGDKVGLVSLILKLFQKIEKEALLPNSFYEASIILIPKPDQGTTKKENFKPISLMYIGTKILNKILAN

SEQ ID NO: 779264 - protein, 144 aa, Homo sapiens
MERASGLSPGGGLGATSRQMSPGTQLANPPDHGDKDCLGRISPGSGKQIQAAGQLPGPPTSLAPAQGRLRSLTPWGLQTPEHSEPEGIGHLQAATEAVLPHSTQNLITKRNLMVQARVQWRDLGSLKPPPPRFKQFSCFSLPSS

SEQ ID NO: 779265 - protein, 112 aa, Homo sapiens
FIKVVKNKAYFKRYQVKFRRRREGKTGYYPQKCLVIQDKNKYNTPKYKMIVRVTNRDIICQTAYARIEGDIVCAAYAHKLPKCGVKVGLTNYAATYCTGLLLARRLPNRFGM

SEQ ID NO: 779266 - protein, 89 aa, Homo sapiens
HKRYPLDRIKSAHKRSRTQQDPCADTLRHSETRKDAHLREQGSRRGSQLQKARPRALGDAQPTDRGSNTKGGHLQGRERPRSRQGARTP

SEQ ID NO: 779267 - protein, 144 aa, Homo sapiens
EKGSHSVNQAGVQRCHDGSTAASTSWAQLIFPSSREWSHVPPCPATFCIFFIEMGFHHVAQAGGQLLSSSYLPTSAFQSAGITGMSHCTWPWTVFLMPQKVTSRIEMFLCRLGTVAHTLSSQHFGRLRQADHEVRRSRPSWLTW

SEQ ID NO: 779268 - protein, 105 aa, Homo sapiens
KEKKAGAPAPGAVRWLGFLRRDWLAEGRNYSANMTIISCLATAHQSRETTQVGNPVCASSASGQPLRAPTFSHAILPLRNAPPPFSLIPFLFNSVFFLWDAFART

SEQ ID NO: 779269 - protein, 138 aa, Homo sapiens
GPKREERGGASARAPGSSAVSGAPFPSPGPFGAFTREDVGQDFALWRRLTSAALAHCEIRHGQRGPREPGTLPVGYGSAATAAPWAMVSLPPTPLPLELRASEAAARGHGWRGSAGLGQSPGFRLVGVGCGLCYPAPS

SEQ ID NO: 779270 - protein, 47 aa, Homo sapiens
MCPGVDSRAWVLPCRIWGGGIWGWLPSCGGCRQPPQDEEIETVLRGL

SEQ ID NO: 779271 - protein, 136 aa, Homo sapiens [sequence omitted]

SEQ ID NO: 779272 - protein, 135 aa, Homo sapiens
MVGQTEDDTAQQLVPTCGMKGVGERIVEYVSNIPALQRATPKGLASVSPDLEHRQEWTYSKSPLMGKGTRLEASENKRAGWLAAAPENLKYHRQIAQGAKDYEILKKETNKFILRIYTHWSHIPTLLSPQGEAKS

SEQ ID NO: 779273 - protein, 116 aa, Homo sapiens
PSSYPGCRGRGCARAASSGADLDLQSAFAAPASCVSKACTGPASASASQRTLHAQLALASLRPPQSKAPAFRPLRQVQLLPASGLFRPSSFLTSAIPGPVFPFRQPLGLVAQDKFD

SEQ ID NO: 779274 - protein, 280 aa, Homo sapiens
MAARGRGLLLLTLSVLLAAGPSAAAAKLNIPKVLLPFTRATRVNFTLEASEGCYRWLSTRPEVASIEPLGLDEQQCSQKAVVQARLTQPARLTSIIFAEDITTGQVLRCDAIVDLIHDIQIVSTTRELYLEDSPLELKIQALDSEGNTFSTLAGLVFEWTIVKDSEADRFSDSHNALRILTFLESTYIPPSYISEMEKAAKQGDTILVSGMKTGSSKLKARIQEAVYKNVRPAEVRLLILENILLNPAYDVYLMVGTSIHYKVQKIRQGKITGVSLALPS

SEQ ID NO: 779275 - protein, 72 aa, Homo sapiens
RTLCIMLLLLQDGRMVVSVIQDCFSYIFSAFFNAVELKPAYVFLCAYLLGSTMMSTTEAVPPLKTQDPLYFF

SEQ ID NO: 779276 - protein, 67 aa, Homo sapiens
NVQRHWRDWWWKVLATTSEPLAGDRMKLVGDESCILLTCRSSCRPAGQTAKGRQQQQWKARSGHCPI

SEQ ID NO: 779277 - protein, 119 aa, Homo sapiens
MCRGHQGEYLQALFPFLHETASFGLGHWALGPPWSSRIATSQNPFSIRHMKVTVTRNGSLDNQPIQNTDLDIGRPRVQILPCSLSAGKLWSNYLASPSQFSLLQNEVTQAATSQNECEN

SEQ ID NO: 779278 - protein, 119 aa, Homo sapiens; identical to SEQ ID NO: 779277

SEQ ID NO: 779279 - protein, 119 aa, Homo sapiens; identical to SEQ ID NO: 779277

SEQ ID NO: 779280 - protein, 119 aa, Homo sapiens; identical to SEQ ID NO: 779277

SEQ ID NO: 779281 - protein, 144 aa, Homo sapiens
DPICNSRHLTNTSGAGKDHSMTQLRPIHLSRNPPPLPAILSSLQREPLCFLRCLGLGRGCPSVRLAYSYRFPNSTQLHQASLGWVPGPLSLAPLAVCCQSLSWHPDRCLRPPKTTHTKPKTTHTTPIMLTCIQQLGTYFSVLFL

SEQ ID NO: 779282 - protein, 122 aa, Homo sapiens
DLLSGLSQPQGPPGSNRLIPSLLTKETVWDNSRTLFHLFHSHVEDRSLNEGTKSLMYLSPRLLKDSHHPCYHTFLTPDCTTACWPPLSALHDMSQGKVATEDFTQFWELELAGAPPLCQWLF

SEQ ID NO: 779283 - protein, 55 aa, Homo sapiens
MLDGGQSPQYTLDFGDLQYKGWLKEHSETQAANPKLYMTNNRQGMRTQEKRQMAK

SEQ ID NO: 779284 - protein, 40 aa, Homo sapiens
MWCNKPNAQLNLTTAKKFRRFSHNRKYPHCSYMMEHYFYV

SEQ ID NO: 779285 - protein, 405 aa, Homo sapiens
HSKEETGSHSPVCLQLHYKHSENRGPQGNQARLSSVPHKAELQIKLNPVCCELDISIVDRLNSLLQPQKLATVEMMASHMYTSYNKHISLHKAFTEVFLDDSHSPANCRISVQVATPALNLSVRFPIPDLRSDQERGPWFKKSLQKEILYLAFTDLEFKTEFIGGSTPEQIKLELTFRELIGSFQEEKGDPSIKFFHVSSGVDGDTTSSDDFDWPRIVLKINPPAMHSILERIAAEEEEENDGHYQEEEEGGAHSLKDVCDLRRPAPSPFSSRRVMFENEQMVMPGDPVEMTEFQDKAISNSHYVLELTLPNIYVTLPNKSFYEKLYNRIFNDLLLWEPTAPSPVETFENISYGIGLSVASQLINTFNKDSFSAFKSAVHYDEESGSEEETLQYFSTVDPNYRSR

SEQ ID NO: 779286 - protein, 101 aa, Homo sapiens
WLRSCASVSSPYGLAPNPVMQRDLPRCRRHFHVRLGKSDFSTNHWLPPAMSPRLELWGPPSSLNTQNLCQLSQDPSCGGLGVEGCRDPKTQPGARFYTGLD

SEQ ID NO: 779287 - protein, 256 aa, Homo sapiens
MPTMWTPAVVTVLRSPMVLLQVWSLPLNHIYLHKQSSSQQRRNFFFRRQRDISHSIVLPAAVSSAHPVPKHIKKPDYVTTGIVPDWGDSIEVKNEDQIQGLHQACQLARHVLLLAGKSLKVDMTTEEIDALVHREIISHNAYPSPLGYGGFPKSVCTSVNNVLCHGIPDSRPLQDGDIINIDVTVYYNGYHGDTSETFLVGNVDECGKKLVEVARRCRDEAIAACRAGAPFSVIGNTISHITHQNGFQVCPHFVGH

SEQ ID NO: 779288 - protein, 78 aa, Homo sapiens
CAWAGLDEGISSTLFVIITVALGVGVITIALYLSYRPCKVDRRKLLYRQKEEDKEEESQFAVQEEKSTTHIIDNCLIE

SEQ ID NO: 779289 - protein, 47 aa, Homo sapiens
SCPQASPSHASHTAPHGCHSSCHLQMALSQNTKRPPALRVEKPSSNP

SEQ ID NO: 779290 - protein, 291 aa, Homo sapiens
MLHPETSPGRGHLLAVLLALLGTAWAEVWPPQLQEQAPMAGALNRKESFLLLSLHNRLRSWVQPPAADMRRLDWSDSLAQLAQARAALCGTPTPSLASGLWRTLQVGWNMQLLPAGLVSFVEVVSLWFAEGQRYSHAAGECARNATCTHYTQLVWATSSQLGCGRHLCSAGQAAIEAFVCAYSPRGNWEVNGKTIVPYKKGAWCSLCTASVSGCFKAWDHAGGLCEVPRNPCRMSCQNHGRLNISTCHCHCPPGYTGRYCQVRCQPASGGARAGSGKEGGPMGLGPFGYGG

SEQ ID NO: 779291 - protein, 220 aa, Homo sapiens
VSEAALLPGPKDSQLPPLPSRTNNPPKVVMLFFTQCFGAVLDLIHLRFQHYKAKRVFSAAGQLVCVVNPTHNLKYVSSRRAVTQSAPEQGSFHPHHLSHHHCHHRHHHHLRHHAHPHHLHHQEAGLHANPVTPCLCMCPLFSCQWEGRLEVVVPHLRQIHRVDILQGAEIVFLATDMHLPAPADWIIMHSCLGHHFLLVLRKQERHEGHPQFFATMMLIG

SEQ ID NO: 779292 - protein, 74 aa, Homo sapiens
MLCHPSSWRELPPVERVCPSLGTRALLFLGIYHILFQVPFTHPAGWEEYIIVPLEVPPCVGHFSRSPGNTGIFL

SEQ ID NO: 779293 - protein, 49 aa, Homo sapiens
MSNASGPFNASGPFNASGPFNASAIQRLRAFNASGPFNASGPFNASGHS

SEQ ID NO: 779294 - protein, 180 aa, Homo sapiens
RCSAQETAVRARARPSRSGTGVGAPSGCARLRAPAQQPEQRPPPARRGCPDAGHTGLGPTDGNRSGGAAPPLLPPRRSQSRSCCAARSRGHSNRRQVPPPLAPAINTGGREGGADTRRAAIRRLTGLSRSGAALVSSACRGLRWRVDSETEGRVWDDLTKLLCILLQADREKRPTTEEPS

SEQ ID NO: 779295 - protein, 84 aa, Homo sapiens
VSTITITITITIIHHHTITITITIITNTITITTTIITIFTITVIIITITVIIVTITIITITVIVITIIICTATMETGPWKSNTP

SEQ ID NO: 779296 - protein, 59 aa, Homo sapiens
MGLKNKKNTEDPEEPLIASQSTEPEIGHLSPSKKETIMVTLHGATNLPACKDGSEPWPY

SEQ ID NO: 779297 - protein, 34 aa, Homo sapiens
LRLKPRPLPGGSRGPRLQAPTPARLHKASSGPGP

SEQ ID NO: 779298 - protein, 81 aa, Homo sapiens
LQLLSDVWDHVGPPTLHQQQQAQPLAQLLSGPLSCKLHEDRDWLHQHCQARCARALNIQQMCLGSKNIHSSSTVTAKSKKH

SEQ ID NO: 779299 - protein, 122 aa, Homo sapiens [sequence omitted]

SEQ ID NO: 779300 - protein, 116 aa, Homo sapiens
MKLRLKKEKFAKGGNSMELSVHRSPGPRIPPLILKTQEGFCIPTMKQVWGWICRVATQSMQNRRSMDFSILAIPFTSWAILSKLPPNVPQFPHLQNGLVAGIVPSSMRPEVMGRGW

SEQ ID NO: 779301 - protein, 114 aa, Homo sapiens
KPHLHQKNTKTSQAWRHAPAIAGTRQAEAGESGREVAVSRDGSSTVQLWLGMRGRPWKGEERGERGFCIFCRDGFHHIGQASLELLTSSDPPSSAFQSAGIIGMSHRAQPIISS

SEQ ID NO: 779302 - protein, 111 aa, Homo sapiens
LSKNDKGGRHRLEGSVRKKTEDVAWETTVPSSATAAAFIIYCCLMSSVCSNRCCNGMNSFICFLCVICTYPVGAKDIGVRWYEFQCWPTSFTGWVTQSMFLNPFEPQFPHL

SEQ ID NO: 779303 - protein, 95 aa, Homo sapiens
MDGPPKPPGRCSQKWAGVGGGCESHTEEGLREPQTRSNPSSEGAWPAGGQIQQRRSLGRWLDRTKARPAHWTAVEFPRTPRRPSNCGVSAHGRGL

SEQ ID NO: 779304 - protein, 69 aa, Homo sapiens
GRRPADITLGDSVYYWAMSMLHPSRKENQILNSCICPITSSTRHQVPRGQISPAVATAISSNAWTVPST

SEQ ID NO: 779305 - protein, 106 aa, Homo sapiens
MVTDYLIFVLWLCPLNPQHLAYVQLLVDIHTEPQHLLFPLPGMPFSRTPSQRAALFLPASHHPNGTITQILPSLPCLWALSSPCPAVFFSLPCSCHCLTCYQRSRV

SEQ ID NO: 779306 - protein, 140 aa, Homo sapiens
LQPQEPGFIDQKRHMRLWPAALLPDAGQGERRGREAGGKTPTLSVYRGSHILCSAPPGPWEGVLPTPHLWPLTSTCTCLFLSDCDYLKGSRQGGFMAWCLQVKATPLPSPLLLGPGADVSESASLCSLCRADSDFRNALL

SEQ ID NO: 779307 - protein, 171 aa, Homo sapiens
MQAPGPTLYALRRTAKVWLSLRQGRLECDRSPTLGPAFACACKSTGVEAPEPCASSRPQHPRHDTHAHARVHTARHAHALSRADWYPGVAVRTHTHMHTATSVYSRSPVGTHKQNSHSRSRPHVPRRVPGGIRAPSTFPPENPARSRGQLWGGVRRGLARGPRVTSPGGCA

SEQ ID NO: 779308 - protein, 202 aa, Homo sapiens
MSNLKMKEAALIYLDRSGGLQKFIDDCKYYNDSKQSYAVYRFKILINPSDVVELDAELGNHILHQPLKAAEVFQSVCFIAVKTLSLIGQLQTETQINIVLKLTHLPPLPSYGLDLCEFPLDYTSQRFYMMQGIVIAMTTITKYTQGARFLCSDEACPLSKGFQYIRVHVPGATESATIRNDFLCNLCASSLQEDRKFRVLGG

SEQ ID NO: 779309 - protein, 232 aa, Homo sapiens
AGRSFGARALGGGSKLTSWIFSCFSLVFDFFWTLVSTISEMPSSLLGAAMPASTSAAALQEALENAGRLIDRQLQEDRMYPDLSELLMVSAPNNPTVSGMSDMDYPLQGPGLLSVPNLPEISSIRRVPLPPELVEQFGHMQCNCMMGVFPPISRAWLTIDSDIFMWNYEDGGDLAYFDGLSETILAVGLVKPKAGIFQPHVRHLLVLETPVDIVNSWTQTMTNLAKQVHGGS

SEQ ID NO: 779310 - protein, 131 aa, Homo sapiens
MDESHLPQLPPGVCMAELGLPREPRPQDPGTAPAPTLAISPHPSLDSARLGSPRPWHPVQAWRHLLSFLQGDSDSPCLPGWSLDSGGHRVLEQHQHLLLSPGVDARIMKFMPGKAWRPRPPPLPRICVKHK

SEQ ID NO: 779311 - protein, 137 aa, Homo sapiens
MINQRSAPNKKPRRRAIPIKIISTVGSSTLYSQYVRHPPFFFRDKRVPPNKTRMIINITNQQAPPGARFIQQHQSRLVVADNNTLAPQVREVTLRSGEPLTTCWWCARHKHLSRDDDNHNSPRHENLNGKTPTWTSK

SEQ ID NO: 779312 - protein, 118 aa, Homo sapiens
MTLIPLPNPNYTLQPTGKGSEMNCRLGNQHPHPPATGRAASAGDTHPRPCTPPPPSQATQTAAWGNLGGPVPSLCRHPHEPRHRLPPSLSRKSHRVVAGIVWWPGRLTLALTRRPSRC

SEQ ID NO: 779313 - protein, 94 aa, Homo sapiens
AQGAQESIKAMWRVPGTTRRPVTGESPGMHRPEAMLLLLTLALLGGPTWAGKMYGPGGGKYFSTTEDYDHEITGLRVSVGLLLVKRFLEGVIYE

SEQ ID NO: 779314 - protein, 206 aa, Homo sapiens
AQGAQESIKAMWRVPGTTRRPVTGESPGMHRPEAMLLLLTLALLGGPTWAGKMYGPGGGKYFSTTEDYDHEITGLRVSVGLLLVKSVQVKLGDSWDVKLGALGGNTQEVTLQPGEYITKVFVAFQAFLRGMVMYTSKDRYFYFGKLDGQISSAYPSQEGQVLVGIYGQYQLLGIKSIGFEWNYPLEEPTTEPPVNLTYSANSPVGR

SEQ ID NO: 779315 - protein, 135 aa, Homo sapiens
MDKENVVHILHATLCSHKDHVLCRDMGEAGSHHPQQTNTGTENQMPHILTRKCKLNNENPWTQRGKHTPGPAGGRDEGRELRGRVNRCSKPPWHTYIYITNPHVLHMYPIFFLCVRKKKKIHKQLQALSPETVTF

SEQ ID NO: 779316 - protein, 99 aa, Homo sapiens
PLVPKKYVDTTGTWTNDGHVKRDEVHGPEGHLDHGLHEEGLEPNWADLERIPLDLIPELEGRDGRRRVLGSMFLAEEAHCKSKGTEEAWWSLENWDSSS

SEQ ID NO: 779317 - protein, 86 aa, Homo sapiens
TPHRVYWGLGVSTCHGAPTLVPSSQDSLVWTQLWREDSLALGSSCRNMAFFCSCGSRAVETSWVFLLILCQPPGAVCTGVGHLAPF

SEQ ID NO: 779318 - protein, 55 aa, Homo sapiens
GSQVTDGKAWATVGDWVPSWQEPTGTQSLPVILPCWLQAQDHRPEAMRDQGRTRA

SEQ ID NO: 779319 - protein, 83 aa, Homo sapiens
VGVHLLAEESQVLQLISVEIARNVDALTAYDHHLPAQHYLLSHDGRQAAQEMASTMEDWDLHLRHLRQPPGKAHLFIVLIVNR

SEQ ID NO: 779320 - protein, 83 aa, Homo sapiens
APRQEEGEQRDLLVGPYPPQPLLLASLFRLFPSALTYDRERARNSRSEKAEDERWPGQERREQSCRHWRARSRQGRQAAPEVA

SEQ ID NO: 779321 - protein, 128 aa, Homo sapiens
GSDAAVDLRIPVFIDAFCRALRKSIRRWPALQPQPGLGAGPGHHFTRDAFNTVGELFANQPSQELDPVMDLLVLSLGHQVIILDIIHIHKEALTKVMESRQHVAEGKTEMQRLMTSESQEQDFFGHCG

SEQ ID NO: 779322 - protein, 119 aa, Homo sapiens
RAGAPAGRSVAKRSVLGLGPEAPSRPRYGARRSGPAGRLDGTSGGFRFFSSPCALLGGSTGRIFQCPDRLKCGQAEFIHYSASTWGSPWPGALLGSAHPVKKDGALFSRRIHFSRGVFA

SEQ ID NO: 779323 - protein, 67 aa, Homo sapiens
MLKTGMWQREPTLLVTGLAPAAGESMSRAEGDTVSITGELPFEGDTGLSSRRDPGHVDAAANLVVVG

SEQ ID NO: 779324 - protein, 69 aa, Homo sapiens
GELRGHVGPPCAGLSGFLGHCGLLQVSLLPFSLASAWPLVRLCTSWGLYGIGHHLIAEPGLVVLERRRK

SEQ ID NO: 779325 - protein, 140 aa, Homo sapiens
PPFSQSRLYAPQDTGYLFSLCNSTITHLKIYGPIQHIQHYFSQFLSIKPQKCLFHALWYSLPLSIFQDLPIVWNILHPFHLNPESASRFRNSTSSVLQLFQPTLLTLYPKLLQNLECISLCMWQLIIFVVSFKFYLPNYT

SEQ ID NO: 779326 - protein, 232 aa, Homo sapiens
MHSHTTHPHTHMCHTTLNSHHTCTYPHTHRHTPHRTCTHHRGTHTQPITYAHTRTIYMHIHRFIHHTSQYTTPHRHLCTICAHTLTPHMHTKHHIHTRTICALRTYTPHITLHTPHHIRTHVHSCADTIQIQVHTYTTHTLYHVLCHTHKPYMHTHKYHTIPLTLYMYTCTQTHHTTNTRTPPHTDTYHPTYTIHVHTYPTHAHIHTASQNTTYSCAHTVPRCYNALYHGAK

SEQ ID NO: 779327 - protein, 151 aa, Homo sapiens
YIGVVFKAICGNFAKEIVLSYALQFSLHLLPSFMANRVNIFFCEEPDSKHARLCKPYSLYSVFVVWKRLIHKPGVLKQGPFRFSYLHPSRHLAMSRVIFGFQYEGWVLLASGEQRPGILLSVLQCIVQLPPPPKKSLIQNVSSSEVEKFYL

SEQ ID NO: 779328 - protein, 61 aa, Homo sapiens
MSYGYLGEEPSCSGNSKCKNLEMGLCFPMFRKSQCDWRRVNQQGEEMKSKKLAGEDLVIGP

SEQ ID NO: 779329 - protein, 121 aa, Homo sapiens
RRAASAAAVAVAAAAAGIAAAAAAARPASSPAAAPPPSLAGALASSLDGVRAARELDTLRTRPKATERRCSVVPGGGRGGREGKRRGGGEAKTPKNKKRETTPNNWGGGKKERKETHPPTK

SEQ ID NO: 779330 - protein, 173 aa, Homo sapiens
MGGLKRDIILSPGNQFAFLPPACSILHQEGPCDMWTPKLALCLSLSFSLSLSLSLTYRHTHTQSYPLNNPRAEIAQPVAMTAFRKMASRIHANCRYQFRAFWTANVGSHITKSWSKNEKRVRLEGPKVTSPHRHGSDQRRMTAEYHLRPRTEASCVHILGLYFSCRAEKNWRK

SEQ ID NO: 779331 - protein, 68 aa, Homo sapiens
VKAGDCANEDVTEFQIAWISRKSTGSPSEGFCGETDGPPGRRALVWALFSCWSQYKDGNQAGHGGSRL

SEQ ID NO: 779332 - protein, 125 aa, Homo sapiens
ALSVGYGRCRSWLPSLLPCKQELSLRAGEDLHYSFCTGRPWVISGEFQQGGFCGHEPACILPPYVAVSPNPWQLTQLACICVGEFCFPLPHQCEGVQSDPLHPPTAIAGRALADTASLLQPAACP

SEQ ID NO: 779333 - protein, 128 aa, Homo sapiens
VPLCSCSCPNLPSLQMPAVGMGRCSLWQLPRVAGAMPRLCFLGPRPCSSETAPFLGPRLCPGSQGLVASCRPHPASRRHPASAFLGFLLERPTPPLPSREMPRMALAPGCLPQNRHPPRAALICHPQA

SEQ ID NO: 779334 - protein, 133 aa, Homo sapiens
DLSSLQTSTSHVQATLLPSASRAAGTTDVCHRAQVIFVFSAETGFHHVAQAGLELLSSGDLLTSASQSAGITGMSYRAQPKCRHSFYNPLLHESWGSAVTGPAVTRCVTSLMVSMDNIIIVQPKIGLPKYFLY

SEQ ID NO: 779335 - protein, 32 aa, Homo sapiens
MGIGGSPLPATPHSAQTLLRSGGRRTSTQWPE

SEQ ID NO: 779336 - protein, 35 aa, Homo sapiens
MAKWGQGNPHWIVEEREDGTNVNNWRWRGWRRPPS

SEQ ID NO: 779337 - protein, 126 aa, Homo sapiens
GVSLPAERPLVHSVLAWGPFLALWAHLELLGTGTTGRVTLHCPEPPAPHQALLASPRAPGHSRGQSGHPGIARPGPVQGLWHLGEAFAPLSSEQKGWQRGKGTGQFCTWPFSRMKASTSRPSPQKE

SEQ ID NO: 779338 - protein, 34 aa, Homo sapiens
SKRVRDNLPFWLFVHCLGPRDWIMPAHTGEVRSL

SEQ ID NO: 779339 - protein, 71 aa, Homo sapiens
TDTSCSPHPPYGVTWARLADKSKTVQETLSDRGVQFPTQTPACSVRQTGRGRTQPLRMSVYYFPVGALRSL

SEQ ID NO: 779340 - protein, 329 aa, Homo sapiens
MMSNSSSEIDVIKTRIPTYDEDDNTILYAYETKPEFVNKEPNIVSDASCNTEEQLKTVDDVLIHCQVIYDALQNLDKKIDVIRRKVSKIQRFHARSLWTNHKRYGYKKHSYRLVKKLKLQKMKKNEVYETFSYPESYSPTLPVSRRENNSPSNLPRPSFCMEEYQRAELEEDPILSRTPSPVHPSDFSEHNCQPYYASDGATYGSSSGLCLGNPRADSIHNTYSTDHASAAPPSVTRSPVENDGYIEEGSITKHPSTWSVEAVVLFLKQTDPLALCPLVDLFRSHEIDGKALLLLTSDVLLKHLGVKLGTAVKLCYYIDRLKQGKCFEN

SEQ ID NO: 779341 - protein, 208 aa, Homo sapiens
MKKNEVYETFSYPESYSPTLPVSRRENNSPSNLPRPSFCMEEYQRAELEEDPILSRTPSPVHPSDFSEHNCQPYYASDGATYGSSSGLCLGNPRADSIHNTYSTDHASAAPPSVTRSPVENDGYIEEGSITKHPSTWSVEAVVLFLKQTDPLALCPLVDLFRSHEIDGKALLLLTSDVLLKHLGVKLGTAVKLCYYIDRLKQGKCFEN

SEQ ID NO: 779342 - protein, 189 aa, Homo sapiens
MTVSRRENNSPSNLPRPSFCMEEYQRAELEEDPILSRTPSPVHPSDFSEHNCQPYYASDGATYGSSSGLCLGNPRADSIHNTYSTDHASAAPPSVTRSPVENDGYIEEGSITKHPSTWSVEAVVLFLKQTDPLALCPLVDLFRSHEIDGKALLLLTSDVLLKHLGVKLGTAVKLCYYIDRLKQGKCFEN

SEQ ID NO: 779343 - protein, 208 aa, Homo sapiens; identical to SEQ ID NO: 779341

SEQ ID NO: 779344 - protein, 208 aa, Homo sapiens; identical to SEQ ID NO: 779341

SEQ ID NO: 779345 - protein, 301 aa, Homo sapiens
MMSNSSSEIDVEPNIVSDASCNTEEQLKTVDDVLIHCQVIYDALQNLDKKIDVIRRKVSKIQRFHARSLWTNHKRYGYKKHSYRLVKKLKLQKMKKNEVYETFSYPESYSPTLPVSRRENNSPSNLPRPSFCMEEYQRAELEEDPILSRTPSPVHPSDFSEHNCQPYYASDGATYGSSSGLCLGNPRADSIHNTYSTDHASAAPPSVTRSPVENDGYIEEGSITKHPSTWSVEAVVLFLKQTDPLALCPLVDLFRSHEIDGKALLLLTSDVLLKHLGVKLGTAVKLCYYIDRLKQGKCFEN

SEQ ID NO: 779346 - protein, 190 aa, Homo sapiens
MKKNEVYETFSYPESYSPTLPVSRRENNSPSNLPRPSFCMEEYQRAELEEDPILSRTPSPVHPSDFSEHNCQPYYASDGATYGSSSGLCLGNPRADSIHNTYSTDHASAAPPSVTRSPVENDGYIEEGSITKHPSTWSVEAVVLFLEIDGKALLLLTSDVLLKHLGVKLGTAVKLCYYIDRLKQGKCFEN

SEQ ID NO: 779347 - protein, 208 aa, Homo sapiens; identical to SEQ ID NO: 779341

SEQ ID NO: 779348 - protein, 301 aa, Homo sapiens; identical to SEQ ID NO: 779345

SEQ ID NO: 779349 - protein, 110 aa, Homo sapiens
SSGSSHSPSLSSHYSDSRSPSRLSPKHRDEGRKTGSQRSSGSRSPSPSGGSGWGSPQRNGGSGQRSGAHGGRPGSAHSPPDVRTLRFAEGSRAAGCAVRGRAGRQRGRGR

SEQ ID NO: 779350 - protein, 55 aa, Homo sapiens
RLLWGRPSEAESDIQKEVNHVLFMMNEANITRITSPQISLHSSETKTMASSPPLS

SEQ ID NO: 779351 - protein, 99 aa, Homo sapiens
MPGTGSIQMSAFSRPTTDYSIAKGGYTHTHTHTHTRTHSYFLKQMSFFCFFRESHTVTQSPRVECRSGVTAQCKLKVGGTTSPPAVSSCSAEITSMSHH

SEQ ID NO: 779352 - protein, 112 aa, Homo sapiens
ERTITLRRMTLQSSLWAEAGARLDLKPYPCMAPPPSCVPLLVNHMHPNPRLRLLSREPGPRPACMGDIVKTLRFTDRESEAQKGHTVCKWLCCTAPLRWSPSPSPCWSSCPG

SEQ ID NO: 779353 - protein, 74 aa, Homo sapiens
PISPALQLGQSSLVLGHRSIRMQGASRLPNSTIYVVEPGYLGFTVHPGDRWVLETGRLYEITIEVFDKFSNKVY

SEQ ID NO: 779354 - protein, 68 aa, Homo sapiens [sequence omitted]

SEQ ID NO: 779355 - protein, 434 aa, Homo sapiens
MDSVEKGAATSVSNPRGRPSRGRPPKLQRNSRGGQGRGVEKPPHLAALILARGGSKGIPLKNIKHLAGVPLIGWVLRAALDSGAFQSVWVSTDHDEIENVAKQFGAQVHRRSSEVSKDSSTSLDAIIEFLNYHNEVDIVGNIQATSPCLHPTDLQKVAEMIREEGYDSVFSVVRRHQFRWSEIQKGVREVTEPLNLNPAKRPRRQDWDGELYENGSFYFAKRHLIEMGYLQGGKMAYYEMRAEHSVDIDVDIDWPIAEQRVLRYGYFGKEKLKEIKLLVCNIDGCLTNGHIYVSGDQKEIISYDVKDAIGISLLKKSGIEVRLISERACSKQTLSSLKLDCKMEVSVSDKLAVVDEWRKEMGLCWKEVAYLGNEVSDEECLKRVGLSGAPADACSTAQKAVGYICKCNGGRGAIREFAEHICLLMEKVNNSCQK

SEQ ID NO: 779356 - protein, 101 aa, Homo sapiens
PSFRSFNSKRHLIEMGYLQGGKMAYYEMRAEHSVDIDVDIDWPIAEQRVLRYGYFGKEKLKEIKLLVCNIDGCLTNGHIYVSGDQKEIISYDVKDAIELLN

SEQ ID NO: 779357 - protein, 263 aa, Homo sapiens
MDSVEKGAATSVSNPRGRPSRGRPPKLQRNSRGGQGRGVEKPPHLAALILARGGSKGIPLKNIKHLAGVPLIGWVLRAALDSGAFQSVWVSTDHDEIENVAKQFGAQVHRRSSEVSKDSSTSLDAIIEFLNYHNEVDIVGNIQATSPCLHPTDLQKVAEMIREEGYDSVFSVVRRHQFRWSEIQKGVREVTEPLNLNPAKRPRRQDWDGELYENGSFYFAKRHLIEMGYLQGGKMAYYEMRAEHSVDIDVDIDWPIAEQRVLR

SEQ ID NO: 779358 - protein, 261 aa, Homo sapiens
MDSTQVGVFKKANQIGLTCLLQSTDSCALEAQICFCYGNLNGSFYFAKRHLIEMGYLQGGKMAYYEMRAEHSVDIDVDIDWPIAEQRVLRYGYFGKEKLKEIKLLVCNIDGCLTNGHIYVSGDQKEIISYDVKDAIGISLLKKSGIEVRLISERACSKQTLSSLKLDCKMEVSVSDKLAVVDEWRKEMGLCWKEVAYLGNEVSDEECLKRVGLSGAPADACSTAQKAVGYICKCNGGRGAIREFAEHICLLMEKVNNSCQK

SEQ ID NO: 779359 - protein, 222 aa, Homo sapiens
PSFRSFNSKRHLIEMGYLQGGKMAYYEMRAEHSVDIDVDIDWPIAEQRVLRYGYFGKEKLKEIKLLVCNIDGCLTNGHIYVSGDQKEIISYDVKDAIGISLLKKSGIEVRLISERACSKQTLSSLKLDCKMEVSVSDKLAVVDEWRKEMGLCWKEVAYLGNEVSDEECLKRVGLSGAPADACSTAQKAVGYICKCNGGRGAIREFAEHICLLMEKVNNSCQK

SEQ ID NO: 779360 - protein, 434 aa, Homo sapiens; identical to SEQ ID NO: 779355

SEQ ID NO: 779361 - protein, 434 aa, Homo sapiens; identical to SEQ ID NO: 779355

SEQ ID NO: 779362 - protein, 434 aa, Homo sapiens; identical to SEQ ID NO: 779355

SEQ ID NO: 779363 - protein, 371 aa, Homo sapiens
KVEEIGHYYKKKYIICLWSAVVDTVWVSTDHDEIENVAKQFGAQVHRRSSEVSKDSSTSLDAIIEFLNYHNEVDIVGNIQATSPCLHPTDLQKVAEMIREEGYDSVFSVVRRHQFRWSEIQKGVREVTEPLNLNPAKRPRRQDWDGELYENGSFYFAKRHLIEMGYLQGGKMAYYEMRAEHSVDIDVDIDWPIAEQRVLRYGYFGKEKLKEIKLLVCNIDGCLTNGHIYVSGDQKEIISYDVKDAIGISLLKKSGIEVRLISERACSKQTLSSLKLDCKMEVSVSDKLAVVDEWRKEMGLCWKEVAYLGNEVSDEECLKRVGLSGAPADACSTAQKAVGYICKCNGGRGAIREFAEHICLLMEKVNNSCQK

SEQ ID NO: 779364 - protein, 234 aa, Homo sapiens
IVSVSVSPKNPAGLSVGIAIETSKTRVLEDFGGKMAYYEMRAEHSVDIDVDIDWPIAEQRVLRYGYFGKEKLKEIKLLVCNIDGCLTNGHIYVSGDQKEIISYDVKDAIGISLLKKSGIEVRLISERACSKQTLSSLKLDCKMEVSVSDKLAVVDEWRKEMGLCWKEVAYLGNEVSDEECLKRVGLSGAPADACSTAQKAVGYICKCNGGRGAIREFAEHICLLMEKVNNSCQK

SEQ ID NO: 779365 - protein, 153 aa, Homo sapiens
RTLSTWRGSRSLAGSCVRPWIQGPSRGAHVREWAARPGRGSGEGVGLLEGLGPPGPPLLEGGHLSCQGCARSGVPGAGLRAQEEGLQLLPCSVAANGHNLGQFLSPPLRIIRKRGDYTSPTVPSSRVDLTGKSKGGHPGATSVIICELLWMGA

SEQ ID NO: 779366 - protein, 128 aa, Homo sapiens
MDLSSEAAGFVRAGSAARPRHSHPAIQQLTSLHCLLASGREDLQDPLGLSLSSFAMPLLDGDLEGSGKHSSRKVDSPFGPGSPSKGFFSRGPQPRPSSPMSAPVRPKTSPGSPKTVFPFSYQESRQLP

SEQ ID NO: 779367 - protein, 114 aa, Homo sapiens
MNSIRISFFGGILSMFTYEIISANTDNFISFFPSWMPFISFSCLIALAKTSSTMLNRSSESGHPCHVLDLRRKSLSVSPLSMIFAVGFSYVAFIMVRYFPCISSSLSVFILKGC

SEQ ID NO: 779368 - protein, 117 aa, Homo sapiens
SRVGSCARCFCRVTLRSLVFSCARLVLRVSALSPRGFRSVLVSHVPRPWLVEARSAGFFCGTQPISSAVVWNVWPVSLRWAPAQRLLLTFWGAGARTHSFVVFCFFFVAQRSFIVFL

SEQ ID NO: 779369 - protein, 117 aa, Homo sapiens; identical to SEQ ID NO: 779368

SEQ ID NO: 779370 - protein, 113 aa, Homo sapiens
MLGNIVDSSSFAMVTLVGHSFLNSTHSLDVYNITFLIDSHICGQRNNSMFSKRPREHISGASPLSLCVRHFGELLEDGGSGRKGKEAGPARALQGPVGCPRRLPEGNANRKRL

SEQ ID NO: 779371 - protein, 85 aa, Homo sapiens
EDGYRMKFACYYPRVEYGFQVKVLREDSRAAFRLFETKITQVLHFTKDVKAAANQMRNFLVRASCRLRLEPGKEYLIMGLDGATY

SEQ ID NO: 779372 - protein, 106 aa, Homo sapiens
SGADRGTPRVLGAERDHACLSSSPAKHSKQDRSNRSPGMGPLPNADPQAPSNQSAALASAQLDESPQHATSPCPQRALALTFSPAYKARPHSSSLPAKPHLSFNTK

SEQ ID NO: 779373 - protein, 92 aa, Homo sapiens
  misc_feature (53)..(53): Xaa can be any naturally occurring amino acid
  misc_feature (75)..(75): Xaa can be any naturally occurring amino acid
ITTTEIPSHSTPSFTSSITTTETTSHSTPSFTSSIRTTETTSHSTPSFTSSIXATETTSHSTPSFTSLITTSETXSHSTPKGTCLVFEELVT

SEQ ID NO: 779374 - protein, 78 aa, Homo sapiens
PESSWGFSSLSICEDSGVKVGLNFCGGSIRGLVNSTKLFLHLWDPAGSDASSQIATRYPGKKSMTQKEPENPNSSKYW

SEQ ID NO: 779375 - protein, 777 aa, Homo sapiens
EAWGVNRPRSHHSRWTRLVDINLVRCHALKLDSFGQFIELLPSLEFISLDQMFREPPKGCARVGLSAGTGIGVSSALVSNQNSNNDDNNAQNNNANIHDNNHHHPDDSDEENDFRQDLQPGEQQFAADALNEMEDIVQEDGEVVAESGNNTPAHSQAIIPVDVDEEQAGPSGLQRVVKPTPITVHDSESDDEEDSLELQEVWIPKNGTRRYSEREEKTGESVQSRELSVSGKGKTPLRKRYNSHQMGQSKQFPLEESSCEKGCQVTSEQIKADMKAARDIPEKKKNKDVYPSCSSTTASTVGNSSSHNTASQSPDFVRTVNSGGSSEPSPTEVDVSRQCACSPGGSEDSEAMEEGDAESSVCPRCCCHRPQESQRRTSRCSDEERPSTSRACVVNGPDGTRSAFSFRTLPQGGSSGPAHDERTNGSGSGATGEDRRGSSQPESCDVQSNEDYPRRPLTRARSRLSHVLLVSESEVAKTKPRHAMKRKRTADKSTSTSDPVIEDDHVQVLVLKSKNLVGVTMTNCGITDLVLKDCPKMMFIHATRCRVLKHLKVENAPIVNRFDYAQCKKLNMDQVLDQILRMPPERNRIIYLRPMQQVDTLTLEQKLFSGPYPYHICIIHEFSNPPNVRNKVRIRSWMDTIANINQELIKYEFFPEATRSEEDLKKYPKYPWGREIYTLEGVVDGAPYSMISDFPWLRSLRAAEPNSFARYDFEDDEESTIYAPRRKGQLSADICMETIGEEISEMRQMKKGVFQRVVAIFIHYCDVNGEPVEDDYI

SEQ ID NO: 779376 - protein, 1113 aa, Homo sapiens [sequence omitted]

SEQ ID NO: 779377 - protein, 1188 aa, Homo sapiens [sequence omitted]

SEQ ID NO: 779378 - protein, 776 aa, Homo sapiens
QNENSPLLKDHSRWTRLVDINLVRCHALKLDSFGQFIELLPSLEFISLDQMFREPPKGCARVGLSAGTGIGVSSALVSNQNSNNDDNNAQNNNANIHDNNHHHPDDSDEENDFRQDLQPGEQQFAADALNEMEDIVQEDGEVVAESGNNTPAHSQAIIPVDVDEEQAGPSGLQRVVKPTPITVHDSESDDEEDSLELQEVWIPKNGTRRYSEREEKTGESVQSRELSVSGKGKTPLRKRYNSHQMGQSKQFPLEESSCEKGCQVTSEQIKADMKAARDIPEKKKNKDVYPSCSSTTASTVGNSSSHNTASQSPDFVRTVNSGGSSEPSPTEVDVSRQCACSPGGSEDSEAMEEGDAESSVCPRCCCHRPQESQRRTSRCSDEERPSTSRACVVNGPDGTRSAFSFRTLPQGGSSGPAHDERTNGSGSGATGEDRRGSSQPESCDVQSNEDYPRRPLTRARSRLSHVLLVSESEVAKTKPRHAMKRKRTADKSTSTSDPVIEDDHVQVLVLKSKNLVGVTMTNCGITDLVLKDCPKMMFIHATRCRVLKHLKVENAPIVNRFDYAQCKKLNMDQVLDQILRMPPERNRIIYLRPMQQVDTLTLEQKLFSGPYPYHICIIHEFSNPPNVRNKVRIRSWMDTIANINQELIKYEFFPEATRSEEDLKKYPKYPWGREIYTLEGVVDGAPYSMISDFPWLRSLRAAEPNSFARYDFEDDEESTIYAPRRKGQLSADICMETIGEEISEMRQMKKGVFQRVVAIFIHYCDVNGEPVEDDYI

SEQ ID NO: 779379 - protein, 1188 aa, Homo sapiens [sequence omitted]

SEQ ID NO: 779380 - protein, 1135 aa, Homo sapiens
MGPRKKSVKTCIMNNEIPEEMTADETKDYMNQLSHEVLCHIFRYLPLQDIMCMECLSRKLKEAVTLYLRVVRVVDLCAGRWWEYMPSGFTDASFLTLLKKMPDVEQLYGLHPRYLERRRVRGHEAFSIPGVLEALQACPNLVGVETSHLELVESIWTYMPHVHILGKFRNRNGAFPIPPENKLKIPIGAKIQTLHLVGVNVPEIPCIPMLRHLYMKWVRLTKPQPFKDFLCISLRTFVMRNCAGPTNSLKYVPLVTGLASARNLEHLEMVRVPFLGGLIQHVVEDSWRSGGFRNLHTIVLGACKNALEVDLGYLIITAARRLHEVRIQPSLTKDGVFSALKMAELEFPQFETLHLGYVDEFLLQSRMANADLVKYGLADVVENPGIITDIGMKAVNEVFSCIKYLAIYNCPHLHNPYNWISDHSRWTRLVDINLVRCHALKLDSFGQFIELLPSLEFISLDQMFREPPKGCARVGLSAGTGIGVSSALVSNQNSNNDDNNAQNNNANIHDNNHHHPDDSDEENDFRQDLQPGEQQFAADALNEMEDIVQEDGEVVAESGNNTPAHSQAIIPVDVDEEQAGPSGLQRVVKPTPITVHDSESDDEEDSLELQEVWIPKNGTRRYSEREEKTGESVQSRELSVSGKGKTPLRKRYNSHQMGQSKQFPLEESSCEKGCQVTSEQIKADMKAARDIPEKKKNKDVYPSCSSTTASTVGNSSSHNTASQSPDFVRTVNSGGSSEPSPTEVDVSRQCACSPGGSEDSEAMEEGDAESSVCPRCCCHRPQESQRRTSRCSDEERPSTSRACVVNGPDGTRSAFSFRTLPQGGSSGPAHDERTNGSGSGATGEDRRGSSQPESCDVQSNEDYPRRPLTRARSRLSHVLLVSESEVAKTKPRHAMKRKRTADKSTSTSDPVIEDDHVQVLVLKSKNLVGVTMTNCGITDLVLKDCPKMMFIHATRCRVLKHLKVENAPIVNRFDYAQCKKLNMDQVLDQILRMPPERNRIIYLRPMQQVDTLTLEQKLFSGPYPYHICIIHEFSNPPNVRNKVRIRSWMDTIANINQELIKYEFFPEATRSEEDLKKYPKYPWGREIYTLEGVVDGAPYSMISDFPWLRSLRAAEPNSFARYDFEDDEESNYDLT

SEQ ID NO: 779381 - protein, 1188 aa, Homo sapiens [sequence omitted]

SEQ ID NO: 779382 - protein, 1138 aa, Homo sapiens
MCMECLSRKLKEAVTLYLRVVRVVDLCAGRWWEYMPSGFTDASFLTLLKKMPDVEQLYGLHPRYLERRRVRGHEAFSIPGVLEALQACPNLVGVETSHLELVESIWTYMPHVHILGKFRNRNGAFPIPPENKLKIPIGAKIQTLHLVGVNVPEIPCIPMLRHLYMKWVRLTKPQPFKDFLCISLRTFVMRNCAGPTNSLKYVPLVTGLASARNLEHLEMVRVPFLGGLIQHVVEDSWRSGGFRNLHTIVLGACKNALEVDLGYLIITAARRLHEVRIQPSLTKDGVFSALKMAELEFPQFETLHLGYVDEFLLQSRMANADLVKYGLADVVENPGIITDIGMKAVNEVFSCIKYLAIYNCPHLHNPYNWISDHSRWTRLVDINLVRCHALKLDSFGQFIELLPSLEFISLDQMFREPPKGCARVGLSAGTGIGVSSALVSNQNSNNDDNNAQNNNANIHDNNHHHPDDSDEENDFRQDLQPGEQQFAADALNEMEDIVQEDGEVVAESGNNTPAHSQAIIPVDVDEEQAGPSGLQRVVKPTPITVHDSESDDEEDSLELQEVWIPKNGTRRYSEREEKTGESVQSRELSVSGKGKTPLRKRYNSHQMGQSKQFPLEESSCEKGCQVTSEQIKADMKAARDIPEKKKNKDVYPSCSSTTASTVGNSSSHNTASQSPDFVRTVNSGGSSEPSPTEVDVSRQCACSPGGSEDSEAMEEGDAESSVCPRCCCHRPQESQRRTSRCSDEERPSTSRACVVNGPDGTRSAFSFRTLPQGGSSGPAHDERTNGSGSGATGEDRRGSSQPESCDVQSNEDYPRRPLTRARSRLSHVLLVSESEVAKTKPRHAMKRKRTADKSTSTSDPVIEDDHVQVLVLKSKNLVGVTMTNCGITDLVLKDCPKMMFIHATRCRVLKHLKVENAPIVNRFDYAQCKKLNMDQVLDQILRMPPERNRIIYLRPMQQVDTLTLEQKLFSGPYPYHICIIHEFSNPPNVRNKVRIRSWMDTIANINQELIKYEFFPEATRSEEDLKKYPKYPWGREIYTLEGVVDGAPYSMISDFPWLRSLRAAEPNSFARYDFEDDEESTIYAPRRKGQLSADICMETIGEEISEMRQMKKGVFQRVVAIFIHYCDVNGEPVEDDYI

SEQ ID NO: 779383 - protein, 822 aa, Homo sapiens
MANADLVKYGLADVVENPGIITDIGMKAVNEVFSCIKYLAIYNCPHLHNPYNWISDHSRWTRLVDINLVRCHALKLDSFGQFIELLPSLEFISLDQMFREPPKGCARVGLSAGTGIGVSSALVSNQNSNNDDNNAQNNNANIHDNNHHHPDDSDEENDFRQDLQPGEQQFAADALNEMEDIVQEDGEVVAESGNNTPAHSQAIIPVDVDEEQAGPSGLQRVVKPTPITVHDSESDDEEDSLELQEVWIPKNGTRRYSEREEKTGESVQSRELSVSGKGKTPLRKRYNSHQMGQSKQFPLEESSCEKGCQVTSEQIKADMKAARDIPEKKKNKDVYPSCSSTTASTVGNSSSHNTASQSPDFVRTVNSGGSSEPSPTEVDVSRQCACSPGGSEDSEAMEEGDAESSVCPRCCCHRPQESQRRTSRCSDEERPSTSRACVVNGPDGTRSAFSFRTLPQGGSSGPAHDERTNGSGSGATGEDRRGSSQPESCDVQSNEDYPRRPLTRARSRLSHVLLVSESEVAKTKPRHAMKRKRTADKSTSTSDPVIEDDHVQVLVLKSKNLVGVTMTNCGITDLVLKDCPKMMFIHATRCRVLKHLKVENAPIVNRFDYAQCKKLNMDQVLDQILRMPPERNRIIYLRPMQQVDTLTLEQKLFSGPYPYHICIIHEFSNPPNVRNKVRIRSWMDTIANINQELIKYEFFPEATRSEEDLKKYPKYPWGREIYTLEGVVDGAPYSMISDFPWLRSLRAAEPNSFARYDFEDDEESTIYAPRRKGQLSADICMETIGEEISEMRQMKKGVFQRVVAIFIHYCDVNGEPVEDDYI

SEQ ID NO: 779384 - protein, 945 aa, Homo sapiens
MGPRKKSVKTCIMNNEIPEEMTADETKDYMNQLSHEVLCHIFRYLPLQDIMCMECLSRKLKEAVTLYLRVVRVVDLCAGRWWEYMPSGFTDASFLTLLKKMPDVEQLYGLHPRYLERRRVRGHEAFSIPGVLEALQACPNLVGVETSHLELVESIWTYMPHVHILGKFRNRNGAFPIPPENKLKIPIGAKIQTLHLVGVNVPEIPCIPMLRHLYMKWVRLTKPQPFKDFLCISLRTFVMRNCAGPTNSLKYVPLVTGLASARNLEHLEMVRVPFLGGLIQHVVEDSWRSGGFRNLHTIVLGACKNALEVDLGYLIITAARRLHEVRIQPSLTKDGVFSALKMAELEFPQFETLHLGYVDEFLLQSRMANADLVKYGLADVVENPGIITDIGMKAVNEVFSCIKYLAIYNCPHLHNPYNWISDHSRWTRLVDINLVRCHALKLDSFGQFIELLPSLEFISLDQMFREPPKGCARVGLSAGTGIGVSSALVSNQNSNNDDNNAQNNNANIHDNNHHHPDDSDEENDFRQDLQPGEQQFAADALNEMEDIVQEDGEVVAESGNNTPAHSQAIIPVDVDEEQAGPSGLQRVVKPTPITVHDSESDDEEDSLELQEVWIPKNGTRRYSEREEKTGESVQSRELSVSEVAKTKPRHAMKRKRTADKSTSTSDPVIEDDHVQVLVLKSKNLVGVTMTNCGITDLVLKDCPKMMFIHATRCRVLKHLKVENAPIVNRFDYAQCKKLNMDQVLDQILRMPPERNRIIYLRPMQQVDTLTLEQKLFSGPYPYHICIIHEFSNPPNVRNKVRIRSWMDTIANINQELIKYEFFPEATRSEEDLKKYPKYPWGREIYTLEGVVDGAPYSMISDFPWLRSLRAAEPNSFARYDFEDDEESTIYAPRRKGQLSADICMETIGEEISEMRQMKKGVFQRVVAIFIHYCDVNGEPVEDDYI

SEQ ID NO: 779385 - protein, 49 aa, Homo sapiens
EILCPTKDPLRETSPLELRGSTRDGFGSLSLTLSGPSGWKEGLPQGDAF

SEQ ID NO: 779386 - protein, 84 aa, Homo sapiens
MRRDHLFWATRVGITASLRQQDTGIVGGKQLTFSFYSVDLACIFSFNPFHNPGKLLLSLFPFLLMKNMKLEEVKKVDQSCIFTL

SEQ ID NO: 779387 - protein, 59 aa, Homo sapiens
MQVQGEGDSSTPTLKAAGTRDEFVLTWSSSDLTRDKDRLSRPHSTLARPASLSIPSMHL

SEQ ID NO: 779388 - protein, 80 aa, Homo sapiens
IPLHPTITAMLPDTRRLKAVVAPEPGMRSVSRARSTRLSPRERIKKSCCQIEKSEEVQVLYLKKVTVTTENARFEAVAVI

SEQ ID NO: 779389 - protein, 107 aa, Homo sapiens
AISFFSDTRTVVRYMDPYTFFCDLVIVCLGLVFSFLILCHWPHVSCDVSLYSASFCMHPFCAYIMENYKNTYLRISLLVMEQEIAKVAFGVRLLDFFPLIVTYLKCC

SEQ ID NO: 779390 - protein, 73 aa, Homo sapiens
MCQHGNDKRAHEGNKPRGDRETGQQDTPDRIRKTRPGGETGAVCAKNPKGQAQRAHKGNITSTRPKGHGDYKR

SEQ ID NO: 779391 - protein, 73 aa, Homo sapiens
KLRSASLSVGDPHITCTHATSGTSTEHEGFLGNLSAYFPPRLPNYHGKEHGTTESVCCVVTTVKAATFLYLGC

SEQ ID NO: 779392 - protein, 73 aa, Homo sapiens; identical to SEQ ID NO: 779391

SEQ ID NO: 779393 - protein, 130 aa, Homo sapiens
MGDLDNSAFAAWAPFCSSSTRALSAPGHWGFEGRQFPAAPARLGGRRPRVPVGGRPRQPAKTSRHRNLRRLPPMRASGAPSLPGGRGEGRVAPGGGLRATGLRCASVDTAPPSASTALGSGTFGNRFGRS

SEQ ID NO: 779394 - protein, 109 aa, Homo sapiens
MGLKRPLAGGSWACQSGREAGALDLGGRSEARASWAWRVRCEAEAGPVQAFGRQEAGKAAGRHELGWAERGRWEAGGAGPGEADSRNFCTWSGRREAGAGPGEADLRTT

SEQ ID NO: 779395 - protein, 30 aa, Homo sapiens
HLPPGFLHLSKLQKLTASKNCLEKLFEEEN

SEQ ID NO: 779396 - protein, 242 aa, Homo sapiens
HRLNFSSLSWPGHILSNHSCSPSFAPSSASPRLSEAAGGAGRIFIHLLGAQESDPGPRLLQQVGASVTSASPYWLWRHLVDASGSAGTAALPVTQKQNQQFTWPYIIFESRIPRVHSQPSSACIVHCLLSAGPTHLHLTSTGTQTEPLPLKSQPHTQLCAQKQAFVLTKQNETTQTSLKMGSMHSTEYYEMDKRVCWIGNVSKSTLKNNTYRMMPFIGRNKPKPDPLFAYPCEMQREGWTHT

SEQ ID NO: 779397 - protein, 125 aa, Homo sapiens
CSFCSDAGFSGCPLRPIFPASCCPFLHASSVVRLPRVASLTLISGWPSSCGFGDYLLSASWPSVSGPVMAPELWPRHLQSLPGGPLCSPRQAPACMLEFGCPSLSLVPSFLCYPPPLGQQVRSVL

SEQ ID NO: 779398 - protein, 155 aa, Homo sapiens
MELRSGAAYSAQRMAGLVLPDFRYGLLLGLDVWASWLDHQWLKQTLALLSSGPAQLVLAACSGPQRWGAAFGSLCELGLCPSPHGASLPSTALTLTQLVLAARSSTGAYALRLCTGPPAPRPASLACVSDCAEGHWEKPGQDAGCTDDGDHTGLP

SEQ ID NO: 779399 - protein, 67 aa, Homo sapiens
FSQGITGLTLGEREAMHAANTCTPPFILPRLLLSGAQACKFVDQCAPQSVLISASPPRGSGDRGSGK

SEQ ID NO: 779400 - protein, 129 aa, Homo sapiens
IWLNLGYNCATLVTGDMGRCCCQWILFMKTHQRDAYWASAPKKGHDPPEQPVHVCLTDSRNHLINTIFQVCSSCCKAQDQSHGASLSPTKNFVVCVLHIDLVLHYFLSFSLHPLIWFRSVSLPKSHVKL

SEQ ID NO: 779401 - protein, 91 aa, Homo sapiens
QRNKLGMTNVHANCPAPVDTSPRVRWHLARYTGRDPGRWPLRSLRGSVLGGTVIVPHDCLALGQGTICLELCNAVGYLASFPNPQGASWSF

SEQ ID NO: 779402 - protein, 91 aa, Homo sapiens
WSAIDTNVLSYSSRSQKSGIRFTGLNPGVGRAVCLLETPGENLQATSIPWLNSWPFLHLQNQQSLVRSFSSCITLNSFSQAQSTLPLIRPT

SEQ ID NO: 779403 - protein, 135 aa, Homo sapiens [sequence omitted]

SEQ ID NO: 779404 - protein, 56 aa, Homo sapiens
MGDPFLVGEIGLLAFKSAADEGQKQDQDSHVLLLEMFSKLLELLTLRHRLIEMSLE

SEQ ID NO: 779405 - protein, 69 aa, Homo sapiens
LRATPRPGIDLEDTKLMVQAATVALGGTQIRGPDGRARRSSPSGSSSSDVPSLQSLTEPRPPKVLGLQA

SEQ ID NO: 779406 - protein, 131 aa, Homo sapiens
MVSGNSVFGVVEPLPVSVVGRLGIPFLQWADSAFAEVGAFAEVAKVTLAKAGLVEIGQAEKMVVAAAAAAVVAVVVAAAAAVVAAAAAVGLKLSSAAVAVVELKLNSAVAVAVAVAAAAAVAAAAAAAAAA

SEQ ID NO: 779407 - protein, 114 aa, Homo sapiens
SRKCQAFLSMYSKRGGLKPSPHSGTSLEQFLGARHISGASLPVRGSLPASISSRPSPWGGSMMHPSSAQGLGPWSRAGDTGALAGGQGVDNGDNGTRGHPGEPDRPGMGSPVFE

SEQ ID NO: 779408 - protein, 216 aa, Homo sapiens
READGILNLFAKKSIDTGMGLERLVSVLQNKMSNYDTDLFVPYFEAIQKGTGARPYTGKVGAEDADGIDMAYRVLADHARTITVALADGGRPDNTGRGYVLRRILRRAVRYAHEKLNASRGFFATLVDVVVQSWEMHFLELKKDPDMVKDIINEEEVQFLKTLSRGRRILDRKIQSLGDSKTIPGDTAWLLYDTYGFPVDLTGLIAEEKGLVVDMD

SEQ ID NO: 779409 - protein, 127 aa, Homo sapiens
READGILNLFAKKSIDTGMGLERLVSVLQNKMSNYDTDLFVPYFEAIQKGKVPDHHTFFEMLGSWSFGDYFKELACKMALELLTQEFGIPIERLYVTYFGGDEAAGLEADLGMQTDLAKFWGWMTTK

SEQ ID NO: 779410 - protein, 133 aa, Homo sapiens
QAGVQWYNLSSLQPPPPRFRLLGSSDSPASAYRVAGITGTCHQAWLIFVFLVEMGFLHIGQAGLEHLISSDPSASVSQSDGITGVSHHTQPNVGSFYNPYCLGVMCQKSQYLWLPQLFLQITSPIDSLSPRDQ

SEQ ID NO: 779411 - protein, 45 aa, Homo sapiens
AHLKSIKPYLEYRHRREGKYTHTKLVLQFKFLSKKKQVRMSLLSK

SEQ ID NO: 779412 - protein, 126 aa, Homo sapiens
LFCHSIKHSFTLLTLHLSAYLILPGCGTKTQDPLNGGAERAVTQTGLKHTPCLPHGGQREGKRGKRRREELWPFKEPRPRSSLSQGYGSLFGALQSLASPSFQAPPHSLVPPMEAACSMPGPAAAL

SEQ ID NO: 779413 - protein, 41 aa, Homo sapiens
MGAFDVKTLAPVQALPSPRCLQHHMELGSPGVSDRGRLQPP

SEQ ID NO: 779414 - protein, 171 aa, Homo sapiens
SLSVCVCVRLGTHVPCAPECGFLARRPFFWSASPRVSAWVVWPVGSRRPGGSSLGVCEGLGNVGIGVGPAGVFIPSPSGAASLLGWIQTSAPQPRTTASQALIVHPQEGARRASRRWLSRLSPSALIEKCSHSSTQGRRRKPARGWGKHVCLSKAGLPGRVTRLTLLPGCR

SEQ ID NO: 779415 - protein, 92 aa, Homo sapiens
VAISHATSTAQGLKNPPNSLAHCCHSQHLIKLPGGSRIGLLTLVPADTLWGPGTGMLNPQLPPLRPEDWPTWHSRPQQNFTTASTNNCTLSH

SEQ ID NO: 779416 - protein, 117 aa, Homo sapiens
MSGGLDLCPVPGVSAHWIAAVVPSLPVTSSPDIKPSVSFSFCLGLQMQLRDLRRLREGGAPPAAGRAGATLLSDCIIFPSPSAQLISLHAYTGPNTHTRVHAHRHTCASPNTSHTCM

SEQ ID NO: 779417 - protein, 195 aa, Homo sapiens
DSRLSARRRPRCNFLRSSRIRVHPTPAASTMPPKFDPNEIKVVYLRCTGGEVGATSALAPKIGPLGLSPKKVGDDIAKATGDWKGLRITVKLTIQNRQAQIEVVPSASALIIKALKEPPRDRKKQKNIKHSGNITFDEIVNIARQMRHRSLARELSGTIKEILGTAQSVGCNVDGRHPHDIIDDINSGAVECPAS

SEQ ID NO: 779418 - protein, 113 aa, Homo sapiens
MAVLLPPPSPTSPFWVHWLTTVFVSDKSLQRTAFWELSHRARLSSLPSCMLGQLPHPPSQPSPTLCWARAAVSLAGLCAKSRHHPSSPQQASSRVLEHSRHSVWTGRALKEFS

SEQ ID NO: 779419 - protein, 104 aa, Homo sapiens
MQGPPCAPPHTGTEGTEKISPSPCPGGTHQRQWRGWVRVQATGLEDPKPNPSSSYLRWVPLVKRHFTLCLSLLFCQVGRAPETTSWGSCEEKERECKRSGQYTA

SEQ ID NO: 779420 - protein, 75 aa, Homo sapiens
GGGLRAPPELPLLAIAPPHKAAGSHFSEGLACKKCPPECWPDKWKSARVGYPHDSSQPALLVPDSCSDSICDCKA

SEQ ID NO: 779421 - protein, 143 aa, Homo sapiens
GLAYGARLSIMRSRIVVQCQPAVTVRHGVGIALQEMKTTSLSQGNELEVSIMMVVEALCELHCPEAIQGIAVWSSSIVGKHLLWINSVAQQAEGRFEKASVEYQEHLCAMTVVDCCISSFDKSVLTLASAGCKSASLKHCLNG

SEQ ID NO: 779422 - protein, 51 aa, Homo sapiens
RPAGKSLKKVELDSQAQALLPSTSSEQASVPWPSSNRLSAFEPSPWICQPP

SEQ ID NO: 779423 - protein, 128 aa, Homo sapiens
MKPHCRGVKGNEQQESGKICKRKEKDQSEGPRESKNQPCCQWRWEWKSEVSEDIVGIRQKTLKAQKRQESFSSFSRSGPGSQLNTKLQKAQSFDVASVPPVAEWAVPQSSRLKYRRLFNSHDKTMSGH

SEQ ID NO: 779424 - protein, 102 aa, Homo sapiens
GGWAFLVPSLAAVEAEDSQDPGEDTVLWWPGLWAPGAEGREDGWGQGSGSRGTLSHLLRWAADGLCERHWCGQRTRETAASQAGRELAQPREAPLPGNEAKA

SEQ ID NO: 779425 - protein, 88 aa, Homo sapiens
DDGGDEDEDEGADEDEGGDEDEGGDKDEGDEDEGEEGDEDEGGWGDEDEDDEGDEDEDDGGDEDEDDGGEEDEDDEGDEDDEGDGRDE

SEQ ID NO: 779426 - protein, 111 aa, Homo sapiens
RKQRIRGRRDHGGKEQLTGSRQTREKAKKERKEVACSQEILTFKKAINNDAQKAQDFHFSNSEQEEKSSSFHAGRLRIEGGHVWYYREILKWESGDSALLLFSCVTLGKSL

SEQ ID NO: 779427 - protein, 75 aa, Homo sapiens
SSGNPLMFPGFVFLLFVISLAAAAHLWVLAAFMGRITVKVCSFTPEASKTVSPPEGANNSRRTAFKSCNTHHKGL

SEQ ID NO: 779428 - protein, 89 aa, Homo sapiens
MGWVWWETDLDTGKDIAYSVPPTHHPLKASNGKRPLGPEDNEEQRGRLTLPLWLWLQIQGLSEQEKEHSPQASRVLGTGWAEGIYTNCA

SEQ ID NO: 779429 - protein, 56 aa, Homo sapiens
SSLQVFFAHRLYAPYGSDSRYSHEQDPGPFLLGAHSLVEETEVVTRYSSVLGEGEA

SEQ ID NO: 779430 - protein, 210 aa, Homo sapiens
MLKCFRNCLRPSSLSTLPLQYGILFPKLLACLVHLHFGHFSSAVISVTSFYLSMNLDGSAQDPEKREYSSVCVGREDDIKKSERMTAVVHDREVVIFYHKGEYHAMDIRCYHSGGPLHLGDIEDFDGRPCIVCPWHKYKITLATGEGLYQSINPKDPSAKPKWCSKGIKQRIHTVTVDNGNIYVTLSNEPFKCDSDFYATGDFKVIKSSS

SEQ ID NO: 779431 - protein, 71 aa, Homo sapiens
MRRASRITTSRARSGSGPKLPPGQEVMPEVSPKGQQQPLPWNRDAVGPCHPSPALPSGCCADPGQEAPSSL

SEQ ID NO: 779432 - protein, 37 aa, Homo sapiens
MRELLLLPKWVDTRVLLNILPEGQDCPTRKNDPAPNK

SEQ ID NO: 779433 - protein, 249 aa, Homo sapiens
VRDMMFYWLLSIVGRQRASPGWQNWSSARNSASAAEARSMALPTQAQVVVCGGGITGTSVAHHQSKMGWKDIVLLEQGRLAAGSTRFCAGILSTARHLTIEQKMADYSNKLYHQLEQETGIRTGYTRTGSIFLAQTQDRLISLKRINAGLNVIGIPSEIISPKKVAELHHLLNVHDLVGAMHVPEDAVVSSADVALALASAASQNGVQIYDRTSVLQVMGKKGQVTGVETDKGQIECQYFVNCAGQLWS

SEQ ID NO: 779434 - protein, 211 aa, Homo sapiens
ASCLSDVEYQNSETNSSFASKVQNGIQNDVSQRTQFPSTENIVVLSLSLLIIPFVPATNLFFYVRFVIAELTYYIFLDMGFCLLYYSWRAKALDVKVQKRFLKSLIFYATCYTNSSSMDSRLRSGMETDRMRNTALYRSGIQVNPAKAWGNLGNVLKSQSKISEAESAYRNALYYRSNMADMLYNLGLLLQENSRFAEALHYYKLAIGSRP

SEQ ID NO: 779435 - protein, 112 aa, Homo sapiens
DVEAPRAKLDGARLEGDLSLADKDVTAKDSKFKMPKFKMPSFGVSAPGKSIEVSVDVSAPKVEAEVSLPSMQGDLKTTDISIEPPSAQLEVQAGQVDLKLPEGHVPEGAGLK

SEQ ID NO: 779436 - protein, 81 aa, Homo sapiens
SSSRHSSSPSSCSSSRHISPPVRFLLSPTIPPFTSLTHTPLLETGAGKTGVGLLSLTGAETEVCHKVPMFELTFGGQTVCQ

SEQ ID NO: 779437 - protein, 37 aa, Homo sapiens
KAASGGALWEVCEVLRKVLQEQEKAGGAFSPSVAVPP

SEQ ID NO: 779438 - protein, 102 aa, Homo sapiens
HCLRLKSELLGTLKAASLSPDCRVPGCCTGPSTVSKAVPPLQGSLLRLLQILSHNSAGDFTRHCLRVALPLNRTPPTGKALRGFISVSPMTGTLTGTQKGAQ

SEQ ID NO: 779439 - protein, 65 aa, Homo sapiens
MVNPAPFSMPRQVRPLERRKYMLKSLDQIETVNGGSVASRLTFPDREALAEHADLKSMVELIKRM

SEQ ID NO: 779440 - protein, 120 aa, Homo sapiens
MTHNDHLAPSMLWEMQHCKKQTKTNKQKNKTPTKWGENRSSIKKKVFCILNKIENIFFQNMKTQLQITPQGHLRKRSPIHKDTVYIIQQNMHSQMILSDNTEEVTAYHSWNAFVQNSERP

SEQ ID NO: 779441 - protein, 108 aa, Homo sapiens [sequence omitted]

SEQ ID NO: 779442 - protein, 90 aa, Homo sapiens
ARSAVLPPVPSEVHGPTAPRPPSALASTLSFHFSQLSPIFRKCSSRGSLSPLAGGARVCASDHMDPCTTICSVLSLWSAQLIKQALVRKI

SEQ ID NO: 779443 - protein, 111 aa, Homo sapiens
QSNPSGPAWSWWILAVLPLERKAQLAILGMTSLKERLLAIRRILVIITRKMNSRQELANARERNELIFLSVKVSGSPCAFINVRHGRIAVHSLCFIKCLWMRFQNGTLAKH

SEQ ID NO: 779444 - protein, 49 aa, Homo sapiens
PQSERTAPGALDARAGRCPPPPPFPRASRGVLSPPPLRRSRVTAGGRGA

SEQ ID NO: 779445 - protein, 258 aa, Homo sapiens
TGLSQPVLRQPNMSPPGMWQPGVQQPGISQQVPSHPDMSQPGMSQQVPSQPGIRQPDTSQSCKNQTDMSQPDANQSSLSDSNQTGIIQPSPSLLGMNQMDMNQWSASLYEMNQVDMKQPSMSQAGMRQSGTNLPDINQPGMKQPGTWQLGRSQPGMWPQSLSELVLSEASISQPGPPQRAPSQSGPRQSSTSQAGTNQSGISQPVMWQLDMRQSGGSQPSMRQVGTSQSGTSQIGMSQPGTWQTGLSQPVPRQPNKSP

SEQ ID NO: 779446 - protein, 136 aa, Homo sapiens
GAARPKHPARIAEPAPCAGGNEDLELGARVWILGTSRTLTYIREHSVVDPVEKKMELCSTNITLTNLVSVNERLVYTPHPENPEMTVLTQEAIITVKGISLGSYLESLMANTISSNAKKGWAAIEWIIEHSESAVS

SEQ ID NO: 779447 - protein, 207 aa, Homo sapiens
CSLEPGRFESAVTLMAPLHSCLLGDRVRPCLRQTKTKGLPGAEACSHPWDTVIQAAMRKYPNPMNPSVLGVDVLQRRVDGRGRLHSLRLLSTEWGLPSLVRAILGTSRTLTYIREHSVVDPVEKKMELCSTNITLTNLVSVNERLVYTPHPENPEMTVLTQEAIITVKGISLGSYLESLMANTISSNAKKGWAAIEWIIEHSESAVS

SEQ ID NO: 779448 - protein, 136 aa, Homo sapiens; identical to SEQ ID NO: 779446

SEQ ID NO: 779449 - protein, 107 aa, Homo sapiens
CSLEPGRFESAVTLMAPLHSCLLGDRVRPCLRQTKTKGLPGAEACSHPWDTVIQAAMRKYPNPMNPSVLGSGCATAPRGRPRPPAQLAPAQHRVGAAQPRESDFGNQ

SEQ ID NO: 779450 - protein, 35 aa, Homo sapiens
SYFYALPGGNSGLLSLYDVITGWGGPQIFLGKGGL

SEQ ID NO: 779451 - protein, 151 aa, Homo sapiens
  misc_feature (77)..(77): Xaa can be any naturally occurring amino acid
DSCLWGMEDKNIIQFVHGEEDLKVQHRGEEQRARLLKDQLSLGNADFSITDVKLQDAGVYRCMISYGGADYKRITVXVNAPYNKINQRISVVDPVTSEHELTCQAEGYPKVEVIWISRDHQVLSGKTTTTNSKREEKLFNVTSTHLSMSRL

SEQ ID NO: 779452 - protein, 66 aa, Homo sapiens
PSCSMKTGFPKSRTSQLSYQVANGSSFSVHSGYWNISQSKPPSPPGTARFCRSMAAASGPVRGKLS

SEQ ID NO: 779453 - protein, 116 aa, Homo sapiens
MPFPPMPPPPAPAPGAQAARQLPRRPCAAGDKKKRPPQRPEGLLSSSWPSATLKRPPARRGPGLDRTQPPAPPGVSPQALPSRARAPATCAPPRPAGSGHSPARTTYAATSAGTGT

SEQ ID NO: 779454 - protein, 219 aa, Homo sapiens
PAGPARVSAVGTRGRRDSPTVGRREAVPAGSSPGSTPRRRGGWERLSLSPRVWSLGCEEAGEAAAGRRWVWRGRPDCGDPLRAQWLSARLSFQGLRIRRLGCTMPFPPMPPPPAPAPGAQAARQLPRRPCAAGDKKKRPPQRPEGLLSSSWPSATLKRPPARRGPGLDRTQPPAPPGVSPQALPSRARAPATCAPPRPAGSGHSPARTTYAATSAGTGT

SEQ ID NO: 779455 - protein, 117 aa, Homo sapiens
EERVPQSSFIYLFRDKVSLFRSAVVITLLGRLRHENRLNPGGGGCSELRMHHWTPSWATEQDFTSQKKGGEGRTTALYQDSENKNDLTIPSFGKDRSLNCLTLLKEHTLVQLLWKPI

SEQ ID NO: 779456 - protein, 234 aa, Homo sapiens
MSSEQSAPGASPRAPRPGTQKSSGAVTKKGERAAKEKPATVLPPVGEEEPKSPVLVDGEKELRSWRNNIFWKGRQDSIQSPTEEYQCSGVLETDFAELCTRWGYTDFPKVVNRPRPQPPFVPSASLSEKATLDDPRLSGSCSLNSLESKYVSFRPTIQVELEQEDSKSVKEIYIRGWKVEERILGVFSKCLPPLTQLQAINLWKVGLTDKTLTTFIELLPLCSSTLRSADWEAP

SEQ ID NO: 779457 - protein, 205 aa, Homo sapiens
MSSEQSAPGASPRAPRPGTQKSSGAVTKKGERAAKEKPATVLPPVGEEEPKSPEEYQCSGVLETDFAELCTRWGYTDFPKVVNRPRPQPPFVPSASLSEKATLDDPRLSGSCSLNSLESKYVSFRPTIQVELEQEDSKSVKEIYIRGWKVEERILGVFSKCLPPLTQLQAINLWKVGLTDKTLTTFIELLPLCSSTLRSADWEAP

SEQ ID NO: 779458 - protein, 66 aa, Homo sapiens
RIKWDHCRSGTAGELQYASEGELEGSAIRPSLQLQKTWALPLMAVLRLGRPRPNTVIFLLGNNDPK

SEQ ID NO: 779459 - protein, 84 aa, Homo sapiens
ADGGKFPEEGRWLNPGRAAAGRKTSEALTTRRGCRRRCYGREPPRPAPSVIIQGILVHHRAHDLGSRHYFVISVLEEERHSDWH

SEQ ID NO: 779460 - protein, 43 aa, Homo sapiens
MLREPAGRKLSAVEKEREEMEEVSGTTELEKNLLLSSPKSCVC

SEQ ID NO: 779461 - protein, 123 aa, Homo sapiens
HAPHSGHSSSAGLSSSGHIASAGLSLSFDHSLSAGSSSSFSLSFGLTASAGSAPPTGPTFYDYAPYAGPALSPDHSPNTGPTFSDLTVSAGTSLCSGFVLSAGHNFFGLTHSAGHTFFPDNVP

SEQ ID NO: 779462 - protein, 67 aa, Homo sapiens
MIGGAGASGCGGDGGVDGDDGGGSDGGVDGGDGGSGDDGGDGDDKVVVKVELMVMMEVVVMVELMVV

SEQ ID NO: 779463 - protein, 150 aa, Homo sapiens
DPTLLDRQSRSVVDVLKRNKNFKAIEKINSHLEKLATCSKDLSGFSNGDGPTSENDIFRKVLEQLVKYMNSGNRLLHKNFLKQEVVQRFLRLLSTLQEIPPDLVCDINQDCATTVFKFLLEKQRWPEVLLLLTRKVSGEPPLGDCLIKDC

SEQ ID NO: 779464 - protein, 427 aa, Homo sapiens
FSPTRIKRKKVNMVFAHRMDNSKPHLIIPTLLVPLQNRSCTETATPLPSQYLMELSEEHSWMSNQTDLHYVLKPGEVATASIFFGILWLFSIFGNSLVCLVIHRSRRTQSTTNYFVVSMACADLLISVASTPFVLLQFTTGRWTLGSATCKVVRYFQYLTPGVQIYVLLSICIDRFYTIVYPLSFKVSREKAKKMIAASWVFDAGFVTPVLFFYGSNWDSHCNYFLPSSWEGTAYTVIHFLVGFVIPSVLIILFYQKVIKYIWRIGTDGRTVRRTMNIVPRTKVKTIKMFLILNLLFLLSWLPFHVAQLWHPHEQDYKKSSLVFTAITWISFSSSASKPTLYSIYNANFRRGMKETFCMSSMKCYRSNAYTITTSSRMAKKNYVGISEIPSMAKTITKDSIYDSFDREAKEKKLAWPINSNPPNTFV

SEQ ID NO: 779465 - protein, 123 aa, Homo sapiens
EHIETVAGSSSKGFQNSKKKEEGPTKSTEVFIAPDSQIQHREQEMAEPSFHRQVVKMSSKPYSSLVAEPGPKTRSPALLEKSSFRWAVGCLHCHPPCWRKRRWGGTFTPIRVIQDAQLHWQFK

SEQ ID NO: 779466 - protein, 113 aa, Homo sapiens [sequence omitted]

SEQ ID NO: 779467 - protein, 80 aa, Homo sapiens
GKKSYGGEVSFKEPRTHAEARQAAWPLSCASRSRDDYKEELEGRRKRSGGITRSENGWGVIEKFFGGGDHELCLRGQRKQ

SEQ ID NO: 779468 - protein, 138 aa, Homo sapiens
PSGPHDHCEWLGNPGQALPTDLRKRTPGSRGRFSSREAGSCWGSQTVPPCLSELQLSLCSLSSLSAPFCSAVTVTQPEPVSLFSRQWDLRECLCCVYAATTFSGSGVSGCEAGSSAGRKSPEDELRPLQQADPLGQEG

SEQ ID NO: 779469 - protein, 105 aa, Homo sapiens [sequence omitted]

SEQ ID NO: 779470 - protein, 98 aa, Homo sapiens
TASLTQTSHLSNGDIWEQHPLYEATMETKEPIVYTGSVERAPGECSGMTLLGSCPTEANTARTVATAPKSAWREESRSRSPDSDESAGLGHASQGENL

SEQ ID NO: 779471 - protein, 129 aa, Homo sapiens
PEKAERGADLCSARRLAGQGRGCQEAREQSRRSGAERALPGSPSAQRMRSVGARPEVGALGRRSPRTPLSTAPLSVRPPWTPSIPKPRQPIRRLGRPQAQRDTTTTTRRHHRRSTWGGTYKASRLTPVS

SEQ ID NO: 779472 - protein, 68 aa, Homo sapiens
AEPPSSNHIRKESETNAPLAVTPYPLAVRCPNSVIRCPDMRPQWTDPGWKGRVRRNQTEEFRRCGNRV

SEQ ID NO: 779473 - protein, 131 aa, Homo sapiens
SVTHDGPQLNDGPQLNDGPQLNEGPQLNDGPQLNDGPQLNEGPQLNDGPQLNDGPQLNDGPQLNDGPQLNDGPQLNDGPQLNDGPQLIKNSTGKTRPHDSIISHWIPPTTCGNCGSYKMRFGWGHRAISVV

SEQ ID NO: 779474 - protein, 270 aa, Homo sapiens
MAQFNLLSHSNSLRATNTFQSSTVHFGHSTNTHLNRPFKSSHTGNSTATSTIHSGPNLESRTFTTTLLRNHTTHPQELIPCPALSSSSSIHATWAQTGSIKDCPRIPGWKHHFQRSAGTPGKLRPTYTQKRDMPHIHRCDPRRDTNSNRTSTTSPDMWHTLAQRSKQTQAHNHSKNITPTKAYGAPPQSQTTIEHTKKQRTKSSREATSTAPTLPKPHNLDDPANRTIRIMNTPGVRKCHSRQRKTERTRVQQGSTNIEIHTQTIHAPHK

SEQ ID NO: 779475 - protein, 86 aa, Homo sapiens
ESSLPWVGSEVGEVASKASLLTLGACTPSPLCFLKPTMSRPSLVPGPEEEDVALPTDKHEEEQTFACSTFQSRGKDSCDMSPPAAL

SEQ ID NO: 779476 - protein, 42 aa, Homo sapiens
EEKMQGQEEKMREQEEKMRGQEEKMWGQEEKMWGQEEKMWGQ

SEQ ID NO: 779477 - protein, 75 aa, Homo sapiens
KLCYSPLICSPLTMAVSISATEVETAPLKAGSVIKGSRDWARWLTPVIPALWEAEAGGSRGHEFETNLSLVKVQK

SEQ ID NO: 779478 - protein, 35 aa, Homo sapiens
MCNSLDVESYLDMGCEAQTGTLCLSKPLVNHPCTI

SEQ ID NO: 779479 - protein, 37 aa, Homo sapiens
RLAPERWSAKGLAGGEEEVILQVFVLIVIPNCLPGIR

SEQ ID NO: 779480 - protein, 44 aa, Homo sapiens
MRDRKRKGQRLSFFSEVEIRHPLLAFLNSFSFYSSTLSGPKYQK

SEQ ID NO: 779481 - protein, 61 aa, Homo sapiens
GVTPLVGGILREPSGNLPGSLRGYPHLPGGEKGESLATLLSLKTIRVRERFLGAFWSFSSV

SEQ ID NO: 779482 - protein, 742 aa, Homo sapiens
MAEGSFSVQSESYSVEDMDEGSDEVGEEEMVEGNDYEEFGAFGGYGTLTSFDIHILRAFGSLGPGLRILSNEPWELENPVLAQTLVEALQLDPETLANETAARAANVARAAASNRAARAAAAAARTAFSQVVASHRVATPQVSGEDTQPTTYAAEAQGPTPEPPLASPQTSQMLVTSKMAAPEAPATSAQSQTGSPAQEAATEGPSSACAFSQAPCAREVDANRPSTAFLGQNDVFDFTQPAGVSGMAFPRPKRPAPAQEAATEGPSAASGVPQTGPGREVAATRPKTTKSGKALAKTRWVEPQNVVAAAAAKAKMATSIPEPEGAAAATAQHSAEPWARMGGKRTKKSKHLDDEYESSEEERETPAVPPTWRASQPSLTVRAQLAPRPPMAPRSQIPSRHVLCLPPRNVTLLQERANKLVKYLMIKDYKKIPIKRADMLKDVIREYDEHFPEIIERATYTLEKKFGIHLKEIDKEEHLYILVCTRDSSARLLGKTKDTPRLSLLLVILGVIFMNGNRASEAVLWEALRKMGLRPGVRHPFLGDLRKLITDDFVKQKYLEYKKIPNSNPPEYEFLWGLRARHETSKMRVLRFIAQNQNRDPREWKAHFLEAVDDAFKTMDVDMAEEHARAQMRAQMNIGDEALIGRWSWDDIQVELLTWDEDGDFGDAWARIPFAFWARYHQYILNSNRANRRATWRAGVSSGTNGGASTSVLDGPSTSSTIRTRNAARAGASFFSWIHWHR

SEQ ID NO: 779483 - protein, 742 aa, Homo sapiens; identical to SEQ ID NO: 779482

SEQ ID NO: 779484 - protein, 877 aa, Homo sapiens
MAEGSFSVQSESYSVEDMDEGSDEVGEEEMVEGNDYEEFGAFGGYGTLTSFDIHILRAFGSLGPGLRILSNEPWELENPVLAQTLVEALQLDPETLANETAARAANVARAAASNRAARAAAAAARTAFSQVVASHRVATPQVSGEDTQPTTYAAEAQGPTPEPPLASPQTSQMLVTSKMAAPEAPATSAQSQTGSPAQEAATEGPSSACAFSQAPCAREVDANRPSTAFLGQNDVFDFTQPAGVSGMAFPRPKRPAPAQEAATEGPSAASGVPQTGPGREVAATRPKTTKSGKALAKTRWVEPQNVVAAAAAKAKMATSIPEPEGAAAATAQHSAEPWARMGGKRTKKSPCPLPPPHPLAPVLSFSSLSCSSPPSPLPLLPLFSSFPSFSPHLPSPPLLSSQLSMFLQHKFAEHVFTPRSPYPQDWWEKRLAQCLALSKHAAHASRCWYCSHFQEPATGEVRAGCFGTGSLVALGLSSLNMIQSKHLDDEYESSEEERETPAVPPTWRASQPSLTVRAQLAPRPPMAPRSQIPSRHVLCLPPRNVTLLQERANKLVKYLMIKDYKKIPIKRADMLKDVIREYDEHFPEIIERATYTLEKKFGIHLKEIDKEEHLYILVCTRDSSARLLGKTKDTPRLSLLLVILGVIFMNGNRASEAVLWEALRKMGLRPGVRHPFLGDLRKLITDDFVKQKYLEYKKIPNSNPPEYEFLWGLRARHETSKMRVLRFIAQNQNRDPREWKAHFLEAVDDAFKTMDVDMAEEHARAQMRAQMNIGDEALIGRWSWDDIQVELLTWDEDGDFGDAWARIPFAFWARYHQYILNSNRANRRATWRAGVSSGTNGGASTSVLDGPSTSSTIRTRNAARAGASFFSWIHWHR

SEQ ID NO: 779485 - protein, 742 aa, Homo sapiens; identical to SEQ ID NO: 779482

SEQ ID NO: 779486 - protein, 742 aa, Homo sapiens; identical to SEQ ID NO: 779482

SEQ ID NO: 779487 - protein, 759 aa, Homo sapiens
CWYRSGKYGIAIGVPENMAEGSFSVQSESYSVEDMDEGSDEVGEEEMVEGNDYEEFGAFGGYGTLTSFDIHILRAFGSLGPGLRILSNEPWELENPVLAQTLVEALQLDPETLANETAARAANVARAAASNRAARAAAAAARTAFSQVVASHRVATPQVSGEDTQPTTYAAEAQGPTPEPPLASPQTSQMLVTSKMAAPEAPATSAQSQTGSPAQEAATEGPSSACAFSQAPCAREVDANRPSTAFLGQNDVFDFTQPAGVSGMAFPRPKRPAPAQEAATEGPSAASGVPQTGPGREVAATRPKTTKSGKALAKTRWVEPQNVVAAAAAKAKMATSIPEPEGAAAATAQHSAEPWARMGGKRTKKSKHLDDEYESSEEERETPAVPPTWRASQPSLTVRAQLAPRPPMAPRSQIPSRHVLCLPPRNVTLLQERANKLVKYLMIKDYKKIPIKRADMLKDVIREYDEHFPEIIERATYTLEKKFGIHLKEIDKEEHLYILVCTRDSSARLLGKTKDTPRLSLLLVILGVIFMNGNRASEAVLWEALRKMGLRPGVRHPFLGDLRKLITDDFVKQKYLEYKKIPNSNPPEYEFLWGLRARHETSKMRVLRFIAQNQNRDPREWKAHFLEAVDDAFKTMDVDMAEEHARAQMRAQMNIGDEALIGRWSWDDIQVELLTWDEDGDFGDAWARIPFAFWARYHQYILNSNRANRRATWRAGVSSGTNGGASTSVLDGPSTSSTIRTRNAARAGASFFSWIHWHR

SEQ ID NO: 779488 - protein, 698 aa, Homo sapiens
MAEGSFSVQSESYSVEDMDEGSDEVGEEEMVEGNDYEEFGAFGGYGTLTSFDIHILRAFGSLGPGLRILSNEPWELENPVLAQTLVEALQLDPETLANETAARAANVARAAASNRAARAAAAAARTAFSQVVASHRVATPQVSGEDTQPTTYAAEAQGPTPEPPLASPQTSQMLVTSKMAAPEAPATSAQSQTGSPAQEAATEGPSSACAFSQAPCAREVDANRPSTAFLGQNDVFDFTQPAGVSGMAFPRPKRPAPAQEAATEGPSAASGVPQTGPGREVAATRPKTTKSGKALAKTRWVEPQNVVAAAAAKAKMATSIPEPEGAAAATAQHSAEPWARMGGKRTKKSKHLDDEYESSEEERETPAVPPTWRASQPSLTVRAQLAPRPPMAPRSQIPSRHVLCLPPRNVTLLQERANKLVKYLMIKDYKKIPIKRADMLKDVIREYDEHFPEIIERATYTLEKKFGIHLKEIDKEEHLYILVCTRDSSARLLGKTKDTPRLSLLLVILGVIFMNGNRASEAVLWEALRKMGLRPGVRHPFLGDLRKLITDDFVKQKYLEYKKIPNSNPPEYEFLWGLRARHETSKMRVLRFIAQNQNRDPREWKAHFLEAVDDAFKTMDVDMAEEHARAQMRAQMNIGDEALIGRWSWDDIQVELLTWDEDGDFGDAWARIPFAFWARYHQYILNSNRANRRATWHR

SEQ ID NO: 779489 - protein, 409 aa, Homo sapiens
MAEGSFSVQSESYSVEDMDEGSDEVGEEEMVEGNDYEEFGAFGGYGTLTSFDIHILRAFGSLGPGLRILSNEPWELENPVLAQTLVEALQLDPETLANETAARAANVARAAASNRAARAAAAAARTAFSQVVASHRVATPQVSGEDTQPTTYAAEAQGPTPEPPLASPQTSQMLVTSKMAAPEAPATSAQSQTGSPAQEAATEGPSSACAFSQAPCAREVDANRPSTAFLGQNDVFDFTQPAGVSGMAFPRPKRPAPAQEAATEGPSAASGVPQTGPGREVAATRPKTTKSGKALAKTRWVEPQNVVAAAAAKAKMATSIPEPEGAAAATAQHSAEPWARMGGKRTKKSKHLDDEYESSEEERETPAVPPTWRASQPSLTVRAQLAPRPPMARGPRYPQGTYCACPPAT

SEQ ID NO: 779490 - protein, 633 aa, Homo sapiens
MAEGSFSVQSESYSVEDMDEGSDEVGEEEMVEGNDYEEFGAFGGYGTLTSFDIHILRAFGSLGPGLRILSNEPWELENPVLAQTLVEALQLDPETLANETAARAANVARAAASNRAARAAAAAARTAFSQVVASHRVATPQVSGEDTQPTTYAAEAQGPTPEPPLASPQTSQMLVTSKMAAPEAPATSAQSQTGSPAQEAATEGPSSACAFSQAPCAREVDANRPSTAFLGQNDVFDFTQPAGVSGMAFPRPKRPAPAQEAATEGPSAASGVPQTGPGREVAATRPKTTKSGKALAKTRWVEPQNVVAAAAAKAKMATSIPEPEGAAAATAQHSAEPWARMGGKRTKKSKHLDDEYESSEEERETPAVPPTWRASQPSLTVRAQLAPRPPMAPRSQIPSRHVLCLPPRNVTLLQERANKLVKYLMIKDYKKIPIKRADMLKDVIREYDEHFPEIIERATYTLEKKFGIHLKEIDKEEHLYILVCTRDSSARLLGKTKDTPRLSLLLVILGVIFMNGNRASEAVLWEALRKMGLRPGVRHPFLGDLRKLITDDFVKQKYLEYKKIPNSNPPEYEFLWGLRARHETSKMRVLRFIAQNQNRDPREWKAHFLEANGCGYGRGTCQGPDEGPDEYRG

SEQ ID NO: 779491 - protein, 758 aa, Homo sapiens
MAEGSFSVQSESYSVEDMDEGSDEVGEEEMVEGNDYEEFGAFGGYGTLTSFDIHILRAFGSLGPGLRILSNEPWELENPVLAQTLVEALQLDPETLANETAARAANVARAAASNRAARAAAAAARTAFSQVVASHRVATPQVSGEDTQPTTYAAEAQGPTPEPPLASPQTSQMLVTSKMAAPEAPATSAQSQTGSPAQEAATEGPSSACAFSQAPCAREVDANRPSTAFLGQNDVFDFTQPAGVSGMAFPRPKRPAPAQEAATEGPSAASGVPQTGPGREVAATRPKTTKSGKALAKTRWVEPQNVVAAAAAKAKMATSIPEPEGAAAATAQHSAEPWARMGGKRTKKSKHLDDEYESSEEERETPAVPPTWRASQPSLTVRAQLAPRPPMAPRSQIPSRHVLCLPPRNVTLLQERANKLVKYLMIKDYKKIPIKRADMLKDVIREYDEHFPEIIERATYTLEKKFGIHLKEIDKEEHLYILVCTRDSSARLLGKTKDTPRLSLLLVILGVIFMNGNRASEAVLWEALRKMGLRPGVRHPFLGDLRKLITDDFVKQKNPELREETPLSMAPSWYLEYKKIPNSNPPEYEFLWGLRARHETSKMRVLRFIAQNQNRDPREWKAHFLEAVDDAFKTMDVDMAEEHARAQMRAQMNIGDEALIGRWSWDDIQVELLTWDEDGDFGDAWARIPFAFWARYHQYILNSNRANRRATWRAGVSSGTNGGASTSVLDGPSTSSTIRTRNAARAGASFFSWIHWHR

SEQ ID NO: 779492 - protein, 734 aa, Homo sapiens
MAEGSFSVQSESYSVEDMDEGSDEVGEEEMVEGNDYEEFGAFGGYGTLTSFDIHILRAFGSLGPGLRILSNEPWELENPVLAQTLVEALQLDPETLANETAARAANVARAAASNRAARAAAAAARTAFSQVVASHRVATPQVSGEDTQPTTYAAEAQGPTPEPPLASPQTSQMLVTSKMAAPEAPATSAQSQTGSPAQEAATEGPSSACAFSQAPCAREVDANRPSTAFLGQNDVFDFTQPAGVSGMAFPRPKRPAPAQEAATEGPSAASGVPQTGPGREVAATRPKTTKSGKALAKTRWVEPQNVVAAAAAKAKMATSIPEPEGAAAATAQHSAEPWARMGGKRTKKSPCPLPPPHPLAPVLSFSSLSCSSPPSPLPLLPLFSSFPSFSPHLPSPPLLSSQLSMFLQHKFAEHVFTPRSPYPQDWWEKRLAQCLALSKHAAHASRCWYCSHFQEPATGEVRAGCFGTGSLVALGLSSLNMIQSKHLDDEYESSEEERETPAVPPTWRASQPSLTVRAQLAPRPPMAPRSQIPSRHVLCLPPRNVTLLQERANKLVKYLMIKDYKKIPIKRADMLKDVIREYDEHFPEIIERATYTLEKVGAGWEQLCGGRAGMGVLVTLQPLKAQSLEPSLTSPTLSFHCTGSLTRASCPRLLSLMLSECLAVWPGGSHRLCQRQLPQRRSSVCCLLLPSLTSLDSLLRSSSNPESLSAGRMPSMGFGSHTLFSPPRRSLGST

SEQ ID NO: 779493 - protein, 570 aa, Homo sapiens
MLVTSKMAAPEAPATSAQSQTGSPAQEAATEGPSSACAFSQAPCAREVDANRPSTAFLGQNDVFDFTQPAGVSGMAFPRPKRPAPAQEAATEGPSAASGVPQTGPGREVAATRPKTTKSGKALAKTRWVEPQNVVAAAAAKAKMATSIPEPEGAAAATAQHSAEPWARMGGKRTKKSKHLDDEYESSEEERETPAVPPTWRASQPSLTVRAQLAPRPPMAPRSQIPSRHVLCLPPRNVTLLQERANKLVKYLMIKDYKKIPIKRADMLKDVIREYDEHFPEIIERATYTLEKKFGIHLKEIDKEEHLYILVCTRDSSARLLGKTKDTPRLSLLLVILGVIFMNGNRASEAVLWEALRKMGLRPGVRHPFLGDLRKLITDDFVKQKYLEYKKIPNSNPPEYEFLWGLRARHETSKMRVLRFIAQNQNRDPREWKAHFLEAVDDAFKTMDVDMAEEHARAQMRAQMNIGDEALIGRWSWDDIQVELLTWDEDGDFGDAWARIPFAFWARYHQYILNSNRANRRATWRAGVSSGTNGGASTSVLDGPSTSSTIRTRNAARAGASFFSWIHWHR

SEQ ID NO: 779494 - protein, 638 aa, Homo sapiens
MAEGSFSVQSESYSVEDMDEGSDEVGEEEMVEGNDYEEFGAFGGYGTLTSFDIHILRAFGSLGPGLRILSNEPWELENPVLAQTLVEALQLDPETLANETAARAANVARAAASNRAARAAAAAARTAFSQVVASHRVATPQVSGEDTQPTTYAAEAQGPTPEPPLASPQTSQMLVTSKMAAPEAPATSAQSQTGSPAQEAATEGPSSACAFSQAPCAREVDANRPSTAFLGQNDVFDFTQPAGVSGMAFPRPKRPAPAQEAATEGPSAASGVPQTGPGREVAATRPKTTKSGKALAKTRWVEPQNVVAAAAAKAKMATSIPEPEGAAAATAQHSAEPWARMGGKRTKKSKHLDDEYESSEEERETPAVPPTWRASQPSLTVRAQLAPRPPMAPRSQIPSRHVLCLPPRNVTLLQERANKLVKYLMIKDYKKIPIKRADMLKDVIREYDEHFPEIIERATYTLEKKFGIHLKEIDKEEHLYILVCTRDSSARLLGKTKDTPRLSLLLVILGVIFMNGNRASEAVLWEALRKMGLRPGVRHPFLGDLRKLITDDFVKQKYLEYKKIPNSNPPEYEFLWGLRARHETSKMRVLRFIAQNQNRDPREWKAHFLEAVDDAFKTMDVDMAEEHARAQIPSVHSE

SEQ ID NO: 779495 - protein, 557 aa, Homo sapiens
MAEGSFSVQSESYSVEDMDEGSDEVGEEEMVEGNDYEEFGAFGGYGTLTSFDIHILRAFGSLGPGLRILSNEPWELENPVLAQTLVEALQLDPETLANETAARAANVARAAASNRAARAAAAAARTAFSQVVASHRVATPQVSGEDTQPTTYAAEAQGPTPEPPLASPQTSQMLVTSKMAAPEAPATSAQSQTGSPAQEAATEGPSSACAFSQAPCAREVDANRPSTAFLGQNDVFDFTQPAGVSGMAFPRPKRPAPAQEAATEGPSAASGVPQTGPGREVAATRPKTTKSGKALAKTRWVEPQNVVAAAAAKAKMATSIPEPEGAAAATAQHSAEPWARMGGKRTKKSKHLDDEYESSEEERETPAVPPTWRASQPSLTVRAQLAPRPPMAPRSQIPSRHVLCLPPRNVTLLQERANKLVKYLMIKDYKKIPIKRADMLKDVIREYDEHFPEIIERATYTLEKKFGIHLKEIDKEEHLYILVCTRDSSARLLGKTKDTPRLSLLLVILGVIFMNGNRASEAVLWEALRKMGLRPGVRHPFLGDLRKLITDDFVKQK

SEQ ID NO: 779496 - protein, 114 aa, Homo sapiens
AHARSSCAERDEWYGCLSRALPEDYKAQALAAFHHSVEIRERLGVSLGERPPTLVPVTHVMMCMNCGCDFSLTLRRHHCHACGKIVCRNMLRRNNEPAEDTERTRVRGDALESA

SEQ ID NO: 779497 - protein, 207 aa, Homo sapiens
AAASTAAPSGTVSDSESSNSSSDAEELERCREAAMPAWGLEQRPHVAGKPRAGAANSQLSTSQPSLRHKVNEHEQDGNELQTTPEFRAHVAKKLGALLDSFITISEAAKEPAWPQSRSRSQVSSTGTRCRLGPKRRKRQRRPARPLHSHQQRVLQLYLQTEPSHGHRAQPAPRTRCPPHPGDKAFPSPTSLSKFKDWAGKPRLPMRP

SEQ ID NO: 779498 - protein, 249 aa, Homo sapiens
TTTKFAAGRRWCTGRMRKTRLWGLLWMLFVSELRAATKLTEEKYELKEGQTLDVKCDYTLEKFASSQKAWQIIRDGEMPKTLACTERPSKNSHPVQVGRIILEDYHDHGLLRVRMVNLQVEDSGLYQCVIYQPPKEPHMLFDRIRLVVTKGFSGTPGSNENSTQNVYKIPPTTTKALCPLYTSPRTVTQAPPKSTADVSTPDSEINLTNVTDIIRVPVFNIVILLAGGFLSKSLVFSVLFAVTLRSFVP

SEQ ID NO: 779499 - protein, 255 aa, Homo sapiens
LWCLVAVPGALSSSWSWCTGRMRKTRLWGLLWMLFVSELRAATKLTEEKYELKEGQTLDVKCDYTLEKFASSQKAWQIIRDGEMPKTLACTERPSKNSHPVQVGRIILEDYHDHGLLRVRMVNLQVEDSGLYQCVIYQPPKEPHMLFDRIRLVVTKGFSGTPGSNENSTQNVYKIPPTTTKALCPLYTSPRTVTQAPPKSTADVSTPDSEINLTNVTDIIRVPVFNIVILLAGGFLSKSLVFSVLFAVTLRSFVP

SEQ ID NO: 779500 - protein, 131 aa, Homo sapiens
HIFIHTSIHPFTHPSTHSSSICPSIHPMCLLAGFSGTPGSNENSTQNVYKIPPTTTKALCPLYTSPRTVTQAPPKSTADVSTPDSEINLTNVTDIIRVPVFNIVILLAGGFLSKSLVFSVLFAVTLRSFVP

SEQ ID NO: 779501 - protein, 131 aa, Homo sapiens; identical to SEQ ID NO: 779500

SEQ ID NO: 779502 - protein, 255 aa, Homo sapiens; identical to SEQ ID NO: 779499

SEQ ID NO: 779503 - protein, 271 aa, Homo sapiens
LWCLVAVPGALSSSWSWCTGRMRKTRLWGLLWMLFVSELRAATKLTEEKYELKEGQTLDVKCDYTLEKFASSQKAWQIIRDGEMPKTLACTERPSKNSHPVQVGRIILEDYHDHGLLRVRMVNLQVEDSGLYQCVIYQPPKEPHMLFDRIRLVVTKGFSGTPGSNENSTQNVYKIPPTTTKALCPLYTSPRTVTQAPPKSTADVSTPDSEINLTNVTDIIREKSMTFGIRRLDVESHPLPPLHTGHFRISQFFSQAGTQSLHSCYKGKPTP

SEQ ID NO: 779504 - protein, 138 aa, Homo sapiens
MVAVGENPGSSTHWGLLSHRPPPCRSHTPRPCCAAQQVRAPCPSHGPQCTILYAVISGQQPWDAGPAVHTCHMNLHGEAHSSPHLSTLSLQHRGTAASWFPQQFFSFSDSSLVTESVQGASVQEGTAENFQEGGKGPN

SEQ ID NO: 779505 - protein, 138 aa, Homo sapiens; identical to SEQ ID NO: 779504

SEQ ID NO: 779506 - protein, 168 aa, Homo sapiens
ILAPVRRATAPRRTLLRVNTGLEATDTQPQCSGFSPAGPAAAHSGHRHRLLQLRSAQPLRDARCALAPGDPRPAQARQRAGVVTELGAGFAFPACLFSAQDLLSVEPSGGGEGAAPPPPPPPPPLLLRSLARRAGQAEAGEWTRSCLPRRRFGLPLSRFPREPLQPST

SEQ ID NO: 779507 - protein, 59 aa, Homo sapiens
CFTQQKANKTKSWLRGRSAVQLHEYRCFLSLNPSSVAYLGHTESAIGYNFKTKARDSVH

SEQ ID NO: 779508 - protein, 175 aa, Homo sapiens
RARQMREAGVRFRARREEEDAFVRCVSVLGNLADQLYYPCEHVAWAADARVLHVDSSRWWTLSTTLWALSLLLGVARSLWMLLKLRQRLRSPTAPFTSPLPRGKRRAMEAQMQSEALSLLSNLADLANAVHWLPRGVLWAGRFPPWLVGLMGTISSILSMYQAARAGGQAEATTP

SEQ ID NO: 779509 - protein, 171 aa, Homo sapiens
MFVYTKQYGLGAQEEDAFVRCVSVLGNLADQLYYPCEHVAWAADARVLHVDSSRWWTLSTTLWALSLLLGVARSLWMLLKLRQRLRSPTAPFTSPLPRGKRRAMEAQMQSEALSLLSNLADLANAVHWLPRGVLWAGRFPPWLVGLMGTISSILSMYQAARAGGQAEATTP

SEQ ID NO: 779510 - protein, 165 aa, Homo sapiens
MFVYTKQYGLGAQEEDAFVRCVSVLGNLADQLYYPCEHVAWAADARVLHVDSSRWWTLSTTLWALSLLLGVARSLWMLLKLRQRLRSPTAPFTSPLPRGKRRAMEAQMQSEALSLLSNLADLANAVHWLPRGVLWAGRFPPWLVGLMGTISSLLPASWRLVSKSR

SEQ ID NO: 779511 - protein, 241 aa, Homo sapiens
MASLSGLASALESYRGRDRLIRVLGYCCQLVGGVLVEQCPARSEVGTRLLVVSTQLSHCRTILRLFDDLAMFVYTKQYGLGAQEEDAFVRCVSVLGNLADQLYYPCEHVAWAADARVLHVDSSRWWTLSTTLWALSLLLGVARSLWMLLKLRQRLRSPTAPFTSPLPRGKRRAMEAQMQSEALSLLSNLADLANAVHWLPRGVLWAGRFPPWLVGLMGTISSILSMYQAARAGGQAEATTP

SEQ ID NO: 779512 - protein, 206 aa, Homo sapiens
TASGFPQIRVLGYCCQLVGGVLVEQCPARSEVGTRLLVVSTQLSHCRTILRLFDDLAMFVYTKQYGLGAQEEDAFVRCVSVLGNLADQLYYPCEHVAWAADARVLHVDSSRWWTLSTTLWALSLLLGVARSLWMLLKLRQRLRSPTAPFTRSSACTRRPGPAARPRPLPPDTAGRAQGHSQSPRRALPAKQKPPGQGPGLSWSCLW

SEQ ID NO: 779513 - protein, 115 aa, Homo sapiens
MLSTTLWALSLLLGVARSLWMLLKLRQRLRSPTAPFTSPLPRGKRRAMEAQMQSEALSLLSNLADLANAVHWLPRGVLWAGRFPPWLVGLMGTISSILSMYQAARAGGQAEATTP

SEQ ID NO: 779514 - protein, 825 aa, Homo sapiens
MFSGFNVFRVGISFVIMCIFYMPTVNSLPELSPQKYFSTLQPGKASLAYFCQADSPRTSVFLEELNEAVRPLQDYGISVAKVNCVKEEISRYCGKEKDLMKAYLFKGNILLREFPTDTLFDVNAIVAHVLFALLFSEVKYITNLEDLQNIENALKGKANIIFSYVRAIGIPEHRAVMEAAFVYGTTYQFVLTTEIALLESIGSEDVEYAHLYFFHCKLVLDLTQQCRRTLMEQPLTTLNIHLFIKTMKAPLLTEVAEDPQQVSTVHLQLGLPLVFIVSQQATYEADRRTAEWVAWRLLGKAGVLLLLRDSLEVNIPQDANVVFKRAEEGVPVEFLVLHDVDLIISHVENNMHIEEIQEDEDNDMEGPDIDVQDDEVAETVFRDRKRKLPLELTVELTEETFNATVMASDSIVLFYAGWQAVSMAFLQSYIDVAVKLKGTSTMLLTRINCADWSDVCTKQNVTEFPIIKMYKKGENPVSYAGMLGTEDLLKFIQLNRISYPVNITSIQEAEEYLSGELYKDLILYSSVSVLGLFSPTMKTAKEDFSEAGNYLKGYVITGIYSEEDVLLLSTKYAASLPALLLARHTEGKIESIPLASTHAQDIVQIITDALLEMFPEITVENLPSYFRLQKPLLILFSDGTVNPQYKKAILTLVKQKYLDSFTPCWLNLKNTPVGRGILRAYFDPLPPLPLLVLVNLHSGGQVFAFPSDQAIIEENLVLWLKKLEAGLENHITILPAQEWKPPLPAYDFLSMIDAATSQRGTRKVPKCMKETDVQENDKEQHEDKSAVRKEPIETLRIKHWNRSNWFKEAEKSFRRDKELGCSKVN

SEQ ID NO: 779515 - protein, 807 aa, Homo sapiens
MFSGFNVFRVGISFVIMCIFYMPTVNSLPELSPQKYFSTLQPGLEELNEAVRPLQDYGISVAKVNCVKEEISRYCGKEKDLMKAYLFKGNILLREFPTDTLFDVNAIVAHVLFALLFSEVKYITNLEDLQNIENALKGKANIIFSYVRAIGIPEHRAVMEAAFVYGTTYQFVLTTEIALLESIGSEDVEYAHLYFFHCKLVLDLTQQCRRTLMEQPLTTLNIHLFIKTMKAPLLTEVAEDPQQVSTVHLQLGLPLVFIVSQQATYEADRRTAEWVAWRLLGKAGVLLLLRDSLEVNIPQDANVVFKRAEEGVPVEFLVLHDVDLIISHVENNMHIEEIQEDEDNDMEGPDIDVQDDEVAETVFRDRKRKLPLELTVELTEETFNATVMASDSIVLFYAGWQAVSMAFLQSYIDVAVKLKGTSTMLLTRINCADWSDVCTKQNVTEFPIIKMYKKGENPVSYAGMLGTEDLLKFIQLNRISYPVNITSIQEAEEYLSGELYKDLILYSSVSVLGLFSPTMKTAKEDFSEAGNYLKGYVITGIYSEEDVLLLSTKYAASLPALLLARHTEGKIESIPLASTHAQDIVQIITDALLEMFPEITVENLPSYFRLQKPLLILFSDGTVNPQYKKAILTLVKQKYLDSFTPCWLNLKNTPVGRGILRAYFDPLPPLPLLVLVNLHSGGQVFAFPSDQAIIEENLVLWLKKLEAGLENHITILPAQEWKPPLPAYDFLSMIDAATSQRGTRKVPKCMKETDVQENDKEQHEDKSAVRKEPIETLRIKHWNRSNWFKEAEKSFRRDKELGCSKVN

SEQ ID NO: 779516 - protein, 52 aa, Homo sapiens
MAMKDDNEGSDDDDRDIEYYEKVIEDFDKDQGDYEDVIEIISDESVEEEDLG

SEQ ID NO: 779517 - protein, 106 aa, Homo sapiens [sequence omitted]

SEQ ID NO: 779518 - protein, 137 aa, Homo sapiens
KGDINEMTIIVEDSPLNKLNALNGLLEGGNGLSCISSELTDASYGPNLLEGLSKMRQENFLCDLVIGTKTKSFDVHKSVMASCSEYFYNILKKDPSIQRVDLNDISPLGLATVIAYAYTGKLTLSLYTIGSIISAAV

SEQ ID NO: 779519 - protein, 102 aa, Homo sapiens
RPRFCSAEVWKEECRKRRKKRIESYVYNTKILTKCKSRNETTGCRSLSILFQCAKHLHVIQHWSSTTDCVNQIRVSGSCAKNIPAQIILADNTRKNKHFSVY

SEQ ID NO: 779520 - protein, 147 aa, Homo sapiens
MGRGGVQVAEQLGTQGLNLGPDTLVSRAWSTNLQYLAYCGPKEGGPCLGKGVPRRLVLQFGVLFWTILLLLWVSVFLYGSFYLFLYATVRHLSPVHFYYRTDCDSSTTSLCSFPVANVSLTKGGRDRGADVWDKRIVVPSELELAES

SEQ ID NO: 779521 - protein, 34 aa, Homo sapiens
RAPAAPLSALSAPRLPERPADGRVAVDAQPAARS

SEQ ID NO: 779522 - protein, 101 aa, Homo sapiens
LPVGFMSFPYNTPCLPGWKRGSRNLETWACSWHMEKRPGKAPLLSMKPPDGTRSCSETPSVPLERLPRAHRPSNRHLWPPGPNPFYIGFSACEYTPGLIPA

SEQ ID NO: 779523 - protein, 42 aa, Homo sapiens
QSLRLPQHRSSKSRQPTVGRDKGSQPDFMYGKTEARVSKKPP

SEQ ID NO: 779524 - protein, 55 aa, Homo sapiens
MKRNEEKRDSRQDCPEKWAEAHKPHKDKDRKSPGIRKKGPWRQGSSLQRQAKGPR

SEQ ID NO: 779525 - protein, 50 aa, Homo sapiens
MSHQGTWALSGFRVARLRMPSQHLPSRICTGRAITPHQPGPHNRMPEASS

SEQ ID NO: 779526 - protein, 106 aa, Homo sapiens [sequence omitted]

SEQ ID NO: 779527 - protein, 106 aa, Homo sapiens [sequence omitted]

SEQ ID NO: 779528 - protein, 92 aa, Homo sapiens
RGAERRAEATSAVLVIGGLSPGTVPGERAVLEPHRVAKQKRHGLAMLPRLIMNSWAQAILQTWPPKVLGFQQRRFKKIPEVVKTLMLNIMFQ

SEQ ID NO: 779529 - protein, 67 aa, Homo sapiens
EDEDAGAAGRAAPRGTGPPQPPQGEPKVAGNTRTRAQPWSATCPTAPSCPPAWLPGPLFSLHIVLSR

SEQ ID NO: 779530 - protein, 179 aa, Homo sapiens
  misc_feature (145)..(145): Xaa can be any naturally occurring amino acid
  misc_feature (157)..(157): Xaa can be any naturally occurring amino acid
NIALHCLTIAHPLRVCCRCSRQEIKAAAPGSFLFFFTLENRVLIRVHPGVGSCRWVLVLQTSMFNLPTFSQALRCVTLFPTLLGPTVKLRCGTHRASPIQRSATAIKAFWANLLGDKHDCKCVAAQLFAAPGPVGSPLLCNSSQXAEISPRLCTHQXPVAQKCVRRGAFLSTLWVEGAT

SEQ ID NO: 779531 - protein, 101 aa, Homo sapiens
ISALHNTKKMTGQIAPVSRVRNNAAMSPFLSLSVERQSPSCRRPGQPRAAHHLLVTLTFSGTEDCSALPHNGHRPRHERAGDELQISDLAIISGVDLLKLH

SEQ ID NO: 779532 - protein, 105 aa, Homo sapiens
HNLECPFSTSPGTNPFKIELKPDCLCSMVPDSSKLINPSLLCTHLSLSFCLFFRKVAVFYYHEFFLCVCVVGGFASFGEPQSPVAKDCVLVITLFPPCFSQAVPH

SEQ ID NO: 779533 - protein, 142 aa, Homo sapiens
MACFLSAIKTRFNLLTGLFLVLFFQLIFKRWVSLCYPGWSAVAIYRSNPTTDQRGSFDMLHFRPALVHPSLGNLVVPRSQEVTIFVLDLAGTPSGYSTLQPRTPGLKRSSHLSLQSSWAYRHVSLCLAIFLFFKGRYTHRMS

SEQ ID NO: 779534 - protein, 44 aa, Homo sapiens
DHRAMPVHSCLQGSRSLDTRWASIPFRQLSVSGALGLLLPTGAI

SEQ ID NO: 779535 - protein, 30 aa, Homo sapiens
PHSRLRALGAGGAVRSPARDGAKRRASFGR

SEQ ID NO: 779536 - protein, 76 aa, Homo sapiens
RTQVYCTVHINQCRMEKSGKGGLSGGRSRLHLIDLGSCVKALSKNREGGSGLCLSLSALGNVILALVNGSKHIPYK

SEQ ID NO: 779537 - protein, 65 aa, Homo sapiens
MEGLEANAEWDVGPPVRMAVLKQSTSSKGWRGCGEAESLYTVDGKVLHGFHILSPPPTSPPLACS

SEQ ID NO: 779538 - protein, 119 aa, Homo sapiens
VFLQNNFMLVWLNPSNFSNLGLAFKLFSHLEAHTVKECTFVTYTMCGASLEFPFLNMTFFSINGPKLIASFHSASLDILQHFSKPSFIDGIAFQGSGRYAGGISRISLCPGQGHITNLV

SEQ ID NO: 779539 - protein, 137 aa, Homo sapiens
MVKLLPAQEAAKIYHTNYVRNSRAVGVMWGTLTICFSVLVMALFIQPYWIGDSVNTPQAGYFGLFSYCVGNVLSSELICKGGPLDFSSIPSRAFKTAMFFVALGMFLIIGSIICFSLFFICNTATVYKICAWMQLAA

SEQ ID NO: 779540 - protein, 138 aa, Homo sapiens
LLSPSSAAEALELNLDEDSIIKPVHSSILGQEFCFEVTTSSGTKCFACRSAAERDKWIENLQRAVKPNKDNSRRVDNVLKLWIIEARELPPKKRYYCELCLDDMLYARTTSKPRSASGDTVFWGEHFEFNNLPAVRAL

SEQ ID NO: 779541 - protein, 473 aa, Homo sapiens
MKRASAGGSRLLAWVLWLQAWQVAAPCPGACVCYNEPKVTTSCPQQGLQAVPVGIPAASQRIFLHGNRISHVPAASFRACRNLTILWLHSNVLARIDAAAFTGLALLEQLDLSDNAQLRSVDPATFHGLGRLHTLHLDRCGLQELGPGLFRGLAALQYLYLQDNALQALPDDTFRDLGNLTHLFLHGNRISSVPERAFRGLHSLDRLLLHQNRVAHVHPHAFRDLGRLMTLYLFANNLSALPTEALAPLRALQYLRLNDNPWVCDCRARPLWAWLQKFRGSSSEVPCSLPQRLAGRDLKRLAANDLQGCAVATGPYHPIWTGRATDEEPLGLPKCCQPDAADKASVLEPGRPASAGNALKGRVPPGDSPPGNGSGPRHINDSPFGTLPGSAEPPLTAVRPEGSEPPGFPTSGPRRRPGCSRKNRTRSHCRLGQAGSGGGGTGDSEGSGALPSLTCSLTPLGLALVLWTVLGPC

SEQ ID NO: 779542 - protein, 555 aa, Homo sapiens
GAGCLGGCGTRLLLSPGHTCPPPPPSGIQAPVFEIDVPRGTPAPLQCFLGPVGGTPTGTPRGLLQCGLCVHWSPEEVPAVTSVHSRRPSRSRLLAWVLWLQAWQVAAPCPGACVCYNEPKVTTSCPQQGLQAVPVGIPAASQRIFLHGNRISHVPAASFRACRNLTILWLHSNVLARIDAAAFTGLALLEQLDLSDNAQLRSVDPATFHGLGRLHTLHLDRCGLQELGPGLFRGLAALQYLYLQDNALQALPDDTFRDLGNLTHLFLHGNRISSVPERAFRGLHSLDRLLLHQNRVAHVHPHAFRDLGRLMTLYLFANNLSALPTEALAPLRALQYLRLNDNPWVCDCRARPLWAWLQKFRGSSSEVPCSLPQRLAGRDLKRLAANDLQGCAVATGPYHPIWTGRATDEEPLGLPKCCQPDAADKASVLEPGRPASAGNALKGRVPPGDSPPGNGSGPRHINDSPFGTLPGSAEPPLTAVRPEGSEPPGFPTSGPRRRPGCSRKNRTRSHCRLGQAGSGGGGTGDSEGSGALPSLTCSLTPLGLALVLWTVLGPC

SEQ ID NO: 779543 - protein, 53 aa, Homo sapiens
MEFLGTNCVPGDLSKAGTGFWLSSNWRNCVIDFIPAVMGGHRKIQQVKCSHWL

SEQ ID NO: 779544 - protein, 101 aa, Homo sapiens
VADKPSLAQLTPDPLPSLPPCRRIETLRQTARSPSPPPRPHHPVNFSQPPPCPHPARCSPSLAPSPRHPCSRAAPEASTYPRGWGRGSAPPLPLQLEPGCD

SEQ ID NO: 779545 - protein, 116 aa, Homo sapiens
ERWGIGEGDRGISALPPEGRSVPDTQNCGISPGAHPRHTTTYCGSPWSQLVPLLQQEQGACPEPGCVFMMGLLRPPAFLNTEAAAFRTSLSNTLMHQRIAAPWELGPKCQLHPHRL

SEQ ID NO: 779546 - protein, 92 aa, Homo sapiens
THQATDNGARGANLSSPQTQSPTDNFSCPHMRLPTNNFSCPHTRFPTTTSAPQHDTHGGRSWGHFTTSSCTLQHGLLQAEGRPGEEPGTTAD

SEQ ID NO: 779547 - protein, 70 aa, Homo sapiens
MSPDTSTRSVTMLSTFAGLTKSEERTIATQTGPHRATSQGTLTWDTSITTSQAGTHSAMTHGFSQLDLST

SEQ ID NO: 779548 - protein, 112 aa, Homo sapiens
QDPACIFKVEPVFADSLDIVVDMKMCCLYPPSRKDLLISCRECEEQKSTSISTSSATAIEKASPEVTLVLDLRAALSGDVRPCYFSLIYYTVRQNLPQSSLYYNLISSSAQS

SEQ ID NO: 779549 - protein, 116 aa, Homo sapiens
CVRGMKDIVRKGRAWSQHREDPCKREATLKRGLQMHLLIFSLGEMCNKHHACQALSLGVELTLTNFTLQVRDSHSIQLIVSEKGNQESQGPYSRILKQTKWLSAVAHTCNPSTLRG

SEQ ID NO: 779550 - protein, 117 aa, Homo sapiens
FLLTCSQTPFISLSPFSYSLSLLYYLSPQAHFLCLSLISVSFSFSSSPWLSTCVVFLVVGNFICSSDITILFTLRVDDARLRVFCLCGGTFICISDGFIIELQMSSGYPNRKLIFSW

SEQ ID NO: 779551 - protein, 128 aa, Homo sapiens
AAAYYYYYYYEDSRPLDQGLRSWILKESFISTRAPDPFHGAGHLGFTGPGLVSVPQPTWLTHSLVGRVSRPDCLLCKTRGLVDDLALSPRNGRGEDQSDQECMKCIPMVGKTGSCSCGGHNLVEEGCY

SEQ ID NO: 779552 - protein, 97 aa, Homo sapiens
FSGPQIMPVGEASTPKVARAFRLPVSASTGIPVMSHIGDPTMPYPGLSTVPSDETLLASTMPSTEAQAMPPPWLRCCPHKMPMIVGCPELSPSHCWF

SEQ ID NO: 779553 - protein, 133 aa, Homo sapiens
CQGPQAASTSPKATGLGKADVLLGWLPGTSDSRKGDLLFPTLLRNHLILPQMNHLPEPQILLQEYGGHLVMGTILFSSFLPTLNTLRLNCRFSVILPSQVKAMKETSLLHQPKHLPICWLHEPQVGGVCVKKQ

SEQ ID NO: 779554 - protein, 180 aa, Homo sapiens
QPPPPDLRSLGFGRRVRPPQERALLVVFTRSQRKNLFAEMREQLGSAEAAGPGAGAEGSWPPPSGAPDARPWLPSPGRRRRRTAFASRHGKRHGKKSRLRCSKKPLHVNFKELGWDDWIIAPLEYEAYHCEGVCDFPLRSHLEPTNHAIIQTLMNSMDPGSTPPSCCVPTKLTPISILYI

SEQ ID NO: 779555 - protein, 53 aa, Homo sapiens
TVTKTEEGADREKRQETEKERRWRKEKEFRHTFVCVRVSAHECLEKRQGDEER

SEQ ID NO: 779556 - protein, 38 aa, Homo sapiens
MVVMVVAVIVMVMVAERVVTVMSVVMVVVMVMVMVVVV

SEQ ID NO: 779557 - protein, 49 aa, Homo sapiens
MSRLSLIILLRMSGASVLCALGLHTGGATNSHCPGLLVDSPRHRCRNLP

SEQ ID NO: 779558 - protein, 66 aa, Homo sapiens
KCEFNGGRCTRVLTSPGNSTSRRKRGHTKQDDGAIKRYSHNSKKQRAFTPPMPTPSTTNAKNFRIS

SEQ ID NO: 779559 - protein, 196 aa, Homo sapiens
LQRDGVYRWFSELPSPQRVEFLCGLLDLCIPLELRFLGSCLEDLARKDYHSLRDSEIKANNPADLGSLTNLTDEVVRSKLLVSLALLGSEQREAAGVLYRTLTHIDSIIHNYGLQLNEGRTGDEFLLLFTMASNHPAFSFHQKQVLRQELTQIQSSLNGGGGHGGKGAPGPGGALPTCPACHKVTPRTEAPVSQCQ

SEQ ID NO: 779560 - protein, 140 aa, Homo sapiens
SRGGSQQQEWNQGGRQKAAKTGRTHTMAVWGVNLQNLDTSGRQALAHSGLQIQLCHFPVNLPGPRFPCNGDDAHCHLPSIAMRIKGVRVGQQFAPDPNPVSIQQAFATIRVHCRIPLQERLPTIHAHCSVPLHSDERTEQ

SEQ ID NO: 779561 - protein, 67 aa, Homo sapiens
GEPLGRISFELFANKFPKTAENFHALSTGEKGVGYKGSCFHRNIPGFMYQGGDFTRRNGTGGKSIYG

SEQ ID NO: 779562 - protein, 95 aa, Homo sapiens
FQTWDKTSIYYRFFKNVSEPQTRQTQRNPHQVISHSNLKLNILMLNLKTKGKENNPESSKTERTSYLQGTNNSSDSKFLIGIMEAKEGAKTFVRC

SEQ ID NO: 779563 - protein, 67 aa, Homo sapiens
QVDISETFCSSLPDKRGKPRPTITQHRDTKPHNHQRKEKAGVWGQREVSLPCSPGMEPEKGQLMRPG

SEQ ID NO: 779564 - protein, 120 aa, Homo sapiens
MSSPALLLGNWTQMLILTCRLTSSSVVECRAAQALQCTWYIPNHLLKPRMPVEQALSCYLRLTSTLPSDGSGKTGDTGRIQWIKFNKAVKVHYTGQDAVSDAFNPSTLGGQRGRIMRSGV

SEQ ID NO: 779565 - protein, 123 aa, Homo sapiens
RGGCPARFAERTFTCRSYEPTNDTKHLPGRPGVVEAPQPPQPPRNDASQGSKGYNDDQGRCSRYLQVVESGYRLEAGSCKMCEKCCAGSAHGIRRAGFGRLQMTCFLSDPGLLSDTCRIVNPK

SEQ ID NO: 779566 - protein, 35 aa, Homo sapiens
IAVIIPKSKPPFALPMFLGSPMPDAEIAFMDKEGA

SEQ ID NO: 779567 - protein, 94 aa, Homo sapiens
SGITDMSQLSLLVRAVVKLLQPLPHFWEAFWAVAKALKDADLGAKDPHPAGLAGSLAWPPDPLLLLLDPSKQDQVTLMQGTGHGCARPCRGWVA

SEQ ID NO: 779568 - protein, 122 aa, Homo sapiens
MTTEEAMPEKAKCPTLEITKQDFFQEAKTLIAQHYEKINENKVQGTSINVFRKKHQKPKSGKYIPLEIDKKVTRDVVQEHRAALRRICFPKELSKSEHLQEPPQRISFKEPHIFSRRERCRP

SEQ ID NO: 779569 - protein, 82 aa, Homo sapiens
LEDPVCRRKEMGRIEAGSHSRRMPFSRDSRVTVHTGARMGSLPARELHLCEVLPGWDLEALRPPQRALARIKAHGPEQRVLS

SEQ ID NO: 779570 - protein, 590 aa, Homo sapiens
MRPRRPLVFMSLVCALLNTCQAHRVHDDKPNIVLIMVDDLGIGDLGCYGNDTMRTPHIDRLAREGVRLTQHISAASLCSPSRSAFLTGRYPIRSGMVSSGNRRVIQNLAVPAGLPLNETTLAALLKKQGYSTGLIGKWHQGLNCDSRSDQCHHPYNYGFDYYYGMPFTLVDSCWPDPSRNTELAFESQLWLCVQLVAIAILTLTFGKLSGWVSVPWLLIFSMILFIFLLGYAWFSSHTSPLYWDCLLMRGHEITEQPMKAERAGSIMVKEAISFLERHSKETFLLFFSFLHVHTPLPTTDDFTGTSKHGLYGDNVEEMDSMVGKILDAIDDFGLRNNTLVYFTSDHGGHLEARRGHAQLGGWNGIYKGGKGMGGWEGGIRVPGIVRWPGKVPAGRLIKEPTSLMDILPTVASVSGGSLPQDRVIDGRDLMPLLQGNVRHSEHEFLFHYCGSYLHAVRWIPKDDSGSVWKAHYVTPVFQPPASGGCYVTSLCRCFGEQVTYHNPPLLFDLSRDPSESTPLTPATEPLHDFVIKKVANALKEHQETIVPVTYQLSELNQGRTWLKPCCGVFPFCLCDKEEEVSQPRGPNEKR

SEQ ID NO: 779571 - protein, 590 aa, Homo sapiens; identical to SEQ ID NO: 779570

SEQ ID NO: 779572 - protein, 630 aa, Homo sapiens
SLTQLPEPGAKLPAGPLEALPGFRFLLQWNRQQEGIPSCTMRPRRPLVFMSLVCALLNTCQAHRVHDDKPNIVLIMVDDLGIGDLGCYGNDTMRTPHIDRLAREGVRLTQHISAASLCSPSRSAFLTGRYPIRSGMVSSGNRRVIQNLAVPAGLPLNETTLAALLKKQGYSTGLIGKWHQGLNCDSRSDQCHHPYNYGFDYYYGMPFTLVDSCWPDPSRNTELAFESQLWLCVQLVAIAILTLTFGKLSGWVSVPWLLIFSMILFIFLLGYAWFSSHTSPLYWDCLLMRGHEITEQPMKAERAGSIMVKEAISFLERHSKETFLLFFSFLHVHTPLPTTDDFTGTSKHGLYGDNVEEMDSMVGKILDAIDDFGLRNNTLVYFTSDHGGHLEARRGHAQLGGWNGIYKGGKGMGGWEGGIRVPGIVRWPGKVPAGRLIKEPTSLMDILPTVASVSGGSLPQDRVIDGRDLMPLLQGNVRHSEHEFLFHYCGSYLHAVRWIPKDDSGSVWKAHYVTPVFQPPASGGCYVTSLCRCFGEQVTYHNPPLLFDLSRDPSESTPLTPATEPLHDFVIKKVANALKEHQETIVPVTYQLSELNQGRTWLKPCCGVFPFCLCDKEEEVSQPRGPNEKR

SEQ ID NO: 779573 - protein, 125 aa, Homo sapiens
RRWCAKHAEGTLWGKEGDNRHVWLWAGLSLQLPCVLCSPCTGGVGSPLLQLRKWGRERLHIFSEVPKPGQWLRWGLPQIWSWHDAPAPLICNPNLRKKIEMIKASVGMPCALRAEGPRNCCSLNT

SEQ ID NO: 779574 - protein, 102 aa, Homo sapiens
VFRLPASPDDDQVRPRELWRGMGYWLGRGCGLVQEEVTWRNSHECWRRMKKMKKSCFSEREDSLHDFPTVGVMSFQAEILLTIHMEIEGSGGADSHINLICP

SEQ ID NO: 779575 - protein, 53 aa, Homo sapiens
LLQRWLGNVENLLCNRNFWILQLPPGSKGEAPKVQELGVGGEALPGLCRVAIC

SEQ ID NO: 779576 - protein, 116 aa, Homo sapiens
HSLTLTLILRAFPSPCLPQSMSGSRCILTLFAHTCTTVFTLASPPVSSLQCTHPGSGSCASCLKLPPPSGPLEAPDWWLSCVSPISSLHNSASSPHPLTASLPPGFLFLYLPWRYH

SEQ ID NO: 779577 - protein, 104 aa, Homo sapiens
LAGGRWLDFGLPSPLRVTILLWLELGCFALQIPLSRRLLPSLKEAPLSLVLCCSSPSWQVQLPSLLLNATEFPGCPLPIGPSWGHIILACLRRALDFYRWECDS

SEQ ID NO: 779578 - protein, 91 aa, Homo sapiens
MDGAMGPRGLLLCMYLVSLLILQAMPALGSATGRSKSSEKRQAVDTAVDGVFIRSLKVNCKVTSRFAHYVVTSQVVNTANEAREVAFDLEI

SEQ ID NO: 779579 - protein, 139 aa, Homo sapiens
DLSLLQPLPPRSKRFSCLSLPSSWDHRHVPPCPANFMFLAETGFLHVGQAGLELPTSGDLPALVSQSAGITGVSHCTQPLPPFYPCLPSYDALNTKNTIPSYGLSIHSSAWNVLSLDRQIPSTLLYPSSSHERQPLYLL

SEQ ID NO: 779580 - protein, 82 aa, Homo sapiens
SIIYIYHPCILSIIYLIYQTIIYLSVYIISLSSLSIHPYIERERERRECLVSVTTGWRAVARSRLTAASASCVQAILLPQLP

SEQ ID NO: 779581 - protein, 747 aa, Homo sapiens
MLGKGVVGGGGGTKAPKPSFVSYVRPEEIHTNEKEVTEKEVTLHLLPGEQLLCEASTVLKYVQEDSCQHGVYGRLVCTDFKIAFLGDDESALDNDETQFKNKVIGENDITLHCVDQIYGVFDEKKKTLFGQLKKYPEKLIIHCKDLRVFQFCLRYTKEEEVKRIVSGIIHHTQAPKLLKRLFLFSYATAAQNNTVTDPKNHTVMFDTLKDWCWELERTKGNMKYKAVSVNEGYKVCERLPAYFVVPTPLPEENVQRFQGHGIPIWCWSCHNGSALLKMSALPKEQDDGILQIQKSFLDGIYKTIHRPPYEIVKTEDLSSNFLSLQEIQTAYSKFKQLFLIDNSTEFWDTDIKWFSLLESSSWLDIIRRCLKKAIEITECMEAQNMNVLLLEENASDLCCLISSLVQLMMDPHCRTRIGFQSLIQKEWVMGGHCFLDRCNHLRQNDKEEVPVFLLFLDCVWQLVHQHPPAFEFTETYLTVLSDSLYIPIFSTFFFNSPHQKDTNMGREGQDTQSKPLNLLTVWDWSVQFEPKAQTLLKNPLYVEKPKLDKGQRKGMRFKHQRQLSLPLTQSKSSPKRGFFREETDHLIKNLLGKRISKLINSSDELQDNFREFYDSWHSKSTDYHGLLLPHIEGPEIKVWAQRYLRWIPEAQILGGGQVATLSKLLEMMEEVQSLQEKIDERHHSQQAPQAEAPCLLRNSARLSSLFPFALLQRHSSKPVLPTSGWKALGDEDDLAKREDEFVDLGDV

SEQ ID NO: 779582 - protein, 747 aa, Homo sapiens; identical to SEQ ID NO: 779581

SEQ ID NO: 779583 - protein, 747 aa, Homo sapiens; identical to SEQ ID NO: 779581

SEQ ID NO: 779584 - protein, 767 aa, Homo sapiens
MLGKGVVGGGGGTKAPKPSFVSYVRPEEIHTNEKEVTEKEVTLHLLPGEQLLCEASTVLKYVQEDSCQHGVYGRLVCTDFKIAFLGDDESALDNDETQFKNKVIGENDITLHCVDQIYGVFDEKKKTLFGQLKKYPEKLIIHCKDLRVFQFCLRYTKEEEVKRIVSGIIHHTQAPKLLKRLFLFSYATAAQNNTVTDPKNHTVMFDTLKDWCWELERTKGNMKYKAVSVNEGYKVCERLPAYFVVPTPLPEENVQRFQGHGIPIWCWSCHNGSALLKMSALPKEQDDGILQIQKSFLDGIYKTIHRPPYEIVKTEDLSSNFLSLQEIQTAYSKFKQLFLIDNSTEFWDTDIKWFSLLESSSWLDIIRRCLKKAIEITECMEAQNMNVLLLEENASDLCCLISSLVQLMMDPHCRTRIGFQSLIQKEWVMGGHCFLDRCNHLRQNDKEEVPVFLLFLDCVWQLVHQHPPAFEFTETYLTVLSDSLYIPIFSTFFFNSPHQKDTNMGREGQDTQSKPLNLLTVWDWSVQFEPKAQTLLKNPLYVEKPKLDKGQRKGMRFKLCLQAQNFSPTESTKERAVMHQRQLSLPLTQSKSSPKRGFFREETDHLIKNLLGKRISKLINSSDELQDNFREFYDSWHSKSTDYHGLLLPHIEGPEIKVWAQRYLRWIPEAQILGGGQVATLSKLLEMMEEVQSLQEKIDERHHSQQAPQAEAPCLLRNSARLSSLFPFALLQRHSSKPVLPTSGWKALGDEDDLAKREDEFVDLGDV

SEQ ID NO: 779585 - protein, 208 aa, Homo sapiens
PTRRPRVRDKGQRKGMRFKHQRQLSLPLTQSKSSPKRGFFREETDHLIKNLLGKRISKLINSSDELQDNFREFYDSWHSKSTDYHGLLLPHIEGPEIKVWAQRYLRWIPEAQILGGGQVATLSKLLEMMEEVQSLQEKIDERHHSQQAPQAEAPCLLRNSARLSSLFPFALLQRHSSKPVLPTSGWKALGDEDDLAKREDEFVDLGDV

SEQ ID NO: 779586 - protein, 747 aa, Homo sapiens; identical to SEQ ID NO: 779581

SEQ ID NO: 779587 - protein, 637 aa, Homo sapiens
MLGKGVVGGGGGTKAPKPSFVSYVRPEEIHTNEKEVTEKEVTLHLLPGEQLLCEASTVLKYVQEDSCQHGVYGRLVCTDFKIAFLGDDESALDNDETQFKNKVIGENDITLHCVDQIYGVFDEKKKTLFGQLKKYPEKLIIHCKDLRVFQFCLRYTKEEEVKRIVSGIIHHTQAPKLLKRLFLFSYATAAQNNTVTDPKNHTVMFDTLKDWCWELERTKGNMKYKAVSVNEGYKVCERLPAYFVVPTPLPEENVQRFQGHGIPIWCWSCHNGSALLKMSALPKEQDDGILQIQKSFLDGIYKTIHRPPYEIVKTEDLSSNFLSLQEIQTAYSKFKQLFLIDNSTEFWDTDIKWFSLLESSSWLDIIRRCLKKAIEITECMEAQNMNVLLLEENASDLCCLISSLVQLMMDPHCRTRIGFQSLIQKEWVMGGHCFLDRCNHLRQNDKEEHQRQLSLPLTQSKSSPKRGFFREETDHLIKNLLGKRISKLINSSDELQDNFREFYDSWHSKSTDYHGLLLPHIEGPEIKVWAQRYLRWIPEAQILGGGQVATLSKLLEMMEEVQSLQEKIDERHHSQQAPQAEAPCLLRNSARLSSLFPFALLQRHSSKPVLPTSGWKALGDEDDLAKREDEFVDLGDV

SEQ ID NO: 779588 - protein, 747 aa, Homo sapiens; identical to SEQ ID NO: 779581

SEQ ID NO: 779589 - protein, 747 aa, Homo sapiens; identical to SEQ ID NO: 779581

SEQ ID NO: 779590 - protein, 84 aa, Homo sapiens
PGTPAGPQGPHAAPVPARASPSTPPCKLREWAPALASPERGSHSAVGALKGSSNAAKVGAQAGEVPRASEGSDDCQHAVTSQYD

SEQ ID NO: 779591 - protein, 101 aa, Homo sapiens
MHCQSSLCLHHHEATPPPCLCILSRTTFLCVCAFVCVHVCTHACVCTCVFSFPSSSKDTSHWIGAHLLPSSHLQRPYFQLRPHSQVLGAGTGRRGREFSSS

SEQ ID NO: 779592 - protein, 164 aa, Homo sapiens
LSNLTRDVPIFVCAMAFPTVPCPLHVFEPRYRLMIRRCMETGTKRFGMCLSAEHAGLSEYGCMLEIKDVRTFPDGSSVVDAIGISRFRVLSHRHRDGYNTADIEYLEDEKVEGPEYEELAALHDSVHQQSVSWFASLQDRMKEQILSHFGVMPDREPEPQVCPP

SEQ ID NO: 779593 - protein, 144 aa, Homo sapiens
PFLSFLQHFLASQPGVEMTGLLSPLPIGGWSPGPRETCDPRCRRENFSPEGKSALRDPAPLPSSATDPERSYRMILETAHFRNHVAGVVHWIHHSRLKLTTQDKWTSQQDPDHPTRLILRRDQTAAEDDRPVLVTPEANQPTHG

SEQ ID NO: 779594 - protein, 121 aa, Homo sapiens
EAGPGKVPQDADCRLGKREPVPQAKRQARQRTVDVHRWPGWQGKRTQREGRRCQLLATPRPGRIKNVGCRTQPPLQPTAAPGRASPTVLRALPECEGSGQQGDGMWLNPSRTAWQLHLSQT

SEQ ID NO: 779595 - protein, 92 aa, Homo sapiens
LQSKQNYQAERGALHNDKGVNSARRHNPCCVAPNNRASKIHEAKIVTIARRNDESTIRDGDFNILLPEMDRSSRQKIIKDVVEISNTINNWI

SEQ ID NO: 779596 - protein, 124 aa, Homo sapiens
KTESSLPTPHQASLPSTTCPAMTGEQLSKCCRLPRMLLTGPRGWGQKEAAGGGNKDLAGDLQRTVSVRQSGWEPAWNGLEHGWEQRNRRQLVQKLLSRSLAVKGTGEGVIIGTGCGIRGGHLFE

SEQ ID NO: 779597 - protein, 85 aa, Homo sapiens
HLDHPGLQWSGSLNVAVPAPGDSEEGVWTHFLHTQPCCAPQDQDTDAVTSAGSTPTAGGSARNQENSSRQPGLSGVWGGERLMFQ

SEQ ID NO: 779598 - protein, 128 aa, Homo sapiens
MASFSTAETLCHNNSHSPLIPTRRGNQIKAESSGGSRAGGDGADCSPFLLPVPLPTLAPGTCSEPQGEGDISSVTHWLLLLRERERRGGPCESYASCSPAKPAKAQPGFDGIVSAGTPSLLRLVQTLL

SEQ ID NO: 779599 - protein, 83 aa, Homo sapiens
RTTFPKLTDVNLQIEKAHTGWTQWLTPVIPAFWEPVAGGSPEVWNLRPAFLTSSLASRLCPVSYRQPPVCTVYKERPCGRSHL

SEQ ID NO: 779600 - protein, 206 aa, Homo sapiens
RRFAPAATAFCRCRRRFLPPPPRLFAAATFCPGRRRFLSPRLFAPATEDFCPRRHGSEGRSGRLGCQLYWRPGKGSAEGCSWSSSPGSGILCLGAGAPGSLPGPCGLHRVALPVEAVGEKKEGGGGGDAAATEGGTGAAASRALQQCGQLQKLIVIFIGSLCGLCTKCAVSNDLTQQEIQTLELGDDILIYEMQEDVMCGTSMKTD

SEQ ID NO: 779601 - protein, 67 aa, Homo sapiens
SGTPSSGAVSAASPAWAWAPGAVAGAVACAVSRHLSLPWEAPTASSKNNTWGGAGSTSQAWPGNLGL

SEQ ID NO: 779602 - protein, 135 aa, Homo sapiens
LQQRAAAAAEAEAEAAAEPGKRGRRREPGAAMARWPAPPPPPPPPPPLAAPPPPGASAKGPPARKLLFMCTLSLSVTYLCYSLLGGSGSLQFPLALQESPGAAAEPPPSPPPPSLLPTPVRLGAPSQPPAPPPLD

SEQ ID NO: 779603 - protein, 40 aa, Homo sapiens
SLVVRGFLGWTPPSLHLRHCKMLASVGQPAPLLSPPPSWA

SEQ ID NO: 779604 - protein, 101 aa, Homo sapiens
LCAAGAAREGCSRKARALIRPSLPKPRRKRGRALSHRCLRGGSGGSRPAGCGFGECPLLRFAPTVNTARAPKVAGSPFARRPAPTGMPANTPAAICIFSHP

SEQ ID NO: 779605 - protein, 72 aa, Homo sapiens
MRKTEAQGTFPRPRAENAAELKFKSSLSDPPNPTLSPRPAMAHIPGGPVTILHLGIFMPPVGLLSGALITEG

SEQ ID NO: 779606 - protein, 108 aa, Homo sapiens
PESRAEPRVFLKTLGVGHGGEVVPRGPRGARHGRRDSGRSVRRTVASASRMCRSCPGRPGSPRCGPGLAPDSLSGPCIGQHLSVQYLEHASSNGFCFPFPAPFATHGP

SEQ ID NO: 779607 - protein, 108 aa, Homo sapiens; identical to SEQ ID NO: 779606

SEQ ID NO: 779608 - protein, 83 aa, Homo sapiens
QMICSLCGSRSCLPPGLLLLHVGEVDLREVADDLQPLRVQLLLAAVPVAAVLLAQLAVVEELREEPVEEEDGKLACEEASCRN

SEQ ID NO: 779609 - protein, 83 aa, Homo sapiens; identical to SEQ ID NO: 779608

SEQ ID NO: 779610 - protein, 112 aa, Homo sapiens [sequence omitted]

SEQ ID NO: 779611 - protein, 40 aa, Homo sapiens
DSSGGAPGVIVVDWLSLSWVILGGRIEHGRRTTGVGSECV

SEQ ID NO: 779612 - protein, 69 aa, Homo sapiens
RPRKNPQALVLSGVKERQGDVESGRSFILSPGASRRGWAGPAGSCLLDLPVGLRVALVGQDVVPAKGAL

SEQ ID NO: 779613 - protein, 46 aa, Homo sapiens
MEEETKAERSSDNSHPYPRLTKLISGSSGVQMHVAGSSKCPNCCVM

SEQ ID NO: 779614 - protein, 199 aa, Homo sapiens
MGNLCCCIQGDSKNSSKKRVKREPYSTTKVTSGSTFNENTRRYAVHTNQCRRPHGSPVKKKMYPQEDDFHHTIFSNLERLDKLQPTLEASEESLVHKDRGDGERPVNVRVVQVAPLRRESIAPHGDTIHDITNEDAVHDTTDEDAVHGTADEDAVQGIADEDAVHGIADWDAIQGLADRDAVHGFADGDAVKGIADGDA

SEQ ID NO: 779615 - protein, 60 aa, Homo sapiens
MKHAGLGEGIPPDNSGNDGYANNGYSAREEENETLTENLRSKVTAIKSFSIEIGHEVKTQ

SEQ ID NO: 779616 - protein, 58 aa, Homo sapiens
MLVVFAPCRWGPKRYMFMATTARTRRMKSSPQTKSSGWTAGYVGGQEVHQEVDQVHQR

SEQ ID NO: 779617 - protein, 107 aa, Homo sapiens [sequence omitted]

SEQ ID NO: 779618 - protein, 113 aa, Homo sapiens
MWPLRLVSLVWSCGRAAPRNRLCSRPGTYSSCSYFLYLGNSRSGRSCCCGVATSEKSPRPSDCSLIACSLLWKPSPNTEKFNPIIKKGFRFSLHLYVLIKVCRSAGILIENSP

SEQ ID NO: 779619 - protein, 67 aa, Homo sapiens
EMRTPLRGASRRVESGGSAAAPLPPAAGDCNSGGCTGSSDDPARRWQCRSQTGSFQKWFLKESNVHE

SEQ ID NO: 779620 - protein, 67 aa, Homo sapiens; identical to SEQ ID NO: 779619

SEQ ID NO: 779621 - protein, 67 aa, Homo sapiens; identical to SEQ ID NO: 779619

SEQ ID NO: 779622 - protein, 103 aa, Homo sapiens
GLMLILDVRNMLKILTKAKNSRNFQNPPTRNSLQKSCTLRNKDGGRAQWLTPVIPALWEAETGRSRGQEIETILANTVKPWWQAPVVPATQEAEAGEWREPGR

SEQ ID NO: 779623 - protein, 126 aa, Homo sapiens
MLYCRPGPWLGVSVSPCSGQACGFGYHEGPSSPGGFRELPLKCMWGAGVQPCCPWPGSPGSTALVRSCPKGTGGPSTRTEAWHHVVSVFMARKHRGRLLGLEEAGGRGSKADPLAGGGHCGVPFLQ

SEQ ID NO: 779624 - protein, 169 aa, Homo sapiens
QKNHQVAKNNTTVNSKKKRKLQERKFNYSTLHSSAVNSIHEVERTAHERCRWERSMRHGGNLRSHTSSPMTGSMGAIHRATLHLPRQEAWGPSSEPHFISHDRKHGGHPLSHTSSPTTGSMGAILRATLHLPRQEAWGPSTEPHFISHNRKHGGHPPSHTLSPTTGSQC

SEQ ID NO: 779625 - protein, 223 aa, Homo sapiens
MILGNGGIALELVYEIEGCEVIWAIKDKAIGNTFFDAGAAEFLTSKLIAEKSEAKIAYKRTRYTTEGRKKEARSKSKSDNVGSALGPDWHEGLNLKGTKEFSHKIHLEAMCEVKKIYLQDEFRILKKKSFTFPRDHTSVTTNTEMWPVYVELTNEKIYGCDFIVSATGVTPNIEPFLHGNSFDLGEDGGLKVDDHMHTSLPDIYAAGDICTTSWQLSPVWQQM

SEQ ID NO: 779626 - protein, 1257 aa, Homo sapiens
MMCEVMPTINEDTPMSQRGSQSSGSDSDSHFEQLMVNMLDERDRLLDTLRETQESLSLAQQRLQDVIYDRDSLQRQLNSALPQDIESLTGGLAGSKGADPPEFAALTKELNACREQLLEKEEEISELKAERNNTRLLLEHLECLVSRHERSLRMTVVKRQAQSPSGVSSEVEVLKALKSLFEHHKALDEKVRERLRVSLERVSALEEELAAANQEIVALREQNVHIQRKMASSEGSTESEHLEGMEPGQKVHEKRLSNGSIDSTDETSQIVELQELLEKQNYEMAQMKERLAALSSRVGEVEQEAETARKDLIKTEEMNTKYQRDIREAMAQKEDMEERITTLEKRYLSAQRESTSIHDMNDKLENELANKEAILRQMEEKNRQLQERLELAEEKLQQTMRKAETLPEVEAELAQRIAALTKAEERHGNIEERMRHLEGQLEEKNQELQRARQREKMNEEHNKRLSDTVDRLLTESNERLQLHLKERMAALEEKNVLIQESETFRKNLEESLHDKERLAEEIEKLRSELDQLKMRTGSLIEPTIPRTHLDTSAELRYSVGSLVDSQSDYRTTKVIRRPRRGRMGVRRDEPKVKSLGDHEWNRTQQIGVLSSHPFESDTEMSDIDDDDRETIFSSMDLLSPSGHSDAQTLAMMLQEQLDAINKEIRLIQEEKESTELRAEEIENRVASVSLEGLNLARVHPGTSITASVTASSLASSSPPSGHSTPKLTPRSPAREMDRMGVMTLPSDLRKHRRKIAVVEEDGREDKATIKCETSPPPTPRALRMTHTLPSSYHNDARSSLSVSLEPESLGLGSANSSQDSLHKAPKKKGIKSSIGRLFGKKEKARLGQLRGFMETEAAAQESLGLGKLGTQAEKDRRLKKKHELLEEARRKGLPFAQWDGPTVVAWLELWLGMPAWYVAACRANVKSGAIMSALSDTEIQREIGISNPLHRLKLRLAIQEMVSLTSPSAPPTSRTPSGNVWVTHEEMENLAAPAKTKESEEGSWAQCPVFLQTLAYGDMNHEWIGNEWLPSLGLPQYRSYFMECLVDARMLDHLTKKDLRVHLKMVDSFHRTSLQYGIMCLKRLNYDRKELERRREASQHEIKDVLVWSNDRVIRWIQAIGLREYANNILESGVHGSLIALDENFDYSSLALLLQIPTQNTQARQILEREYNNLLALGTERRLDESDDKNFRRGSTWRRQFPPREVHGISMMPGSSETLPAGFRLTTTSGQSRKMTTDVASSRLQRLDNSTVRTYSC

SEQ ID NO: 779627 - protein, 516 aa, Homo sapiens
MMCEVMPTINEDTPMSQRGSQSSGSDSDSHFEQLMVNMLDERDRLLDTLRETQESLSLAQQRLQDVIYDRDSLQRQLNSALPQDIESLTGGLAGSKGADPPEFAALTKELNACREQLLEKEEEISELKAERNNTRLLLEHLECLVSRHERSLRMTVVKRQAQSPSGVSSEVEVLKALKSLFEHHKALDEKVRERLRVSLERVSALEEELAAANQEIVALREQNVHIQRKMASSEGSTESEHLEGMEPGQKVHEKRLSNGSIDSTDETSQIVELQELLEKQNYEMAQMKERLAALSSRVGEVEQEAETARKDLIKTEEMNTKYQRDIREAMAQKEDMEERITTLEKRYLSAQRESTSIHDMNDKLENELANKEAILRQMEEKNRQLQERLELAEEKLQQTMRKAETLPEVEAELAQRIAALTKAEERHGNIEERMRHLEGQLEEKNQELQRARQREKMNEEHNKRLSDTVDRLLTESNERLQLHLKERMAALEEKNVLIQESETFRKNLEESLHDKV

SEQ ID NO: 779628 - protein, 105 aa, Homo sapiens
MTTHITHIQYLMQYPAPSDCSVHRRPAPLPIASTFPLKVTGSGQVVGLQLGKLGGNRPRGENFPNLHSHPSPNAPASTRTSRRDCGLLGSRVSSTAPDSCKCVTS

SEQ ID NO: 779629 - protein, 191 aa, Homo sapiens
PSCEGKQTRHEQLPSPSLLTMWTLKSSLVLLLCLTCSYAFMFSSLRQKTSEPQGKVQYGEHFRIRQNLPEHTQGWLGSKWLWLLFVVVPFVILQCQRDSEKNKEQSPPGLRGGQLHSPLKKKRNASPNKDCAFNTLMELEVELMKFVSKVRNLKRAMATGSGSNLRLRKSEMPADPYHVTICEIWGEESSS

SEQ ID NO: 779630 - protein, 152 aa, Homo sapiens
MKLPFLVDGAFSLESSQGPTFPTDGAFSLSPHTRPTFLTDGAFSLSPHVGPAFLIDGAFSLSPHTRPAFLIDGAFSLSPHTRPAFLIDGTFSLSPHVVEGARGLSGVPFLRTIITFMRLHPQDPITSQRPHLLTPSLLGSGFGTSTLERHRR

SEQ ID NO: 779631 - protein, 70 aa, Homo sapiens
DTGTGLGALERGRVHICHHPTDATGCKRGPDEAAPALRATGVLGAQAVTSTVLAHLSSPGPTGHAQAQGG

SEQ ID NO: 779632 - protein, 108 aa, Homo sapiens
MGNELLSRAAVQNQNGLPCKDIPDLSDPAEADVIPSLLQMYTATSHPSLLPFSQPWPSIEDFSIYSLSAGCKPSPSSHFRSLSRRSSLLLHLPFSYSLLEILLKMQTL

SEQ ID NO: 779633 - protein, 127 aa, Homo sapiens
ALDRGCGGGEAGCPQTGRPTKKGMRNPLVHGPLCDGPRHRTQWPAESPPRDCPGSGRACYPRMGCLWPLGQSPIWPRLAWDGRTGTRQGVSDLTAHLGRRKEGWALPSLDGGDGQAGRCLMHPADPN

SEQ ID NO: 779634 - protein, 50 aa, Homo sapiens
MVWEETALSLKPCLSVVSDAQLHVFLMLSSLYPRPLASAAEVALFLPFVL

SEQ ID NO: 779635 - protein, 108 aa, Homo sapiens [sequence omitted]

SEQ ID NO: 779636 - protein, 109 aa, Homo sapiens
EGQDQGLWGPLGAWLVAWWPGGMLAGTDSPSGWGCIPCGHVWMAVCLHLRHSSLTPHPCHGSSRQNHSHLLSVCYGRHSTWPLYMHSLGTAMGCLSPGFVLFITVLSPT

SEQ ID NO: 779637 - protein, 89 aa, Homo sapiens
PASVPLPGLPGVLASPLGPEPCRSDVGAGAAGAEDAGEVSGSRATCGGLGRTPPGRAGRRQRGGAGLLAPHEWGRCLSATTSRLAAGLT

SEQ ID NO: 779638 - protein, 75 aa, Homo sapiens
RGRSGAVRAWLGRLETVALNGPPPVGGKAAGLESQQATCEEAGSPGGLDTAMWTSPLPQRCWLLIACTSLPKKRN

SEQ ID NO: 779639 - protein, 34 aa, Homo sapiens
MGGSAKHTWTLSLMGGKLCNLPGGRSQCLIVHST

SEQ ID NO: 779640 - protein, 66 aa, Homo sapiens
VPITLLDGRGDLLGFSGGELCLVESRSLQKVLQPAHPDQDLACWPSLFTFLISSCAVLKTHAGTGP

SEQ ID NO: 779641 - protein, 73 aa, Homo sapiens
KGGANSIAATMDVGVTEKLQGELNLGAGNSKNGVAIYYDGEDYEKGRYGGERYRIRFFKPKFEMSIQEELPTH

SEQ ID NO: 779642 - protein, 190 aa, Homo sapiens
APHFLLSQQHLPSAPPPLSTIQTAPAECPPLSTIPTAPAECPPLSTIQTAPAECPPLSITTAPAECPPLSTIPTAPAECPPLSAIQTAPAECPPLSTIPTVPAECPPLSAIQRAPAECPHSLLSRQHLPSAPHFLLSRQHLPSAPHFLLSRQHLPSVPHFLLSRQHLLGNSPSAVVCVPARALGLVWGSR

SEQ ID NO: 779643 - protein, 118 aa, Homo sapiens
MKQTVEDCCLSAPFVAGQGILLERVSETTLKFIWNQKRAHIAKSILSQKNKAGGITLPDFKLYYKAIVTKTAWYWYQNRDIDQWNRTEPSEIMPHIYNYLIFDKPEKNKKWGKDSLFN

SEQ ID NO: 779644 - protein, 142 aa, Homo sapiens
GRLGPGRVTGPGVSWVPVGRRGWAGFRGGREGPGAQDWDRGADLGPCRGSASGRPELGWPFRRTGSSPLAAPDAPGKKPQLFQSQLQTYSRPHVELKWEKTLKEAVKDAGGHVREEQKEDNGKRSSYPENIPGPLQAVGKIW

SEQ ID NO: 779645 - protein, 114 aa, Homo sapiens [sequence omitted]

SEQ ID NO: 779646 - protein, 43 aa, Homo sapiens
HHGVKSWSRGIHQGLPKATVCMPTCLIPPTCLALAPGGRQHYL

SEQ ID NO: 779647 - protein, 69 aa, Homo sapiens
RSVEQRTGIDCSDDGKKSEYNTNHISEINYMCSRNLTSQIKSTEYHSSKKVTLREHSTKNYGKKQTTSA

SEQ ID NO: 779648 - protein, 73 aa, Homo sapiens
TYSVPGDGESLLDRPDKVPAPVKLWILERDRDSDDKDMETKQSATSTVKENKQDAVTENLGDCLGFLGHLRSW

SEQ ID NO: 779649 - protein, 361 aa, Homo sapiens
RSGTASACALACQRRWTMEAARPFAREWRAQSLPLAVGGVLKLRLCELWLLLLGSSLNARFLPDEEDVDFINEYVNLHNELRGDVIPRGSNLRFMTWDVALSRTARAWGKKCLFTHNIYLQDVQMVHPKFYGIGENMWVGPENEFTASIAIRSWHAEKKMYNFENGSCSGDCSNYIQLVWDHSYKVGCAVTPCSKIGHIIHAAIFICNYAPGGTLTRRPYEPGIFCTRCGRRDKCTDFLCSNADRDQATYYRFWYPKWEMPRPVVCDPLCTFILLLRILCFILCVITVLIVQSQFPNILLEQQMIFTPEESEAGNEEEEKEEEKKEKEEMEMEIMEMEEEKEEREEEEEETQKEKMEEEEK

SEQ ID NO: 779650 - protein, 214 aa, Homo sapiens
RSGTASACALACQRRWTMEAARPFAREWRAQSLPLAVGGVLKLRLCELWLLLLGSSLNARFLPDEEDVDFINEYVNLHNELRGDVIPRGSNLRFMTWDVALSRTARAWGKNVCLRIIFIYKMYKWSILNFMVLVKICGSALKMNLLQVLLSEVGMQRRKCTILKMAVALETVLIIFSLFGTTLTKLVVLLLHVQKLDILYMQQFSYATMRQEEH

SEQ ID NO: 779651 - protein, 270 aa, Homo sapiens
RSGTASACALACQRRWTMEAARPFAREWRAQSLPLAVGGVLKLRLCELWLLLLGSSLNARFLPDEEDVDFINEYVNLHNELRGDVIPRGSNLRFMTWDVALSRTARAWGKKCLFTHNIYLQDVQMVHPKFYGIGENMWVGPENEFTASIAIRSWHAEKKMYNFENGSCSGDCSNYIQLVWDHSYKVGCAVTPCSKIGHIIHAAIFICNYAPGGTLTRRPYEPGIFCTRCGRRDKCTDFLCSKIKKINMKKMHNGLDKKNKRLNTSFLWSC

SEQ ID NO: 779652 - protein, 122 aa, Homo sapiens
FDIYFQGNLNQKEGNESQASFYIPVSRDKREFLLHSFNAVPSLSRLPVASLIPGPYFGPVWPHEFDYICMKVFTKNSTFLRLYYILHMLLTHIFTTFPREGKKLWAWERWQLRIEIVLYLVH

SEQ ID NO: 779653 - protein, 92 aa, Homo sapiens
ACQLKPQPRALATVLVGHPCPSCSMASICSAPYTTPEVGEPTTEPLTKKVLTMEKLRYWRRGLCSHAGSRAPVSQAAAATKGAQGLACWSQC

SEQ ID NO: 779654 - protein, 108 aa, Homo sapiens
KKQICKWAMDSNRHLAIEGIQLVKRHMERCSASLIIRKMKMKTATSGLDHSGMHESFQTSSCWEWLRRLGSFCLSWKSGVSTRTSVFWTCVRPGVFMAGCLVYLCLTE

SEQ ID NO: 779655 - protein, 70 aa, Homo sapiens
KRLEVGLEEQQVGLPGPSSVLSTASPGAKLPRVSLSRPSSPASRNTGDKPLLSIYHLSETEPGTGEVKTS

SEQ ID NO: 779656 - protein, 169 aa, Homo sapiens
GRSHFRLGNMAERPGPPGGAVSATAYPDTPAEFPPHLQAGAMRRRFWGVFNCLCAGAFGALAAASAKLAFGSEVVSMGLCVLGIIVMASTNSLMWTFFSRGLSFSMSSAIASVTVTFSNILSSAFLGYVLYGECQEVLWWGGVFLILCGLTLIHRKLPPTWKPLPHKQQ

SEQ ID NO: 779657 - protein, 135 aa, Homo sapiens
AAAPTSDWATWPRGRGLRAAPCPRPRTLTPPRNSLRTSRRVSMGLCVLGIIVMASTNSLMWTFFSRGLSFSMSSAIASVTVTFSNILSSAFLGYVLYGECQEVLWWGGVFLILCGLTLIHRKLPPTWKPLPHKQQ

SEQ ID NO: 779658 - protein, 169 aa, Homo sapiens; identical to SEQ ID NO: 779656

SEQ ID NO: 779659 - protein, 74 aa, Homo sapiens
GRSHFRLGNMAERPGPPGGAVSATAYPDTPAEFPPHLQAGAMRRRFWGVFNCLCAGAFGALAAASAKLAFGSEV

SEQ ID NO: 779660 - protein, 72 aa, Homo sapiens
VQLSVSMHRVLVLPALSLRDLGAATPKAASTLSTQISSTRNQGSWEKWPIAELKQGQYKRKLERLMCWKVRS

SEQ ID NO: 779661 - protein, 238 aa, Homo sapiens
NFTGKSHKSQSSMAHKGEIHDPPPEAVQTVTPVEVHIGTWFTTTPEGNRIGTKGLERIADLTPLLSFQATDPVNGTVMTTREDKVVIVERKDGTRIVDHADGTRITTFYQVYEDQIILPDDQETTEGPRTVTRQVKCMRVESSRYATVIANCEDSSCCATFGDGTTIIAKPQGTYQVLPPNTGSLYIDKDCSAVYCHESSSNIYYPFQKREQLRAGRYIMRHTSEVICEVLDPEGNTF

SEQ ID NO: 779662 - protein, 72 aa, Homo sapiens
ESLCFEASVLWLVPTSPDYFQTLPAAILHYHLLSVFSDLQNTEVFSLSGSSHLLFSLLKILLLQAGRGGSRL

SEQ ID NO: 779663 - protein, 129 aa, Homo sapiens
GAYYYRAGRVWPFLLILNNFKLIQNIAKIKIGQRTQFKHFSLHLRPFTSRHISVYFLRMRMFSCVPQDTCPLLALFRKCLPSPVLEHVLPRYSCVRMFLRGHDSQVSANGIGSEQQETGHVAWFVGWVE

SEQ ID NO: 779664 - protein, 120 aa, Homo sapiens
PGGANSQEVWDQEYESCPTGLRRKKRFEAAAWHKLTGHYPPWSISVRPFLTGFGAQLSLSHSLAQWLSFLQVLPGSLLPPPSAKGRRVCFSPLLTRSLLSRPYQVSDQSEAGTGGIVGPG

SEQ ID NO: 779665 - protein, 112 aa, Homo sapiens
MPSAPGTRPGPLSCSHRIPHGTDPERPLHTLGRASSAFCSVKAGHGAWRPHLQQPQSKGLQLPPQNPLGSAPTDLGWREGGGEAGREASPSPVSLGAGEAESSSLPQAETHH

SEQ ID NO: 779666 - protein, 109 aa, Homo sapiens
  misc_feature (2)..(2): Xaa can be any naturally occurring amino acid
RXPNPATHSPYPQVILPQFGGYWIEDPENVGTPTSLGSSICEEEEEDNLSPNTFGYKLECKGEARAYRRHFLGKDHLNFYCTGSSLGNLILSVKCEEAEGIEYLRVILR

SEQ ID NO: 779667 - protein, 138 aa, Homo sapiens
MDPGLKPRSHGTLSNPSPPHAPGSCFQLDSPSRVTLLQTQELLLSLPLPSDQIWRALKEFMCRLSLNLNTEHTHLWPHGAHIPNQCDKEPTISRPPCGAERRLTRGCEPGKSTHHRLGPKFPIKGDLESQEIQCQGSL

SEQ ID NO: 779668 - protein, 142 aa, Homo sapiens
CSRQTGLTNTTTATSLTTVDPHVPGSTTILVRFCSPFIPSLSQTTPSLLRLPNLLLAHLRYSTEKIRTIRKEFQLPPNPPPSPGLPFVTGDELVEFLSKTTAPLLTRSQGLKDIAQQFSPFSPHHFASHQDHPMSTDMLSFP

SEQ ID NO: 779669 - protein, 101 aa, Homo sapiens
AGVGRAAGPALWGWPHVWAAVRVCRCVWTSCVCGCVMCLCGLGPYHAPTSSTELGSCPHAFPASQASLGAVLHLPSRTGLLSPRLPSVPGQPGGRAPPPLP

SEQ ID NO: 779670 - protein, 209 aa, Homo sapiens
PKRLGPAMGQTAGDLGWRLSLLLLPLLLVQAGVWGFPRPPGRPQLSLQELRREFTVSLHLARKLLSEVRGQAHRFAESHLPGVNLYLLPLGEQLPDVSLTFQAWRRLSDPERLCFISTTLQPFHALLGGLGTQGRWTNMERMQLWAMRLDLRDLQRHLRFQVLAAGFNLPEEEEEEEEEEEEERKGLLPGALGSALQGPAQVSWPQLLS

SEQ ID NO: 779671 - protein, 41 aa, Homo sapiens
RVLVCVCVHVCVCVRAHAAPPGGHSAHCARHRAGLCFWLRK

SEQ ID NO: 779672 - protein, 74 aa, Homo sapiens
MHLEFTPTSPSPLTWAATASYLGSLLPQLPLSSFTGHRAASDLLLASHTLTTALQPAPSSSAWQRPHPSGLGFN

SEQ ID NO: 779673 - protein, 89 aa, Homo sapiens
ARIWSQLNDGPQLNDGPQLNDGPQLNDGPQLNHGPCSCCERWFLDLSPSCLLLLEGPPFVKLRFCENPANFCPNLLHTEAAFEDRCEGS

SEQ ID NO: 779674 - protein, 101 aa, Homo sapiens
SEDPPYVLTHRISNPSCLRTQKQVSVWPTSGNGWSSLPGPSPCLVLMSIEGTWEMRPTDSKLLSFPLLWASEIESLSIFWCGREDLSLRARARYSLPSQNL

SEQ ID NO: 779675 - protein, 218 aa, Homo sapiens
REATIRNRCMSDGQPEGQTELRKGLEEPHTCGRPTAPGTRPAEVDVLSPASDKGGLQSFLLDPAHAEARAELSNETDTSFAERSFYLNYEEKDSEDQVLPPPLEERKGRLDAPPGGEPRPTLNSLDLRVSAAASSRSKDEAHMTSPKEGAGTPKNHGGPGDLKGSPAGQTFAEGWEDAQWGVEGEFPHLTASAAREEGTPVSGDLLGKAEESPTEELK

SEQ ID NO: 779676 - protein, 37 aa, Homo sapiens
QSRPVLEAECTQGSYAPIAGVRGPGQHEPGEWPRASG

SEQ ID NO: 779677 - protein, 37 aa, Homo sapiens
SHRVLFIPLVKQEYNLLNKAVLLGVRPPGFDALNHSP

SEQ ID NO: 779678 - protein, 43 aa, Homo sapiens
EVYSDLCSSKFGSRKQRTPGTAHAYRLLGEHPRQRRRLQKSSL

SEQ ID NO: 779679 - protein, 110 aa, Homo sapiens
SISPSHKFTFQIILCLPTYARTSSQHRPNMGHTSPQHIHILPKPNSSARPGSRGIPGHVTVSSTNLWIYLLYFKSWISHKRCQPYSLHTFQIHRQEKPLGFLQRNFSRSE

SEQ ID NO: 779680 - protein, 84 aa, Homo sapiens
QGNIQSQPEFIRCQRRNSYRFLNRHLQPRPERAEHSLELLETQRETILLSLSAGASCRTSGPSSCRKRDYSHVYIIPVELQKLG

SEQ ID NO: 779681 - protein, 96 aa, Homo sapiens
SWGVGSRVERRHPPWERASTWPEMQMDASDGLLSAHHTVPSQGLPQPGGGAGSRIYSSCYVVEGNGDEGGPGLPTILPCTIKTFCTQKGCPNGPSA

SEQ ID NO: 779682 - protein, 123 aa, Homo sapiens
SDLCMPCTGTKCLQDPLRVLLPLGGGAGPVVFLCLGILLMFPTWSSAFPTAPGSQGQGPWTCLLLLTSLCFMGRDETQARVCQLTTFQPALFSCLPIFIIWQVLSFCQCLRADRRAFPCTNQE

SEQ ID NO: 779683 - protein, 84 aa, Homo sapiens
SRAYCIAAAEETQALEQATTAQRGTCQAATSTGGCERIEREGVAALCVVCVPAQNIHFLLATDAPRLLSRGEIKSSLSFNKVIP

SEQ ID NO: 779684 - protein, 332 aa, Homo sapiens
AWGTKTTTASERSGFAEGPRRLLPPYHSLINNFVKPEKLTKVETRLKEKIVAEMTDLNKHIKQAQTQRKQLLEESRELHREKLLVQAENRFFLEYLTNKTEEYTEQPEKVWNSYLQKSGELNEEDKNQPSRYAEQISVLKTALLQKENIQSSLKRKLQAMRDIAILKEKQEKEIQTLQEETKKVQAETASKTREVQAQLLQEKRLLEKQLSEPDRSYWEKRKRRELNMKAQALKLAAKRFIFEYSCGINRENQQFKKELLQLIEQAQKLTATQSHLENRKQQLQQEQWYLESLIRARQRLQGSHNQCLNRMFQRPHPVFPKAPNQGLIQSNF

SEQ ID NO: 779685 - protein, 105 aa, Homo sapiens
CVLICSYENPSQTWLEPTLMTSFHLSGLLKGPVSMHSHILEYWGLGLQHMNLDNSVHNRGAGPRAALWLAQPSVSMLLLGSWNWKGHEECSSPNPPTCTKGETKV

SEQ ID NO: 779686 - protein, 593 aa, Homo sapiens
MEQPEDMASLSEFDSLAGSIPATKVEITVSCRNLLDKDMFSKSDPLCVMYTQGMENKQWREFGRTEVIDNTLNPDFVRKFIVDYFFEEKQNLRFDLYDVDSKSPDLSKHDFLGQAFCTLGEIVGSPGSRLEKPLTIGAFSLNSRTGKPMPAVSNGGVPGKKCGTIILSAEELSNCRDVATMQFCANKLDKKDFFGKSDPFLVFYRSNEDGTFTICHKTEVMKNTLNPVWQTFSIPVRALCNGDYDRTIKVEVYDWDRDGSHDFIGEFTTSYRELARGQSQFNIYEVVNPKKKMKKKKYVNSGTVTLLSFAVESECTFLDYIKGGTQINFTVAIDFTASNGNPSQSTSLHYMSPYQLNAYALALTAVGEIIQHYDSDKMFPALGFGAKLPPDGRVSHEFPLNGNQENPSCCGIDGILEAYHRSLRTVQLYGPTNFAPVVTHVARNAAAVQDGSQYSVLLIITDGVISDMAQTKEAIVNAAKLPMSIIIVGVGQAEFDAMVELDGDDVRISSRGKLAERDIVQFVPFRDYVDRTGNHVLSMARLARDVLAEIPDQLVSYMKAQGIRPRPPPAAPTHSPSQSPARTPPASPLHTHI

SEQ ID NO: 779687 - protein, 243 aa, Homo sapiens
MSPYQLNAYALALTAVGEIIQHYDSDKMFPALGFGAKLPPDGRVSHEFPLNGNQENPSCCGIDGILEAYHRSLRTVQLYGPTNFAPVVTHVARNAAAVQDGSQYSVLLIITDGVISDMAQTKEAIVNAAKLPMSIIIVGVGQAEFDAMVELDGDDVRISSRGKLAERDIVQFVPFRDYVDRTGNHVLSMARLARDVLAEIPDQLVSYMKAQGIRPRPPPAAPTHSPSQSPARTPPASPLHTHI

SEQ ID NO: 779688 - protein, 328 aa, Homo sapiens
MEQPEDMASLSEFDSLAGSIPATKVEITVSCRNLLDKDMFSKSDPLCVMYTQGMENKQWREFGRTEVIDNTLNPDFVRKFIVDYFFEEKQNLRFDLYDVDSKSPDLSKHDFLGQAFCTLGEIVGSPGSRLEKPLTIGAFSLNSRTGKPMPAVSNGGLWMESLRTTGLEASGGVPGKKCGTIILSAEELSNCRDVATMQFCANKLDKKDFFGKSDPFLVFYRSNEDGTFTICHKTEVMKNTLNPVWQTFSIPVRALCNGDYDRTIKVEVYDWDRDGSHDFIGEFTTSYRELARGQSQFNIYEVVNPKKKMKKKKYVNSGTDPDQLHCGH

SEQ ID NO: 779689 - protein, 243 aa, Homo sapiens; identical to SEQ ID NO: 779687

SEQ ID NO: 779690 - protein, 243 aa, Homo sapiens; identical to SEQ ID NO: 779687

SEQ ID NO: 779691 - protein, 315 aa, Homo sapiens
MKKKKYVNSGTVTLLSFAVESECTFLDYIKGGVSVSSSVHKENWNRTQINFTVAIDFTASNGNPSQSTSLHYMSPYQLNAYALALTAVGEIIQHYDSDKMFPALGFGAKLPPDGRVSHEFPLNGNQENPSCCGIDGILEAYHRSLRTVQLYGPTNFAPVVTHVARNAAAVQDGSQYSVLLIITDGVISDMAQTKEAIVNAAKLPMSIIIVGVGQAEFDAMVELDGDDVRISSRGKLAERDIVQFVPFRDYVDRTGNHVLSMARLARDVLAEIPDQLVSYMKAQGIRPRPPPAAPTHSPSQSPARTPPASPLHTHI

SEQ ID NO: 779692 - protein, 524 aa, Homo sapiens
MEQPEDMASLSEFDSLAGSIPATKVEITVSCRNLLDKDMFSKSDPLCVMYTQGMENKQWREFGRTEVIDNTLNPDFVRKFIVDYFFEEKQNLRFDLYDVDSKSPDLSKHDFLGQAFCTLGEIVGSPGSRLEKPLTIGAFSLNSRTGKPMPAVSNGGLWMESLRTTGLEASGGVPGKKCGTIILSAEELSNCRDVATMQFCANKLDKKDFFGKSDPFLVFYRSNEDGTFTICHKTEVMKNTLNPVWQTFSIPVRALCNGDYDRTIKVEVYDWDRDGSHDFIGEFTTSYRELARGQSQFNIYEVVNPKKKMKKKKYVNSGTVTLLSFAVESECTFLDYIKGGTQINFTVAIDFTASNGNPSQSTSLHYMSPYQLNAYALALTAVGEIIQHYDSDKMFPALGFGAKLPPDGRVSHEFPLMLPLHVCSCLPTAGPGFLVPDKTQNGNQENPSCCGIDGILEAYHRSLRTVQLYGPTNFAPVVTHVARNAAAVQDGSQYSVLLIITDGVISDMAQTKEAIVNVSKECAV

SEQ ID NO: 779693 - protein, 238 aa, Homo sapiens
MKKKKYVNSGTVTLLSFAVESECTFLDYIKGGTQINFTVAIDFTASNGNPSQSTSLHYMSPYQLNAYALALTAVGEIIQHYDSDKMFPALGFGAKLPPDGRVSHEFPLNGNQENPSCCGIDGILEAYHRSLRTVQLYGPTNFAPVVTHVARNAAAVQDGSQYSVLLIITDGVISDMAQTKEAIVNAAKLPMSIIIVGVGQAEFDAMVELDGDDVRISSRGKLAERDIVQVKPRPCLPH

SEQ ID NO: 779694 - protein, 243 aa, Homo sapiens; identical to SEQ ID NO: 779687

SEQ ID NO: 779695 - protein, 301 aa, Homo sapiens
MKKKKYVNSGTVTLLSFAVESECTFLDYIKGGTQINFTVAIDFTASNGNPSQSTSLHYMSPYQLNAYALALTAVGEIIQHYDSDKMFPALGFGAKLPPDGRVSHEFPLNGNQENPSCCGIDGILEAYHRSLRTVQLYGPTNFAPVVTHVARNAAAVQDGSQYSVLLIITDGVISDMAQTKEAIVNAAKLPMSIIIVGVGQAEFDAMVELDGDDVRISSRGKLAERDIVQFVPFRDYVDRTGNHVLSMARLARDVLAEIPDQLVSYMKAQGIRPRPPPAAPTHSPSQSPARTPPASPLHTHI

SEQ ID NO: 779696 - protein, 426 aa, Homo sapiens
SAGHPRARALGSSLTCRAGSHTQSPQTLNKQSSSLPSTLPGPEIQGSTTLPPPRSSTPGKSTVQLHAELMPLLQWPRRRTIKVEVYDWDRDGSHDFIGEFTTSYRELARGQSQFNIYEVVNPKKKMKKKKYVNSGTVTLLSFAVESECTFLDYIKGGTQINFTVAIDFTASNGNPSQSTSLHYMSPYQLNAYALALTAVGEIIQHYDSDKMFPALGFGAKLPPDGRVSHEFPLNGNQENPSCCGIDGILEAYHRSLRTVQLYGPTNFAPVVTHVARNAAAVQDGSQYSVLLIITDGVISDMAQTKEAIVNAAKLPMSIIIVGVGQAEFDAMVELDGDDVRISSRGKLAERDIVQFVPFRDYVDRTGNHVLSMARLARDVLAEIPDQLVSYMKAQGIRPRPPPAAPTHSPSQSPARTPPASPLHTHI

SEQ ID NO: 779697 - protein, 328 aa, Homo sapiens; identical to SEQ ID NO: 779688

SEQ ID NO: 779698 - protein, 140 aa, Homo sapiens
MEQPEDMASLSEFDSLAGSIPATKVEITVSCRNLLDKDMFSKSDPLCVMYTQGMENKQWREFGRTEVIDNTLNPDFVRKFIVDYFFEEKQNLRFDLYDVDSKSPDLSKHDFLGQAFCTLGEIVGSPGSRLEKPLTEKLLL

SEQ ID NO: 779699 - protein, 200 aa, Homo sapiens
MKQELQNLRDEIKQLGREIRLQLKAIEHQEPRPGFSPSSLGGRAEPPVGPLPHTGPYAEGQTVLLGLAAAHFMMASSFRPQCLGEACTVLIGRDTRFCTKINTKHQNKKKKKNLWAVQGLKKTFKTNSFMGEGGPKRRTGKPGDKVVSQERPVDTQNSEWRFHSKKKTARGEQPRFVTTTEREDPGLTGDSTTGDKRIDK

SEQ ID NO: 779700 - protein, 39 aa, Homo sapiens
MGFTQELTEKSNSGYPRRRSCSGIKRVCMEFALRAYMEQ

SEQ ID NO: 779701 - protein, 117 aa, Homo sapiens
HGSPWVSHTGKTNSAGTAETLFPTVISIAAQKILWMEGPAATYPPDGSTEYIGLRLESSPIAHCPAPGLTNAQDRLEMDRKSTAPSFPQLATWVGISSSREFDLADTMLLLYHFFAT

SEQ ID NO: 779702 - protein, 77 aa, Homo sapiens
SIPQESWRQQPSVPSPRSATHRCHVSTQLTPAQSWIDSSAQGFGDYNHPAGVLLSTSSGFLCSFVRRDFSGSRALGP

SEQ ID NO: 779703 - protein, 51 aa, Homo sapiens
QAIGIEDARFRSDCSPLRGTITSIYQFSKTTTYVKFNSPNTLHLHPPADIG

SEQ ID NO: 779704 - protein, 107 aa, Homo sapiens
MDLKLYKVKTEFSTPLSPAPIHFSPVSSISNCGTAAHSSCCLSQISRDYLRFSFFSFPLLNKLSVHFINFYLPKHNPNIFTCLHVYYQHPALNHCYSFLHFQLCPLQ

SEQ ID NO: 779705 - protein, 105 aa, Homo sapiens [sequence omitted]

SEQ ID NO: 779706 - protein, 134 aa, Homo sapiens
VVLGAAPATRARVSAARTLQGQVATLRDATWRSGLGCVGQGPGPDTGAAGMPGALRGCGPRAVRGSELLAGRGARQRTERSPGRRLIIAEDQGLEELLDLEVQSRCLESILAVLAEKMLEHHRLVGQGPGKVLL

SEQ ID NO: 779707 - protein, 90 aa, Homo sapiens
VVLGAAPATRARVSAARTLQGQVATLRDATWRSGLGCVGQGPGPDTGAAGMPGALRGCGPRAVRGSELLAGRGARQSYPGSYLWYQCDPS

SEQ ID NO: 779708 - protein, 149 aa, Homo sapiens
SISEPPLKKIIYGITILMIVQQSNHAIWIHVFTSKELVAFAISKDVQPLSKRFYFFWSLFFKFAFDCFHVIFDVVLVGVFCEAGFLQVIVCDSINSDNCGFGTFALGTFSRGISANEQVISVTLCPTDHIPLHHQAQPICNLPNLINVE

SEQ ID NO: 779709 - protein, 130 aa, Homo sapiens
  misc_feature (6)..(6): Xaa can be any naturally occurring amino acid
  misc_feature (29)..(29): Xaa can be any naturally occurring amino acid
  misc_feature (33)..(33): Xaa can be any naturally occurring amino acid
PHRLSXKGLQPKFLAPPPEIAQKKVTNGXEENXRILRRLLRRYRESKKIDRHTYHSLYLKVKGNVFKDKRILMEHIHKLKADKARKKLLADQAEARRSKTKEAGKRPEERLQAKKEEIIKTLSKEEEAKK

SEQ ID NO: 779710 - protein, 92 aa, Homo sapiens
TSSSLPTTETATTPMTNLVTTTTEISSHSTPSFSSSTIYSTVSTSTTAISSLPPTSGTMVTSTTMTPSSLSTDIPFTTPTTITHHSVGSTVS

SEQ ID NO: 779711 - protein, 93 aa, Homo sapiens
TSSSLPTTETATTPMTNLVTTTTEISSHSTPSFSSSTIYSTVSTSTTAISSLPPTSGTMVTSTTMTPSSLKHSKHRLLNHTVIFSTTLSAGGS

SEQ ID NO: 779712 - protein, 485 aa, Homo sapiens
MRSRVAVRACHKVCRCLLSGFGGRVDAGQPELLTERSSPKGGHVKSHAELEGNGEHPEAPGSGEGSEALLEICQRRHFLSGSKQQLSRDSLLSGCHPGFGPLGVELRKNLAAEWWTSVVVFREQVFPVDALHHKPGPLLPGDSAFRLVSAETLREILQDKELSKEQLVAFLENVLKTSGKLRENLLHGALEHYVNCLDLVNKRLPYGLAQIGVCFHPVFDTKQIRNGVKSIGEKTEASLVWFTPPRTSNQWLDFWLRHRLQWWRKFAMSPSNFSSSDCQDEEGRKGNKLYYNFPWGKELIETLWNLGDHELLHMYPGNVSKLHGRDGRKNVVPCVLSVNGDLDRGMLAYLYDSFQLTENSFTRKKNLHRKVLKLHPCLAPIKVALDVGRGPTLELRQVCQGLFNELLENGISVWPGYLETMQSSLEQLYSKYDEMSILFTVLVTETTLENGLIHLRSRDTTMKEMMHISKLKDFLIKYISSAKNV

SEQ ID NO: 779713 - protein, 398 aa, Homo sapiens
MRSRVAVRACHKVCRCLLSGFGGRVDAGQPELLTERSSPKGGHVKSHAELEGNGEHPEAPGSGEGSEALLEICQRRHFLSGSKQQLSRDSLLSGCHPGFGPLGVELRKNLAAEWWTSVVVFREQVFPVDALHHKPGPLLPGDSAFRLVSAETLREILQDKELSKEQLVAFLENVLKTSGKLRENLLHGALEHYVNCLDLVNKRLPYGLAQIGVCFHPVFDTKQIRNGVKSIGEKTEASLVWFTPPRTSNQWLDFWLRHRLQWWRKFAMSPSNFSSSDCQDEEGRKGNKLYYNFPWGKELIETLWNLGDHELLHMYPGNVSKLHGRDGRKNVVPCVLSVNGDLDRGMLAYLYDSFQLTENSFTRKKNLHRKVLKLHPCLAPIKVALDVGRGPTLELRQV

SEQ ID NO: 779714 - protein, 328 aa, Homo sapiens
MRSRVAVRACHKVCRCLLSGFGGRVDAGQPELLTERSSPKGGHVKSHAELEGNGEHPEAPGSGEGSEALLEICQRRHFLSGSKQQLSRDSLLSGCHPGFGPLGVELRKNLAAEWWTSVVVFREQVFPVDALHHKPGPLLPGDSAFRLVSAETLREILQDKELSKEQLVAFLENVLKTSGKLRENLLHGALEHYVNCLDLVNKRLPYGLAQIGVCFHPVFDTKQIRNGVKSIGEKTEASLVWFTPPRTSNQWLDFWLRHRLQWWRKFAMSPSNFSSSDCQDEEGRKGNKLYYNFPWGKELIETLWNLGDHELLHMYPGNVSKLHLKVVI

SEQ ID NO: 779715 - protein, 485 aa, Homo sapiens; identical to SEQ ID NO: 779712

SEQ ID NO: 779716 - protein, 485 aa, Homo sapiens; identical to SEQ ID NO: 779712

SEQ ID NO: 779717 - protein, 330 aa, Homo sapiens
MRSRVAVRACHKVCRCLLSGFGGRVDAGQPELLTERSSPKGGHVKSHAELEGNGEHPEAPGSGEGSEALLEICQRRHFLSGSKQQLSRDSLLSGCHPGFGPLGVELRKNLAAEWWTSVVVFREQVFPVDALHHKPGPLLPGDSAFRLVSAETLREILQDKELSKEQLVAFLENVLKTSGKLRENLLHGALEHYVNCLDLVNKRLPYGLAQIGVCFHPVFDTKQIRNGVKSIGEKTEASLVWFTPPRTSNQWLDFWLRHRLQWWRKFAMSPSNFSSSDCQDEEGRKGNKLYYNFPWGKELIETLWNLGDHELLHMYPGNVSKLHMQRHSPT

SEQ ID NO: 779718 - protein, 58 aa, Homo sapiens
PLYVKHRAPHFENHHPRRFLIKFGDSPKQNGSLRGLATEGTWFVLGGQSRLIVFLLCC

SEQ ID NO: 779719 - protein, 102 aa, Homo sapiens
PHSAQASICVPAPNPRLHPGWCLEGLPASACLLQPGGSELHMFLQGALWNRTQPGKEMRLTRASAWMSLEDVTFSERRQTPKATQGRFDPISMQCPGRRRGH

SEQ ID NO: 779720 - protein, 70 aa, Homo sapiens
GAYSHDHNIDECLTFLEVLNTPLFFLIYLHLMTGQVRGSSVLCHPNTGIQKEGGTVKIPIAIEKRKKHAE

SEQ ID NO: 779721 - protein, 118 aa, Homo sapiens
MKLPRKHNNWLVFPHETLEVCSLLIVRSAQAAEPIAVTQVCTLAKEKMATLYTDSRYAFGVCHTVGIIWKCLEFLTSAGASIANGHIIVDLLQAIFLPTKITVAYCSAHTKESGIVSL

SEQ ID NO: 779722 - protein, 137 aa, Homo sapiens
SFPSPGKVYWSDSTLHRISRANLDGSQHEDIITTGLQTTDGLAVDAIGRKVYWTDTGTNRIEVGNLDGSMRKVLVWQNLDSPRAIVLYHEMGFMYWTDWGENAKLERSGMDGSDRVVLINNNLGWPNGLTVDKASSQ

SEQ ID NO: 779723 - protein, 48 aa, Homo sapiens
MAAWRSTGRSEATCETDATGPGHSQKQRQGTNTKCGFSGLHKSSKQST

SEQ ID NO: 779724 - protein, 71 aa, Homo sapiens
MWTYVIEGFLEAQIPMARQVLEPELLYLWLASQAIQCEKTSHSHQDHPLGAGWAVTPVSPGFSPPPTSSRA

SEQ ID NO: 779725 - protein, 169 aa, Homo sapiens
MRCTSHPATITGPAHTGRGPVRPTCLSHGVTSWRELRKLADGRWWPSMLGVLACCVHGPAVHVTQQAQGLDPGEVPFDRCGSGPLVTKLSLVWTGSSANVAVRVTPTVASHVSHLVDGFQLGALVRPLQLAPRILSPRIRTSWGLLGRDTLLHKPLQPRGLTLAVWSGR

SEQ ID NO: 779726 - protein, 116 aa, Homo sapiens
ICTCRGFSSPHLPQLFLPTHCTFQGNPSLGSARIVRCTPCVIIPGNFNRILSSFLSKFGGNLVWCDRKSPEFSVVDHINFMCQSLRLRLASLKEGNNGLLGFTPLFPPNFHMGIWL

SEQ ID NO: 779727 - protein, 73 aa, Homo sapiens
RPQVTPPCCLGSLALRQPCAEALEWDVPLGEGDMGARPCARRFPLAPTTGRKAGWGLRLRGSLHECGRDWPGP

SEQ ID NO: 779728 - protein, 57 aa, Homo sapiens
MYSLILVRPKPVAWSGLCELGSTLAKSNPFDSSEIGVGWRRSSYPFINPKACCYWLF

SEQ ID NO: 779729 - protein, 146 aa, Homo sapiens
VCTIHTHPKWCGLEPSRLASGLKAERPWGFFSFLGQDSPFVGTTSSINLTIAVSLVLTVSRHCDQHISQPQNHPLELFLVRDGTNHLCVARPAGAALGGGHAGAALVASWHCRLAWHSLGAQVFLGKAGPGVRSWASIRGGCQMLS

SEQ ID NO: 779730 - protein, 221 aa, Homo sapiens
WSAAAGLRAGVRVPRSPGPSRRMPARSGAQFADGWGKRSSDQLEQGSHTARPTQPRHLQSSHTARPMQPRHLAPGSAAGTATIRAHTAASISQAQRATLPDWGGVLRPAGSPPGPGISGTGPSRAIPNGTELRGRIVETEAYLGPEDEAATQGVAADPRNRGMFMKLGTLYVSIIYGMYFCMNISRQGDGARVLLEQLEPLEGPETIASASKTPRKDRSRV

SEQ ID NO: 779731 - protein, 47 aa, Homo sapiens
MLGLEGKVEFTSMQGGSTTLADGTALAKVQRQEALHVKGYIFRTLNI

SEQ ID NO: 779732 - protein, 102 aa, Homo sapiens
LMKQCNMCVKCKVFMLGQLARPPCCAIFRKAAQPGEQGLAAVLPHSLGLSAACPSGVRCTSLPGVHPDLGRSVHLLNLVIWKGIQPWIFMEVPFSGCCWLQM

SEQ ID NO: 779733 - protein, 85 aa, Homo sapiens
PSFAGWQGSGALPCLPAQAAERERFHLCCEREEPLCAPRHVQRAGGNTLSCGGQLSQGPCLTRARRLPRGPRMAPGRQTPIPVES

SEQ ID NO: 779734 - protein, 117 aa, Homo sapiens
MDLKQAGLSSVGPHCDCRGTLQCGCTVHVGCGISGAAGKSPGGSCIGWVSGWASSRNGGCGTGNCQGDSPASGGRKSSLDPEWMPRQPKTMSVPCTLWRLISSFPFLCKLHWIFKFS

SEQ ID NO: 779735 - protein, 76 aa, Homo sapiens
GPGTPHSLPRPQAPAGAEPQAGLQCTALPGGRGMDTHTQWPPTTHKSRECGSCRGPPHPAPLGTSGCARMFERVWT

SEQ ID NO: 779736 - protein, 164 aa, Homo sapiens
MASARGAKQSSPRVGTTPYTETSTVRVETSSHRVETSSRRVETSQRRSEGPSLSPSGKRLPRILEASSRHVESSSQRTETTSRHVRASSLRVETSLHCAESPTPRPSRPPARTKKRPDEMLLPKGHQGARALSQDRKASSCQPASQLPGGPIIFGFMETNHKSM

SEQ ID NO: 779737 - protein, 45 aa, Homo sapiens
NYRASSSKRRKTHLQTLPKDQGTDSNSNFPKHFSLHRLRFTTNSS

SEQ ID NO: 779738 - protein, 121 aa, Homo sapiens
AERSVNSSGARANIGLAAAACQPARGVLGPARCTPTGTMASSQGKNELKLADWMATLPESMHSIPLTNLAIPGSHDSFSFYIDEASPVGPEQPETVQNFVSVFGTVAKKLMRKWLATQTMN

SEQ ID NO: 779739 - protein, 145 aa, Homo sapiens
VKFIGAYLPQPPRVDQALPQERRAPVTPSSASRYHRRRSSGSRDERYRSDVHTEAVQAALAKHKERKMAVPMPSKRRSLVVQTSMDAYTPPDTSSGSEDEGSVQGDSQGTPTSSQGSINMEHWISQAIHGSTTFTTSSSSTQSGG

SEQ ID NO: 779740 - protein, 112 aa, Homo sapiens
MKSFLLVVNALALTLPFLAVEVQNQKQPACHENDERPFYQKTAPYVPMYYVPNSYPYYGTNLYQRRPAIAINNPCVPRTYYANPAVVRPHAQIPQRQYLPNSAPPLWYVAQT

SEQ ID NO: 779741 - protein, 125 aa, Homo sapiens
MSCLPPQGVFFPISELSKCTIGFYTETFRSQGQAGDRGLPLISTARGLPLLLILLSTDPLWVSGWGTVRTFSSQEAIFQTITGGEKPWTIPGFPRQRSQQLFAVRCAPGLLRLENGDDFYQAYCL

SEQ ID NO: 779742 - protein, 110 aa, Homo sapiens
RVNPGGNPGCGRRLRPAGAEGKNGALRKRGASPSRFAAAEPARPRGRGEKPETGQRPGEREDLAMLPRLDLTSWAQGILLPQPPTQQGLQLHTTTQLPSSCLTCPYYHSE

SEQ ID NO: 779743 - protein, 108 aa, Homo sapiens
RPSSRPRLSLHTSLQAEGAGSGLCQPRNGLPQCSSRLKGSSSVARVGAEAEEAPRASEAASTLSPLAASDSGVAGITVTRHHARLIFVLLIETRFRHVGQACLNLLTS

SEQ ID NO: 779744 - protein, 130 aa, Homo sapiens
SSSSSISSSSSPSSNFSNFISSFFSFSSNSLNSSSSFPSPAFLIPPLPSTFPPPPSPPPLSILPNPPPPTPPISPSPVPLSPIIPPPHAALPPVTPLPHTLLLVTPPPPLVPLPPITPPPHAPLPPITPP

SEQ ID NO: 779745 - protein, 115 aa, Homo sapiens
LNLLSLAVMSLSARDRSPSSRTLSSLAPGASTSTSMLGRDTSTTGVITSALGPFRSSLGPLTSTWGPLRATLGIFKQGICTLGRCPLRPAPLGRGPSGSFTSTWPAWTSRSAEGD

SEQ ID NO: 779746 - protein, 69 aa, Homo sapiens
SSHPLRGGIVGSRRICTSETLIHPWQDGEPFAVLSGYSPKWLPGRVDLCFFPRVRFYNTWASGLGTALH

SEQ ID NO: 779747 - protein, 116 aa, Homo sapiens
ECWWLSSFTGRDSDDSETVATLFPVVLPLSVGWVTAMSVAFCKSTSKFAVTFMVGQIHFTMILPITLVISTHIYLPKVETRTRLETGAGRLLLTGIKWAGGLLLSDGPWTFPVDCV

SEQ ID NO: 779748 - protein, 31 aa, Homo sapiens
MPHSWAHHRPPSSHPVTNTSHHHRMGWHPTS

SEQ ID NO: 779749 - protein, 122 aa, Homo sapiens [sequence omitted]

SEQ ID NO: 779750 - protein, 559 aa, Homo sapiens
QCPLSAANQASPFPSPSTIASTPLEVPFPQSSSGTALPLGTAPEAPTFLPNLIGPPISPAALALASPMIAPTLKGTPSSSAPLALVALAPHSVQKSSAFPPNLLTSPPSVAVAESGSVITLSAPIAPSEPKTNLNKVPSEVVPNPKGTPSPPCIVSTVPYHCVTPMASIQSGVASLPQTTPTTTLAIASPQVKDTTISSVLISPQNPGSLSLKGPVSPPAALSLSTQSLPVVTSSQKTAGPNTPPDFPISLGSHLAPLHQSSFGSVQLLGQTGPSALSDPTVKTISVDHSSTGASYPSQRSVIPPLPSRNEVVPATVAAFPVVAPSVDKGPSTISSITCSPSGSLNVATSFSLSPTTSLILKSSPNATYHYPLVAQMPVSSVGTTPLVVTNPCTIAAAPTTTFEVATCVSPPMSSGPISNIEPTSPAALVMAPVAPKEPSTQVATTLRIPVSPPLPDPEDLKNLPSSVLVKFPTQKDLQTVPASLEGAPFSPAQAGLTTKKDPTVLPLVQAAPKNSPSFQSTSSSPEIPLSPEATLAKKSLGEPLPIGKPASSMTSPLG

SEQ ID NO: 779751 - protein, 53 aa, Homo sapiens
MFSQEGLHFPFQKRETQNCIYLENARMDVYARMDVYARMDVYARMDVYARMDV

SEQ ID NO: 779752 - protein, 84 aa, Homo sapiens
DSIPRGSKERHLWAVLASGRQFGTSWVFVIILAEPLSCLPGNPSWGGEVKDPGPRLPGHASRMADLGSPRHRSELIWNEAGEFD

SEQ ID NO: 779753 - protein, 130 aa, Homo sapiens
SIIRLKGLMGKVLVSYATLDDMEKPPYFPPNLARATQGRDYIPASGFALFGANQSEATIAISILDDDEPERSESVFIELLNSTLVAKVQSRSIPNSPRLGPKVETIAQLIIIANDDAFGTLQLSAPIVRV

SEQ ID NO: 779754 - protein, 34 aa, Homo sapiens
KCRVLELRIFSESEASCLTGLLTLTHAFLQSLSS

SEQ ID NO: 779755 - protein, 79 aa, Homo sapiens
FLSSLPILFLDNLMYTLGLLGHQVVTHHYHHHTAAGTSSLTRPFSFNNDKHGVQSGPLNPVLQMGTLRHKEVKIMQVTK

SEQ ID NO: 779756 - protein, 40 aa, Homo sapiens
MAFKSTVESSTYSVFGKLLQVYPQNNPAPSSLSTATAWHL

SEQ ID NO: 779757 - protein, 104 aa, Homo sapiens
MIQEAGPWDAESPGALLSDFTAFRAVRNQGLLFPGHPTCGILLQFQLRHFLTERLLLEVMRSQKTCVHWPLCESLRTRERQVCSSVSQPSVSFLSVFLFLGTTL

SEQ ID NO: 779758 - protein, 57 aa, Homo sapiens
MIQCHVKHTPAPGKTLNLDRITGKHQMGPDYQDTLHDDWPGILKNSNAVKDINKTEK

SEQ ID NO: 779759 - protein, 116 aa, Homo sapiens
MSRPSCGALLQPQQAKSGTVNRRPPRESARRGDLSWGNWSLCLSFPNVGEVVPMATGRPPRGPAHQVGRNASPRLLRCTEPHILPSGRLSSPLSYKGWAGPLQDSAEGETQSGSGQ

SEQ ID NO: 779760 - protein, 83 aa, Homo sapiens
GSSCSDSSSTLLLLPHTATVAQDCSVEQPVCCTLLLWATLGYSVYGTALPCLRSHHFAIHYCSNKLAFFHCQLTLEFFLEQSQ

SEQ ID NO: 779761 - protein, 71 aa, Homo sapiens
ACTNRKLRPPLPEEAAMAPAVDSLSPLVWNECPLLAVPGTAAPVTLASQEGAPPSPTHPQLPPPARSAVPG

SEQ ID NO: 779762 - protein, 117 aa, Homo sapiens
LGSWAGRPLASHVLESGLVRSAARLAGCRGLRAALLRRGCVGVGPTCGNCPIRLPGLARLPAVASPPPAADRRGPVSAAAGCPSGPVAFPRRAAPRGLPTRSGLSERPGFVPSGGCG

SEQ ID NO: 779763 - protein, 39 aa, Homo sapiens
ANGITAGWPYNLLSKQGRSLSEEGIINSEAWTTNINVDH

SEQ ID NO: 779764 - protein, 101 aa, Homo sapiens
REGGEWNDLSRLTWRNWWPLSPRSPPCQVPLPHMTQGGCRAASRTLVRQEEGPATTWPCEETQSKPVTSASTQHRVLLKPLLSSQQGSQGKARGRLKRGAE

SEQ ID NO: 779765 - protein, 72 aa, Homo sapiens
MTGSNYMFKLKRNYQTVFQSNRNLHSHQQGIKVPVACEHLVISNFFLPNFSHFNRYVILFIVVLHFPNNSRC

SEQ ID NO: 779766 - protein, 176 aa, Homo sapiens
KLQAMRDIAILKEKQEKEIQTLQEETKKVQAETASKTREVQAQLLQEKRLLEKQLSEPDRRLLGKRKRRELNMKAQALKLAAKRFIFEYSCGINRENQQFKKELLQLIEQAQKLTATQSHLENRKQQLQQEQWYLESLIQARQRLQGSHNQCLNRQDVPKTTPSLPQGTKSRINPK

SEQ ID NO: 779767 - protein, 107 aa, Homo sapiens
MISSALDDCLQDRRPGENLEAIVICRPVNPKICLCDIIGHIAYTIFKRLLSGKYLIQLYNVCDYDVSACCLHRFCIVICSMNYETKVHFLVHEVSFVINVCHMFIPI

SEQ ID NO: 779768 - protein, 76 aa, Homo sapiens
LGLARLTVDRGGLEDTGSAGKYLGHSKNPGLGSPGLKSGLTWSKPAPIPRDPHTLGRSLRNAPVPYSELRLPQDEP

SEQ ID NO: 779769 - protein, 82 aa, Homo sapiens
QHSCHRVSQPMLWPQSQPGSPQGLGPTHLIPFSSPVVRSRGPGPAHAEVQRELVDEQKEHSGLKAGECGFIQQQLLLTAFSH

SEQ ID NO: 779770 - protein, 64 aa, Homo sapiens
MPYLLEAGMMGSLLQGHRKGEVHGSWMARPWLGLESLGERIAAGALEVLAGEGGPRHRRGRQAI

SEQ ID NO: 779771 - protein, 76 aa, Homo sapiens
ERLSYFCNPKLNDAWSLAVHATGLDFHSPDSLFPPPGRSGSWKLREAQGPDDPPGPGQDTASCWKGMPREGLTVDF

SEQ ID NO: 779772 - protein, 108 aa, Homo sapiens
MSQCWPLVSMSVERLLCFPSCRMGTTTSSHRVLRIQGQDTAKVPQSPFLTPAWRHPLSKGRSRDLPTNLSGCEVWPPAWCLCSGPRTEGSLGTWGGQVNLDPDSASGD

SEQ ID NO: 779773 - protein, 116 aa, Homo sapiens
RQSRGLGATTAMAMSPFTGTLKYKGTLHVPKTLTSEALAASPEYGAGGWYGPGAPREPDRSQKQAEGAIIVVVIDASQLYLVSWLAAVHQICEENGVLGAGQPASRHFAWTLLDSD

SEQ ID NO: 779774 - protein, 106 aa, Homo sapiens
SPTTALPECGGILVARQSFPSSPIAPCVSLTKSQAQLNFVYLSHRKSFLPSFPQIFFSTHPRVSAVLDAGAGAVDKTKILLSELTFGFELMVMGRERNNQGNFRHW

SEQ ID NO: 779775 - protein, 95 aa, Homo sapiens
EGRGRQDRELQEVGVGPGMLGQRCYPGRTAWPGYAGSRVHAAPLGCMTSPPAPLRFLGGLRTWAKATDGQGGQAPPTAAGPGPLPTVLFFGVIAY

SEQ ID NO: 779776 - protein, 60 aa, Homo sapiens
GDSRGFRLACQWEAKSVPASHPDLLPLQKRPCSSCLHLAGSTATEFAAVPAQKREFPAQG

SEQ ID NO: 779777 - protein, 104 aa, Homo sapiens
ASLPLQIPPAPQPTAGSRRGQTAAAREGPSPSREGRARVRSPHPTHSAVSNWGHLRVPATLLALWSPGLQVSPKGPSVQGMQPPECPHPTVELRSLSAPWVLAG

SEQ ID NO: 779778 - protein, 89 aa, Homo sapiens
KWQMEGNGFWKAPGGLGWVLETIFQLLFRRRVGQISSVATWALEGRDTGRCGHRRESTMCGGSPQLEPKGPRRDPGSDISQPCGLGQGP

SEQ ID NO: 779779 - protein, 109 aa, Homo sapiens [sequence omitted]

SEQ ID NO: 779780 - protein, 79 aa, Homo sapiens
QPRTQGEHDPAPGARSALTARPEQRVPHVPAHGNPAPSATSLTAGPGRWVPHVPAHVERLHHLVEEGFITEASAKGTAA

SEQ ID NO: 779781 - protein, 73 aa, Homo sapiens
RVFSLSGGPLTKAEVNIAMGRFSGEVGPRALRGWPPTPALHTILEGLPCAHFLLASTYFLLLLPPIPTEFTLS

SEQ ID NO: 779782 - protein, 76 aa, Homo sapiens
AGPKWGGGAGGALLEAFGCSQRMVVVCEPAAPRQTQIETVMRARNLEPGDRRQWGTTLLPLLCHPNTLASFSFLLA

SEQ ID NO: 779783 - protein, 105 aa, Homo sapiens
MRTLPLLPDHLPKSLHFLIPSSWGLQFQHKFWGDINTETIAFCPWFPQIHILFTCQTNSFYPNNPQSLNSFQHQLKSPESNISFKYHLNQLRLKLKAQFYLTQNS

SEQ ID NO: 779784 - protein, 59 aa, Homo sapiens
MHTDRHAHPEIWWCTSALAPGRCWTCWLNGGNWCISTYCVPSPSAQGPKKLLHEVSQPR

SEQ ID NO: 779785 - protein, 120 aa, Homo sapiens
LPQPPSSWDYRHVPPRPANFVFLVEMGFHHVGHAGLELLTSGDLPTSASQSTGITGVSHCARPKISTLYAYLAQQDLALTYLTQLICQIPTLFQSTTFFFTFPQSKHIPASGPLHRLLPL

SEQ ID NO: 779786 - protein, 35 aa, Homo sapiens
RVTDMSTEEPKCSELLGLENLNYIPVSIGQTSNTL

SEQ ID NO: 779787 - protein, 96 aa, Homo sapiens
PWVSVEGGTALCDKREARYVIREKLMGAKGWGWVSQGLGQHGDLSAPRLIWQERLETSGRQLQANCRLSQPLSAERIITCGWRGESLALSSPAWRD

SEQ ID NO: 779788 - protein, 111 aa, Homo sapiens
FTCVPPAPRRVSLPVFPPLRVGSLCLVPPALGRICPRDSRGLHLIMSEPSSELCPLRPRLLQGSRQVPGSACPSSRKQTRAASKPQQPAGQRWQTTPQCLGGRRSVSYILC

SEQ ID NO: 779789 - protein, 134 aa, Homo sapiens
MLKKMGEAVARVARKVNETVESGSDTLELHLEGNFLHRLPSEVSALQHLKAIDLSRNQFQDFPEQLTALPALETINLEENEIVDVPVEKLAAMPALRSINLRFNPLNAEVRVIAPPLIKFDMLMSPEGARAPLP

SEQ ID NO: 779790 - protein, 184 aa, Homo sapiens
MLKKMGEAVARVARKVNETVESGSDTLDLAECKLVSFPIGIYKVLRNVSGQIHLITLANNELKSLTSKFMTTFSQLRELHLEGNFLHRLPSEVSALQHLKAIDLSRNQFQDFPEQLTALPALETINLEENEIVDVPVEKLAAMPALRSINLRFNPLNAEVRVIAPPLIKFDMLMSPEGARAPLP

SEQ ID NO: 779791 - protein, 100 aa, Homo sapiens
QAGTALAMYGHLQHLKAIDLSRNQFQDFPEQLTALPALETINLEENEIVDVPVEKLAAMPALRSINLRFNPLNAEVRVIAPPLIKFDMLMSPEGARAPLP

SEQ ID NO: 779792 - protein, 128 aa, Homo sapiens
MLKKMGEAVARVARKVNETVESGSDTLDLAECKLVSFPIGIYKVLRNVSGQIHLITLANNELKSLTSKFMTTFSQLRDVPVEKLAAMPALRSINLRFNPLNAEVRVIAPPLIKFDMLMSPEGARAPLP

SEQ ID NO: 779793 - protein, 184 aa, Homo sapiens; identical to SEQ ID NO: 779790

SEQ ID NO: 779794 - protein, 101 aa, Homo sapiens
MMHLKYRRYMYVAKMATSCEQRHDSNLTGRGAGRKVTCTLTSSGEDTQAPYQVASLENPCPHDWRPAFPIHCLVSTPRPPCSPAADFGTPTLQAVLESPRG

SEQ ID NO: 779795 - protein, 794 aa, Homo sapiens
  misc_feature (6)..(6): Xaa can be any naturally occurring amino acid
  misc_feature (8)..(8): Xaa can be any naturally occurring amino acid
QVGYPXEXWISSTQRPRWLFRLDISFESQHILLRGDKTSRDMWATGSLPDFPAAAKFLGFRQRCIPRSLCLSECPLEPPSLTRLCATLKDCPGPLELQLSCEFLSDQSLETLLDCLPQLPQLSLLQLSQTGLSPKSPFLLANTLSLCPRVKKVDLRSLHHATLHFRSNEEEEGVCCGLSANLLGDSGLRCLLECLPQVPISGLLDLSHNSISQESALYLLETLPSCPRVREASVNLGSEQSFRIHFSREDQAGKTLRLSECSFRPEHVSRLATGLSKSLQLTELTLTQCCLGQKQLAILLSLVGRPAGLFSLRVQEPWADRARVLSLLEVCAQASGSVAEISISETQQQLCVQLEFPRQEENPEAVALRLAHCDLGAHHSLLVGQLMETCARLQQLSLSQVNLCEDDDASSLLLQSLLLSLSELKTFRLTSSCVSTEGLAHLASGLGHCHHLEELDLSNNQFDEEGTKALMRALEGKWMLKRLDLSHLLLNSSTLALLTHRLSQMTCLQSLRLNRNSIGDVGCCHLSEALRAATSLEELDLSHNQIGDAGVQHLATILPGLPELRKIDLSGNSISSAGGVQLAESLVLCRRLEELMLGCNALGDPTALGLAQELPQHLRVLHLPFSHLGPGGALSLAQALDGSPHLEEISLAENNLAGGVLRFCMELPLLRQIDLVSCKIDNQTAKLLTSSFTSCPALEVILLSWNLLGDEAAAELAQVLPQMGRLKRVDLEKNQITALGAWLLAEGLAQGSSIQVIRLWNNPIPCDMAQHLKSQEPRLDFAFFDNQPQAPWGT

SEQ ID NO: 779796 - protein, 823 aa, Homo sapiens
  misc_feature (6)..(6): Xaa can be any naturally occurring amino acid
  misc_feature (8)..(8): Xaa can be any naturally occurring amino acid
QVGYPXEXWISSTQRPRWLFRLDISFESQHILLRGDKTSRDMWATGSLPDFPAAAKFLGFRQRCIPRSLCLSECPLEPPSLTRLCATLKDCPGPLELQLSCEFLSDQSLETLLDCLPQLPQLSLLQLSQTGLSPKSPFLLANTLSLCPRVKKVDLRSLHHATLHFRSNEEEEGVCCGGFTGCSLSQEHVESLCWLLSKCKDLSQVDLSANLLGDSGLRCLLECLPQVPISGLLDLSHNSISQESALYLLETLPSCPRVREASVNLGSEQSFRIHFSREDQAGKTLRLSECSFRPEHVSRLATGLSKSLQLTELTLTQCCLGQKQLAILLSLVGRPAGLFSLRVQEPWADRARVLSLLEVCAQASGSVAEISISETQQQLCVQLEFPRQEENPEAVALRLAHCDLGAHHSLLVGQLMETCARLQQLSLSQVNLCEDDDASSLLLQSLLLSLSELKTFRLTSSCVSTEGLAHLASGLGHCHHLEELDLSNNQFDEEGTKALMRALEGKWMLKRLDLSHLLLNSSTLALLTHRLSQMTCLQSLRLNRNSIGDVGCCHLSEALRAATSLEELDLSHNQIGDAGVQHLATILPGLPELRKIDLSGNSISSAGGVQLAESLVLCRRLEELMLGCNALGDPTALGLAQELPQHLRVLHLPFSHLGPGGALSLAQALDGSPHLEEISLAENNLAGGVLRFCMELPLLRQIDLVSCKIDNQTAKLLTSSFTSCPALEVILLSWNLLGDEAAAELAQVLPQMGRLKRVDLEKNQITALGAWLLAEGLAQGSSIQVIRLWNNPIPCDMAQHLKSQEPRLDFAFFDNQPQAPWGT

SEQ ID NO: 779797 - protein, 1619 aa, Homo sapiens
HHLNCFQALFLFEFRQLNLITRFLTPSELLFDLYLSPESDHDTVFQYLEKNADQVLLIFDGLDEALQPMGPDGPGPVLTLFSHLCNGTLLPGCRVMATSRPGKLPACLPAEAAMVHMLGFDGPRVEEYVNHFFSAQPSREGALVELQTNGRLRSLCAVPALCQVACLCLHHLLPDHAPGQSVALLPNMTQLYMQMVLALSPPGHLPTSSLLDLGEVALRGLETGKVIFYAKDIAPPLIAFGATHSLLTSFCVCTGPGHQQTGYAFTHLSLQEFLAALHLMASPKVNKDTLTQYVTLHSRWVQRTKARLGLSDHLPTFLAGLASCTCRPFLSHLAQGNEDCVGAKQAAVVQVLKKLATRKLTGPKVVELCHCVDETQEPELASLTAQSLPYQLPFHNFPLTCTDLATLTNILEHREAPIHLDFDGCPLEPHCPEALVGCGQIENLSFKSRKCGDAFAEALSRSLPTMGRLQMLGLAGSKITARGISHLVKALPLCPQLKEVSFRDNQLSDQVVLNIVEVLPHLPRLRKLDLSSNSICVSTLLCLARVAVTCPTVRMLQAREADLIFLLSPPTETTAELQRAPDLQESDGQRKGAQSRSLTLRLQKCQLQVHDAEALIALLQEGPHLEEVDLSGNQLEDEGCRLMAEAASQLHIARKLDLSDNGLSVAGVHCVLRAVSACWTLAELHISLQHKTVIFMFAQEPEEQKGPQERAAFLDSLMLQMPSELPLSSRRMRLTHCGLQEKHLEQLCKALGGSCHLGHLHLDFSGNALGDEGAARLAQLLPGLGALQSLNLSENGLSLDAVLGLVRCFSTLQWLFRLDISFESQHILLRGDKTSRDMWATGSLPDFPAAAKFLGFRQRCIPRSLCLSECPLEPPSLTRLCATLKDCPGPLELQLSCEFLSDQSLETLLDCLPQLPQLSLLQLSQTGLSPKSPFLLANTLSLCPRVKKVDLRSLHHATLHFRSNEEEEGVCCGGFTGCSLSQEHVESLCWLLSKCKDLSQVDLSANLLGDSGLRCLLECLPQVPISGLLDLSHNSISQESALYLLETLPSCPRVREASVNLGSEQSFRIHFSREDQAGKTLRLSECSFRPEHVSRLATGLSKSLQLTELTLTQCCLGQKQLAILLSLVGRPAGLFSLRVQEPWADRARVLSLLEVCAQASGSVAEISISETQQQLCVQLEFPRQEENPEAVALRLAHCDLGAHHSLLVGQLMETCARLQQLSLSQVNLCEDDDASSLLLQSLLLSLSELKTFRLTSSCVSTEGLAHLASGLGHCHHLEELDLSNNQFDEEGTKALMRALEGKWMLKRLDLSHLLLNSSTLALLTHRLSQMTCLQSLRLNRNSIGDVGCCHLSEALRAATSLEELDLSHNQIGDAGVQHLATILPGLPELRKIDLSGNSISSAGGVQLAESLVLCRRLEELMLGCNALGDPTALGLAQELPQHLRVLHLPFSHLGPGGALSLAQALDGSPHLEEISLAENNLAGGVLRFCMELPLLRQIDLVSCKIDNQTAKLLTSSFTSCPALEVILLSWNLLGDEAAAELAQVLPQMGRLKRVDLEKNQITALGAWLLAEGLAQGSSIQVIRLWNNPIPCDMAQHLKSQEPRLDFAFFDNQPQAPWGT

SEQ ID NO: 779798 - protein, 158 aa, Homo sapiens
  misc_feature (6)..(6): Xaa can be any naturally occurring amino acid
  misc_feature (8)..(8): Xaa can be any naturally occurring amino acid
QVGYPXEXWISSTQRPRWLFRLDISFESQHILLRGDKTSSLSECPLEPPSLTRLCATLKDCPGPLELQLSCEFLSDQSLETLLDCLPQLPQLSLLQLSQTGLSPKSPFLLANTLSLCPRVKKVDLRSLHHATLHFRSNEEEEGVCCGGSQAAASARST

SEQ ID NO: 779799 - protein, 1173 aa, Homo sapiens
HHLNCFQALFLFEFRQLNLITRFLTPSELLFDLYLSPESDHDTVFQYLEKNADQVLLIFDGLDEALQPMGPDGPGPVLTLFSHLCNGTLLPGCRVMATSRPGKLPACLPAEAAMVHMLGFDGPRVEEYVNHFFSAQPSREGALVELQTNGRLRSLCAVPALCQVACLCLHHLLPDHAPGQSVALLPNMTQLYMQMVLALSPPGHLPTSSLLDLGEVALRGLETGKVIFYAKDIAPPLIAFGATHSLLTSFCVCTGPGHQQTGYAFTHLSLQEFLAALHLMASPKVNKDTLTQYVTLHSRWVQRTKARLGLSDHLPTFLAGLASCTCRPFLSHLAQGNEDCVGAKQAAVVQVLKKLATRKLTGPKVVELCHCVDETQEPELASLTAQSLPYQLPFHNFPLTCTDLATLTNILEHREAPIHLDFDGCPLEPHCPEALVGCGQIENLSFKSRKCGDAFAEALSRSLPTMGRLQMLGLAGSKITARGISHLVKALPLCPQLKEVSFRDNQLSDQVVLNIVEVLPHLPRLRKLDLSSNSICVSTLLCLARVAVTCPTVRMLQAREADLIFLLSPPTETTAELQRAPDLQESDGQRKGAQSRSLTLRLQKCQLQVHDAEALIALLQEGPHLEEVDLSGNQLEDEGCRLMAEAASQLHIARKLDLSDNGLSVAGVHCVLRAVSACWTLAELHISLQHKTVIFMFAQEPEEQKGPQERAAFLDSLMLQMPSELPLSSRRMRLTHCGLQEKHLEQLCKALGGSCHLGHLHLDFSGNALGDEGAARLAQLLPGLGALQSLNLSENGLSLDAVLGLVRCFSTLQWLFRLDISFESQHILLRGDKTSRDMWATGSLPDFPAAAKFLGFRQRCIPRSLCLSECPLEPPSLTRLCATLKDCPGPLELQLSCEFLSDQSLETLLDCLPQLPQLSLLQLSQTGLSPKSPFLLANTLSLCPRVKKVDLRSLHHATLHFRSNEEEEGVCCGGFTGCSLSQEHVESLCWLLSKCKDLSQVDLSANLLGDSGLRCLLECLPQVPISGLLDLSHNSISQESALYLLETLPSCPRVREASVNLGSEQSFRIHFSREDQAGKTLRLSECSFRPEHVSRLATGLSKSLQLTELTLTQCCLGQKQLAILLSLVGRPAGLFSLRDSTRHTEKLSFPTLEACALGFKKKRKKERKKVSED

SEQ ID NO: 779800 - protein, 1619 aa, Homo sapiens; identical to SEQ ID NO: 779797

SEQ ID NO: 779801 - protein, 135 aa, Homo sapiens
  misc_feature (1)..(1): Xaa can be any naturally occurring amino acid
XHSESIPTSYPTTGALLSPFTALSPPLDLLALLLLTLGPLPCRLSWNLLGDEAAAELAQVLPQMGRLKRVDLEKNQITALGAWLLAEGLAQGSSIQVIRLWNNPIPCDMAQHLKSQEPRLDFAFFDNQPQAPWGT

SEQ ID NO: 779802 - protein, 62 aa, Homo sapiens
MGRSSTKHPREAVIRGRVTHPYSQTDLGTGKQHSIPNQLMRDCSCLAPGPSRPWNSSDPICG

SEQ ID NO: 779803 - protein, 107 aa, Homo sapiens
TVSTLYLRNSNLEKSAFHGQRPNSHVPTGPFRSAGGTQRAGCVRGLCTCCFPGLRCCSPKSWRGYSTAGHPSQQATCEAAPCSHSPTQCSTGQTASHSSEYFYFCFF

SEQ ID NO: 779804 - protein, 38 aa, Homo sapiens
LSQSLNFLVLKIPPLLSGAGHSCHVVRMCALAVVTSSA

SEQ ID NO: 779805 - protein, 77 aa, Homo sapiens
QYGCGRYCYKWHLPDSRAAGVTLWGPGANLPLGSAWRESILQVGSEKTCIHKEGFCVENPIGLAGSSKRVYWQSSKS

SEQ ID NO: 779806 - protein, 117 aa, Homo sapiens
GVSKEPEGAWLQDPGIHVGQSPAPPQLEPKGPAGQDWRLPPALCPSEASSALILEAPRVAVRARIPARLSPGSSWQQAPSMPSPPRGPPGNACPASCWRLPRAPACPLKTGQTCMSP

SEQ ID NO: 779807 - protein, 115 aa, Homo sapiens
RLSQGKGPDIFHRLGPLSVFSAKNRWRLVGPVHLTRGEGGFGLTLRGDSPVLIAAVIPGSQAAAAGLKEGDYIVSVNGMPSPPRGPPGNACPASCWRLPRAPACPLKTGQTCMSP

SEQ ID NO: 779808 - protein, 111 aa, Homo sapiens
LASGNRWGLRPSRPNPGSCQLPLGQVQAAGLNASQGGSRCASLILGSQGAHSDLTKGSAPTAPMSQSHPACHGAMPSLWPSPRPWTPAPEMALPLLPLGMAVAPWLSSSPL

SEQ ID NO: 779809 - protein, 118 aa, Homo sapiens [sequence omitted]

SEQ ID NO: 779810 - protein, 208 aa, Homo sapiens
MMRLLNNCENCCLDAWDKIQDDGKVCPSFTAVRQGQHEPYPDFITRLQDAAEKAIPDSHGQRLVVELMAYEQANPDGQAAVCPAKGKIPPGGDILTSYIKACEGVGGTLHTATIMAQAMASIRMPGHSLANASYAARRDMQKEIALGVQVAVLYITTNNKKKLFSNKTPHLLLYAHEAKRVFTGHLNAIPDLILMAILYGLFKNQETG

SEQ ID NO: 779811 - protein, 76 aa, Homo sapiens
VLRIPDGVLHRQVVLHRQVVLQRGRLYFCLSSLERGEDIVFLRMWEGALKCLLRFLLRSEVTKGLNFILATPASVI

SEQ ID NO: 779812 - protein, 107 aa, Homo sapiens
RPCVRHTSENHLAPPSLSSFICRLRVSASSTQTALTQLSTLLTSVMICSGKAFVITSFHSSLPGHTDMTRRRKVEVFLEDRKMIFPISLPTDSKSSIPLVAESWTGI

SEQ ID NO: 779813 - protein, 142 aa, Homo sapiens [sequence omitted]

SEQ ID NO: 779814 - protein, 35 aa, Homo sapiens
VGSGNWEVVSVLTSVEVAILLFGEARPGVFGAMGQ

SEQ ID NO: 779815 - protein, 111 aa, Homo sapiens
SLAGIGFGTLGNKSAFSPLQTTSASYGGDSSLYGVNPRVGISPLRLAYSSAGRGLSGFMSPYLTPGLVPTLPFRPALDYAFSGMIRDSSYLSSKDSITCGRLYFRPNQDNP

SEQ ID NO: 779816 - protein, 110 aa, Homo sapiens
ALSTLILNRLKVGLQVVAVKAPGFGDNRKNQLKDMAIATGGAVFGEEGLTLNLEDVQPHDLGKVGEVIVTKDDAMLLKGKGDKAQLEKRIQEIIGQLDVTTSEYEKEKLN

SEQ ID NO: 779817 - protein, 70 aa, Homo sapiens
RRPLFTKHHSYYCLKRPGKLSDQTFAPMVQSRLEKAQSLQGGEAEVAGADPTAMPSPLVPDLPPSMNAAH

SEQ ID NO: 779818 - protein, 89 aa, Homo sapiens
EEGPRQKADQKAEVDGGRDIFRSGHSLPHILWMLSWETGTREPSCHVGTARPRVYAHGSIPSPKGTDMEMRALMTLMPVLGPVWKGERA

SEQ ID NO: 779819 - protein, 93 aa, Homo sapiens
GGLRGVCWSSVQLFSLFSSELLQFPSGHILPPGPGHLTQMQPSEHTYPRALGFREVPLTSSGPVPCTLSSTMQGEQEHTFAPSLCWPRGPRGA

SEQ ID NO: 779820 - protein, 75 aa, Homo sapiens
PSMPVGLSWKPHAPCHALVTSGRTGAVILSVWTWTWAPGILLPCPSDKWPDWSCNLISPDLDLGPRRPPPGRPWS

SEQ ID NO: 779821 - protein, 206 aa, Homo sapiens
MRSTILLFCLLGSTRSLPQLKPALGLPPTKLAPDQGTLPNQQQSNQVFPSLSLIPLTQMLTLGPDLHLLNPAAGMTPGTQTHPLTLGGLNVQQQLHPHVLPIFVTQLGAQGTILSSEELPQIFTSLIIHSLFPGGILPTSQAGANPDVQDGSLPAGGAGVNPATQGTPAGRLPTPSGTDDDFAVTTPAGIQRSTHAIEEATTESAN

SEQ ID NO: 779822 - protein, 113 aa, Homo sapiens
VGKQWGWTQGRWPKKSAKFLLHMLKNAESNGELKGLDVDSLVIEHIQVNKAPKICHWTYRAYGRINPYVSSLCHTEMILTEKEQIVPKPEEEVAQKKKISQKKLKKQKLMARE

SEQ ID NO: 779823 - protein, 73 aa, Homo sapiens
VLSATPPATNAMRAGPGPGGHQHLALQTPEKCLLNEGLNGQRLSHPWQVGHTPKPARRDRPCPRGQGAKVSAL

SEQ ID NO: 779824 - protein, 502 aa, Homo sapiens
MLAAMGSLAAALWAVVHPRTLLLGTVAFLLAADFLKRRRPKNYPPGPWRLPFLGNFFLVDFEQSHLEVQLFVKKYGNLFSLELGDISAVLITGLPLIKEALIHMDQNFGNRPVTPMREHIFKKNGLIMSSGQAWKEQRRFTLTALRNFGLGKKSLEERIQEEAQHLTEAIKEENGQPFDPHFKINNAVSNIICSITFGERFEYQDSWFQQLLKLLDEVTYLEASKTCQLYNVFPWIMKFLPGPHQTLFSNWKKLKLFVSHMIDKHRKDWNPAETRDFIDAYLKEMSKHTGNPTSSFHEENLICSTLDLFFAGTETTSTTLRWALLYMALYPEIQEKVQAEIDRVIGQGQQPSTAARESMPYTNAVIHEVQRMGNIIPLNVPREVTVDTTLAGYHLPKGTMILTNLTALHRDPTEWATPDTFNPDHFLENGQFKKREAFMPFSIGKRACLGEQLARTELFIFFTSLMQKFTFRPPNNEKLSLKFRMGITISPVSHRLCAVPQV

SEQ ID NO: 779825 - protein, 502 aa, Homo sapiens; identical to SEQ ID NO: 779824

SEQ ID NO: 779826 - protein, 564 aa, Homo sapiens
MLAAMGSLAAALWAVVHPRTLLLGTVAFLLAADFLKRRRPKNYPPGPWRLPFLGNFFLVDFEQSHLEVQLFVKKYGNLFSLELGDISAVLITGLPLIKEALIHMDQNFGNRPVTPMREHIFKKNGLIMSSGQAWKEQRRFTLTALRNFGLGKKSLEERIQEEAQHLTEAIKEENGQPFDPHFKINNAVSNIICSITFGERFEYQDSWFQQLLKLLDEVTYLEASKTCQLYNVFPWIMKFLPGPHQTLFSNWKKLKLFVSHMIDKHRKDWNPAETRDFIDAYLKEMSKHTGNPTSSFHEENLICSTLDLFFAGTETTSTTLRWALLYMALYPEIQEKVQAEIDRVIGQGQQPSTAARESMPYTNAVIHEVQRMGNIIPLNVPREVTVDTTLAGYHLPKGTMILTNLTALHRDPTEWATPDTFNPDHFLENGQFKKREAFMPFSIGKRACLGEQLARTELFIFFTSLMQKFTFRPPNNEKHGTCSETTGVCSDVLGQNESDFQERSEEFDSEKTRSKSQLYCLVRISLGKIIYMLNNLPFYLGDEKRIMFPSIKKVLVRIKRNGEL

SEQ ID NO: 779827 - protein, 266 aa, Homo sapiens
MKFLPGPHQTLFSNWKKLKLFVSHMIDKHRKDWNPAETRDFIDAYLKEMSKHTGNPTSSFHEENLICSTLDLFFAGTETTSTTLRWALLYMALYPEIQEKVQAEIDRVIGQGQQPSTAARESMPYTNAVIHEVQRMGNIIPLNVPREVTVDTTLAGYHLPKGTMILTNLTALHRDPTEWATPDTFNPDHFLENGQFKKREAFMPFSIGKRACLGEQLARTELFIFFTSLMQKFTFRPPNNEKLSLKFRMGITISPVSHRLCAVPQV

SEQ ID NO: 779828 - protein, 502 aa, Homo sapiens; identical to SEQ ID NO: 779824

SEQ ID NO: 779829 - protein, 355 aa, Homo sapiens
MLAAMGSLAAALWAVVHPRTLLLGTVAFLLAADFLKRRRPKNYPPGPWRLPFLGNFFLVDFEQSHLEVQLFVKKYGNLFSLELGDISAVLITGLPLIKEALIHMDQNFGNRPVTPMREHIFKKNGLIMSSGQAWKEQRRFTLTALRNFGLGKKSLEERIQEEAQHLTEAIKEENGQPFDPHFKINNAVSNIICSITFGERFEYQDSWFQQLLKLLDEVTYLEASKTCQLYNVFPWIMKFLPGPHQTLFSNWKKLKLFVSHMIDKHRKDWNPAETRDFIDAYLKEMSKHTGNPTSSFHEENLICSTLDLFFAGTETTSTTLRWALLYMALYPEIQGYHDPDQFDGAAQGPHRVGHP

SEQ ID NO: 779830 - protein, 489 aa, Homo sapiens
MLAAMGSLAAALWAVVHPRTLLLGTVAFLLAADFLKRRRPKNYPPGPWRLPFLGNFFLVDFEQSHLEVQLFVKKYGNLFSLELGDISAVLITGLPLIKEALIHMDQNFGNRPVTPMREHIFKKNGLIMSSGQAWKEQRRFTLTALRNFGLGKKSLEERIQEEAQHLTEAIKEENVSNIICSITFGERFEYQDSWFQQLLKLLDEVTYLEASKTCQLYNVFPWIMKFLPGPHQTLFSNWKKLKLFVSHMIDKHRKDWNPAETRDFIDAYLKEMSKHTGNPTSSFHEENLICSTLDLFFAGTETTSTTLRWALLYMALYPEIQEKVQAEIDRVIGQGQQPSTAARESMPYTNAVIHEVQRMGNIIPLNVPREVTVDTTLAGYHLPKGTMILTNLTALHRDPTEWATPDTFNPDHFLENGQFKKREAFMPFSIGKRACLGEQLARTELFIFFTSLMQKFTFRPPNNEKLSLKFRMGITISPVSHRLCAVPQV

SEQ ID NO: 779831 - protein, 434 aa, Homo sapiens
MMFVKKYGNLFSLELGDISAVLITGLPLIKEALIHMDQNFGNRPVTPMREHIFKKNGLIMSSGQAWKEQRRFTLTALRNFGLGKKSLEERIQEEAQHLTEAIKEENGQPFDPHFKINNAVSNIICSITFGERFEYQDSWFQQLLKLLDEVTYLEASKTCQLYNVFPWIMKFLPGPHQTLFSNWKKLKLFVSHMIDKHRKDWNPAETRDFIDAYLKEMSKHTGNPTSSFHEENLICSTLDLFFAGTETTSTTLRWALLYMALYPEIQEKVQAEIDRVIGQGQQPSTAARESMPYTNAVIHEVQRMGNIIPLNVPREVTVDTTLAGYHLPKGTMILTNLTALHRDPTEWATPDTFNPDHFLENGQFKKREAFMPFSIGKRACLGEQLARTELFIFFTSLMQKFTFRPPNNEKLSLKFRMGITISPVSHRLCAVPQV

SEQ ID NO: 779832 - protein, 103 aa, Homo sapiens
CCNSLSKNALLSAGTVRTSFTQEFLWPVFRKKGVDQNAFLASAVSQVPLAQNNLYVKKAYYGILWGATLHCQIIFHHMTIPHFMYPFVILWTFRLFPHIGYCE

SEQ ID NO: 779833 - protein, 134 aa, Homo sapiens
NLSLFIFYYYFTSEKSWKSSCNEGESSSTSYMHQRSPGGPTKLIEIISDCNWEEDRNKILSILSQHINSNMPQSLKVGSFIIELASQRKSRGEKNPPVYSSRVKISMPSCQDQDDMAEKSGSETPDGPLSPGKM

SEQ ID NO: 779834 - protein, 50 aa, Homo sapiens
MEYLSHNACVGSTGMITGLAVAKEQHKKDFVSVFNELICKHIWNQEQRTR

SEQ ID NO: 779835 - protein, 81 aa, Homo sapiens
DEQTEAQRWCYVLEATLQGWVHLTHELVPFNQHVIVGGGSMKTMAASHLIERKDGQREGRPPVLKLQSSALQYPERGTPRL

SEQ ID NO: 779836 - protein, 41 aa, Homo sapiens
PLKGSVGLQYNLNLPHMAITRKLGLELEGALEKYVFKIHWN

SEQ ID NO: 779837 - protein, 115 aa, Homo sapiens
REGATAESQRQRSGREGGLRGGSWAVHVEREWEEPMLRPHTLTFFQGTTESPKMKEPTDMVSLPKGRCELRKVNCKSGGANRKCSAQAPLAPLSPYFFQVKTLCPHHRKGSSPLS

SEQ ID NO: 779838 - protein, 73 aa, Homo sapiens
GSRTLLLVRYHGNTGLYCCKASQTAPITSVKPKFHPHLLVILLFTVLNYSHMPCSCLHCRFTLFLQDITGDIS

SEQ ID NO: 779839 - protein, 118 aa, Homo sapiens
ADSLLDSARLHPGEINSHVLTQKPVGGLFTRTCMKFGAVTRIRGPPLGDQSPILLLFAPEKDPPTTSGPETDQPKKHLTNFKSGRNVRPLSPSQAIASPVTCTYTPRWPEVTEESQKK

SEQ ID NO: 779840 - protein, 243 aa, Homo sapiens
MESKAWESNNEDLLSSSGVTSNGGSSSSFFVSSIRGTIIENTSSAGTLTQVPFFPKYEVELDSPRKIIPSPGKEHFERVLEEYSHQVKDLQRRLNESNELHEKQKFYLRQSVIDLQTKLQEMQMERDAMADIRRRESQSQEDLRNQLQNTVHELEAAKCLKEDMLKDSNTQIEQLRKMMLSHEGVLQEIRSILVDFEEASGKKICEHDSMSTLHFRSLGSAISKILRELDTEISYLKGRIFPV

SEQ ID NO: 779841 - protein, 557 aa, Homo sapiens
MFRDVAIDVSQEEWECLNPAQRNLYKEVMLENYSNLVSLGLSVSKPAVISSLEQGKEPWMVVREETGRWCPGTWKTWGFHNNFLDNNEATDINADLASRDEPQKLSPKRDIYETELSQWVNMEEFKSHSPERSIFSAIWEGNCHFEQHQGQEEGYFRQLMINHENMPIFSQHTLLTQEFYDREKISECKKCRKIFSYHLFFSHHKRTHSKELSECKECTEMVNTPCLFKQQTIQNGDKCNECKECWKAFVHCSQLKHLRIHNGEKRYECNECGKAFNYGSELTLHQRIHTGEKPYECKECGKAFRQRSQLTQHQRLHTGEKPYECKQCGKAFIRGFQLTEHLRLHTGEKPYECKECGKTFRHRSHLTIHQRIHTGEKPYECRECGKAFSYHSSFSHHQKIHSGKKPYECHECGKAFCDGLQLTLHQRIHTGEKPYECKECGKTFRQCSHLKRHQRIHTGEKPHECMICGKAFRLHSHLIQHQRIHTGEKPYECKECGKAFSYHSSFSHHQRIHSGKKPYQCGKAFNHRLQLNLHQTLHTGEKPVRFPLLPPHPSLAS

SEQ ID NO: 779842 - protein, 471 aa, Homo sapiens
SGESLLSSDLASRDEPQKLSPKRDIYETELSQWVNMEEFKSHSPERSIFSAIWEGNCHFEQHQGQEEGYFRQLMINHENMPIFSQHTLLTQEFYDREKISECKKCRKIFSYHLFFSHHKRTHSKELSECKECTEMVNTPCLFKQQTIQNGDKCNECKECWKAFVHCSQLKHLRIHNGEKRYECNECGKAFNYGSELTLHQRIHTGEKPYECKECGKAFRQRSQLTQHQRLHTGEKPYECKQCGKAFIRGFQLTEHLRLHTGEKPYECKECGKTFRHRSHLTIHQRIHTGEKPYECRECGKAFSYHSSFSHHQKIHSGKKPYECHECGKAFCDGLQLTLHQRIHTGEKPYECKECGKTFRQCSHLKRHQRIHTGEKPHECMICGKAFRLHSHLIQHQRIHTGEKPYECKECGKAFSYHSSFSHHQRIHSGKKPYQCGKAFNHRLQLNLHQTLHTGEKPVRFPLLPPHPSLAS

SEQ ID NO: 779843 - protein, 563 aa, Homo sapiens
MAHELVMFRDVAIDVSQEEWECLNPAQRNLYKEVMLENYSNLVSLGLSVSKPAVISSLEQGKEPWMVVREETGRWCPGTWKTWGFHNNFLDNNEATDINADLASRDEPQKLSPKRDIYETELSQWVNMEEFKSHSPERSIFSAIWEGNCHFEQHQGQEEGYFRQLMINHENMPIFSQHTLLTQEFYDREKISECKKCRKIFSYHLFFSHHKRTHSKELSECKECTEMVNTPCLFKQQTIQNGDKCNECKECWKAFVHCSQLKHLRIHNGEKRYECNECGKAFNYGSELTLHQRIHTGEKPYECKECGKAFRQRSQLTQHQRLHTGEKPYECKQCGKAFIRGFQLTEHLRLHTGEKPYECKECGKTFRHRSHLTIHQRIHTGEKPYECRECGKAFSYHSSFSHHQKIHSGKKPYECHECGKAFCDGLQLTLHQRIHTGEKPYECKECGKTFRQCSHLKRHQRIHTGEKPHECMICGKAFRLHSHLIQHQRIHTGEKPYECKECGKAFSYHSSFSHHQRIHSGKKPYQCGKAFNHRLQLNLHQTLHTGEKPVRFPLLPPHPSLAS

SEQ ID NO: 779844 - protein, 436 aa, Homo sapiens
MEEFKSHSPERSIFSAIWEGNCHFEQHQGQEEGYFRQLMINHENMPIFSQHTLLTQEFYDREKISECKKCRKIFSYHLFFSHHKRTHSKELSECKECTEIVNTPCLFKQQTIQNGDKCNECKECWKAFVHCSQLKHLRIHNGEKRYECNECGKAFNYGSELTLHQRIHTGEKPYECKECGKAFRQRSQLTQHQRLHTGEKPYECKQCGKAFIRGFQLTEHLRLHTGEKPYECKECGKTFRHRSHLTIHQRIHTGEKPYECRECGKAFSYHSSFSHHQKIHSGKKPYECHECGKAFCDGLQLTLHQRIHTGEKPYECKECGKTFRQCSHLKRHQRIHTGEKPHECMICGKAFRLHSHLIQHQRIHTGEKPYECKECGKAFSYHSSFSHHQRIHSGKKPYQCGKAFNHRLQLNLHQTLHTGEKPVRFPLLPPHPSLAS

SEQ ID NO: 779845 - protein, 138 aa, Homo sapiens
ISLIVQNQELKYISYLSDLASRDEPQKLSPKRDIYETELSQWVNMEEFKSHSPERSIFSAIWEGNCHFEQHQGQEEGYFRQLMINHENMPIFSQHTLLTQEFYDREKISECKKCRKIFSYHLFFSHHKRTHSKELSEC

SEQ ID NO: 779846 - protein, 148 aa, Homo sapiens
RGRSGGGHTHACLAVGVVLCEDQQWPYPALRDGTLRWSQASREPGDWGTGGPHTLFSSAPPSHHYRRHPPESVASVLCVGLCSWFSFAFSFKSELSPWELVRRAPTGGGAGGTFPILWGWLRPLFQEIFCVCRSPNTPPLAPRALSAH

SEQ ID NO: 779847 - protein, 118 aa, Homo sapiens
SVFLWGQIKEKGGEQIVRSGLCSCACWVGFPEMCILSYFFPLWASVSGREEGRLPGPVSCSFPSLPPVHILSSCCNPSSSGLLCRFRSLNPSNTPRRAPAGASVGRQQDYHTERAPGE

SEQ ID NO: 779848 - protein, 119 aa, Homo sapiens
VLGTRGPWPWHGSSTQGSWQPGSQEAEEMRGEVSPSKGKEVGCAVTVLEHSLDQQHPYHLQTGWKSSLRTNIITSPAVIHKYFKKWSIISAKQSHTVRGTTGGLCVLVSVFLPLSRHVD

SEQ ID NO: 779849 - protein, 39 aa, Homo sapiens
PETQAPDSTRERRHSPGQPPPDGDNHRPVTWGCRRPQPY

SEQ ID NO: 779850 - protein, 153 aa, Homo sapiens
GNLVGDSTNDPSMEAAGFTAQVITLNHLMANMKRRDAPVLGIATRYPDCMLSLLQLKGKKIDPPVSGKKAWRVWAIEVSVNVLVMRARLLIWFAGKARCVLGELLVEISPVVVVSDSPAGDVVISEHMQLGFGRLEVVNQQRQVDKEGLLELG

SEQ ID NO: 779851 - protein, 146 aa, Homo sapiens
QAQLQGLLSFASTIPSSPCSRPSPTIWQSGQSNHSHIRALPGSFIECPLRRLEERPMTFALETPESRFITTMLRLPVWLQGHFFHSFIYNRCSICCVPDAILGSRETKQSPCFPRHPHSRKDCYQPGVVAHACNPSTLGGRGGRIT

SEQ ID NO: 779852 - protein, 451 aa, Homo sapiens
MESSPIPQSSGNSSTLGRVPQTPGPSTASGVPEVGLRDVASESVALFFMLLLDLTAVAGNAAVMAVIAKTPALRKFVFVFHLCLVDLLAALTLMPLAMLSSSALFDHALFGEVACRLYLFLSVCFVSLAILSVSAINVERYYYVVHPMRYEVRMTLGLVASVLVGVWVKALAMASVPVLGRVSWEEGAPSVPPGCSLQWSHSAYCQLFVVVFAVLYFLLPLLLILVVYCSMFRVARVAAMQHGPLPTWMETPRQRSESLSSRSTMVTSSGAPQTTPHRTFGGGKAAVVLLAVGGQFLLCWLPYFSFHLYVALSAQPISTGQVESVVTWIGYFCFTSNPFFYGCLNRQIRGELSKQFVCFFKPAPEEELRLPSREGSIEENFLQFLQGTGCPSESWVSRPLPSPKQEPPAVDFRIPGQIAEETSEFLEQQLTSDIIMSDSYLRPAASPRLES

SEQ ID NO: 779853 - protein, 451 aa, Homo sapiens; identical to SEQ ID NO: 779852

SEQ ID NO: 779854 - protein, 109 aa, Homo sapiens
MLGIWEWQRKLEFSLPCPLSGSPGLSEHYQCCQRRHSTLQLNCTASLPHGIFSHTPTPNHRPSQHRNHLSVLVSPVHIHTCTHIQVVHTCKNQHASKSSLMGVGGSCCP

SEQ ID NO: 779855 - protein, 69 aa, Homo sapiens
CGDVTSRFRYHRMPVLPLGQPSLEIIHISFLERSAGEFLLHAILILSSRALNNSCSLRDLGPGPARKCL

SEQ ID NO: 779856 - protein, 124 aa, Homo sapiens
MNGFRFEIYKDMSCVIWDELFMDSFLKLPFAEYLFQLSSGVTSFRKPTLILLAPPWPLAAPSLCSHYTLFISLLTLFSHGIKNSIIFLNIPPLNCKLIEKIALISCSLGTVLIFSLRNHLSPSL

SEQ ID NO: 779857 - protein, 51 aa, Homo sapiens
EAGKIVSSDFKKKTLGRAGSHSTPWHRAGRVTPHRGIEQGESPHTVASSRE

SEQ ID NO: 779858 - protein, 89 aa, Homo sapiens
SELKLGVRVERGWIQKEASLGTGMERRERLSHGKGQLDHSGTNQTWPRREAQCLFQRTHVPLDTSSQAERFTDIHRDIRIIPQHAQTNT

SEQ ID NO: 779859 - protein, 99 aa, Homo sapiens
HLCLHFLHSPAKQKLPWNQGSPKTPNSKEAAASCENSLSLFISLPTGTLMLTARRMRPSQEPPEISGPVSSCLLQPHSWPHCQEDSQRSHRGRCGSVHL

SEQ ID NO: 779860 - protein, 105 aa, Homo sapiens
RGKPRSISLHLPLPRQEAEQNHTCNPATRPPGCVLPIFHPLCLARCLAQRRHSRGTGLNPVASEQLPGEAGVTPFKGHWKDAWSPFLPRHKPFLYCPTLMPEVKQ

SEQ ID NO: 779861 - protein, 116 aa, Homo sapiens
NGARPERRPPPRPSRIHNPSNSYPLQQYTLRTMNHNQCYQSILIINNHNGYSNKTRNSPLSLLSPRGYPRHPSDIRPASSHMTKTSPHLNHIPNLSLTRRKPSPHSLNLIHHSRAS

SEQ ID NO: 779862 - protein, 104 aa, Homo sapiens
GPRGSELGNNEQFPLEMPIYTFQLPDLSVYSEDFRSFIERDLIEQATMVALEQAGRLNWWSTVCTSCKRLLPLATTGDGNCLLHAASLGKLHSTDRGWPGSRPA

SEQ ID NO: 779863 - protein, 156 aa, Homo sapiens
MRGEVFKCNSEVQRRLREGVQRERGRWWGCYQGLPRTQGLHNPPGTSPEREQGLDACQQRGAGLTALSLGFLSGGNAGSFERVLSVQAVCTPLSWSPLSTLAHLIRGCGRAGYFSHLPAAVELVPTYPVGSKMVLKPLPRKPSQVELEEGVSFNIP

SEQ ID NO: 779864 - protein, 96 aa, Homo sapiens
ITITITITISISITITISITITITISITITITISISITISRTFSSSLTKPLCPLNMNSPFLPVPQSLETSIPLSAFKNLPILGPHSIFKLPEVANI

SEQ ID NO: 779865 - protein, 44 aa, Homo sapiens
ILLQRTCSNMLRKLRQRKVDGEFWKSEKGSELIEQNGNRFQQFS

SEQ ID NO: 779866 - protein, 88 aa, Homo sapiens
LLLPQQSPNGSTSRTSGGSGLNLGFKLESPRDPEKPLRVSSPEILIQLAWHMDLHCGPTLTSAKACTRTDESHARTSRHKSARPPPPA

SEQ ID NO: 779867 - protein, 83 aa, Homo sapiens
VRMCGPSDVRASTDVRASTDACSKEQIPRSKVSDYCLKQEAANTPILLRNTPLDEPEMMWLPQSIDSSPLQVVEPKEFLVFPF

SEQ ID NO: 779868 - protein, 101 aa, Homo sapiens
RKDSCQDVFLLSLHQQVSVSPRGQCSRQVMWRMDRGFGGRDPCTRRQRHLQCRGERTRGTEAVTETQDVARVPEGRGDAFQLARVPEGKGDSFEFTEKKKS

SEQ ID NO: 779869 - protein, 296 aa, Homo sapiens
MSYLKQPPYAVNGLSLTTSGMDLLHPSVGYPGPWASCPAATPRKQRRERTTFTRAQLDVLEALFAKTRYPDIFMREEVALKINLPESRVQVWFKNRRAKCRQQQQQQQNGGQNKVRPAKKKTSPAREVSSESGTSGQFTPPSSTSVPTIASSSAPVSIWSPASISPLSDPLSTSSSCMQRSYPMTYTQASGYSQGYAGSTSYFGGMDCGSYLTPMHHQLPGPGATLSPMGTNAVTSHLNQSPASLSTQGYGASSLGFNSTTDCLDYKDQTASWKLNFNADCLDYKDQTSSWKFQVL

SEQ ID NO: 779870 - protein, 288 aa, Homo sapiens
MSYLKQPPYAVNGLSLTTSGMDLLHPSVGYPATPRKQRRERTTFTRAQLDVLEALFAKTRYPDIFMREEVALKINLPESRVQVWFKNRRAKCRQQQQQQQNGGQNKVRPAKKKTSPAREVSSESGTSGQFTPPSSTSVPTIASSSAPVSIWSPASISPLSDPLSTSSSCMQRSYPMTYTQASGYSQGYAGSTSYFGGMDCGSYLTPMHHQLPGPGATLSPMGTNAVTSHLNQSPASLSTQGYGASSLGFNSTTDCLDYKDQTASWKLNFNADCLDYKDQTSSWKFQVL

SEQ ID NO: 779871 - protein, 296 aa, Homo sapiens; identical to SEQ ID NO: 779869

SEQ ID NO: 779872 - protein, 296 aa, Homo sapiens; identical to SEQ ID NO: 779869

SEQ ID NO: 779873 - protein, 288 aa, Homo sapiens; identical to SEQ ID NO: 779870

SEQ ID NO: 779874 - protein, 97 aa, Homo sapiens
MLFTRFCTQSHPKTIISTRFLESAMSTTSRAWRIHATSGITTWSGPKVTHSRSHPPATPPGRTPKGLSVPAPETTKAGGQSFKICYKETYIHSDIHK

SEQ ID NO: 779875 - protein, 31 aa, Homo sapiens
MQQPLKTSLGRQNSTEIVTKGRYQSLTVPTC

SEQ ID NO: 779876 - protein, 67 aa, Homo sapiens
PTFLPAEHEGSAGTPPACMCPDMYVQADQRFPLICHQEHQLVLEDQVLAPRPQWEQGEDEAGHPPKW

SEQ ID NO: 779877 - protein, 58 aa, Homo sapiens
MAKRDSAGGIKMIVRVGLIYSHVLFKSRVSSGQQQGGSQKDMKLRKDSTLLLALQMEG

SEQ ID NO: 779878 - protein, 35 aa, Homo sapiens
RSMLSALLAIMIPTSHMEGVQSGGRTCLTKPDNTL

SEQ ID NO: 779879 - protein, 56 aa, Homo sapiens
EADWVMRVTSPGFPGNEAATPHFLLLLQRKLGVLGCFLPLTSGETPKPLSDRAVVG

SEQ ID NO: 779880 - protein, 120 aa, Homo sapiens
PGKFFCIFSRNRVSPYLLGWSRTPDLSDPPPLGLPKCWDYRSELLRLGHICFFTFSLCRCIHIKLVFLIHLEKSCGHQDSLPLNLEVCTNQYIFLHDTPPLLDPRTSALMQLYPLVYSSS

SEQ ID NO: 779881 - protein, 68 aa, Homo sapiens
SCGEQCTPARGRGVLCPCSEGSAAVPIDLHLRLCIRGDCPGGPRQSHITILMLGVGLALIIRWLMVQG

SEQ ID NO: 779882 - protein, 105 aa, Homo sapiens
PQGTGLDSGWEAAHPAAWPGSALGRVWAGGVGGSVSLLGRWLGEAALQQGTRGDLSLAFPSLTRKCGCDHNVVHVARSIWNSRNHRLSNVHTPSRGCNFTFTSTH

SEQ ID NO: 779883 - protein, 260 aa, Homo sapiens
SALEWSPFQAWSKTELRDFSLNLRSHTRSTMTSPQLEWTLQTLLEQLNEDELKSFKSLLWAFPLEDVLQKTPWSEVEEADGKKLAEILVNTSSENWIRNATVNILEEMNLTELCKMAKAEMMEDGQVQEIDNPELGDAEEDSELAKPGEKEGWRNSMEKQSLVWKNTFWQGDIDNFHDDVTLRNQRFIPFLNPRTPRKLTPYTVVLHGPAGVGKTTLAKKCMLDWTDCNLSPTLRYAFYLSCKELSRMGPCSFAELISKD

SEQ ID NO: 779884 - protein, 241 aa, Homo sapiens
LPYCIIFRAIKILYPGILNSGEACGSASLDELIEIGRDWKRPWPLEDVLQKTPWSEVEEADGKKLAEILVNTSSENWIRNATVNILEEMNLTELCKMAKAEMMEDGQVQEIDNPELGDAEEDSELAKPGEKEGWRNSMEKQSLVWKNTFWQGDIDNFHDDVTLRNQRFIPFLNPRTPRKLTPYTVVLHGPAGVGKTTLAKKCMLDWTDCNLSPTLRYAFYLSCKELSRMGPCSFAELISKD

SEQ ID NO: 779885 - protein, 235 aa, Homo sapiens
SALEWSPFQAWSKTELRDFSLNLRSHTRSTMTSPQLEWTLQTLLEQLNEDELKSFKSLLWAFPLEDVLQKTPWSEVEEADGKKLAEILVNTSSENWIRNATVNILEEMNLTELCKMAKAEMMGEKEGWRNSMEKQSLVWKNTFWQGDIDNFHDDVTLRNQRFIPFLNPRTPRKLTPYTVVLHGPAGVGKTTLAKKCMLDWTDCNLSPTLRYAFYLSCKELSRMGPCSFAELISKD

SEQ ID NO: 779886 - protein, 71 aa, Homo sapiens
DFSRAAGSPNIYGKFPNIPITVVATLDMACTLSVLCPTLGAGWQRGSLVQCCQVSVSGSPALHPLPTVLSQ

SEQ ID NO: 779887 - protein, 30 aa, Homo sapiens
MPRGFTHDGGWTWHLLNRGWMWASLWSLSV

SEQ ID NO: 779888 - protein, 104 aa, Homo sapiens
YLLDLVGFYVVQVYFLVDIVRGDSKHYLIYGANFSIKQFLPPILSIVLSRLIMCSEGIRLFPYTHTPLNTIVTEVCGGFSTFTTNSPGDTSWVFYNSIIILCIC

SEQ ID NO: 779889 - protein, 124 aa, Homo sapiens
ILPEPEHRSLPRSTSSKLHGLDQAPLLPHFLLSRMEIIKPPPCKPPSQKAVVRIKQDNNGETSLKTVRCQSNLRASERAAVNRYCTRQLLGAHWEPLTTSMVHVPVSRADRVAATQASFLRYFL

SEQ ID NO: 779890 - protein, 106 aa, Homo sapiens
MLQTCKQCQCLFLFITSSLHLCLSHSERPSINFMMDFRCSTPSICSFLYSQPTFCLQHGFCLLTQPLLPHGFCLLTSLCILFLFHAITLCGDCMYLIQIPKEKNCD

SEQ ID NO: 779891 - protein, 104 aa, Homo sapiens
DLEDPLGWGRGLAWERAGLGKRAGLGKRAGWGRGEIGFAESSCSLSLPVSDACFLSSGRTSDSMFFSLGIWDLNQQPSGGPRAFGFRLRAALLASLVLRFSDLD

SEQ ID NO: 779892 - protein, 82 aa, Homo sapiens
ATHPCTVFPQQPSLGTFPKGSRKQLTQQTFGDFRKQKGRQVTSISSLKSPPGSRLLRGLAQPASRQHGLSIFTVLLITSAGG

SEQ ID NO: 779893 - protein, 110 aa, Homo sapiens
HCSSLSGKKFRHSELFSHFLSIPAVSARPASASKLPVLCTAMLDLWILCSSTCHGLPNLKMLPVTLCQALSPFTNLVCPFLILIPGSPSKSSQTQHISAMDFTSKHSLHF

SEQ ID NO: 779894 - protein, 103 aa, Homo sapiens
MVQSPNQRRSTLSPAWPGPGAPGASRKQNQCLSHLVAPGLRRSPQPVGHPPGNWVLRLETLGCRSSGWAGTFRRPERGPLTSIVRRGRCPGRIPTGKGCPGAQ

SEQ ID NO: 779895 - protein, 109 aa, Homo sapiens
SSGCCWERLPAPPHAEIRGADTGGFVLPAPPHPEIRGADTGGFVLPAPPHAEIRGADTGGFVLPAPPHVEIRGADTGGFVLPAPPHAEIRGADTGGFVLPAPPHPEIRG

SEQ ID NO: 779896 - protein, 48 aa, Homo sapiens
AGITGVSHRTRPAACISEIQVKWPSWDTSLRADSEPRFPSFNTPSFPT

SEQ ID NO: 779897 - protein, 132 aa, Homo sapiens
GREPLDQLRVSGPVGADNWPQSTPTWWLSPRTLVGLWVIFLIFKFLFEIESCYVAQAGLKSLGSSDPPASAPRVAGTAGVSHRTWLGMLMVVSPHRGTVTGPRSHQACPCSHSPQMQRGGMVWGLVSGNSST

SEQ ID NO: 779898 - protein, 118 aa, Homo sapiens
  misc_feature (76)..(76): Xaa can be any naturally occurring amino acid
VYRLHSQPSQSYPGTSTRWFIHLTIYQRYLQESYIIVKPDKGVEKPHTEGSQIGETTTDPFSEGVSVFVCKFLFPXRGCSPKTKRRVCHRDLQEKKNLARLDLFLFSVKSNSKLIYIL

SEQ ID NO: 779899 - protein, 425 aa, Homo sapiens
TLPLHPNQGLPESVKFHFTVSDGEHTSPEMVLTIHLLPSDQQLPVFQVTAPRLAVSPGGSTSVGLQVVVRDAETAPKELFFELRRPPQHGVLLKHTAEFRRPMATGDTFTYEDVEKNALQYIHDGSSTREDSMEISVTDGLTVTMLEVRVEVSLSEDRGPRLAAGSSLSITVASKSTAIITRSHLAYVDDSSPDPEIWIQLNYLPSYGTLLRISGSEVEELSEVSNFTMEDINNKKIRYSAVFETDGHLVTDSFYFSVSDMDHNHLDNQIFTIMITPAENPPPVIAFADLITVDEGGRAPLSFHHFFCYCDDDNLQRDAIIKLSALPKYGCIENTGTGDRFGPETASDLEASFPIQDVLENYIYYFQSVHESIEPTHDIFSFYVSDGTSRSEIHSINITIEVKTLEVGKVEPLTTIFHTIRELSL

SEQ ID NO: 779900 - protein, 145 aa, Homo sapiens
TLPLHPNQGLPESVKFHFTVSDGEHTSPEMVLTIHLLPSDQQLPVFQVTAPRLAVSPGGSTSVGLQVVVRDAETAPKELFFELRRPPQHGVLLKHTAEFRRPMATGSYTPTHSVTDLLGGFFALQSVVMCLRREQSVFVIQTMRS

SEQ ID NO: 779901 - protein, 70 aa, Homo sapiens
NNELKSLTSKFMTTFSQLRDVPVEKLAAMPALRSINLRFNPLNAEVRVIAPPLIKFDMLMSPEGARAPLP

SEQ ID NO: 779902 - protein, 70 aa, Homo sapiens; identical to SEQ ID NO: 779901

SEQ ID NO: 779903 - protein, 70 aa, Homo sapiens; identical to SEQ ID NO: 779901

SEQ ID NO: 779904 - protein, 81 aa, Homo sapiens
SLGKVGKGVGEGSGVNAGTTLESGVDKAKSGLVKMRSGFVREAGSGVGGEVSGASEVASDVKAEWGVSSRLESEVSAGPGG

SEQ ID NO: 779905 - protein, 79 aa, Homo sapiens
RLYRAGEDAVWVLDSGSVRGATANSSAAWLVQFYSSWCGHCIGYAPTWRALAGDVRDWASAIRVAALDCMEEKNQASFA

SEQ ID NO: 779906 - protein, 210 aa, Homo sapiens
LFLTGEDLGVISLCQNGASLANLKVRFKPPSPRVFTVTIVALWMFPSCFQDRDIDGGCRLSTASVSSFPHKHVYILRMPFNLCPILQALCFGIWSTSPHPPVGSWLPPPLGPACTLQSARSPSPPVPPSPLLQAAKCFLLAGRGQTEPEAQSASAAPPSKCSRDYPVFVAASLGQVPEGSPCSSGCSTPDVGISTGEEPRNSVAVLRFRK

SEQ ID NO: 779907 - protein, 73 aa, Homo sapiens
LHGPMANGCHTGRQTLNISIITDGPTGPTPSSTGRTDHCPPAAHSPSLLSIFRGSNRSSLKTFPSCWKPGMMT

SEQ ID NO: 779908 - protein, 592 aa, Homo sapiens
MSVSLVVIRLELAEHSPVPAGFGFSAAAGEMSDEEIKKTTLASAVACLEGKSPGEKVAIIHQHLGRREMTDVIIETMKSNPDELKTTVEERKSSEASPTAQRSKDHSKECINAAPDSPSKQLPDQISFFSGNPSVEIVHGIMHLYKTNKMTSLKEDVRRSAMLCILTVPAAMTSHDLMKFVAPFNEVIEQMKIIRDSTPNQYMVLIKFRAQADADSFYMTCNGRQFNSIEDDVCQLVYVERAEVLKSEDGASLPVMDLTELPKCTVCLERMDESVNGILTTLCNHSFHSQCLQRWDDTTCPVCRYCQTPEPVEENKCFECGVQENLWICLICGHIGCGRYVSRHAYKHFEETQHTYAMQLTNHRVWDYAGDNYVHRLVASKTDGKIVQYECEGDTCQEEKIDALQLEYSYLLTSQLESQRIYWENKIVRIEKDTAEEINNMKTKFKETIEKCDNLEHKLNDLLKEKQSVERKCTQLNTKVAKLTNELKEEQEMNKCLRANQVLLQNKLKEEERVLKETCDQKDLQITEIQEQLRDVMFYLETQQKINHLPAETRQEIQEGQINIAMASASSPASSGGSGKLPSRKGRSKRGK

SEQ ID NO: 779909 - protein, 600 aa, Homo sapiens
AAFPVAGSGPGGLPFPKHWPGKSPRRGLLPRKTRRAGEMSDEEIKKTTLASAVACLEGKSPGEKVAIIHQHLGRREMTDVIIETMKSNPDELKTTVEERKSSEASPTAQRSKDHSKECINAAPDSPSKQLPDQISFFSGNPSVEIVHGIMHLYKTNKMTSLKEDVRRSAMLCILTVPAAMTSHDLMKFVAPFNEVIEQMKIIRDSTPNQYMVLIKFRAQADADSFYMTCNGRQFNSIEDDVCQLVYVERAEVLKSEDGASLPVMDLTELPKCTVCLERMDESVNGILTTLCNHSFHSQCLQRWDDTTCPVCRYCQTPEPVEENKCFECGVQENLWICLICGHIGCGRYVSRHAYKHFEETQHTYAMQLTNHRVWDYAGDNYVHRLVASKTDGKIVQYECEGDTCQEEKIDALQLEYSYLLTSQLESQRIYWENKIVRIEKDTAEEINNMKTKFKETIEKCDNLEHKLNDLLKEKQSVERKCTQLNTKVAKLTNELKEEQEMNKCLRANQVLLQNKLKEEERVLKETCDQKDLQITEIQEQLRDVMFYLETQQKINHLPAETRQEIQEGQINIAMASASSPASSGGSGKLPSRKGRSKRGK

SEQ ID NO: 779910 - protein, 277 aa, Homo sapiens
LIKIFLFRQNLWICLICGHIGCGRYVSRHAYKHFEETQHTYAMQLTNHRVWDYAGDNYVHRLVASKTDGKIVQYECEGDTCQEEKIDALQLEYSYLLTSQLESQRIYWENKIVRIEKDTAEEINNMKTKFKETIEKCDNLEHKLNDLLKEKQSVERKCTQLNTKVAKLTNELKEEQEMNKCLRANQVLLQNKLKEEERVLKETCDQKDLQITEIQEQLRDVMFYLETQQKINHLPAETRQEIQEGQINIAMASASSPASSGGSGKLPSRKGRSKRGK

SEQ ID NO: 779911 - protein, 257 aa, Homo sapiens
MSVSLVVIRLELAEHSPVPAGFGFSAAAGEMSDEEIKKTTLASAVACLEGKSPGEKVAIIHQHLGRREMTDVIIETMKSNPDELKTTVEERKSSEASPTAQRSKDHSKECINAAPDSPSKQLPDQISFFSGNPSVEIVHGIMHLYKTNKMTSLKEDVRRSAMLCILTVPAAMTSHDLMKFVAPFNEVIEQMKIIRDSTPNQYMVLIKFRAQADADSFYMTCNGRQFNSIEDDVCQLVYVERAEVLKSEDVSVNCSYI

SEQ ID NO: 779912 - protein, 592 aa, Homo sapiens; identical to SEQ ID NO: 779908

SEQ ID NO: 779913 - protein, 443 aa, Homo sapiens
MTSLKEDVRRSAMLCILTVPAAMTSHDLMKFVAPFNEVIEQMKIIRDSTPNQYMVLIKFRAQADADSFYMTCNGRQFNSIEDDVCQLVYVERAEVLKSEDGASLPVMDLTELPKCTVCLERMDESVNGILTTLCNHSFHSQCLQRWDDTTCPVCRYCQTPEPVEENKCFECGVQENLWICLICGHIGCGRYVSRHAYKHFEETQHTYAMQLTNHRVWDYAGDNYVHRLVASKTDGKIVQYECEGDTCQEEKIDALQLEYSYLLTSQLESQRIYWENKIVRIEKDTAEEINNMKTKFKETIEKCDNLEHKLNDLLKEKQSVERKCTQLNTKVAKLTNELKEEQEMNKCLRANQVLLQNKLKEEERVLKETCDQKDLQITEIQEQLRDVMFYLETQQKINHLPAETRQEIQEGQINIAMASASSPASSGGSGKLPSRKGRSKRGK

SEQ ID NO: 779914 - protein, 152 aa, Homo sapiens [sequence omitted]

SEQ ID NO: 779915 - protein, 108 aa, Homo sapiens
MTSLKEDVRRSAMLCILTVPAAMTSHDLMKFVAPFNEVIEQMKIIRDSTPNQYMVLIKFRAQADADSFYMTCNGRQFNSIEDDVCQLVYVERAEVLKSEDVSVNCSYI

SEQ ID NO: 779916 - protein, 139 aa, Homo sapiens
DDPDAPLQPVTPLQLFEGRRNRRRREAPKVVEEQESRVHYTVCIWRNGKVGLSGMAIADVTLLSGFHALRADLEKLTSLSDRYVSHFETEGPHVLLYFDSVPTSQKCAGCTQAHFSRRLRDLLTRRLTGSNYPGLSISL

SEQ ID NO: 779917 - protein, 109 aa, Homo sapiens
SPFPALPPTSTPAPRRPGALGAGVSQSGQERGQYTGVGLSTGKCHLHPLTPLLVGKTSGATGCPEVNVLGGSQPHHVSCRHPGLQESQPYLGMTCWPTQGLHLSLVFSR

SEQ ID NO: 779918 - protein, 144 aa, Homo sapiens
RGVRQVWWGGRIICMQEDESELCAWRKAPNWMRAGRARTGMGWGRLACYRFDQVPVRGRKFPYQSKETLHRPEEGYLKSEGGGRGSFPGGVPHTSQSGEASHTNQRGMVPTLTRGGGAPHESEGGGPHTNQSGEVPHSNQRGMV

SEQ ID NO: 779919 - protein, 80 aa, Homo sapiens
MKKTEEEQRKRKQARRRKKERHKDKTEQRKDKREKGNSDEDIEKTRGRREKKMRDRARGGGRERKEKKKREKRDKKDHRG

SEQ ID NO: 779920 - protein, 111 aa, Homo sapiens
YGHRIGSGTGHGWFWKRQHLSGKTGMYVLTLGCGFRLEVGALAGDLPSSAQNSPASYLYYLYYLSITKYLMSSYQEPGLLWKESRMRHRNHFKISCYVIAQKKLTCMNSSQ

SEQ ID NO: 779921 - protein, 70 aa, Homo sapiens
  misc_feature (2)..(2): Xaa can be any naturally occurring amino acid
  misc_feature (70)..(70): Xaa can be any naturally occurring amino acid
VXLSPPPPWMGKEAGGLLQESEDGVGMMGAGKGTEPGVLGSLLLSSLLTLSQRGPGSYWPQPPQYWLGAX

SEQ ID NO: 779922 - protein, 165 aa, Homo sapiens
GSSCAGDLGTSQEETQEMGAGPCHCQHDPTAGRACSTPCSRGPGLGQGSPSPPLFSCFLCPTVVGWRELVDCLAIEPPLRAALQELHIHLSGTTPHWAITNSLCDLRQVTSLWAWVPQKSKKALNQRLSLHLCILEFSERMSGKSPPLGSFPVGGDQGRGCRDFP

SEQ ID NO: 779923 - protein, 77 aa, Homo sapiens
GGLGGGQGHPQMSDDKVDRVQREVHAEAWKLKTTRLEEGAAPRTQNVQKGRMESAKPCQEMRALLCEAIGFWNKMTL

SEQ ID NO: 779924 - protein, 65 aa, Homo sapiens
MRTELQNGSGDRSRDWERGSRQRSLEEPAQPQGPGKAGDTTSQHSTPHHSLQLGGPVIAAPTGTG

SEQ ID NO: 779925 - protein, 44 aa, Homo sapiens
GTLLAQEGSVRYERVLVQLPRQSSVIFLRGSELKLTSYQGLRSL

SEQ ID NO: 779926 - protein, 100 aa, Homo sapiens
PLSPLSMSTIHHHPLSPLSMSTVHHYPLSPLFITTLYLHCPSPPSISTVHHHPLSPLSITTLYLHCPCPLSITTLYLHCPSLPSVSTIHVHCPSPPSIST

SEQ ID NO: 779927 - protein, 518 aa, Homo sapiens
MLCASFLGLGLSVAIVGPTFQDLATNVNRNISSLSFIFVGRALGYLSGSVIGGFLVDVMNYFLLLGISMSATTVGLYLVPFCKTAILLTVMMSIFGVSIGILDTGGNVLILAIWGDKGAPHMQALHFSFALGAFLAPLLAKLALGPTASAENHTESDFHPALNQSSDADSEALFGVPNDKNLLWAYAVIGTYMFLVSVIFFCLFLKNSSKQEKARASAETFRRAKYHNALLCLLFLFFFFYVGAEVTYGSYVFSFATTHAGMKESEAAGLNSIFLGDICSLRGWQSFLLPVYRPGTMIVLSNIGSLTSSLFLVLFDKNPICLWIATSVYGASMATTFPSGVSWIEQYTTIHGKSAAFFVIGASLGEMAIPAVIGILQGKYPDLPVVLYTSLGASIATGILFPVLYKLATSPLDRQRKEDRKSEDQKALLSSSGLNEYEEENEEEDAEKWNEMDFEMIETNDTMRHSIIETSRSSLTEPTAEVYNQYPSNALVFESSPFNTGSAHVKHLPETRTKGTNV

SEQ ID NO: 779928 - protein, 518 aa, Homo sapiens; identical to SEQ ID NO: 779927

SEQ ID NO: 779929 - protein, 111 aa, Homo sapiens
MSLCQNLLVAFQSRSQGSSVACKALHELTSHDLSSSCPHVLCPRYPDILAVCQAHQACSCPGVICTGIHFAPDTTWPTLSPSYSVHPMMPTQLPYLKLQPVAPPLSPAFLT

SEQ ID NO: 779930 - protein, 92 aa, Homo sapiens
QHWRSCGVGGAGEATRGGLFPVPFPSGDSWPEVTQHWMRFQGQRPWCPGLWTTPAHSHCKPQTGAVDNASPRQPHAPDQHEKNAGRQHLHLW

SEQ ID NO: 779931 - protein, 147 aa, Homo sapiens
VTQHWMRFQGQRPWCPGLWTTPAHSHCKPQTGAVDNASPRQPHAPDQHEKNAGRQHLHLWSLACPPWLHSIPHIKGTILSEALSGFLVSDRRTKTVAGLRWLWLRKEATPTASRTTLSSSLAPRGRGVNTLGRGGCTLMVLSSDLCD

SEQ ID NO: 779932 - protein, 66 aa, Homo sapiens
IHPGTHYHHLIHNFHNYGTTFNHCSNYRKGQTTFTSSTATLPGATAPGQESSFLGHIHKTSKRLTY

SEQ ID NO: 779933 - protein, 111 aa, Homo sapiens
LHLDAHKYLTFNTCKVQVHALSQLPQFLPRQYKCSIIHLAAQVADVGDNFDLPFPSASTSSPLAGAVDPRSKQSHKLQVSVQVSPSPLPHISHVSNPFHEDCCNSPVYCHH

SEQ ID NO: 779934 - protein, 63 aa, Homo sapiens
QAPPKRVIQMRCGFAGGVGHQRKRTRRRRLNPGDETQGSRPEEGDPERKESQAGKQGRRRGSV

SEQ ID NO: 779935 - protein, 34 aa, Homo sapiens
RTPAVPVLAFKFLGQGEVQDPRGAAQVAKEISGS

SEQ ID NO: 779936 - protein, 66 aa, Homo sapiens
SLQPPFIPSGPAVLQSVQAASVDLQRCSQYCWVDLGSPWVYCLPGIPGSDFQTLVVNVEHYPSSFI

SEQ ID NO: 779937 - protein, 112 aa, Homo sapiens
ASLLCMAMPFSLFSGFHILCTIHSFREHLLRTYNMSNTIKGQGDTKMNKEWTLLSKDQEAERQRKDDDFDDGDDDDDVQGICTMIIDLYRILRAERGTHSLCSKSQLNTPLL

SEQ ID NO: 779938 - protein, 54 aa, Homo sapiens
MSTSAVLSFKKFKENKTRGPQGCTGKQTSNRTGTMAEAHAGHQNREWTRPHGEA

SEQ ID NO: 779939 - protein, 108 aa, Homo sapiens
KTVAIKRADMLKYVIKRYRSFLPEIFKKASDLPELVFGFYLKELDPAEHSYVLIRKIDPALVWGLTGDQGTPKTRLLMITLDSIFMQASCVPEEVVWEVLRVLEAHFV

SEQ ID NO: 779940 - protein, 108 aa, Homo sapiens; identical to SEQ ID NO: 779939

SEQ ID NO: 779941 - protein, 48 aa, Homo sapiens
MTGKATSYHPVKGEGWASCSQEVAAKRGPESAGLLSKELTAAETLNPS

SEQ ID NO: 779942 - protein, 139 aa, Homo sapiens
MTEKFLFLYLSLLPMPLLSQAQWNENSLVSFSKIIASGNHLSNCWICHNFITRSSSYQYILVRNFSLNLTFGSGIPEGQHKSVPLQVSLANSAHQVPCLDLTPPFNQSSKTSFYFYNCSSLNQTCCPCPEGHCDIGGRG

SEQ ID NO: 779943 - protein, 64 aa, Homo sapiens
CGNLATSLNDPLHTLPGPGCLHQHTGCVESSSPSDQGHCCSFSVSPQNMALEEAAQLTETWQVA

SEQ ID NO: 779944 - protein, 103 aa, Homo sapiens
DTPLGSANYLGCTAAKLHRQPPLLQSSPDFFLICYLSRRNSRKSTRAFPANRVRLISQTPAPSTKQQLFSFLGMVSVVGILTQEPGPHPVAFLSKQLDLTVLA

SEQ ID NO: 779945 - protein, 71 aa, Homo sapiens
MLNISDLKLVLHTVCQPYIVSLVSALPHCITPSCFFSLFLLSPPYYSLAIVFFPLDHGNAGILLSGVSFHV

SEQ ID NO: 779946 - protein, 121 aa, Homo sapiens
KEAGSNRQASKIPRGNDVRATPVCVPGDNLMKKANLAPYPKGEPWHEINLPGSPQCKLAALSDASTIPGSSEGGGYYPHLTDGNAGPERIVAQLRNQHPQLIFIISQKHAARSVNETPSIQ

SEQ ID NO: 779947 - protein, 99 aa, Homo sapiens
CLLVMYAQWEKLMEVCSNHKQSEISRVQNSQKSRFGSLHQVKNSGQLSNMDVAVEADRTLYNVHTSPNIQNYCSQWNCLPLRKSGNSGNPRTRYHGTYL

SEQ ID NO: 779948 - protein, 72 aa, Homo sapiens
LRRLILVFGHHRAFPSNLIQAKTIFRDKNLNRFSRVRWLMPVIPVLWEAEAGGSRGQEIETILANMVKPCLY

SEQ ID NO: 779949 - protein, 72 aa, Homo sapiens
VVLVSLELQLDPSVPHAQGAREVPGNRPIQALQVHPDIFALLFRQCKGSPFFPFVTWAFCILFKSTFSSYIF

SEQ ID NO: 779950 - protein, 82 aa, Homo sapiens
CLCGQNTPSELAEPALSPNPTLPGPKRPKRKREAAALVHSGVNTLQALRFLQDQHRRSHRSHTRLLSDPEGGAVWNSIFTHV

SEQ ID NO: 779951 - protein, 41 aa, Homo sapiens
SHTLVSHAASVLQAKKLRPAAVQPGLKQRLLDSGHLSYQPP

SEQ ID NO: 779952 - protein, 102 aa, Homo sapiens
CFTMAFTPARHLCIKVFTDPKIRLSRFSSCSFGPLPWWSQPPQCCPRVSLVITVPCPWCPGARPPSPAVDMPTNPKAPLSAQHRPRSSPESYSLLDVPHRLI

SEQ ID NO: 779953 - protein, 127 aa, Homo sapiens
LIRTLFFQTASFSHRSLYHSDHCPLNLLPHPLFHPDEPGFTVCGTSGHGTKWFSTLLLSTGLLVLFLDTNPGINVPFPSKGPHCGFLSTLLSFLLLDLCLTTFPGSLCFFILLFSFSPGAFVSGFLC

SEQ ID NO: 779954 - protein, 81 aa, Homo sapiens
SSPSSSLSLPSPSPPLSLSSSPFSITIIIIIIIILIPIIITITTVIAVIITITINVVITIIITIIIITIITITIIITVIIT

SEQ ID NO: 779955 - protein, 325 aa, Homo sapiens
AVRRLRLEGTGGEMSRVPAFLSAAEVEEHLRSSSLLIPPLETALANFSSGPEGGVMQPVRTVVPVTKHRGYLGVMPAYSAAEDALTTKLVTFYEDRGITSVVPSHQATVLLFEPSNGTLLAVMDGNVITAKRTAAVSAIATKFLKPPSSEVLCILGAGVQAYSHYEIFTEQFSFKEVRIWNRTKENAEKFGDTVQGEVRVCSSVQEAVAGADVIITVTLATEPILFGEWVKPGAHINAVEPADLTGEKLDDELMKEAVLYVDSQEAALKESGDVLLSEIFAELGEVIKGVKPAHCEKTTVYKSLGMAVEDTVAAKLIYDSWSSGK

SEQ ID NO: 779956 - protein, 270 aa, Homo sapiens
MQPVRTVVPVTKHRGYLGVMPAYSAAEDALTTKLVTFYEDRGITSVVPSHQATVLLFEPSNGTLLAVMDGNVITAKRTAAVSAIATKFLKPPSSEVLCILGAGVQAYSHYEIFTEQFSFKEVRIWNRTKENAEKFGDTVQGEVRVCSSVQEAVAGADVIITVTLATEPILFGEWVKPGAHINAVEPADLTGEKLDDELMKEAVLYVDSQEAALKESGDVLLSEIFAELGEVIKGVKPAHCEKTTVYKSLGMAVEDTVAAKLIYDSWSSGK

SEQ ID NO: 779957 - protein, 69 aa, Homo sapiens
MGTDGRRAQSQGSPTAPRLLQIVTTTPAISGDFPENSEHGVPDSVSQSWDVIWCQPFRGHWGQHPHLRV

SEQ ID NO: 779958 - protein, 110 aa, Homo sapiens
KAQRDETAYQGCHRSYVMESGNQTQARECHHPSHLDFCYSHLILLYLISSQLPAARVNCMYNGSCPPLLRAFQQFSPHSQPSSSSHLTHKSQRLMWPTGPRGRALLLLYP

SEQ ID NO: 779959 - protein, 49 aa, Homo sapiens
ERPSVGFERKQEIEELQDASEREERGDVEEQIGSPRGHHKGSSGGEAGQ

SEQ ID NO: 779960 - protein, 98 aa, Homo sapiens
GGWLVRGYDSGPALLAATLAQASLRTAWMSGTPAVLYWPPGTLPILSGHGQSHHGQRQGWVQPRAAREDQAGLLPPPSAVRSCWVQVVPSPLFSGKLI

SEQ ID NO: 779961 - protein, 101 aa, Homo sapiens
NFWALELSEGVSKRQVCFLPAPSWNILMTVSHQSNPSPVAYQAPHWDETHATLPQASQGAIHAVPHPWLAVLWCFSPSAQLLCPHEPGAFCIKDAMISVPH

SEQ ID NO: 779962 - protein, 101 aa, Homo sapiens
YQDSCALGRRKSHRRTEGGNRPQTHRRRKRHRRTDGVNRPQTHGGRKRHRHMDGGNRPQTHGRRKHHRHTDERNTTDAGTEETPQMHGWRKRATEARTEKT

SEQ ID NO: 779963 - protein, 117 aa, Homo sapiens
LWVRGWSSCGDIQQTIGSLGLEFKSKARARTRATDLRVFGTEVIVAAEEVDEVAQSEKKNQKAKGSTFREVYISGSREEKECLEMRPVGVVRKGGEEPGEGGAAKAREKGASPESRN

SEQ ID NO: 779964 - protein, 90 aa, Homo sapiens
LCGPLRSSQPPRSRCSCGSAALPGGLRDQREAGAQGLSTGKPSALGSGGRVQQPSNPGGAEGGLVSVSSRRTPSWSCKEPAWSKLEQGRG

SEQ ID NO: 779965 - protein, 125 aa, Homo sapiens
PEKRQVKSVVEEIQKQKICGSLTLQHHMLEPVQRIPRYEMLLKDYLRKLPPDSLDWNDAKKSLEIISTAASHSNSAIRKMENLKKLLEIYEMLGEEEDIVNPSNELIKEGQILKLAARNTSAQER

SEQ ID NO: 779966 - protein, 134 aa, Homo sapiens
MTRNDGNPFVGTHEDENDSPKMPRDKQKHGHIHMRGDLAASTDTQTGAAPTLTASNGARNSTRGSPPKARKQRATDKQKKPSGLGRPARNQTNKRESRAGHKHEKHKKRGRKSTREHKLQGKHTSAGRRMKSNM

SEQ ID NO: 779967 - protein, 53 aa, Homo sapiens
YSSTLLLQSHQEVHNSVEDTLTKKQGDKPQSCVPQSAGITGVSHHGQLHKPTS

SEQ ID NO: 779968 - protein, 66 aa, Homo sapiens
GGGCRLSPGNPSTWEAEGGGSQDQEIKTILANMAETPSLLKTQNFAGRGGMRLYVPATREAERLGL

SEQ ID NO: 779969 - protein, 144 aa, Homo sapiens
MSMLGPQKRLASSVLRCGKKKVWLDPSETNEIANANSRQQIRKLIKDGLIIRKPVTVHSRARCRKNTLARRKGRHVAIGEQKGTANARMPEKVTWMRRMTILRRLLRRYRESKKIDRHTYHSLYLKVKGNVFKDKRILIEHIHS

SEQ ID NO: 779970 - protein, 144 aa, Homo sapiens; identical to SEQ ID NO: 779969

SEQ ID NO: 779971 - protein, 144 aa, Homo sapiens; identical to SEQ ID NO: 779969

SEQ ID NO: 779972 - protein, 167 aa, Homo sapiens
GGTISIIQTWKLRQSPAGRIEQAPAGWAQGRDPALSTSALRDGLSGSCLPPLPTCFPTPGPNSHLGAPHGFPSSSPRLASDPSCTKPSAFSIPSSSPSIPPLLRFPWQPHPPLCHSVLPSHLISFFPLSSLPSSQCTVQIPLCPLPLLSRSLLLSFYLLQCSLVISG

SEQ ID NO: 779973 - protein, 81 aa, Homo sapiens
RKVEAVWEEAGSGPAAGPALLPPLASRLPGVVRNPRHVLWGLWQGRGTLEPAPCALRAVPGQGNSSCPLRTTRTEGWVHPV

SEQ ID NO: 779974 - protein, 68 aa, Homo sapiens
DAGPGLQQPYQPLQLRGGSGSLRLRFLSRSVLPIPFGLCLHRRLCNPFPVGESLLRCSGVSVFWLNSD

SEQ ID NO: 779975 - protein, 101 aa, Homo sapiens
LTLIQGLSLSRSHRQDRAGTQGPQHKLQRPPRLTLPQCAHKDRTSTQFTPRLETLGVLPLISPEPPHKPCKLCEGQLGTAESPATSPCPGWDWAGGATSYC

SEQ ID NO: 779976 - protein, 131 aa, Homo sapiens
MLWKVILDSSPSESMLDSSPSVWAVFYNGDICVMGLFIYPLCTRLPTHLSIHSPIICLSIYLSIHPAIIHLFHPLFHPFTFPSIHPSSVYPSIHPSSIIHPPTHPSIHLPTQPSIHPFVHPHIHPSIHPPI

SEQ ID NO: 779977 - protein, 75 aa, Homo sapiens
KQPCQQPVPELGSRSPRRHTLSLYVDRQQSHSVLEKEPCVSHSLSFQHRHRHPNVPFTGRYSLQPSNCLQPPPPL

SEQ ID NO: 779978 - protein, 113 aa, Homo sapiens
MWIPCCSVWLIDSSTCIPRSFVEMLKLSSHPRATESEYVVCVHVKVSDAGYHPWFLVASFRKSCYLGWILHCPLPVALKIYSVTWNTEYFPGVHYCDLTLGRHKLDEGEIASR

SEQ ID NO: 779979 - protein, 148 aa, Homo sapiens
GDLPTSASQSAGILGMSHRAWPGSSSSSTQICLTLSTLWLRSSFFFLFCSAHLAYDFNHHFSEHGSGSTSLLNFRPTSLATWWRPPQNDLLLPKSRLSKLQSVSPPEAFPQAFLFLPSIPHSPTLPCQKPAGQLGFLFVLFFLYFAGA

SEQ ID NO: 779980 - protein, 74 aa, Homo sapiens
PGLQLQDTHIRKTPAPPGFYSCMTLKLKNTRCSPGLQLHEPQTRTTSAPPRVFSCLTLKLEQHQLLSKSPDHGP

SEQ ID NO: 779981 - protein, 113 aa, Homo sapiens
SYYTFSKLYTSQRLYFLKASYFSTLYTSQRFILLNALYFSTLYTSSTLYTSSKLHTSQRFILLNALYFLNALYFLNALYFLNALYFPYYHSALRSCLGWRNVFIIRTLSGSSL

SEQ ID NO: 779982 - protein, 70 aa, Homo sapiens
KKSLMPKPISIQHSSGHMIGHWMSHDLSLAGNAGMHSVFLWVWHCKEMRFGTTTTTGGQPGATGLTARSR

SEQ ID NO: 779983 - protein, 130 aa, Homo sapiens
WLAVCVSMLLLYDSVCVSGCVCVCVSLCVSPIRSSVSVPRSLCVSFPLSVGLCVCARVRVCLWPNVPCAPQSGFWHGGRSLVSLFLRLCLGHEGRLSIVFTAPDPLCVCEDLAHVRRCVGPGATEISSPS

SEQ ID NO: 779984 - protein, 113 aa, Homo sapiens
  misc_feature (46)..(46): Xaa can be any naturally occurring amino acid
AYTTKGMVAQRSPKCHSQGSVPGRPTMMIRTRPMTLRLLQCTHPRXLPGELLGYRLQYCGADEARPNTIDFGKDDQHFTVPARAHFLLFCRVPQSVLHLCVEPHVKAIFKTTN

SEQ ID NO: 779985 - protein, 102 aa, Homo sapiens
MKKRHREGCDMPGPWSTLRSHRGHHCPHLHPVLRRPTLTDVEGCLQCLDVCGHPRHAVDAHLLHASALDLLHALAHDVGHLGPLSPAGGGNVLSVLTALLGP

SEQ ID NO: 779986 - protein, 141 aa, Homo sapiens
MLCPLLSRAGMASSRKKYSSTSTCPRGVGKRRVAQRGAHSCWWEVFGAQAPKSTSGARNPCWCHEPLTVRRGWGGVLTRHDLLGGGWLFILEMHRALLCPPGWSTVAPSWITAASNSWAQAILLCQPPRYLGLQICAPMPA

SEQ ID NO: 779987 - protein, 141 aa, Homo sapiens; identical to SEQ ID NO: 779986

SEQ ID NO: 779988 - protein, 131 aa, Homo sapiens
MLLFSLSQVVRRVYKECLGSPAGAGRWGSERSCASTCSGRESPVSRPGPFLTLHVSCSPETSEPTPENSGARRLEEDQMLPGHGLSRITFQHLIRYLDLLGKKLETMYKTYKYSSIKRLFRMKVLKQVISK

SEQ ID NO: 779989 - protein, 669 aa, Homo sapiens
GAEASASEVQHHVLGHSQREATPGPSEQPLLTSGVTLPSTHCPTMAGDRLPRKVMDAKKLASLLRGGPGGPLVIDSRSFVEYNSWHVLSSVNICCSKLVKRRLQQGKVTIAELIQPAARSQVEATEPQDVVVYDQSTRDASVLAADSFLSILLSKLDGCFDSVAILTGGFATFSSCFPGLCEGKPAALLPMSLSQPCLPVPSVGLTRILPHLYLGSQKDVLNKDLMTQNGISYVLNASNSCPKPDFICESRFMRVPINDNYCEKLLPWLDKSIEFIDKAKLSSCQVIVHCLAGISRSATIAIAYIMKTMGMSSDDAYRFVKDRRPSISPNFNFLGQLLEYERTLKLLAALQGDPGTPSGTPEPPPSPAAGAPLPRLPPPTSESAATGNAAAREGGLSAGGEPPAPPTPPATSALQQGLRGLHLSSDRLQDTNRLKRSFSLDIKSAYAPSRRPDGPGPPDPGEAPKLCKLDSPSGAALGLSSPSPDSPDAAPEARPRPRRRPRPPAGSPARSPAHSLGLNFGDAARQTPRHGLSALSAPGLPGPGQPAGPGAWAPPLDSPGTPSPDGPWCFSPEGAQGAGGVLFAPFGRAGAPGPGGGSDLRRREAARAEPRDARTGWPEEPAPETQFKRRSCQMEFEEGMVEGRARGEELAALGKQASFSGSVEVIEVS

SEQ ID NO: 779990 - protein, 95 aa, Homo sapiens
LPCSLPSLRRPRALHQSHRMEEQELVCPGEVRPALHQLQAPNLGGKEGTPLPVAPELFSGRGGQALGFMVPGCSEGLRNRTVCVGASGRGFWNVR

SEQ ID NO: 779991 - protein, 107 aa, Homo sapiens
ITSEFTSNGPEGAQGAGGVLFAPFGRAGAPGPGGGSDLRRREAARAEPRDARTGWPEEPAPETQFKRRSCQMEFEEGMVEGRARGEELAALGKQASFSGSVEVIEVS

SEQ ID NO: 779992 - protein, 557 aa, Homo sapiens
MPEALNGPQVEATEPQDVVVYDQSTRDASVLAADSFLSILLSKLDGCFDSVAILTGGFATFSSCFPGLCEGKPAALLPMSLSQPCLPVPSVGLTRILPHLYLGSQKDVLNKDLMTQNGISYVLNASNSCPKPDFICESRFMRVPINDNYCEKLLPWLDKSIEFIDKAKLSSCQVIVHCLAGISRSATIAIAYIMKTMGMSSDDAYRFVKDRRPSISPNFNFLGQLLEYERTLKLLAALQGDPGTPSGTPEPPPSPAAGAPLPRLPPPTSESAATGNAAAREGGLSAGGEPPAPPTPPATSALQQGLRGLHLSSDRLQDTNRLKRSFSLDIKSAYAPSRRPDGPGPPDPGEAPKLCKLDSPSGAALGLSSPSPDSPDAAPEARPRPRRRPRPPAGSPARSPAHSLGLNFGDAARQTPRHGLSALSAPGLPGPGQPAGPGAWAPPLDSPGTPSPDGPWCFSPEGAQGAGGVLFAPFGRAGAPGPGGGSDLRRREAARAEPRDARTGWPEEPAPETQFKRRSCQMEFEEGMVEGRARGEELAALGKQASFSGSVEVIEVS

SEQ ID NO: 779993 - protein, 111 aa, Homo sapiens
MPEALNGPQVEATEPQDVVVYDQSTRDASVLAADSFLSILLSKLDGCFDSVAILTGGFATFSSCFPGLCEGKPAALLPMSLSQRSAAPQPPGLFCEWFLSRQHGSQASRDM

SEQ ID NO: 779994 - protein, 204 aa, Homo sapiens
MPQAELGIQVCTCRLRGSVSRCCSHREFRRQPSPCAAGIGLLHLGSTASRQVKPPRLPPPPWGRSGEKLPFTPFPGCSLSRWHASPQTQVAFGPRWVSLLPLPHTPSGHWDPCPSDVLGSRSGASHCGKRPGAWPERQPRAGPSPESWSRAREAPIPPRPAALSAVSSICSSFHPQLCVPVIPPFSKSPVPVPSVPTHSCSPKK

SEQ ID NO: 779995 - protein, 165 aa, Homo sapiens
MPEALNGPQVEATEPQDVVVYDQSTRDASVLAADSFLSILLSKLDGCFDSVAILTGGFATFSSCFPGLCEGKPAALLPMSLSQPCLPVPSVGLTRILPHLYLGSQKDVLNKDLMTQNGISYVLNASNSCPKPDFICESRPQGVFQVRKLLCRQPGPGWKTSLGYL

SEQ ID NO: 779996 - protein, 103 aa, Homo sapiens
CIPYSVLLKDLEMRNLRELEDLIIEAVYTDIIQGKLDQRNQLLEVDFCIGRDIRKKDINNIVKTLHEWCDGCEAVLLGIEQQVLRANQYKENHNRTQQQVEAE

SEQ ID NO: 779997 - protein, 106 aa, Homo sapiens
PVSVPQVAGTEGMSHHTRIIFVFFVETGFHPVGHGGLKLLGSSNLPSSASQSTGITGMSHCAWPFFTFIKNGGGTLQVSSPTSDLLTSASLGMAPPVPGSQIWFSV

SEQ ID NO: 779998 - protein, 179 aa, Homo sapiens
DLVHHFEKGTKLGETFDSDSSEMFLSVEAKRYKIYPLALSPIYEDDSSQEDILSSEVSPGHHGPRKSRDSENQSSSVLSLLQSVSERLKMNFDEDDREAADEEEEEEEAAVLHKGDLRAGSGERVTFQLPDPSITFYPDDQESVGISKNSYVMPNEPTTSNLQVGLWPEKTSFLQKSDL

SEQ ID NO: 779999 - protein, 60 aa, Homo sapiens
MGNSGIGKPAGGGEDSEESDEEVNEVKCQLSANMRLRQAYSLRAPGSRPLPGLPVSVSPY

SEQ ID NO: 780000 - protein, 443 aa, Homo sapiens
MLFRNRFLLLLALAALLAFVSLSLQFFHLIPVSTPKNGMSSKSRKRIMPDPVTEPPVTDPVYEALLYCNIPSVAERSMEGHAPHHFKLVSVHVFIRHGDRYPLYVIPKTKRPEIDCTLVANRKPYHPKLEAFISHMSKGSGASFESPLNSLPLYPNHPLCEMGELTQTGVVQHLQNGQLLRDIYLKKHKLLPNDWSADQLYLETTGKSRTLQSGLALLYGFLPDFDWKKIYFRHQPSALFCSGSCYCPVRNQYLEKEQRRQYLLRLKNSQLEKTYGEMAKIVDVPTKQLRAANPIDSMLCHFCHNVSFPCTRNGCVDMEHFKVIKTHQIEDERERREKKLYFGYSLLGAHPILNQTIGRMQRATEGRKEELFALYSAHDVTLSPVLSALGLSEARFPRFAARLNIPSGFFTMASMSHSTPLSAKTTTSVLPSPCARLKTWSAL

SEQ ID NO: 780001 - protein, 441 aa, Homo sapiens
SAPHEESMRYFIKSMEHSVCPSSAVHLIPVSTPKNGMSSKSRKRIMPDPVTEPPVTDPVYEALLYCNIPSVAERSMEGHAPHHFKLVSVHVFIRHGDRYPLYVIPKTKRPEIDCTLVANRKPYHPKLEAFISHMSKGSGASFESPLNSLPLYPNHPLCEMGELTQTGVVQHLQNGQLLRDIYLKKHKLLPNDWSADQLYLETTGKSRTLQSGLALLYGFLPDFDWKKIYFRHQPSALFCSGSCYCPVRNQYLEKEQRRQYLLRLKNSQLEKTYGEMAKIVDVPTKQLRAANPIDSMLCHFCHNVSFPCTRNGCVDMEHFKVIKTHQIEDERERREKKLYFGYSLLGAHPILNQTIGRMQRATEGRKEELFALYSAHDVTLSPVLSALGLSEARFPRFAARLNIPSGFFTMASMSHSTPLSAKTTTSVLPSPCARLKTWSAL

SEQ ID NO: 780002 - protein, 308 aa, Homo sapiens
MSKGSGASFESPLNSLPLYPNHPLCEMGELTQTGVVQHLQNGQLLRDIYLKKHKLLPNDWSADQLYLETTGKSRTLQSGLALLYGFLPDFDWKKIYFRHQPSALFCSGSCYCPVRNQYLEKEQRRQYLLRLKNSQLEKTYGEMAKIVDVPTKQLRAANPIDSMLCHFCHNVSFPCTRNGCVDMEHFKVIKTHQIEDERERREKKLYFGYSLLGAHPILNQTIGRMQRATEGRKEELFALYSAHDVTLSPVLSALGLSEARFPRFAARLNIPSGFFTMASMSHSTPLSAKTTTSVLPSPCARLKTWSAL

SEQ ID NO: 780003 - protein, 170 aa, Homo sapiens
MLFRNRFLLLLALAALLAFVSLSLQFFHLIPVSTPKNGMSSKSRKRIMPDPVTEPPVTDPVYEALLYCNIPSVAERSMEGHAPHHFKLVSVHVFIRHGDRYPLYVIPKTKRPEIDCTLVANRKPYHPKLEAFISHMSKGSGASFESPLNSLPLYPNHPLCEMGELTQTGA

SEQ ID NO: 780004 - protein, 405 aa, Homo sapiens
MSSKSRKRIMPDPVTEPPVTDPVYEALLYCNIPSVAERSMEGHAPHHFKLVSVHVFIRHGDRYPLYVIPKTKRPEIDCTLVANRKPYHPKLEAFISHMSKGSGASFESPLNSLPLYPNHPLCEMGELTQTGVVQHLQNGQLLRDIYLKKHKLLPNDWSADQLYLETTGKSRTLQSGLALLYGFLPDFDWKKIYFRHQPSALFCSGSCYCPVRNQYLEKEQRRQYLLRLKNSQLEKTYGEMAKIVDVPTKQLRAANPIDSMLCHFCHNVSFPCTRNGCVDMEHFKVIKTHQIEDERERREKKLYFGYSLLGAHPILNQTIGRMQRATEGRKEELFALYSAHDVTLSPVLSALGLSEARFPRFAARLNIPSGFFTMASMSHSTPLSAKTTTSVLPSPCARLKTWSAL

SEQ ID NO: 780005 - protein, 480 aa, Homo sapiens
MLFRNRFLLLLALAALLAFVSLSLQFFHLIPVSTPKNGMSSKSRKRIMPDPVTEPPVTDPVYEALLYCNIPSVAERSMEGHAPHHFKLVSVHVFIRHGDRYPLYVIPKTKRPEIDCTLVANRKPYHPKLEAFISHMSKGSGASFESPLNSLPLYPNHPLCEMGELTQTGVVQHLQNGQLLRDIYLKKHKLLPNDWSADQLYLETTGKSRTLQSGLALLYGFLPDFDWKKIYFRHQPSALFCSGSCYCPVRNQYLEKEQRRQYLLRLKNSQLEKTYGEMAKIVDVPTKQLRAANPIDSMLCHFCHNVSFPCTRNGCVDMEHFKVIKTHQIEDERERREKKLYFGYSLLGAHPILNQTIGRMQRATEGRKEELFALYSAHDVTLSPVLSALGLSEARFPRFAARLIFELWQDREKPSEHSVRILYNGVDVTFHTSFCQDHHKRSPKPMCPLENLVRFVKRDMFVALGGSGTNYYDACHREGF

SEQ ID NO: 780006 - protein, 67 aa, Homo sapiens
GKGACTQEIESSLGKTVGPPSHYLSWLWWCTTVVPATWETEVGGPPEPGKSRLQGDMIMPLHSSLGD

SEQ ID NO: 780007 - protein, 85 aa, Homo sapiens
GDAPCQETDFVSASALGVKLRTGLAPSLIVSSERIADQHTHLSAAKGVQQLLRIRRVHKAGHALAPRSELPEGRGFVVFFQLSHP

SEQ ID NO: 780008 - protein, 95 aa, Homo sapiens
CRPSRLSRGKEPHQGQHCATPNKAGNLACQWRPLFRLGSSSRARPVTSAPPSNTRLHMGTASLNCVVAGGLERCCHHCTWTHHQPLSVTCPRAFR

SEQ ID NO: 780009 - protein, 128 aa, Homo sapiens
TGATLLHQPPPPHGSLNPVTTSGAAQVGWGGGGDRERASERHSLSHQFWDRTGPGCLFLMYVKEMQTDWERTEVLSPTGYGEKVRVAYQTNSKLQTSFSSAYMHSKLHAYVRSAPARQRVSFLSISNL

SEQ ID NO: 780010 - protein, 448 aa, Homo sapiens
MDMGTQWAKGNPWHRAKRRGLPQIKKRRGGPRVFCPIPEGVFEANGVYTGGQGSRIYDRPARGTTYQKAKREKEEKEGEEKRRDKREAKGGRRENKKEEEKTSKTQDTDTRIPTSTKPGLGIAEEAHTTSKEEKKKYETTRQREEAGEERKKQEEEKKEERDSRRGREEKKAQRGETCGKSGEKEREDMRETNRRKEQQEEARGSERETEQTRAKREEIESERGREEGETIRERQTSGTERQQSQARQRHEQDDVIEPRQAGQRHMRRREERKKQRRGERLDHGQHMTEDHEGAQRYGRTRERRRRGPDRTRDEDTRWENERPGQEEDGRRRERKRTTGEVDNETTDGEKTEEETAKRKRDEEARNDEDRKRKKADRGPTGESRRARARRNDGERETTREATAREKRRADKSEKKGTDAEETDREEREQTGQEEGEQREKTTERADRS

SEQ ID NO: 780011 - protein, 102 aa, Homo sapiens
MPMLFPGACCLSPHPLPHRLYGLRPDLMHQARVSCRDPGCTPHLAQTNQTHQLLSFPISVGEPGTTQMTGLEVDSHSPLLTPLSSHPAHPARQVLSFHLLNL

SEQ ID NO: 780012 - protein, 28 aa, Homo sapiens
MRVEGLGCTVESALPGQGVGHSSHHKTP

SEQ ID NO: 780013 - protein, 136 aa, Homo sapiens
MRQAHSGSTHKRQIPTLSEGAEHTRSRREEKTHDGHHNNDLEEQKLTRRRAPQTKKKQGTAGHHRHSEYEEVAALERQNKQQRTHNQSGEEIKPHYYLAEKTPTKGSLTHTQEEDKTRTNGVGTTHKRINNVGRPP

SEQ ID NO: 780014 - protein, 107 aa, Homo sapiens
SHSSQTEISTKKVGSIVFSLMCFPFQPESRAPAPSFIVISHSDLFFLYFKHPSLLHHSAFIFAVLCLEQFCPRASITVSSSFWSKLRHDPLREAFPDHTSYCHILTE

SEQ ID NO: 780015 - protein, 53 aa, Homo sapiens
MLGASIELEMIGMAPKSGCYVLKIGDNGKPSTLVLTDFNKVQFTEIEGRKRKR

SEQ ID NO: 780016 - protein, 69 aa, Homo sapiens
MNALDGVPFKLPKGFVIGTEPLPGPELSVPACGEVLLGSMHDFSLERTALFWVEAAGQGPSPYQCGDPG

SEQ ID NO: 780017 - protein, 110 aa, Homo sapiens
  misc_feature (4)..(4): Xaa can be any naturally occurring amino acid
MVPXVTFAMHPFNVIISCCSRTLQTPGEVGVGVPREDTGAEAGVLPWAVRELVRNRVVGDKVGPGCLVVRLVTGEVGIPVTPEVSDTKPDVGTRVVREVDREVVDEGLPS

SEQ ID NO: 780018 - protein, 112 aa, Homo sapiens
MGGDWGSGKAFSLRVSGSWVSLHGLPQCPAEVPEKAGLRGRGAVCGAQSPNKPQFHGNHYTHSSRRCRGRCFLVHPTLSRDRPQIWAQDFVQGGEMQVTSPYSSIKPGLKMG

SEQ ID NO: 780019 - protein, 37 aa, Homo sapiens
IAKRPIYEGVQFSTIWEKYSRTLVQQCVSKTLIYHCS

SEQ ID NO: 780020 - protein, 115 aa, Homo sapiens
MQLDIQARYIYGKPVQGVAYVRFGLLDEDGKKTFFRGLESQTKLVNGQSHISLSKAEFQDALEKLNMGITDLQGLRLYVAAAIIESPGGETDETERWCALGGLERPRENKQRPQK

SEQ ID NO: 780021 - protein, 128 aa, Homo sapiens
MLGEPTQHTTGTGKMSSKAWLSSLKLLPRQKESSYKLHQTSLQTSLLQGAFGSQDGRGPGDREQDHLLAGVRGRRAREAGSPLLRQLQGHAGWGPCKAGNPGYWQTSPIFSLRRKESSTEQARPAPGP

SEQ ID NO: 780022 - protein, 124 aa, Homo sapiens
MTGVSCFCHYTSHPLHHLLCSYKDPKKWNHRIADLRKQTEELSERKYDHELYEFNQVKDYKLINQLCQLELKKPKVPVMIPYPLIQSHVEDFMEKAFSKNNTTGGTPAGEATSTQLATNRRSQK

SEQ ID NO: 780023 - protein, 87 aa, Homo sapiens
MEKACLILPASVRRRWHRALLGELEQQFVRWQRKNKCRYKFTIRLWPGSSQNKTEPQGPGKGPPCHPWEVRRPRRGRQDVRDSQIRV

SEQ ID NO: 780024 - protein, 71 aa, Homo sapiens
SFITSHYWFRNYNHVVFSKGKSLFKNASGSCSQVETVCASLCVCACAHARMEATVHAGLCTCVQVHETQDF

SEQ ID NO: 780025 - protein, 113 aa, Homo sapiens
MNKDSLEVRSKMESVRSDLFHCHHVLITIFASVLSKLPPGCLFNSPFTPPPKSASPSRIQATDSHPGSRLLFQMTTFLRELNERICSEWSLPISSFSWHPLPKPWHMDILGLC

SEQ ID NO: 780026 - protein, 31 aa, Homo sapiens
MCLQEGAVTVPHSDFHWVFSGWWWRQLTAAG

SEQ ID NO: 780027 - protein, 248 aa, Homo sapiens
YREADDRLRPYQGCTCHILERLHKKPLKIGALWASGIQRDIFWKLNTQEGRIEPVYADVIHTVGPIARGHINGSHKEDLANCYKSSLKLVKENNIRSVAFPCISTGIYGFPNEPAAVIALNTIKEWLAKNHHEVDRIIFCVFLEVDFKIYKKKMNEFFSVDDNNEEEEDVEMKEDSDENGPEEKQSVEEMEEQSQDADGVNTVTVPGPASEEAVEDCKDDDLKGRNYYKGGEVKIILCVTKIIAKDKR

SEQ ID NO: 780028 - protein, 130 aa, Homo sapiens
SQDWSRSMDSAHGILPSLALKRHCHTNGPRVHSPVVNIDGRVFVWAHSCFSWVNTQEYMAFEVVRVTPPPLESGVPSYRPAPGVCGSTPHGGTGVPRGALLLNPARSVPVCRHSQAEPRTLHARLQTFSG

SEQ ID NO: 780029 - protein, 558 aa, Homo sapiens
SGGCPGDAGTQRSGSRRRPSRRHDRPLGGLAGRAASPQSSRRADGGGGAMSQRQVLQVFEQYQKARTQFVQMVAELATRPQNIETLQNAGVMSLLRTLLLDVVPTIQQTAALALGRLANYNDDLAEAVVKCDILPQLVYSLAEQNRFYKKAAAFVLRAVGKHSPQLAQAIVDCGALDTLVICLEDFDPGVKEAAAWALRYIARHNAELSQAVVDAGAVPLLVLCIQEPEIALKRIAASALSDIAKHSPELAQTVVDAGAVAHLAQMILNPDAKLKHQILSALSQVSKHSVDLAEMVVEAEIFPVVLTCLKDKDEYVKKNASTLIREIAKHTPELSQLVVNAGGVAAVIDCIGSCKGNTRLPGIMMLGYVAAHSENLAMAVIISKGVPQLSVCLSEEPEDHIKAAAAWALGQIGRHTPEHARAVAVTNTLPVLLSLYMSTESSEDLQVKSKKAIKNILQKCTYLPALEPFLYDAPPNILKHVVGQFSKVLPHDSKARRLFVTSGGLKKVQEIKAEPGSLLQEYINSINSCYPEEIVRYYSPGYSDTLLQRVDSYQPLNN

SEQ ID NO: 780030 - protein, 133 aa, Homo sapiens
SGGCPGDAGTQRSGSRRRPSRRHDRPLGGLAGRAASPQSSRRADGGGGAMSQRQVLQVFEQYQKARTQFVQMVAELATRPQNIETLQNAGVMSLLRTLLLDVVPTIQQTAALALGRLAPFLTDIPSHELSLCK

SEQ ID NO: 780031 - protein, 536 aa, Homo sapiens
SGGCPGDAGTQRSGSRRRPSRRHDRPLGGLAGRAASPQSSRRADGGGGAMSQRQVLQVFEQYQKARTQFVQMVAELATRPQNIETLQNAGVMSLLRTLLLDVVPTIQQTAALALGRLANYNDDLAEAVVKCDILPQLVYSLAEQNRFYKKAAAFVLRAVGKHSPQLAQAIVDCGALDTLVICLEDFDPGVKEAAAWALRYIARHNAEIALKRIAASALSDIAKHSPELAQTVVDAGAVAHLAQMILNPDAKLKHQILSALSQVSKHSVDLAEMVVEAEIFPVVLTCLKDKDEYVKKNASTLIREIAKHTPELSQLVVNAGGVAAVIDCIGSCKGNTRLPGIMMLGYVAAHSENLAMAVIISKGVPQLSVCLSEEPEDHIKAAAAWALGQIGRHTPEHARAVAVTNTLPVLLSLYMSTESSEDLQVKSKKAIKNILQKCTYLPALEPFLYDAPPNILKHVVGQFSKVLPHDSKARRLFVTSGGLKKVQEIKAEPGSLLQEYINSINSCYPEEIVRYYSPGYSDTLLQRVDSYQPLNN

SEQ ID NO: 780032 - protein, 590 aa, Homo sapiens
SGGCPGDAGTQRSGSRRRPSRRHDRPLGGLAGRAASPQSSRRADGGGGAMSQRQVLQVFEQYQKARTQFVQMVAELATRPQNIETLQNAGVMSLLRTLLLDVVPTIQQTAALALGRLANYNDDLAEAVVKCDILPQLVYSLAEQNRFYKKAAAFVLRAVGKHSPQLAQAIVDCGALDTLVICLEDFDPGVKEAAAWALRYIARHNAELSQAVVDAGAVPLLVLCIQEPEIALKRIAASALSDIAKHSPELAQTVVDAGAVAHLAQMILNPDAKLKHQILSALSQVSKHSVDLAEMVVEAEIFPVVLTCLKDKDEYVKKNASTLIREIAKHTPELSQLVVNAGGVAAVIDCIGSCKGNTRLPGIMMLGYVAAHSENLAMAVIISKGVPQLSVCLSEEPEDHIKAAAAWALGQIGRHTPEHARAVAVTNTLPVLLSLYMSTESSEDLQVKSKKAIKNILQKCTYLPALEPFLYDAPPNILKHVVGQFSKVLPHDSKARRLFVTSGGLKKVQEIKAEPGSLLQEYINSINSCYPEEIVRWGKWTLKRSILECSFSVFTSRFYIHCVKMWTLKYDVRPICTFISLLISSPCQIN

SEQ ID NO: 780033 - protein, 106 aa, Homo sapiens
SGGCPGDAGTQRSGSRRRPSRRHDRPLGGLAGRAASPQSSRRADGGGGAMSQRQVLQVFEQYQKARTQFVQMVAELATRPQNIETLQNAGCTPVVSLLVRRTGRSY

SEQ ID NO: 780034 - protein, 492 aa, Homo sapiens
SGGCPGDAGTQRSGSRRRPSRRHDRPLGGLAGRAASPQSSRRADGGGGAMSQRQVLQVFEQYQKARTQFVQMVAELATRPQNIETLQNAGVMSLLRTLLLDVVPTIQQTAALALGRLANYNDDLAEAVVKCDILPQLVYSLAEQNRFYKKAAAFVLRAVGKHSPQLAQAIVDCGALDTLVICLEDFDPGVKEAAAWALRYIARHNAELSQAVVDAGAVPLLVLCIQEPEIALKRIAASALSDIAKHSPELAQTVVDAGAVAHLAQMILNPDAKLKHQILSALSQVSKHSVDLAEMVVEAEIFPVVLTCLKDKDEYVKKNASTLIREIAKHTPELSQLVVNAGGVAAVIDCIGSCKGNTRLPGIMMLGYVAAHSENLAMAVIISKGVPQLSVCLSEEPEDHIKAAAAWALGQIGRHTPEHARAVAVTNTLPVLLSLYMSTESSEDLQVKSKKAIKNILQKCTYLPALEPFLYDAPPNILKHVVGQFSKNKWRN

SEQ ID NO: 780035 - protein, 468 aa, Homo sapiens
SGGCPGDAGTQRSGSRRRPSRRHDRPLGGLAGRAASPQSSRRADGGGGAMSQRQVLQVFEQYQKARTQFVQMVAELATRPQNIETLQNAGVMSLLRTLLLDVVPTIQQTAALALGRLANYNDDLAEAVVKCDILPQLVYSLAEQNRFYKKAAAFVLRAVGKHSPQLAQAIVDCGALDTLVICLEDFDPGVKEAAAWALRYIARHNAELSQAVVDAGAVPLLVLCIQEPEIALKRIAASALSDIAKHSPELAQTVVDAGAVAHLAQMILNPDAKLKLGYVAAHSENLAMAVIISKGVPQLSVCLSEEPEDHIKAAAAWALGQIGRHTPEHARAVAVTNTLPVLLSLYMSTESSEDLQVKSKKAIKNILQKCTYLPALEPFLYDAPPNILKHVVGQFSKVLPHDSKARRLFVTSGGLKKVQEIKAEPGSLLQEYINSINSCYPEEIVRYYSPGYSDTLLQRVDSYQPLNN

SEQ ID NO: 780036 - protein, 634 aa, Homo sapiens
SGGCPGDAGTQRSGSRRRPSRRHDRPLGGLAGRAASPQSSRRADGGGGAMSQRQVLQVFEQYQKARTQFVQMVAELATRPQNIETLQNAGEPGARTPVAPRALSPRRLRPAALPVELLGSRSVGTGVRKSIHSFQRVFGGQAERVKLPDGCGRCALSLFPSSLHTGVMSLLRTLLLDVVPTIQQTAALALGRLANYNDDLAEAVVKCDILPQLVYSLAEQNRFYKKAAAFVLRAVGKHSPQLAQAIVDCGALDTLVICLEDFDPGVKEAAAWALRYIARHNAELSQAVVDAGAVPLLVLCIQEPEIALKRIAASALSDIAKHSPELAQTVVDAGAVAHLAQMILNPDAKLKHQILSALSQVSKHSVDLAEMVVEAEIFPVVLTCLKDKDEYVKKNASTLIREIAKHTPELSQLVVNAGGVAAVIDCIGSCKGNTRLPGIMMLGYVAAHSENLAMAVIISKGVPQLSVCLSEEPEDHIKAAAAWALGQIGRHTPEHARAVAVTNTLPVLLSLYMSTESSEDLQVKSKKAIKNILQKCTYLPALEPFLYDAPPNILKHVVGQFSKVLPHDSKARRLFVTSGGLKKVQEIKAEPGSLLQEYINSINSCYPEEIVRYYSPGYSDTLLQRVDSYQPLNN

SEQ ID NO: 780037 - protein, 319 aa, Homo sapiens
SGGCPGDAGTQRSGSRRRPSRRHDRPLGGLAGRAASPQSSRRADGGGGAMSQRQVLQVFEQYQKARTQFVQMVAELATRPQNIETLQNAGVMSLLRTLLLDVVPTIQQTAALALGRLANYNDDLAEAVVKCDILPQLVYSLAEQNGVPQLSVCLSEEPEDHIKAAAAWALGQIGRHTPEHARAVAVTNTLPVLLSLYMSTESSEDLQVKSKKAIKNILQKCTYLPALEPFLYDAPPNILKHVVGQFSKVLPHDSKARRLFVTSGGLKKVQEIKAEPGSLLQEYINSINSCYPEEIVRYYSPGYSDTLLQRVDSYQPLNN

SEQ ID NO: 780038 - protein, 106 aa, Homo sapiens; identical to SEQ ID NO: 780033

SEQ ID NO: 780039 - protein, 117 aa, Homo sapiens
SFLLQTLIQTTAHWSGQGGRAEIGKPMFQPRFCHNLCGNLPCAGPQRPLCTLSGPTSCPPDPFQLSNLTGSGLTAEWKIPSDFGLLCLFGVWLHRQEPVEDVAFHGSFNQRLTSILS

SEQ ID NO: 780040 - protein, 152 aa, Homo sapiens
GVGVIGFHKTSEKSVQSFQLKGFPFSIYGNLAVKDCCINPHSPLIRVTKSSKLEKGSLPGTDWTVFQINHSAYQPVIFAKVKTPENLSPSISKGAFYATIIHDLGLHDGIQRVLFGNNLNFWLHKLIFIDAISFLSGEEADIVLGQVHSCGY

SEQ ID NO: 780041 - protein, 145 aa, Homo sapiens
GQISGCWAVMALLDVCGAPRGQRPESALPVAGSGRRSDPGHYSFSMRSPELALPRGMQPTEFFQSLGGDGERNVQIEMAHGTTTLAFKFQHGVIAAVDSRASAGSYISALRVNKVIEINPYLLGTMSGCAADCQYWERLLAKECR

SEQ ID NO: 780042 - protein, 84 aa, Homo sapiens
PTTKPWQAVDAGTANSLSIPVSEETCFEGCTTWICFYSGVCHYEDSTMGRHQVRDPDKARTASSSAHSSAPFPAMPNTKPSPEG

SEQ ID NO: 780043 - protein, 489 aa, Homo sapiens
MLFPTSAQESSRGLPDANDLCLGLQSLSLTGWDRPWSTQDSDSSAQSSTHSVLSMLHNPLGNVLGKPPLSFLPLDPLGSDLVDKFPAPSVRGSRLDTRPILDSRSSSPSDSDTSGFSSGSDHLSDLISSLRISPPLPFLSLSGGGPRDPLKMGVGSRMDQEQAALAAVTPSPTSASKRWPGASVWPSWDLLEAPKDPFSIEREARLHRQAAAVNEATCTWSGQLPPRNYKNPIYSCKVFLGGVPWDITEAGLVNTFRVFGSLSVEWPGKDGKHPRCPPKGNMRYVYLVFELEKSVRSLLQACSHDPLSPDGLSEYYFKMSSRRMRCKEVQVIPWVLADSNFVRSPSQRLDPSRTVFVGALHGMLNAEALAAILNDLFGGVVYAGIDTDKHKYPIGSGRVTFNNQRSYLKAVSAAFVEIKTTKFTKKVQIDPYLEDSLCHICSSQPGPFFCRDQVCFKYFCRSCWHWRHSMEGLRHHSPLMRNQKNRDSS

SEQ ID NO: 780044 - protein, 206 aa, Homo sapiens
MLFPTSAQESSRGLPDANDLCLGLQSLSLTGWDRPWSTQDSDSSAQSSTHSVLSMLHNPLGNVLGKPPLSFLPLDPLGSDLVDKFPAPSVRGSRLDTRPILDSRSSSPSDSDTSGFSSGSDHLSDLISSLRISPPLPFLSLSGGGARDPSRWGEGSRIGSGARAGCSACSHSLPNQCFKEMARSFCVAILGTPRSSQRPLSSIERE

SEQ ID NO: 780045 - protein, 579 aa, Homo sapiens
MGGRLAGLRARETRRAGGIEEEEAGRIKDCWDNQEAPALSTCSNANIFRRINAILDNSLDFSRVCTTPINRGIHDHLPDFQDSEETVTSRMLFPTSAQESSRGLPDANDLCLGLQSLSLTGWDRPWSTQDSDSSAQSSTHSVLSMLHNPLGNVLGKPPLSFLPLDPLGSDLVDKFPAPSVRGSRLDTRPILDSRSSSPSDSDTSGFSSGSDHLSDLISSLRISPPLPFLSLSGGGPRDPLKMGVGSRMDQEQAALAAVTPSPTSASKRWPGASVWPSWDLLEAPKDPFSIEREARLHRQAAAVNEATCTWSGQLPPRNYKNPIYSCKVFLGGVPWDITEAGLVNTFRVFGSLSVEWPGKDGKHPRCPPKGNMRYVYLVFELEKSVRSLLQACSHDPLSPDGLSEYYFKMSSRRMRCKEVQVIPWVLADSNFVRSPSQRLDPSRTVFVGALHGMLNAEALAAILNDLFGGVVYAGIDTDKHKYPIGSGRVTFNNQRSYLKAVSAAFVEIKTTKFTKKVQIDPYLEDSLCHICSSQPGPFFCRDQVCFKYFCRSCWHWRHSMEGLRHHSPLMRNQKNRDSS

SEQ ID NO: 780046 - protein, 624 aa, Homo sapiens
MSWKSSLPTFFCHIYSFFHDFLYWLCGKSVKSCTTSGNSFFKQEFIILGMMAFMDFSVTMMALSLEEEAGRIKDCWDNQEAPALSTCSNANIFRRINAILDNSLDFSRVCTTPINRGIHDHLPDFQDSEETVTSRMLFPTSAQESSRGLPDANDLCLGLQSLSLTGWDRPWSTQDSDSSAQSSTHSVLSMLHNPLGNVLGKPPLSFLPLDPLGSDLVDKFPAPSVRGSRLDTRPILDSRSSSPSDSDTSGFSSGSDHLSDLISSLRISPPLPFLSLSGGGPRDPLKMGVGSRMDQEQAALAAVTPSPTSASKRWPGASVWPSWDLLEAPKDPFSIEREARLHRQAAAVNEATCTWSGQLPPRNYKNPIYSCKVFLGGVPWDITEAGLVNTFRVFGSLSVEWPGKDGKHPRCPPKGNMGYVYLVFELEKSVRSLLQACSHDPLSPDGLSEYYFKMSSRRMRCKEVQVIPWVLADSNFVRSPSQRLDPSRTVFVGALHGMLNAEALAAILNDLFGGVVYAGIDTDKHKYPIGSGRVTFNNQRSYLKAVSAAFVEIKTTKFTKKVQIDPYLEDSLCHICSSQPGPFFCRDQVCFKYFCRSCWHWRHSMEGLRHHSPLMRNQKNRDSS

SEQ ID NO: 780047 - protein, 33 aa, Homo sapiens
STSVCFWEGLGKLTIMVKEKQASHMVEAETRKM

SEQ ID NO: 780048 - protein, 873 aa, Homo sapiens
MSFIMKLHRHFQRTVILLATFCMVSIIISAYYLYSGYKQENELSETASEVDCGDLQHLPYQLMEVKAMKLFDASRTDPTVLVFVESQYSSLGQDIIMILESSRFQYHIEIAPGKGDLPVLIDKMKGKYILIIYENILKYINMDSWNRSLLDKYCVEYGVGVIGFHKTSEKSVQSFQLKGFPFSIYGNLAVKDCCINPHSPLIRVTKSSKLEKGSLPGTDWTVFQINHSAYQPVIFAKVKTPENLSPSISKGAFYATIIHDLGLHDGIQRVLFGNNLNFWLHKLIFIDAISFLSGKRLTLSLDRYILVDIDDIFVGKEGTRMNTNDVKALLDTQNLLRAQITNFTFNLGFSGKFYHTGTEEEDEGDDCLLGSVDEFWWFPHMWSHMQPHLFHNESSLVEQMILNKKFALEHGIPTDMGYAVAPHHSGVYPVHVQLYEAWKKVWNIKITSTEEYPHLKPARYRRGFIHKNIMVLPRQTCGLFTHTIFYKEYPGGPKELDKSIQGGELFFTVVLNPISIFMTHLSNYGNDRLGLYTFVNLANFVKSWTNLRLQTLPPVQLAHKYFELFPDQKDPLWQNPCDDKRHRDIWSKEKTCDRLPKFLVIGPQKTGTTALYLFLVMHPSILSNSPSPKTFEEVQFFNRNNYHRGIDWYMDFFPVPSNVTTDFLFEKSANYFHSEEAPKRAASLVPKAKIITILIDPSDRAYSWYQHQRSHEDPAALKFSFYEVISAGPRAPSELRALQKRCLVPGWYASHIERWLVYFPPFQLLIIDGQQLRTDPATVMDEVQKFLGVLPHYNYSEALTFDSHKGFWCQLLEEGKTKCLGKSKGRKYPPMDSDSRTFLSSYYRDHNVELSKLLHKLGQPLPSWLRQELQKVR

SEQ ID NO: 780049 - protein, 95 aa, Homo sapiens
KVQEMGSRPSRRKVSLQSPGLYSENKGCANEVLTGEFLLPRNLPAWPAGTLTLHQAEPAVAQPGSTEDVRGHPLYWEEGWSHQLQRGPASAGGWF

SEQ ID NO: 780050 - protein, 67 aa, Homo sapiens
CKIKELNKDSGFQTGFRGTLGFQEDMMVRRARQKGKKTIVNEQDPHFYPDCSFLLCFVYHASTQYYT

SEQ ID NO: 780051 - protein, 58 aa, Homo sapiens
KWQLAKTRTNAQRVEMDVWIESWQTAGQTVSPGSLLRGHTAKPTCISESLRTETQPPP

SEQ ID NO: 780052 - protein, 46 aa, Homo sapiens
MCTQKTEECYSRTELLKPGAILPNPWLRSLRLETWALSTGSQSSSF

SEQ ID NO: 780053 - protein, 1136 aa, Homo sapiens
TGGENPLLFFLSLFFFLRRNLTLSPRLEGSGEISAHCNLHLPGSSNSPASAFRVAGITGARHHAQLIFVFLVETGFYHVGHAGLKLLTSCDPPASASQTAGIIGMSHCAWPTIPFKGRWCLQHQGHTAATPLQVPGLPDNHDQLVPDNLEAWALAGPRGLFPKRTLVIWKRIGAGLVVTVALLPRMDGRWQCSCWAWFLLVLAVVAGDTVSTGSTDNSPTSNSLEGGTDATAFWWGEWTKWTACSRSCGGGVTSQERHCLQQRRKSVPGPGNRTCTGTSKRYQLCRVQECPPDGRSFREEQCVSFNSHVYNGRTHQWKPLYPDDYVHISSKPCDLHCTTVDGQRQLMVPARDGTSCKLTDLRGVCVSGKCEPIGCDGVLFSTHTLDKCGICQGDGSSCTHVTGNYRKGNAHLGYSLVTHIPAGARDIQIVERKKSADVLALADEAGYYFFNGNYKVDSPKNFNIAGTVVKYRRPMDVYETGIEYIVAQGPTNQGLNVMVWNQNGKSPSITFEYTLLQPPHESRPQPIYYGFSESAESQGLDGAGLMGFIPHNGSLYGQASSERLGLDNRLFGHPGLDMELGPSQGQETNEVCEQAGGGACEGPPRGKGFRDRNVTGTPLTGDKDDEEVDTHFASQEFFSANAISDQLLGAGSDLKDFTLNETVNSIFAQGAPRSSLAESFFVDYEENEGAGPYLLNGSYLELSSDRVANSSSEAPFPNVSTSLLTSAGNRTHKARTRPKARKQGVSPADMYRWKLSSHEPCSATCTTGVMSAYAMCVRYDGVEVDDSYCDALTRPEPVHEFCAGRECQPRWETSSWSECSRTCGEGYQFRVVRCWKMLSPGFDSSVYSDLCEAAEAVRPEERKTCRNPACGPQWEMSEWSECTAKCGERSVVTRDIRCSEDEKLCDPNTRPVGEKNCTGPPCDRQWTVSDWGPCSGSCGQGRTIRHVYCKTSDGRVVPESQCQMETKPLAIHPCGDKNCPAHWLAQDWERCNTTCGRGVKKRLVLCMELANGKPQTRSGPECGLAKKPPEESTCFERPCFKWYTSPWSECTKTCGVGVRMRDVKCYQGTDIVRGCDPLVKPVGRQACDLQPCPTEPPDDSCQDQPGTNCALAIKVNLCGHWYYSKACCRSCRPPHS

SEQ ID NO: 780054 - protein, 1091 aa, Homo sapiens
SVPPRLPDSYKGGRRRRAATGLRPPGNPLSWMLFEVGEGGGAGEEGKGRGRPGRSLCTHAAPARTAHLAPSALRSARPFLWEDNLLTRSQGLPDNHDQLVPDNLEAWALAGPRGLFPKRTLVIWKRIGAGLVVTVALLPRMDGRWQCSCWAWFLLVLAVVAGDTVSTGSTDNSPTSNSLEGGTDATAFWWGEWTKWTACSRSCGGGVTSQERHCLQQRRKSVPGPGNRTCTGTSKRYQLCRVQECPPDGRSFREEQCVSFNSHVYNGRTHQWKPLYPDDYVHISSKPCDLHCTTVDGQRQLMVPARDGTSCKLTDLRGVCVSGKCEPIGCDGVLFSTHTLDKCGICQGDGSSCTHVTGNYRKGNAHLGYSLVTHIPAGARDIQIVERKKSADVLALADEAGYYFFNGNYKVDSPKNFNIAGTVVKYRRPMDVYETGIEYIVAQGPTNQGLNVMVWNQNGKSPSITFEYTLLQPPHESRPQPIYYGFSESAESQGLDGAGLMGFIPHNGSLYGQASSERLGLDNRLFGHPGLDMELGPSQGQETNEVCEQAGGGACEGPPRGKGFRDRNVTGTPLTGDKDDEEVDTHFASQEFFSANAISDQLLGAGSDLKDFTLNETVNSIFAQGAPRSSLAESFFVDYEENEGAGPYLLNGSYLELSSDRVANSSSEAPFPNVSTSLLTSAGNRTHKARTRPKARKQGVSPADMYRWKLSSHEPCSATCTTGVMSAYAMCVRYDGVEVDDSYCDALTRPEPVHEFCAGRECQPRWETSSWSECSRTCGEGYQFRVVRCWKMLSPGFDSSVYSDLCEAAEAVRPEERKTCRNPACGPQWEMSEWSECTAKCGERSVVTRDIRCSEDEKLCDPNTRPVGEKNCTGPPCDRQWTVSDWGPCSGSCGQGRTIRHVYCKTSDGRVVPESQCQMETKPLAIHPCGDKNCPAHWLAQDWERCNTTCGRGVKKRLVLCMELANGKPQTRSGPECGLAKKPPEESTCFERPCFKWYTSPWSECTKTCGVGVRMRDVKCYQGTDIVRGCDPLVKPVGRQACDLQPCPTEPPDDSCQDQPGTNCALAIKVNLCGHWYYSKACCRSCRPPHS

SEQ ID NO: 780055 - protein, 173 aa, Homo sapiens
METKPLAIHPCGDKNCPAHWLAQDWERCNTTCGRGVKKRLVLCMELANGKPQTRSGPECGLAKKPPEESTCFERPCFKWYTSPWSECTKTCGVGVRMRDVKCYQGTDIVRGCDPLVKPVGRQACDLQPCPTEPPDDSCQDQPGTNCALAIKVNLCGHWYYSKACCRSCRPPHS

SEQ ID NO: 780056 - protein, 1091 aa, Homo sapiens; identical to SEQ ID NO: 780054

SEQ ID NO: 780057 - protein, 97 aa, Homo sapiens
KKTRNAHHPGAEKLMSSSLAHQNYQIKKQNKMCACTRFRPWTHRHFQKFSWNPIQIPKMQNFPETSLEFNSCPNPKLQNFPEISRGSTGERKLRPHI

SEQ ID NO: 780058 - protein, 65 aa, Homo sapiens
GAEEYGKPGGKKVVLEPEEPAQARAEGVRGHDGEEEWHFYVIMPDSTERVLCRARPTSSPGKLTM

SEQ ID NO: 780059 - protein, 120 aa, Homo sapiens
RQNRLGITTAGHYPATPDLGQGNSREGRPQGLPSPEVESTGHSQWWGEPGCPQRNGRIQTTTEQKAGGLGVGQGGGAPGSYSQPSAGLGGKFTAPEHSQMGFSPPPKECKPGKGGEIPLG

SEQ ID NO: 780060 - protein, 103 aa, Homo sapiens
EFTSDCELRSHPLQSHQSTLLLKYPQVHSSHFTVTAHECNEGLLPSNLAGPCLALKGTSKQGPFNDPWQRAAKALQCPQSPESGPNPLHLPPSSPHIWHNTLY

SEQ ID NO: 780061 - protein, 109 aa, Homo sapiens
AGKRECQEREGGACLMVHKRCLRWSCSASLSSWGCWGQTGLLRRCEEVSCPRLHPFPHLGRKALCLCRLFRLLRPFSFSVVFLYHRLYPCENTRPGITSWVTCPDLLPL

SEQ ID NO: 780062 - protein, 395 aa, Homo sapiens
WDARGCEPAGHAPRAGSLLAAMKRQNVRTLSLIVCTFTYLLVGAAVFDALESDHEMREEEKLKAEEIRIKGKYNISSEDYRQLELVILQSEPHRAGVQWKFAGSFYFAITVITTIGYGHAAPGTDAGKAFCMFYAVLGIPLTLVMFQSLGERMNTFVRYLLKRIKKCCGMRNTDVSMENMVTVGFFSCMGTLCIGAAAFSQCEEWSFFHAYYYCFITLTTIGFGDYVALQTKGALQKKPLYVAFSFMYILVGLTVIGAFLNLVVLRFLTMNSEDERRDAEERASLAGNRNSMVIHIPEEPRPSRPRYKADVPDLQSVCSCTCYRSQDYGGRSVAPQNSFSAKLAPHYFHSISYKIEEISPSTLKNSLFPSPISSISPGLHSFTDHQRLMKRRKSV

SEQ ID NO: 780063 - protein, 395 aa, Homo sapiens; identical to SEQ ID NO: 780062

SEQ ID NO: 780064 - protein, 107 aa, Homo sapiens
LLNQQTEKQIVLWLLLPPEGSYLITLAACSSSLRPYRDDTTSHIPFYSPHGTFHHLNAPFLYLCIPFRSGFPLYALPLKCKFLGSRRSIDPTSVQHPPVPTTLPGTQ

SEQ ID NO: 780065 - protein, 146 aa, Homo sapiens
WSLRVGPVNVLSAVYASWSKHAETVPEMSTLAFHSRGRPLGEASNEKCRVSRLLSLRPSGVSFSYLSLGFLICSTGHSSACFAGLSKKTIEPTERASPTERASPHRESVTPQRERHPTERASPHRESVTPQRERHIPHRESVGYRA

SEQ ID NO: 780066 - protein, 101 aa, Homo sapiens
LLLSLPLIAQTVERLQSVIWLGGGSDRASQKMFFLSWKSDTLRNKVLCDRPLTKEESRGLHDDSEAYGQVPPHTRRPVCTIVRQVENFCAYVFPISKRVWH

SEQ ID NO: 780067 - protein, 114 aa, Homo sapiens
WPLSLSEPPFPGLLYEHVDLAPRYPCHDTFSSSSLGQPSHMAFDCFSHYGIWGAVGAQLNLVGEAQECTTEWLSRAFPLPASCLCSPLCQECGPHSSLLVEILVLEALRKCCLP

SEQ ID NO: 780068 - protein, 111 aa, Homo sapiens
LRYRPPVIYICFNANIGKHWAFLKPFCFVLFEAPLPPVMSLSLVLRAGSPDRRPKSLQNERLPPLKEEGVVLLFCFVLFFRPFSFNGPAALCVALFPVNNCLTVLPGGLRL

SEQ ID NO: 780069 - protein, 104 aa, Homo sapiens
  misc_feature (15)..(15): Xaa can be any naturally occurring amino acid
  misc_feature (20)..(20): Xaa can be any naturally occurring amino acid
AVHSPDRLLVRLIRXLRNLXRAKFGTGSPEFVDELCVRARSTLATWPTMDIDKDLEAPLYLTPEGWSLFLQRYYQVVHEGAELRHLDTQVQRCEDIRALLQILT

SEQ ID NO: 780070 - protein, 110 aa, Homo sapiens
MVRPGLNRPRWSAFPAQNARRSHKKPSLLQSRSCRSPRLRQGLEQNLTVMNQYQSLKNRIPPRQPHNKPSWRQQLKIDEEPVSKAKQSRSETEGTEGYVQTGSSAGYRSY

SEQ ID NO: 780071 - protein, 110 aa, Homo sapiens; identical to SEQ ID NO: 780070

SEQ ID NO: 780072 - protein, 120 aa, Homo sapiens
  misc_feature (22)..(22): Xaa can be any naturally occurring amino acid
NLEINPLTYREQKLEPPHPVAXRLLEPSEIPPGLQEFRHEPKIEDLSPASTTSSLLRNSKFKVKLSQTFKKTHRLQLYKRRVKQEEVDETRCRTLRTIELVMSQANVSRAKAVRALKEQQ

SEQ ID NO: 780073 - protein, 122 aa, Homo sapiens
MAKYVKILYDFTARNANELSVLKDEVLEVLEDGRQWWKLRSRSGQAGYVPCNILGEELRGELLTQGRAAELRGELQNSGASCWRQQLKIDEEPVSKAKQSRSETEGTEGYVQTGSSAGYRSY

SEQ ID NO: 780074 - protein, 80 aa, Homo sapiens
VRRRLSARLRQGLEQNLTVMNQYQSLKNRIPPRQPHNKPSWRQQLKIDEEPVSKAKQSRSETEGTEGYVQTGSSAGYRSY

SEQ ID NO: 780075 - protein, 94 aa, Homo sapiens
HKNIGQVRGWVALSAAILVPRSLHSLLFIPFLQKCPAKPQETVPATEQELPQPQAETGSGTESDSDESVPELEEQDSTQATTQQAQLAAAAENR

SEQ ID NO: 780076 - protein, 114 aa, Homo sapiens
HKNIGQVRGWVALSAAILVPRSLHSLLFIPFLQKCPAKPQETVPATEQELPQPQAETVAAFPLESADPAGVAPTTAKGSGTESDSDESVPELEEQDSTQATTQQAQLAAAAENR

SEQ ID NO: 780077 - protein, 118 aa, Homo sapiens
TQKYRSGTRLGGAFCRHLGSAFPAQNARRSHKKPSLLQSRSCRSPRLRQGLEQNLTVMNQYQSLKNRIPPRQPHNKPSWRQQLKIDEEPVSKAKQSRSETEGTEGYVQTGSSAGYRSY

SEQ ID NO: 780078 - protein, 118 aa, Homo sapiens; identical to SEQ ID NO: 780077

SEQ ID NO: 780079 - protein, 118 aa, Homo sapiens; identical to SEQ ID NO: 780077

SEQ ID NO: 780080 - protein, 118 aa, Homo sapiens; identical to SEQ ID NO: 780077

SEQ ID NO: 780081 - protein, 118 aa, Homo sapiens; identical to SEQ ID NO: 780077

SEQ ID NO: 780082 - protein, 94 aa, Homo sapiens; identical to SEQ ID NO: 780075

SEQ ID NO: 780083 - protein, 94 aa, Homo sapiens; identical to SEQ ID NO: 780075

SEQ ID NO: 780084 - protein, 94 aa, Homo sapiens; identical to SEQ ID NO: 780075

SEQ ID NO: 780085 - protein, 94 aa, Homo sapiens; identical to SEQ ID NO: 780075

SEQ ID NO: 780086 - protein, 94 aa, Homo sapiens; identical to SEQ ID NO: 780075

SEQ ID NO: 780087 - protein, 94 aa, Homo sapiens; identical to SEQ ID NO: 780075

SEQ ID NO: 780088 - protein, 94 aa, Homo sapiens; identical to SEQ ID NO: 780075

SEQ ID NO: 780089 - protein, 94 aa, Homo sapiens; identical to SEQ ID NO: 780075

SEQ ID NO: 780090 - protein, 94 aa, Homo sapiens; identical to SEQ ID NO: 780075

SEQ ID NO: 780091 - protein, 94 aa, Homo sapiens; identical to SEQ ID NO: 780075

SEQ ID NO: 780092 - protein, 94 aa, Homo sapiens; identical to SEQ ID NO: 780075

SEQ ID NO: 780093 - protein, 94 aa, Homo sapiens; identical to SEQ ID NO: 780075

SEQ ID NO: 780094 - protein, 129 aa, Homo sapiens
MGLPAAWASSIIWIKGQARLRRLTGSSTKGTDSRSSTIADDTSSDKAFNMARARGIILRLNDARLLGDLTQQAKQLVTQIIQKQQIRSNATAQPNRHLTSPRASLVDKSTLADPVVNGLKRAAQAVSMI

SEQ ID NO: 780095 - protein, 94 aa, Homo sapiens; identical to SEQ ID NO: 780075

SEQ ID NO: 780096 - protein, 94 aa, Homo sapiens; identical to SEQ ID NO: 780075

SEQ ID NO: 780097 - protein, 94 aa, Homo sapiens; identical to SEQ ID NO: 780075

SEQ ID NO: 780098 - protein, 94 aa, Homo sapiens; identical to SEQ ID NO: 780075

SEQ ID NO: 780099 - protein, 94 aa, Homo sapiens; identical to SEQ ID NO: 780075

SEQ ID NO: 780100 - protein, 94 aa, Homo sapiens; identical to SEQ ID NO: 780075

SEQ ID NO: 780101 - protein, 94 aa, Homo sapiens; identical to SEQ ID NO: 780075

SEQ ID NO: 780102 - protein, 118 aa, Homo sapiens; identical to SEQ ID NO: 780077

SEQ ID NO: 780103 - protein, 94 aa, Homo sapiens; identical to SEQ ID NO: 780075

SEQ ID NO: 780104 - protein, 144 aa, Homo sapiens
TQKYRSGTRLGGAFCRHLGSAFPAQNARRSHKKPSLLQSRSCRSPRLRQGLEQNLTVMNQYQSLKNRIPPRQPHNKPSWRQQLKIDEEPVSKAKQSRSETEGTEEKKKKKKKKKQKTKKNWGAARPPHKSFSRTQLCVGDRGPQ

SEQ ID NO: 780105 - protein, 118 aa, Homo sapiens; identical to SEQ ID NO: 780077

SEQ ID NO: 780106 - protein, 107 aa, Homo sapiens
SSRSRAAARDLELANARRSHKKPSLLQSRSCRSPRLRQGLEQNLTVMNQYQSLKNRIPPRQPHNKPSWRQQLKIDEEPVSKAKQSRSETEGTEGYVQTGSSAGYRSY

SEQ ID NO: 780107 - protein, 82 aa, Homo sapiens
GAVKRIPVNFYTKQIGVKRRHGRLCPNWVFGRLQELLESLSGNLRISSCVITKPDVYKSPASDTYIVFGEAQDRRFIPSKHN

SEQ ID NO: 780108 - protein, 82 aa, Homo sapiens
IRGRVRPAAQKTTEGSLLRNSKFKVKLSQTFKKTHRLQLYKRRVKQEEVDETRCRTLRTIELVMSQANVSRAKAVRALKEQQ

SEQ ID NO: 780109 - protein, 67 aa, Homo sapiens
YASRGWVQSAEGLKNRIPPRQPHNKPSWRQQLKIDEEPVSKAKQSRSETEGTEGYVQTGSSAGYRSY

SEQ ID NO: 780110 - protein, 94 aa, Homo sapiens; identical to SEQ ID NO: 780075

SEQ ID NO: 780111 - protein, 94 aa, Homo sapiens; identical to SEQ ID NO: 780075

SEQ ID NO: 780112 - protein, 118 aa, Homo sapiens; identical to SEQ ID NO: 780077

SEQ ID NO: 780113 - protein, 94 aa, Homo sapiens; identical to SEQ ID NO: 780075

SEQ ID NO: 780114 - protein, 94 aa, Homo sapiens; identical to SEQ ID NO: 780075

SEQ ID NO: 780115 - protein, 94 aa, Homo sapiens; identical to SEQ ID NO: 780075

SEQ ID NO: 780116 - protein, 94 aa, Homo sapiens; identical to SEQ ID NO: 780075

SEQ ID NO: 780117 - protein, 94 aa, Homo sapiens; identical to SEQ ID NO: 780075

SEQ ID NO: 780118 - protein, 94 aa, Homo sapiens; identical to SEQ ID NO: 780075

SEQ ID NO: 780119 - protein, 94 aa, Homo sapiens; identical to SEQ ID NO: 780075

SEQ ID NO: 780120 - protein, 94 aa, Homo sapiens; identical to SEQ ID NO: 780075

SEQ ID NO: 780121 - protein, 94 aa, Homo sapiens; identical to SEQ ID NO: 780075

SEQ ID NO: 780122 - protein, 94 aa, Homo sapiens; identical to SEQ ID NO: 780075

SEQ ID NO: 780123 - protein, 94 aa, Homo sapiens; identical to SEQ ID NO: 780075

SEQ ID NO: 780124 - protein, 116 aa, Homo sapiens
MKTGFTFAGAARITPGVQKGRINGNKLGALDPKVPATFNKFEREKSVRTLCTKTFHHISEENTVNTNAHQEEDIRENTRVSRRSKKGPKNHTEGKTRCEKKAKREGEEKESRGDYI

SEQ ID NO: 780125 - protein, 94 aa, Homo sapiens; identical to SEQ ID NO: 780075

SEQ ID NO: 780126 - protein, 94 aa, Homo sapiens; identical to SEQ ID NO: 780075

SEQ ID NO: 780127 - protein, 94 aa, Homo sapiens; identical to SEQ ID NO: 780075

SEQ ID NO: 780128 - protein, 94 aa, Homo sapiens; identical to SEQ ID NO: 780075

SEQ ID NO: 780129 - protein, 118 aa, Homo sapiens; identical to SEQ ID NO: 780077

SEQ ID NO: 780130 - protein, 90 aa, Homo sapiens
TQKYRSGTRLGGAFCRHLGSAFPAQNARRSHKKPSLLQSRSCRSPRLRQGLEQNLTVMNQYQSLKNRIPPRQPHNKPSWRQQLKIDEEQQ

SEQ ID NO: 780131 - protein, 129 aa, Homo sapiens
DSFMQGCRYLESAIPRFLPAQKFSLVFKFHVFFLETESDSIPQAGVQWNDLGSPQPLPPGFKQFSCLSLPSSWDYRYLPPHWANFCIFSRDGVSPCVGQDGLELLTSGDPPTSASESAGITGVSHHAQL

SEQ ID NO: 780132 - protein, 141 aa, Homo sapiens
MTNGSRHREHMVNHDKTRLLRQPPQNKYSNPGLTQHTESQTKERSFAEVFLGKRRSRGGASRITYCRHKHNRAKREPRSKQRGQRANLHQAKQSTTTCWKYELGNLQPGRTTRGPGSKTECRTARGGPSAHFTKKCSREVW

SEQ ID NO: 780133 - protein, 96 aa, Homo sapiens
REFKVGALRQELATLLSSVQLLKEDNPGRKIAEMQGKLATVVLGLPAPSWERGGAIRFRRGSRAERQDPQPTGHFPASRRRSENHLSEARRGGLHP

SEQ ID NO: 780134 - protein, 126 aa, Homo sapiens
  misc_feature (6)..(6): Xaa can be any naturally occurring amino acid
VGKDVXHHTFFDLLGSGPLGDYFKELACKMALELLTQEFGIPIAKTLCYLPWRGPGTAVIPQWQKDELRETLKSLKKVMDDLDRASKADVQKRVLEKTKQFIDSNPNQPLVILEMESGASAKATQG

SEQ ID NO: 780135 - protein, 199 aa, Homo sapiens
RVCATHGTIYGDLKVGDQVWLFIDEPRRRPIMSNHTATHILNFALRSVLGEADQKGSLVAPDRLRFDFTAKGAMSTQQIKKAEEIANEMIEAAKAVYTQDCPLAAAKAIQGLRPVFDETYPDPVRVVSIGVPVSELLDDPSGPAGSLTSVEFCGGTHLRNSSHAGAFVIVTEEAIAKGIRRLVAVTGAEAQKASGKQRA

SEQ ID NO: 780136 - protein, 108 aa, Homo sapiens
MVNQCFGLGDGTCLLSIQLEGPKHVAFGWPECPEAPLPTLPPPPLKEPLTVSPRGSHLMSAMPGVSPSRCVGSFPSCLMLTCGHRGCPHIGAFSSSSCPLCHNGMMAW

SEQ ID NO: 780137 - protein, 108 aa, Homo sapiens; identical to SEQ ID NO: 780136

SEQ ID NO: 780138 - protein, 384 aa, Homo sapiens
EDVSLVLGIMAKLLPLRALPLLFNLIKVVPRVFGRMVGKSREAVAQAMVLEMFREEDYYNDDVLDQMGASILGVEGPRRHPDEPPEDEVFELFPMFMGGLLSAHNRAVLAQLGCPIKNLDALENAQAIKKKLGKLGRQVLPPSELLDHLFFHYEFQNQRFSAEVLSSLRQLNLAGVRMTPVKCTVVAAVLGSGRHALDEVNLASCQLDPAGLRTLLPVFLRARKLGLQLNSLGPEACKDLRDLLLHDQCQITTLRLSNNPLTEAGVAVLMEGLAGNTSVTHLSLLHTGLGDEGLELLAAQLDRNRQLQELNVAYNGAGDTAALALARAAREHPSLELLHLYFNELSSEGRQVLRDLGGAAEGGARVVVSLTEGTAVSEYWSVIL

SEQ ID NO: 780139 - protein, 391 aa, Homo sapiens
EDVSLVLGIMAKLLPLRALPLLFNLIKVVPRVFGRMVGKSREAVAQAMVLEMFREEDYYNDDVLDQMGASILGVEGPRRHPDEPPEDEVFELFPMFMGGLLSAHNRAVLAQLGCPIKNLDALENAQAIKKKLGKLGRQVLPPSELLDHLFFHYEFQNQRFSAEVLSSLRQLNLAGVRMTPVKCTVVAAVLGSGRHALDEVNLASCQLDPAGLRTLLPVFLRARKLGLQLNSLGPEACKDLRDLLLHDQCQITTLRLSNNPLTEAGVAVLMEGLAGNTSVTHLSLLHTGLGDEGLELLAAQLDRNRQLQELNVAYNGAGDTAALALARAAREHPSLELLQGVAIQMCWKLPLLPYAHLWTPRMPSHWCFLLILMPPLPQWYDGLVAPRGRCT

SEQ ID NO: 780140 - protein, 115 aa, Homo sapiens
GIDFLSPASLYFNELSSEGRQVLRDLGGAAEGGARVVVSLTEGTAVSEYWSVILSEVQRNLNSWDRARVQRHLELLLRDLEDSRGATLNPWRKAQLLRVEGEVRALLEQLGSSGS

SEQ ID NO: 780141 - protein, 349 aa, Homo sapiens
MVGKSREAVAQAMVLEMFREEDYYNDDVLDQMGASILGVEGPRRHPDEPPEDEVFELFPMFMGGLLSAHNRAVLAQLGCPIKNLDALENAQAIKKKLGKLGRQVLPPSELLDHLFFHYEFQNQRFSAEVLSSLRQLNLAGVRMTPVKCTVVAAVLGSGRHALDEVNLASCQLDPAGLRTLLPVFLRARKLGLQLNSLGPEACKDLRDLLLHDQCQITTLRLSNNPLTEAGVAVLMEGLAGNTSVTHLSLLHTGLGDEGLELLAAQLDRNRQLQELNVAYNGAGDTAALALARAAREHPSLELLHLYFNELSSEGRQVLRDLGGAAEGGARVVVSLTEGTAVSEYWSVIL

SEQ ID NO: 780142 - protein, 112 aa, Homo sapiens
THRAEDMMSVPACSGGRNGLKRHSLALWEGCGRGHTPACSALLSLLQASGDNQDPVWRPPADSKHGDADARMAPTHEESRFENTMEPKSRLQDLYTIWEENRDTHACVSSTC

SEQ ID NO: 780143 - protein, 115 aa, Homo sapiens
LFGNNNTAPNVGLREDSEPQRSCPKPEREAEILMFLSAIVMMKNRRSITVEQHIGNIFMFSKVANAILFFRLDIRMGLLYITLCIVFLMTCKPPPPHIWALSISSTSMIKPLMRN

SEQ ID NO: 780144 - protein, 1340 aa, Homo sapiens
MFRVGFLIISSSSSLSPLLLVSVVRVNTTNCHKCLLSGTYIFAVLLVCVVFHSGAQEKNYTIREEIPENVLIGNLLKDLNLSLIPNKSLTTTMQFKLVYKTGDVPLIRIEEDTGEIFTTGARIDREKLCAGIPRDEHCFYEVEVAILPDEIFRLVKIRFLIEDINDNAPLFPATVINISIPENSAINSKYTLPAAVDPDVGINGVQNYELIKSQNIFGLDVIETPEGDKMPQLIVQKELDREEKDTYVMKVKVEDGGFPQRSSTAILQVSVTDTNDNHPVFKETEIEVSIPENAPVGTSVTQLHATDADIGENAKIHFSFSNLVSNIARRLFHLNATTGLITIKEPLDREETPNHKLLVLASDGGLMPARAMVLVNVTDVNDNVPSIDIRYIVNPVNDTVVLSENIPLNTKIALITVTDKDADHNGRVTCFTDHEIPFRLRPVFSNQFLLENAAYLDYESTKEYAIKLLAADAGKPPLNQSAMLFIKVKDENDNAPVFTQSFVTVSIPENNSPGIQLMKVSATDADSGPNAEINYLLGPDAPPEFSLDRRTGMLTVVKKLDREKEDKYLFTILAKDNGVPPLTSNVTVFVSIIDQNDNSPVFTHNEYKFYVPENLPRHGTVGLITVTDPDYGDNSAVTLSILDENDDFTIDSQTGVIRPNISFDREKQESYTFYVKAEDGGRVSRSSSAKVTINVVDVNDNKPVFIVPPYNYSYELVLPSTNPGTVVFQVIAVDNDTGMNAEVRYSIVGGNTRDLFAIDQETGNITLMEKCDVTDLGLHRVLVKANDLGQPDSLFSVVIVNLFVNESVTNATLINELVRKSIEAPVTPNTEIADVSSPTSDYVKILVAAVAGTITVVVVIFITAVVRCRQAPHLKAAQKNMQNSEWATPNPENRQMIMMKKKKKKKKHSPKNLLLNVVTIEETKADDVDSDGNRVTLDLPIDLEEQTMGKYNWVTTPTTFKPDSPDLARHYKSASPQPAFQIQPETPLNLKHHIIQELPLDNTFVACDSISNCSSSSSDPYSVSDCGYPVTTFEVPVSVHTRPSQRRVTFHLPEGSQESSSDGGLGDHDAGSLTSTSHGLPLGYPQEEYFDRATPSNRTEGDGNSDPESTFIPGLKKEITVQPTVEEASDNCTQECLIYGHSDACWMPASLDHSSSSQAQASALCHSPPLSQASTQHHSPPVTQTIVLCHSPPVTQTIALCHSPPPIQVSALHHSPPLVQGTALHHSPPSAQASALCYSPPLAQAAAISHSSSLPQVIALHRSQAQSSVSLQQGWVQGANGLCSVDQGVQGSATSQFYTMSERLHPSDDSIKVIPLTTFAPRQQARPSRGDSPIMETHPL

SEQ ID NO: 780145 - protein, 1048 aa, Homo sapiens
MFRVGFLIISSSSSLSPLLLVSVVRVNTTNCHKCLLSGTYIFAVLLVCVVFHSGAQEKNYTIREEIPENVLIGNLLKDLNLSLIPNKSLTTTMQFKLVYKTGDVPLIRIEEDTGEIFTTGARIDREKLCAGIPRDEHCFYEVEVAILPDEIFRLVKIRFLIEDINDNAPLFPATVINISIPENSAINSKYTLPAAVDPDVGINGVQNYELIKSQNIFGLDVIETPEGDKMPQLIVQKELDREEKDTYVMKVKVEDGGFPQRSSTAILQVSVTDTNDNHPVFKETEIEVSIPENAPVGTSVTQLHATDADIGENAKIHFSFSNLVSNIARRLFHLNATTGLITIKEPLDREETPNHKLLVLASDGGLMPARAMVLVNVTDVNDNVPSIDIRYIVNPVNDTVVLSENIPLNTKIALITVTDKDADHNGRVTCFTDHEIPFRLRPVFSNQFLLENAAYLDYESTKEYAIKLLAADAGKPPLNQSAMLFIKVKDENDNAPVFTQSFVTVSIPENNSPGIQLMKVSATDADSGPNAEINYLLGPDAPPEFSLDRRTGMLTVVKKLDREKEDKYLFTILAKDNGVPPLTSNVTVFVSIIDQNDNSPVFTHNEYKFYVPENLPRHGTVGLITVTDPDYGDNSAVTLSILDENDDFTIDSQTGVIRPNISFDREKQESYTFYVKAEDGGRVSRSSSAKVTINVVDVNDNKPVFIVPPYNYSYELVLPSTNPGTVVFQVIAVDNDTGMNAEVRYSIVGGNTRDLFAIDQETGNITLMEKCDVTDLGLHRVLVKANDLGQPDSLFSVVIVNLFVNESVTNATLINELVRKSIEAPVTPNTEIADVSSPTSDYVKILVAAVAGTITVVVVIFITAVVRCRQAPHLKAAQKNMQNSEWATPNPENRQMIMMKKKKKKKKHSPKNLLLNVVTIEETKADDVDSDGNRVTLDLPIDLEEQTMGKYNWVTTPTTFKPDSPDLARHYKSASPQPAFQIQPETPLNLKHHIIQELPLDNTFVACDSISNCSSSSSDPYSVSDCGYPVTTFEVPVSVHTRPTDSRT

SEQ ID NO: 780146 - protein, 1037 aa, Homo sapiens
MTVGFNSDISSVVRVNTTNCHKCLLSGTYIFAVLLVCVVFHSGAQEKNYTIREEIPENVLIGNLLKDLNLSLIPNKSLTTTMQFKLVYKTGDVPLIRIEEDTGEIFTTGARIDREKLCAGIPRDEHCFYEVEVAILPDEIFRLVKIRFLIEDINDNAPLFPATVINISIPENSAINSKYTLPAAVDPDVGINGVQNYELIKSQNIFGLDVIETPEGDKMPQLIVQKELDREEKDTYVMKVKVEDGGFPQRSSTAILQVSVTDTNDNHPVFKETEIEVSIPENAPVGTSVTQLHATDADIGENAKIHFSFSNLVSNIARRLFHLNATTGLITIKEPLDREETPNHKLLVLASDGGLMPARAMVLVNVTDVNDNVPSIDIRYIVNPVNDTVVLSENIPLNTKIALITVTDKDADHNGRVTCFTDHEIPFRLRPVFSNQFLLENAAYLDYESTKEYAIKLLAADAGKPPLNQSAMLFIKVKDENDNAPVFTQSFVTVSIPENNSPGIQLMKVSATDADSGPNAEINYLLGPDAPPEFSLDRRTGMLTVVKKLDREKEDKYLFTILAKDNGVPPLTSNVTVFVSIIDQNDNSPVFTHNEYKFYVPENLPRHGTVGLITVTDPDYGDNSAVTLSILDENDDFTIDSQTGVIRPNISFDREKQESYTFYVKAEDGGRVSRSSSAKVTINVVDVNDNKPVFIVPPYNYSYELVLPSTNPGTVVFQVIAVDNDTGMNAEVRYSIVGGNTRDLFAIDQETGNITLMEKCDVTDLGLHRVLVKANDLGQPDSLFSVVIVNLFVNESVTNATLINELVRKSIEAPVTPNTEIADVSSPTSDYVKILVAAVAGTITVVVVIFITAVVRCRQAPHLKAAQKNMQNSEWATPNPENRQMIMMKKKKKKKKHSPKNLLLNVVTIEETKADDVDSDGNRVTLDLPIDLEEQTMGKYNWVTTPTTFKPDSPDLARHYKSASPQPAFQIQPETPLNLKHHIIQELPLDNTFVACDSISNCSSSSSDPYSVSDCGYPVTTFEVPVSVHTRPTDSRT

SEQ ID NO: 780147 - protein, 101 aa, Homo sapiens
TGLLGVWGAGPHLSRDTLLHRPCCFHAASKASGLRGHPSGGVSLFQDKPSPLCHLLPTPKFKVTPASRLVLGQKGLARGSVTSAPPAGPRGTLHALPTTDP

SEQ ID NO: 780148 - protein, 98 aa, Homo sapiens
GAGELGEQEEGIEGQQLASSNWATASLNVAGSSLGTSPLESQEKPSSCHKRGFQPHFLTSVLRPPSALTILEQAEILAWVNGAENPAPSPEPRPTALR

SEQ ID NO: 780149 - protein, 91 aa, Homo sapiens
GVGDPQRSLQAGPLREAGSREQNLNSSPGTETEEVEHLWRMADQQAWEWQGAFPHVPTTPRTPFWSPQLMESLGTFFPGLFLQPDHLPGKS

SEQ ID NO: 780150 - protein, 69 aa, Homo sapiens
MEKLESCGSSVKWQVWPEDGISRVPEMAMERHRGQAMPGLCCLCCHQGQPQPSAQASGIFQPTFTHPFF

SEQ ID NO: 780151 - protein, 104 aa, Homo sapiens
GRGTTTDRSILQKKKGQESLLDDNSHLQTIPSDLTSFPAQVDLPRSNGEMDGNDLMQASKGLSDLEIGMYALLGVFCLAILVFLINCVTFALKYRHKQVPFEEQ

SEQ ID NO: 780152 - protein, 105 aa, Homo sapiens [sequence omitted]

SEQ ID NO: 780153 - protein, 212 aa, Homo sapiens
HPRYLKNSLVYHPQLRAQVWRYLTYIFMHAGIEHLGLNVVLQLLVGVPLEMVHGATRIGLVYVAGVVAGSLAVSVADMTAPVVGSSGGVYALVSAHLANIVMNWSGMKCQFKLLRMAVALICMSMEFGRAVWLRFHPSAYPPCPHPSFVAHLGGVAVGITLGVVVLRNYEQRLQDQSLWWIFVAMYTVFVLFAVFWNIFAYTLLDLKLPPPP

SEQ ID NO: 780154 - protein, 49 aa, Homo sapiens
MPFVPCLAPYTTYTLIPLCQPQNPSSSHLGPHILFCTSLYCHLDTLLTA

SEQ ID NO: 780155 - protein, 114 aa, Homo sapiens
GHTGPAGGHGRGLQWGRPLRVEAPPRRRLGSPWPPIWHMSGSTGNQAYRPGRESQLQWWARCEDSGLRPLMGSWLGSVAAHLPTSCVTRASLPNSPNLSHEAKVPALQGPWQMR

SEQ ID NO: 780156 - protein, 165 aa, Homo sapiens
GLLPSAYICFLPTPLPSPASVSSLCDALPPTPVTFLLRPKAPQHPYLFRTSLWQSQLPASSQLVRRPPHLLDEATNQDTLAPPESHPQGLQTSLQHCQAMFPGPSGHPHPQQWATLPSPPALWSDDIEEMKSPEGNALISPGPLCIPTHRVSSPSCPPFPPGSHL

SEQ ID NO: 780157 - protein, 40 aa, Homo sapiens
KTPLGTLSMGIKGQISGVAAEAQSTKASMLETHSLLHLAE

SEQ ID NO: 780158 - protein, 108 aa, Homo sapiens
QLLLGFNGSPFGYNFSGLALGWSRSLLKCGPRAAHHLWMLPEAAGAQAVVPVTGPHVSYAEVSRECWCGWLLHHSHLSSPICGQPKSSDIVHNDCYETTSLSPCTQAA

SEQ ID NO: 780159 - protein, 68 aa, Homo sapiens
RAGAERVGAPQQHPPHPSTLPEDSRGGSFHQSGRPGQGGMQPMGTMSRGRLRQALVPSPAYPEARSAL

SEQ ID NO: 780160 - protein, 66 aa, Homo sapiens
WDNLLVLDNSSRMGKDTEVYRVQGLRSKSTPSTAQRWRAAPETAVHGAETQHCTNAVLLHLGCLLE

SEQ ID NO: 780161 - protein, 366 aa, Homo sapiens
MASMAAVLTWALALLSAFSATQARKGFWDYFSQTSGDKGRVEQIHQQKMAREPATLKDSLEQDLNNMNKFLEKLRPLSGSEAPRLPQDPVGMRRQLQEELEEVKARLQPYMAEAHELVGWNLEGLRQQLKPYTMDLMEQVALRVQELQEQLRVVGEDTKAQLLGGVDEAWALLQGLQSRVVHHTGRFKELFHPYAESLVSGIGRHVQELHRSVAPHAPASPARLSRCVQVLSRKLTLKAKALHARIQQNLDQLREELSRAFAGTGTEEGAGPDPQMLSEEVRQRLQAFRQDTYLQIAAFTRAIDQETEEVQQQLAPPPPGHSAFAPEFQQTDSGKVLSKLQARLDDLWEDITHSLHDQGHSHLGDP

SEQ ID NO: 780162 - protein, 366 aa, Homo sapiens; identical to SEQ ID NO: 780161

SEQ ID NO: 780163 - protein, 102 aa, Homo sapiens
HTCEQLAPIALVSINMLGVDLLPPRLHTFSVLRSRPRVPGHSLSSPRPAPRSLAFPDLTFTWDQVFLNQKQAESEKPRQAVLLASCVFRFISPRYRPGIPNS

SEQ ID NO: 780164 - protein, 107 aa, Homo sapiens
LPHFVQETTVIALHLPQPILSAHLGQGKLSKTYLASPHCPPPAVLLPDHPSIPLHPMSQPAPAPDSAPSCQASACTIPSAWTATPSAQACSPATALGQHLPPDAMTP

SEQ ID NO: 780165 - protein, 58 aa, Homo sapiens
SLGSGGWKSKTVTGGTLSALALGTWCANITAIHPAVLHNGIPAMAKIRLTEESLRSSS

SEQ ID NO: 780166 - protein, 57 aa, Homo sapiens
PYSVSKLSVHFTLTDHLRADQPHFNAHSHTYVRVVATALARHRLRSSIGSPFLGTFC

SEQ ID NO: 780167 - protein, 54 aa, Homo sapiens
SSSHGSSAQAVPSSWATHCTQQHRVLALVSGLPGPYLLHKALPWSFLPSSCSLS

SEQ ID NO: 780168 - protein, 186 aa, Homo sapiens
MAVGGIIIPDTLKCQSEKQNKKKQTKQTMGGRRPSGPRKKLSKEQSGWGRAGRPEGHRWTSGPQTRYPQRGREPGGQGHKRGRGFFSHTYKKKARRGAHPRKPFSETKLPREGGVPRGGPHIQGGTLYISHREGEILQREREDRAKYHSQNYNDPPHPSGGNPTTNSDATTTTTKKDKINQNTSHT

SEQ ID NO: 780169 - protein, 76 aa, Homo sapiens
NEPPQPPVPEPANAGERKMREFNSGPHNPVEETKLICLCPSGHASCQVHLWTGAMLLGFQSWRELPGSGLKARILQ

SEQ ID NO: 780170 - protein, 97 aa, Homo sapiens
PPVGLVVFLSLPSLSGDPDNLLRLLEKGSPRRLGLPPIGSGSYFPSHPKKPRALPLLQLGIAPTKHILPRSPWTPCSEMQKREKKYLSGHKDLAHPG

SEQ ID NO: 780171 - protein, 193 aa, Homo sapiens
SAGLQGMGSADGPGCRKGIGSSGEMGSVDKEGYKKDLGAPENMGSGSKADYRDGVGGSGAMGSMDEAGYRKDLGAPEGISSGSKADYRGGLQDSREAGSGSKADYSGGLKGSREIGSMDETDNRKDLGVPEGMGAGYRAGLRGPGEMGSLDESGHRNGIGGYGEMGSGYREDLGAPEGMGTGSKAGYRDGLRG

SEQ ID NO: 780172 - protein, 158 aa, Homo sapiens
SAGLQGMGSADGPGCRKGIGSSGEMGSVDKEAGYRKDLGAPEGISSGSKADYRGGLQDSREAGSGSKADYSGGLKGSREIGSMDETDNRKDLGVPEGMGAGYRAGLRGPGEMGSLDESGHRNGIGGYGEMGSGYREDLGAPEGMGTGSKAGYRDGLRG

SEQ ID NO: 780173 - protein, 132 aa, Homo sapiens
LGSELGVPRSPTPLWGLSATTQQMEPQGDGGWGDCDGVGEPEGEGLGVAVSVRPREGGQVSKRASRAWWLTPVMPALWEAKAGRLPDCLSLGVQDQPGQHGGTPVSTKTTKISQAWWCVPVIPATWEAETGE

SEQ ID NO: 780174 - protein, 210 aa, Homo sapiens
NGTHHNVRLLMLDDQRLLLPHWAKVVLTDPEAAKYVHGIAVHWYLDFLAPAKATLRETHHLFPNTMLFASEACVGSKFWEQSVRLGSWDRGMQYSHSIITNLLYHVVGWTELEPIIVDITKHTFYKQPMFYHLGHFSKFIPEGSQRVGLVASQKNDPDAVALMHPDGSPVVVVLNRSSKDVPLTIKDPAVGFLETISPGYSIHTYLWRRQ

SEQ ID NO: 780175 - protein, 122 aa, Homo sapiens
NGTHHNVRLLMLDDQRLLLPHWAKVVLTDPEAAKYVHGIAVHWYLDFLAPAKATLRETHHLFPNTMLFASEACVGSKFWEQSVRLGSWDRGMQYSHSIITVSHPSLPSCKGDLRPISSLTKD

SEQ ID NO: 780176 - protein, 142 aa, Homo sapiens
RAPPFHTRPIISYIGWLTSLYTTREQEGVQGGTSEEAHPSPFAPWRQEVTRQQQKTPMPEAGLRCRKAGKFIPEGSQRVGLVASQKNDPDAVALMHPDGSPVVVVLNRSSKDVPLTIKDPAVGFLETISPGYSIHTYLWRRQ

SEQ ID NO: 780177 - protein, 154 aa, Homo sapiens
MSATRAKKVKMATKSCPECDQQVPVACKSCPCGYIFISRKLLNAKHSEKSPPSTENKHEAKRRRTERVRREKINSTVNKDLENRKRSRSNSHSDHIRRGRGRPKSASAKKHEEEREKQEKEIDIYANLSDEKAFVFSVALAEINRKIINQRLIL

SEQ ID NO: 780178 - protein, 161 aa, Homo sapiens
PGARAGGSGLAAVVCGGGPRRAPGGRAVPVACKSCPCGYIFISRKLLNAKHSEKSPPSTENKHEAKRRRTERVRREKINSTVNKDLENRKRSRSNSHSDHIRRGRGRPKSASAKKHEEERGCRKPMPRTPILEGKLGKEKSAEKKEKREILPGSENNILFS

SEQ ID NO: 780179 - protein, 154 aa, Homo sapiens; identical to SEQ ID NO: 780177

SEQ ID NO: 780180 - protein, 154 aa, Homo sapiens; identical to SEQ ID NO: 780177

SEQ ID NO: 780181 - protein, 154 aa, Homo sapiens; identical to SEQ ID NO: 780177

SEQ ID NO: 780182 - protein, 188 aa, Homo sapiens
MNGDDAFARRPTVGAQIPEKIQKAFDDIAKYFSKEEWEKMKASEKIFYVYMKRKYEAMTKLGFKATLPPFMCNKRAEDFQGNDLDNDPNRGNQVERPQMTFGRLQGISPKIMPKKPAEEGNDSEEVPEASGPQNDGKELCPPGKPTTSEKIHERSGPKRGEHAWTHRLRERKQLVIYEEISDPEEDDE

SEQ ID NO: 780183 - protein, 246 aa, Homo sapiens
SEYARSDFLFGFFQNQSQTAPGAMNGDDAFARRPTVGAQIPEKIQKAFDDIAKYFSKEEWEKMKASEKIFYVYMKRKYEAMTKLGFKATLPPFMCNKRAEDFQGNDLDNDPNRGNQVERPQMTFGRLQGISPKIMPKKPAEEGNDSEEVPEASGPQNDGKELCPPGKPTTSEKIHERSGNREAQEKEERRGTAHRWSSQNTHNIGRFSLSTSMGAVHGTPKTITHNRDPKGGNMPGPTDCVRENSW

SEQ ID NO: 780184 - protein, 99 aa, Homo sapiens
RPTQPGPPQPPQQRPYGYDQLIMPKKPAEEGNDSEEVPEASGPQNDGKELCPPGKPTTSEKIHERSGPKRGEHAWTHRLRERKQLVIYEEISDPEEDDE

SEQ ID NO: 780185 - protein, 176 aa, Homo sapiens
RPTQPGPPQPPQQRPYGYDQSPFMCNKRAEDFQGNDLDNDPNRGNQVERPQMTFGRLQGISPKIMPKKPAEEGNDSEEVPEASGPQNDGKELCPPGKPTTSEKIHERSGNREAQEKEERRGTAHRWSSQNTHNIGRFSLSTSMGAVHGTPKTITHNRDPKGGNMPGPTDCVRENSW

SEQ ID NO: 780186 - protein, 211 aa, Homo sapiens
SEYARSDFLFGFFQNQSQTAPGAMNGDDAFARRPTVGAQIPEKIQKAFDDIAKYFSKEEWEKMKASEKIFYVYMKRKYEAMTKLGFKATLPPFMCNKRAEDFQGNDLDNDPNRGNQVERPQMTFGRLQGISPKIMPKKPAEEGNDSEEVPEASGPQNDGKELCPPGKPTTSEKIHERSGPKRGEHAWTHRLRERKQLVIYEEISDPEEDDE

SEQ ID NO: 780187 - protein, 127 aa, Homo sapiens
NPLLQNTLMRQKSLYEFGNLYQQRKILMYSLSVERPQMTFGRLQGISPKIMPKKPAEEGNDSEEVPEASGPQNDGKELCPPGKPTTSEKIHERSGPKRGEHAWTHRLRERKQLVIYEEISDPEEDDE

SEQ ID NO: 780188 - protein, 139 aa, Homo sapiens
SEYARSDFLFGFFQNQSQTAPGAMNGDDAFARRPTVGAQIPEKIQKAFDDIAKYFSKEEWEKMKASEKIFYVYMKRKYEAMTKLGFKATLPPFMCNKRAEDFQGNDLDNDPNRGNQVERPQMTFGRLQGISPKVSVSQI

SEQ ID NO: 780189 - protein, 31 aa, Homo sapiens
MWLSGPWRFKELFLSHRGFIKGKIGVHKHTQ

SEQ ID NO: 780190 - protein, 107 aa, Homo sapiens
MTEAALLHSTGATPCQHISLPSPGQAQVPCLNSKFSRIEGKRGSEFASLTPATCLCPLLVYNATLHSICLLSAHLSKDIRATKDLKDHLIQWFQGFSFPITTSPPAK

SEQ ID NO: 780191 - protein, 109 aa, Homo sapiens
QAHDSLSVINFHLAECVIQLPVNLRELPGAVAHSPLGSELCFSDSGSVPSHTRSFPKAAIRLTANHRRGCTESGWPFSLVFLFERCMWPGTVAHTCNPSTLGGQGGQIT

SEQ ID NO: 780192 - protein, 54 aa, Homo sapiens
VLAPEPEEIWVAEMLCGLKMKLKRRRVSLVLPEHHEAFNRLLGRRTPQRAPPIL

SEQ ID NO: 780193 - protein, 66 aa, Homo sapiens
RPRGRPSWTLQTFPSQRAPMLHVGTGATIRPFPGETEALPSATAWGALGRHTLHFIASCDTGGEQR

SEQ ID NO: 780194 - protein, 51 aa, Homo sapiens
EAKHNTKGPTEEMAPKTRGCRTNYKKILLPTAFLEKLFRGGSRRQSPETKE

SEQ ID NO: 780195 - protein, 81 aa, Homo sapiens
MWGITCDNVRHKSFKFGYNLIYSFFLFWRMLWVSYPRNSNHGQIQYHEAFWSYNFSKCLIISLGLKSIESFRYYLIKMMSV

SEQ ID NO: 780196 - protein, 83 aa, Homo sapiens
QVGVHVAQIVAEEQVEAFLGGWEYWAGMCRLHSQTVGAVGPRHHQSSFRKRRWVMESLGLGREIGEEATVSSKAATVSTPTGI

SEQ ID NO: 780197 - protein, 52 aa, Homo sapiens
GFGHSSVTELLHSLFDLVLVGFDIHNGHKLCCCLLSSSWLTQWLGEPDDELL

SEQ ID NO: 780198 - protein, 80 aa, Homo sapiens
IRGGSNDVLANSPSNAIIPHPEQLLSGNVSGKASQAAGSEKVGQAAGLSITGWSPNRVHSDLHTSPCTSSSLLWAGPVAY

SEQ ID NO: 780199 - protein, 91 aa, Homo sapiens
SGIAGTGCRECLVTNLEGAFLQFAQGPSGRELKGPPGVPVGSVEFPSGRGGRSPLCLGPPAPSAQPWICVCLPVGAWAPWREGQAWTFLET

SEQ ID NO: 780200 - protein, 152 aa, Homo sapiens
KGVKGVPLNLQIDTYDCGLGTERLVHRAVCQIKIFCDKGAERKMRDDERKQFRRKVKCPDSSNSGVKGCLLSGFRGNETTYLRPETDLETPPVLFIPNVHFSSLQRSGGVRPGLGSREGAERGSWLLGGACLSTDQWGAAFPSASFKTFIES

SEQ ID NO: 780201 - protein, 238 aa, Homo sapiens
KGVKGVPLNLQIDTYDCGLGTERLVHRAVCQIKIFCDKGAERKMRDDERKQFRRKVKCPDSSNSGVKGCLLSGFRGNETTYLRPETDLETPPVLFIPNVHFSSLQRSGGAAPSAGPSSSNRLPLKRTCSPFTEEFEPLPSKQAKEGDLQRVLLYVRRETEEVFDALMLKTPDLKGLRNAISEKYGFPEENIYKVYKKCKRGILVNMDNNIIQHYSNHVAFLLDMGELDGKIQIILKEL

SEQ ID NO: 780202 - protein, 78 aa, Homo sapiens
GTQLHQPATAFGKPRRRGSTLRFEGSRIIDQGIEVLRFASRSGMMVRCSGSRARPGSQFCLALSSCMTYLTQPRCSHL

SEQ ID NO: 780203 - protein, 121 aa, Homo sapiens
MGHLDWVLNGGPCGERAQKQVHAAITRPPLCPASAQDPQQPGEAPHASSGSPTGKVFPGVLTNHSSSPQNHAGTRHSASVHQEGLLCKSTSSHKQLSRPPGGWLILLWKHSSTHTCTQLCV

SEQ ID NO: 780204 - protein, 36 aa, Homo sapiens
MAAPQKRGREARAELPAACWMHRVEAPPAVIHSLKQ

SEQ ID NO: 780205 - protein, 132 aa, Homo sapiens
KSTYASCLYPSQSPSEAPQYPQEKSQGRWCGSPGPVKLLPPSPSHLPSKSQGLCTGSSSFPECSLLFPPLLSPESCPLILPVSAQTSLLETLFPEPLHELRCPPCPFSLLVSCTFAPEHLKPFVIILLTCVF

SEQ ID NO: 780206 - protein, 92 aa, Homo sapiens
EEDSAEETGLRSLGWGGYPGLSRGASVITGVPTRDRGRWESLSLRRRCAEAESRLAIPGFKMEEGATSQGMQAALENGQGYSFSSGGSRRSQ

SEQ ID NO: 780207 - protein, 115 aa, Homo sapiens
MDRHVDRHVDVAVDRHVDRPVDVAVDRDVDSAMDRSVDHAVVDRDVDDAAVSRGVDTAMDWGVDTAMDTGVDNAAQARVVDDVPMDRGVDTAVDRGVADAAADRGWMLLWIGVWL

SEQ ID NO: 780208 - protein, 71 aa, Homo sapiens
ERQHGTVGTGVFFLVVTFLPSLRALGSSLEEKFSSQNCKPGTKVVLIFKNSARVIMVDTKAGKILVGHNED

SEQ ID NO: 780209 - protein, 96 aa, Homo sapiens
GPGKLRHCWAGAAIALGTEYILVKGDQVTGIVTAKSGDIFRVDVGGSEPVSLSYLAFEGATKRNRPNVQVGDLIYGQFVVANKDMEPEMVCIDSYG

SEQ ID NO: 780210 - protein, 120 aa, Homo sapiens
MTREQDTHRIIRTGQVKKYPTCPDSASVDWFYFLHLFEAHSICTAGPFGKILKSFPSRRNFAGCNSTVNRSCGILKHTTLSIGAEGRRTKVALHIVLHFGLPHWVQQLEGRVTWEGQSTA

SEQ ID NO: 780211 - protein, 70 aa, Homo sapiens
LWVPGALPHSPFPCGSELPLPLRQFQVGGCSASFLSVLHGSRCFCYESQCVLVDDPFEELVFTSHSVSSS

SEQ ID NO: 780212 - protein, 119 aa, Homo sapiens
AQFRECESLLIIMEELFYPGSDWSLPHPVTVVSENDLSQMPITKFIWGLEGGLQRVSPTQSTWLLYMGRSRMTDYSIHENRMVSYLFYISTSTQKYYIHRAYITMCIFPHFIKGDGRFC

SEQ ID NO: 780213 - protein, 135 aa, Homo sapiens
MAWGAPPLAELEGLGSGPRVGPPCLERSCPGFWSQRGRGTARELVSCWKGQLGVGSSRATGCPRHRPLPRVRGPLDWRTSQPWGCPWPVPGSCTLIRFSVGGEVISFPHPSQASWLRPVRNKMLPRCHKEIALKH

SEQ ID NO: 780214 - protein, 117 aa, Homo sapiens
MAVGSLSQQELGSQMLPGAWNCEWPWRWLCCSYTGHPGTRRSSRDPAPATAPAKHLGDTVVGWGGGLKSGEFVSSGSCDKVAQTLVASTAGTDSPGSPRSKGWLFRGPASRSCTPSS

SEQ ID NO: 780215 - protein, 175 aa, Homo sapiens
QKRPHLLPVGPLGRSMRWCLLLIWAQGLRQAPLASGMMTGTIETTGNISAEKGGSIILQCHTYPDGTYTGRIFLEVLESSVAEHGARFQIPLLGAMAATLVVICTAVIVVVALTRKVMAPAAHRSHGHPHVWHPGPFRFSFHPERDPDVIFPSALCAFFLAFVLPISAVIYALPL

SEQ ID NO: 780216 - protein, 194 aa, Homo sapiens
QKRPHLLPVGPLGRSMRWCLLLIWAQGLRQAPLASGMMTGTIETTGNISAEKGGSIILQCHTYPDGTYTGRIFLEVLESSVAEHGARFQIPLLGAMAATLVVICTAVIVVVALTRKKKALRIHSVEGDLRRKSAGQEEWSPSAPSPPGSCVQAEAAPAGLCGEQRGEDCAELHDYFNVLSYRSLGNCSFFTETG

SEQ ID NO: 780217 - protein, 125 aa, Homo sapiens [sequence omitted]

SEQ ID NO: 780218 - protein, 704 aa, Homo sapiens
MDHITVPKVENVKLVDRYVSKKPANGILYLTATHLIYVEASGAARKETWIALHHIATVEKLPITSLGCPLTLRCKNFRVAHFVLDSDLVCHEVYISLLKLSQPALPEDLYAFSYNPKSSKEMRESGWKLIDPISDFGRMGIPNRNWTITDANRNYEICSTYPPEIVVPKSVTLGTVVGSSKFRSKERVPVLSYLYKENNAAICRCSQPLSGFYTRCVDDELLLEAISQTNPGSQFMYVVDTRPKLNAMANRAAGKGYENEDNYANIRFRFMGIENIHVMRSSLQKLLEVCELKTPTMSEFLSGLESSGWLRHIKAIMDAGIFITKAVKVEKASVLVHCSDGWDRTAQVCSVASILLDPFYRTFKGLMILIEKEWISMGHKFSQRCGHLDGDSKEVSPIFTQFLDCIWQLMEQFPCAFEFNENFLLEIHDHVFSCQFGNFLGNCQKDREDLRVYEKTHSVWPFLVQRKPDFRNPLYKGFTMYGVLNPSTVPYNIQFWCGMYNRFDKGLQPKQSMLESLLEIKKQRAMLETDVHELEKKLKVRDEPPEEICTCSQLGNILSQHLGSPLTNPLGFMGINGDLNTLMENGTLSREGGLRAQMDQVKSQGADLHHNCCEIVGSLRAINISGDVGISEAMGISGDMCTFEATGFSKDLGICGAMDISEATGISGNLGISEARGFSGDMGILGDTGISKASTKEADYSKHQ

SEQ ID NO: 780219 - protein, 667 aa, Homo sapiens
MDHITVPKVENVKLVDRYVSKKPANGILYLTATHLIYVEASGAARKETWIALHHIATVEKLPITSLGCPLTLRCKNFRVAHFVLDSDLVCHEVYISLLKLSQPALPEDLYAFSYNPKSSKEMRESGWKLIDPISDFGRMGIPNRNWTITDANRNYEICSTYPPEIVVPKSVTLGTVVGSSKFRSKERVPVLSYLYKENNAAICRCSQPLSGFYTRCVDDELLLEAISQTNPGSQFMYVVDTRPKLNAMANRAAGKGYENEDNYANIRFRFMGIENIHVMRTVCRNSWKAVKVEKASVLVHCSDGWDRTAQVCSVASILLDPFYRTFKGLMILIEKEWISMGHKFSQRCGHLDGDSKEVSPIFTQFLDCIWQLMEQFPCAFEFNENFLLEIHDHVFSCQFGNFLGNCQKDREDLRVYEKTHSVWPFLVQRKPDFRNPLYKGFTMYGVLNPSTVPYNIQFWCGMYNRFDKGLQPKQSMLESLLEIKKQRAMLETDVHELEKKLKVRDEPPEEICTCSQLGNILSQHLGSPLTNPLGFMGINGDLNTLMENGTLSREGGLRAQMDQVKSQGADLHHNCCEIVGSLRAINISGDVGISEAMGISGDMCTFEATGFSKDLGICGAMDISEATGISGNLGISEARGFSGDMGILGDTGISKASTKEADYSKHQ

SEQ ID NO: 780220 - protein, 595 aa, Homo sapiens
MDHITVPKVENVKLVDRYVSKKPANGILYLTATHLIYVEASGAARKETWIALHHIATVEKLPITSLGCPLTLRCKNFRVAHFVLDSDLVCHEVYISLLKLSQPALPEDLYAFSYNPKSSKEMRESGWKLIDPISDFGRMGIPNRNWTITDANRNYEIRFRFMGIENIHVMRSSLQKLLEVCELKTPTMSEFLSGLESSGWLRHIKAIMDAGIFITKAVKVEKASVLVHCSDGWDRTAQVCSVASILLDPFYRTFKGLMILIEKEWISMGHKFSQRCGHLDGDSKEVSPIFTQFLDCIWQLMEQFPCAFEFNENFLLEIHDHVFSCQFGNFLGNCQKDREDLRVYEKTHSVWPFLVQRKPDFRNPLYKGFTMYGVLNPSTVPYNIQFWCGMYNRFDKGLQPKQSMLESLLEIKKQRAMLETDVHELEKKLKVRDEPPEEICTCSQLGNILSQHLGSPLTNPLGFMGINGDLNTLMENGTLSREGGLRAQMDQVKSQGADLHHNCCEIVGSLRAINISGDVGISEAMGISGDMCTFEATGFSKDLGICGAMDISEATGISGNLGISEARGFSGDMGILGDTGISKASTKEADYSKHQ

SEQ ID NO: 780221 - protein, 370 aa, Homo sapiens
MDHITVPKVENVKLVDRYVSKKPANGILYLTATHLIYVEASGAARKETWIALHHIATVEKLPITSLGCPLTLRCKNFRVAHFVLDSDLVCHEVYISLLKLSQPALPEDLYAFSYNPKSSKEMRESGWKLIDPISDFGRMGIPNRNWTITDANRNYEICSTYPPEIVVPKSVTLGTVVGSSKFRSKERVPVLSYLYKENNAAICRCSQPLSGFYTRCVDDELLLEAISQTNPGSQFMYVVDTRPKAVKVEKASVLVHCSDGWDRTAQVCSVASILLDPFYRTFKGLMILIEKEWISMGHKFSQRCGHLDGDSKEVSPIFTQFLDCIWQLMEQFPCAFEFNENFLLEIHDHVFSCQFGNFLGNCQKDREDLR

SEQ ID NO: 780222 - protein, 63 aa, Homo sapiens
AAQRRDELLNSGASCSTQVRAANSGASFREEPGRQVGPSLPTVSSLRLSLLLRPSHVLCIFCM

SEQ ID NO: 780223 - protein, 118 aa, Homo sapiens
MKPQGDIGRREITTTTLDVVAKTNLCYHGEEHAFWERRAPTYLTVGRISPKLIVRANTISYTEIFKTALKRSNKYNIYKSCLSRVVTTDAGKNTASALKKQFKRITGILSVEKNFITR

SEQ ID NO: 780224 - protein, 87 aa, Homo sapiens
PTGSARRHWRLLRRSSGFRVLMTGPGSGCEAVETHGSAFLIRSFLLLLGKLHVCCPVVFRVCSLGRLCRGSSLCLIGPARVNNLHFS

SEQ ID NO: 780225 - protein, 135 aa, Homo sapiens
LERPFFLSLSVCTLSFFKNKTEICTAFCNVNYTTIKCFKTNSNNQKTSDIGSKNFVLKLEMIASILKFYRTLYLSYRKKYILYILSLFLDICFKIDGRACSFSFRPFVNTSAENSLVCTIPQVQHKLLLNRQTSP

SEQ ID NO: 780226 - protein, 103 aa, Homo sapiens
AGITGACHHAWLIFCIFSRARVSLCWPGLSRTPALVILLLATTTEAPGEYFFLERVQLKKYQGMGSLDAMEKSSSSQKRYFSKGDKVKIAQGVSGSIQDKGSI

SEQ ID NO: 780227 - protein, 75 aa, Homo sapiens
PHSSTVGLESPNHLSSFCEKRKRGSLSYVRRLRQENRYGHGNWFSHGRELFSSRDVISGCRFVSGRETDCREFRS

SEQ ID NO: 780228 - protein, 214 aa, Homo sapiens
MRKLARLKLGLVEMALGMLQFIWEEAHGQQSEQGSLEKLLADYLQNTSDYTSVGLQWFTLKRTLAHGALAQLGSLQPLSVGCVEIRARLLGLAGRALHLLAMQADPVHPTCYWEAGPSVGAKLSGLKSLELEVEEEGATKSSRDPPASRAAPEEHCRRGEDLKRRMVLAQQYLAQASEVLLQCLQVALGSGLLDVAAAASLEMVECVGTLDPAT

SEQ ID NO: 780229 - protein, 271 aa, Homo sapiens
EAYGLAQGAVAEEEGRLHSIQGLYGLAQGAMAEEEGRLHSVQGLLSLQDLQNVNTPLMRKLARLKLGLVEMALGMLQFIWEEAHGQQSEQGSLEKLLADYLQNTSDYTSVGLQWFTLKRTLAHGALAQLGSLQPLSVGCVEIRARLLGLAGRALHLLAMQADPVHPTCYWEAGPSVGAKLSGLKSLELEVEEEGATKSSRDPPASRAAPEEHCRRGEDLKRRMVLAQQYLAQASEVLLQCLQVALGSGLLDVAAAASLEMVECVGTLDPAT

SEQ ID NO: 780230 - protein, 104 aa, Homo sapiens
MSKKGNYAKTDGKSVGWETLPPWLLLPEWPSHSAGLPGTSPERSKGETVPCSSPGMQGGDYIYLIPSYPFPIDQSLLHGGFNSLSLLACITRQLQWLLRVFCPA

SEQ ID NO: 780231 - protein, 149 aa, Homo sapiens
MQDFNTPLLTLDRSMRQKVNKDIQELNSALHQADLIDIYRTLHPKSTEYTFFSAPHHTYSKINHIVGSKALLSKCKRTEIITTCLSDHSAIKLELRIKKLTQNRSTTWKLNNLLLNDYLVHNEMKAEIKMFFETNENKDTTYQNLWDTC

SEQ ID NO: 780232 - protein, 78 aa, Homo sapiens
ESKQCPESKQCSESKQCPESKQCPESKQCPESKQCPESKQCPESKQCPESKQCPESKQCPESKQCPESKQCSESKQCQ

SEQ ID NO: 780233 - protein, 141 aa, Homo sapiens
IESSRSPWCVMHTLTYTHSCTLITHSHMFIHNILMYTYTHTYTHSYTHTALNTLHTHSCTLTLITLHTQDTHAHKKHVHSHILTTQSYTTHTFTTHNTRTLTIHMQHRYTTDNTCTHSTLAHIYTLTTHLHAHIYTLAHIH

SEQ ID NO: 780234 - protein, 165 aa, Homo sapiens
MSVTLHTDVGDIKIEVFCERTPKTCEMESRCVPQAGVQWRDLGSLQPPPPGFKQVFCLSLPRTGRGGNSIWGKKFEDEYSEYLKHNVRGVVSMANNGPNTNGSQFFITYGKQPHLDMKYTVFGKVIDGLETLDELEKLPVNEKTYRPLNDVHIKDITIHANPFAQ

SEQ ID NO: 780235 - protein, 161 aa, Homo sapiens
MSVTLHTDVGDIKIEVFCERTPKTCENFLALCASNYYNGCIFHRNIKGFMVQTGDPTGTGRGGNSIWGKKFEDEYSEYLKHNVRGVVSMANNGPNTNGSQFFITYGKQPHLDMKYTVFGKVIDGLETLDELEKLPVNEKTYRPLNDVHIKDITIHANPFAQ

SEQ ID NO: 780236 - protein, 161 aa, Homo sapiens; identical to SEQ ID NO: 780235

SEQ ID NO: 780237 - protein, 165 aa, Homo sapiens; identical to SEQ ID NO: 780234

SEQ ID NO: 780238 - protein, 161 aa, Homo sapiens; identical to SEQ ID NO: 780235

SEQ ID NO: 780239 - protein, 157 aa, Homo sapiens
MSVTLHTDVGDIKIEVFCERTPKTCEAGVQWRDLGSLQPPPPGFKQVFCLSLPRTGRGGNSIWGKKFEDEYSEYLKHNVRGVVSMANNGPNTNGSQFFITYGKQPHLDMKYTVFGKVIDGLETLDELEKLPVNEKTYRPLNDVHIKDITIHANPFAQ

SEQ ID NO: 780240 - protein, 112 aa, Homo sapiens
MVQTGDPTGTGRGGNSIWGKKFEDEYSEYLKHNVRGVVSMANNGPNTNGSQFFITYGKQPHLDMKYTVFGKVIDGLETLDELEKLPVNEKTYRPLNDVHIKDITIHANPFAQ

SEQ ID NO: 780241 - protein, 112 aa, Homo sapiens; identical to SEQ ID NO: 780240

SEQ ID NO: 780242 - protein, 165 aa, Homo sapiens; identical to SEQ ID NO: 780234

SEQ ID NO: 780243 - protein, 131 aa, Homo sapiens
KPHGALPGSNQACFVFLALLCIYRASLPSSVAESPQPVRKLLEDRAAVHRHGFLLQLEPTVNRQAGHRALCVPAACSGHLLPTLSAGSLDWRLEGTQGAIPEVLPGACCWPQWNSSDSKPSPQGSGAKPSL

SEQ ID NO: 780244 - protein, 45 aa, Homo sapiens
ICKEATAIIMVNGERLKAFPLKLGTRQEYVLSSLLFNSVLQVQLD

SEQ ID NO: 780245 - protein, 165 aa, Homo sapiens
LTAGFCGEQYYCVCRQWPWDPQARPVHGAGLHSHPPSCGERLARPGQARQKVSAKWPRPHPAISQLLFITFVPHLGVCFLHLDTLPGRSSEPNPRLCSVGEGMTSPPPDLPRVLVSLSAGGPLCVFVQFCCMGFVTQKLMLRKANPTTDLKPPLEPPAGLRPQSL

SEQ ID NO: 780246 - protein, 64 aa, Homo sapiens
SCLELCGEPTPSPGQRFPKAAPVTLHPAPGWDLLRWGRPWEETSLGGRAQALSSGFGVTGWDTA

SEQ ID NO: 780247 - protein, 31 aa, Homo sapiens
MAPTAAGHNHQKIKIPRLIPFYKSRRHPKRN

SEQ ID NO: 780248 - protein, 82 aa, Homo sapiens
YFPSLWEKEERGLAACRQVAPQGTDRVGDRWDMQAFTWLAVSAKVQAAPSMETSLMEVSFPTHLHTHISQKQTFTLLFSILF

SEQ ID NO: 780249 - protein, 39 aa, Homo sapiens
MPSGTGQPPAASTLHAPAGPASLSALCYRWQIPCSPERP

SEQ ID NO: 780250 - protein, 64 aa, Homo sapiens
TVFYSFSNSNLLVDSIQAWRHLMAPHCSYSLVDQKVPVERSLTVTARSSESLEFTFLSRLLVDK

SEQ ID NO: 780251 - protein, 101 aa, Homo sapiens
MVRRVQPDRKQLPLVLLRLLCLLPTGLPVRSVDFNRGTDNITVRQGDTAILRCVVEDKNSKRGLVEPFWHHFAGHDKWSLDPRVELEKRHSLALQAPASRH

SEQ ID NO: 780252 - protein, 107 aa, Homo sapiens
GREALGCCCFCCCCCCVAVSVHSLAGLVPAPSPARPPAWESGLQSEGAQLRHWQRSIQSQRDQTRTLSFGFLFSSSRGLAICTLSFEIVLLLLFTLLLGFYEGFVKS

SEQ ID NO: 780253 - protein, 90 aa, Homo sapiens
QRDNEFLSYISEHLPNARDNAGCCAVNDKEDTVLPLKSDGGRHVNRSSLSIGSNCDCLPARMLLENRGEELASAWRNRSREHWRLQVKNE

SEQ ID NO: 780254 - protein, 30 aa, Homo sapiens
MTHGVLEENSRTPIQVYFYAILLQLCVFSL

SEQ ID NO: 780255 - protein, 83 aa, Homo sapiens
MALGIIFCSQAPQAVTYDSCMTLLLLIIYTSNSPSAVVFRLLFCLFCFVCPYSYYYWLSALNPSPVSESPDSLSFFALPLKKG

SEQ ID NO: 780256 - protein, 50 aa, Homo sapiens
MASGMMHKPILCTSAGRQGLGIGSMQKEEEEFCSHSGAAALISESLMGIR

SEQ ID NO: 780257 - protein, 107 aa, Homo sapiens
TGALNPGWLIFVFLVEMGFHHVGQAGLELLTLSNQPASASQSVGITGVSHRTRPCKTPFRLKAASEDFCTSPPHCTFLLNINKLSGSGSLHSLYCALTWSSLCLPSS

SEQ ID NO: 780258 - protein, 136 aa, Homo sapiens
ATTLCSLFPLAHATLANTGLWLVLEHSRSSPSEGHCTCCARVWNILYMAFHVASTFSSFCSWFQCCLSRGSFPDLLSKAAPSPLLAPIAVLLWFSAWYSYFVYASPYLFISTFKNVSHRRAPMSSLYSLTSSPAES

SEQ ID NO: 780259 - protein, 110 aa, Homo sapiens
LNKDNTASLNMKELTLKDVECKFSKMKTTYEEVTTKLEEYKEAFAAALNANNSMSKKLTKSNKKIAMISTKLLMEKEWVKYFLSTLPTRRGQESPCVENLTSIVLNSKYI

SEQ ID NO: 780260 - protein, 60 aa, Homo sapiens
HHHQPKTFKSFLTLAPKLSIHSTLVLSVLLLKRMYPESNHFSPILLLLSSASLQEEKQGL

SEQ ID NO: 780261 - protein, 135 aa, Homo sapiens
ASRGGWRRESTVKSPSAAAGRRMGSGSSSYRPKAIYLDIDGRIQKVIFSKYCNSSDIMDLFCIATGLPRNTTISLLTTDDAMVSIDPTMPANSERNELILYTSLRNLLFLPSKESWASHQHSVQSETCGHQATLR

SEQ ID NO: 780262 - protein, 555 aa, Homo sapiens
ASRGGWRRESTVKSPSAAAGRRMGSGSSSYRPKAIYLDIDGRIQKVIFSKYCNSSDIMDLFCIATGLPRNTTISLLTTDDAMVSIDPTMPANSERTPYKVRPVAIKQLSEREELIQSVLAQVAEQFSRAFKINELKAEVANHLAVLEKRVELEGLKVVEIEKCKSDIKKMREELAARSSRTNCPCKYSFLDNHKKLTPRRDVPTYPKYLLSPETIEALRKPTFDVWLWEPNEMLSCLEHMYHDLGLVRDFSINPVTLRRWLFCVHDNYRNNPFHNFRHCFCVAQMMYSMVWLCSLQEKFSQTDILILMTAAICHDLDHPGYNNTYQINARTELAVRYNDISPLENHHCAVAFQILAEPECNIFSNIPPDGFKQIRQGMITLILATDMARHAEIMDSFKEKMENFDYSNEEHMTLLKMILIKCCDISNEVRPMEVAEPWVDCLLEEYFMQSDREKSEGLPVAPFMDRDKVTKATAQIGFIKFVLIPMFETVTKLFPMVEEIMLQPLWESRDRYEELKRIDDAMKELQKKTDSLTSGATEKSRERSRDVKNSEGDCA

SEQ ID NO: 780263 - protein, 528 aa, Homo sapiens
RLGSEAGGGLDIDGRIQKVIFSKYCNSSDIMDLFCIATGLPRNTTISLLTTDDAMVSIDPTMPANSERTPYKVRPVAIKQLSEREELIQSVLAQVAEQFSRAFKINELKAEVANHLAVLEKRVELEGLKVVEIEKCKSDIKKMREELAARSSRTNCPCKYSFLDNHKKLTPRRDVPTYPKYLLSPETIEALRKPTFDVWLWEPNEMLSCLEHMYHDLGLVRDFSINPVTLRRWLFCVHDNYRNNPFHNFRHCFCVAQMMYSMVWLCSLQEKFSQTDILILMTAAICHDLDHPGYNNTYQINARTELAVRYNDISPLENHHCAVAFQILAEPECNIFSNIPPDGFKQIRQGMITLILATDMARHAEIMDSFKEKMENFDYSNEEHMTLLKMILIKCCDISNEVRPMEVAEPWVDCLLEEYFMQSDREKSEGLPVAPFMDRDKVTKATAQIGFIKFVLIPMFETVTKLFPMVEEIMLQPLWESRDRYEELKRIDDAMKELQKKTDSLTSGATEKSRERSRDVKNSEGDCA

SEQ ID NO: 780264 - protein, 466 aa, Homo sapiens
MDAFRSTPYKVRPVAIKQLSEREELIQSVLAQVAEQFSRAFKINELKAEVANHLAVLEKRVELEGLKVVEIEKCKSDIKKMREELAARSSRTNCPCKYSFLDNHKKLTPRRDVPTYPKYLLSPETIEALRKPTFDVWLWEPNEMLSCLEHMYHDLGLVRDFSINPVTLRRWLFCVHDNYRNNPFHNFRHCFCVAQMMYSMVWLCSLQEKFSQTDILILMTAAICHDLDHPGYNNTYQINARTELAVRYNDISPLENHHCAVAFQILAEPECNIFSNIPPDGFKQIRQGMITLILATDMARHAEIMDSFKEKMENFDYSNEEHMTLLKMILIKCCDISNEVRPMEVAEPWVDCLLEEYFMQSDREKSEGLPVAPFMDRDKVTKATAQIGFIKFVLIPMFETVTKLFPMVEEIMLQPLWESRDRYEELKRIDDAMKELQKKTDSLTSGATEKSRERSRDVKNSEGDCA

SEQ ID NO: 780265 - protein, 487 aa, Homo sapiens
ASRGGWRRESTVKSPSAAAGRRMGSGSSSYRPKAIYLDIDGRIQKHSVQSETCGHQATLRAFKINELKAEVANHLAVLEKRVELEGLKVVEIEKCKSDIKKMREELAARSSRTNCPCKYSFLDNHKKLTPRRDVPTYPKYLLSPETIEALRKPTFDVWLWEPNEMLSCLEHMYHDLGLVRDFSINPVTLRRWLFCVHDNYRNNPFHNFRHCFCVAQMMYSMVWLCSLQEKFSQTDILILMTAAICHDLDHPGYNNTYQINARTELAVRYNDISPLENHHCAVAFQILAEPECNIFSNIPPDGFKQIRQGMITLILATDMARHAEIMDSFKEKMENFDYSNEEHMTLLKMILIKCCDISNEVRPMEVAEPWVDCLLEEYFMQSDREKSEGLPVAPFMDRDKVTKATAQIGFIKFVLIPMFETVTKLFPMVEEIMLQPLWESRDRYEELKRIDDAMKELQKKTDSLTSGATEKSRERSRDVKNSEGDCA

SEQ ID NO: 780266 - protein, 323 aa, Homo sapiens [sequence omitted]

SEQ ID NO: 780267 - protein, 523 aa, Homo sapiens
ASRGGWRRESTVKSPSAAAGRRMGSGSSSYRPKAIYLDIDGRIQKVIFSKYCNSSDIMDLFCIATGLPRNTTISLLTTDDAMVSIDPTMPANSERTPYKVRPVAIKQLSEREELIQSVLAQVAEQFSRAFKINELKAEVANHLAVLEKRVELEGLKVVEIEKCKSDIKKMREELAARSSRTNCPCKYSFLDNHKKLTPRRDVPTYPKYLLSPETIEALRKPTFDVWLWEPNEMLSCLEHMYHDLGLVRDFSINPVTLRRWLFCVHDNYRNNPFHNFRHCFCVAQMMYSMVWLCSLQEKFSQTDILILMTAAICHDLDHPGYNNTYQINARTELAVRYNDISPLENHHCAVAFQILAEPECNIFSNIPPDGFKQIRQGMITLILATDMARHAEIMDSFKEKMENFDYSNEEHMTLLKMILIKCCDISNEVRPMEVAEPWVDCLLEEYFMQSDREKSEGLPVAPFMDRDKVTKATAQIGFIKFVLIPMFETVTKLQKKTDSLTSGATEKSRERSRDVKNSEGDCA

SEQ ID NO: 780268 - protein, 454 aa, Homo sapiens
ASRGGWRRESTVKSPSAAAGRRMGSGSSSYRPKAIYLDIDGRIQKVIFSKYCNSSDIMDLFCIATGLPRNTTISLLTTDDAMVSIDPTMPANSERTPYKVRPVAIKQLSEREELIQSVLAQVAEQFSRAFKINELKAEVANHLAVLEKRVELEGLKVVEIEKCKSDIKKMREELAARSSRTNCPCKYSFLDNHKKLTPRRDVPTYPKYLLSPETIEALRKPTFDVWLWEPNEMLSCLEHMYHDLGLVRDFSINPVTLRRWLFCVHDNYRNNPFHNFRHCFCVAQMMYSMVWLCSLQEKFSQTDILILMTAAICHDLDHPGYNNTYQINARTELAVRYNDISPLENHHCAVAFQILAEPECNIFSNIPPDGFKQIRQGMITLILATDMARHAEIMDSFKEKMENFDYSNEEHMTLLKMILIKCCDISNEVRPMEVAEPWVDCLLEEYFMQRCEKQ

SEQ ID NO: 780269 - protein, 457 aa, Homo sapiens
ASRGGWRRESTVKSPSAAAGRRMGSGSSSYRPKAIYLDIDGRIQKVIFSKYCNSSDIMDLFCIATGLPRNTTISLLTTDDAMVSIDPTMPANSERTPYKVRPVAIKQLSEREELIQSVLAQVAEQFSRAFKINELKAEVANHLAVLEKRVELEGLKVVEIEKCKSDIKKMREELAARSSRTNCPCKYSFLDNHKKLTPRRDVPTYPKYLLSPETIEALRKPTFDVWLWEPNEMLSCLEHMYHDLGLVRDFSINPVTLRRWLFCVHDNYRNNPFHNFRHCFCVAQMMYSMVWLCSLQEKFSQTDILILMTAAICHDLDHPGYNNTYQINARTELAVRYNDISPLENHHCAVAFQILAEPECNIFSNIPPDGFKQIRQGMITLILATDMARHAEIMDSFKEKMENFDYSNEEHMTLLKMILIKCCDISNEVRPMEVAEPWVDCLLEEYFMQNAPNGYRA

SEQ ID NO: 780270 - protein, 270 aa, Homo sapiens
LCGVLEDPIGAEKFSQTDILILMTAAICHDLDHPGYNNTYQINARTELAVRYNDISPLENHHCAVAFQILAEPECNIFSNIPPDGFKQIRQGMITLILATDMARHAEIMDSFKEKMENFDYSNEEHMTLLKMILIKCCDISNEVRPMEVAEPWVDCLLEEYFMQSDREKSEGLPVAPFMDRDKVTKATAQIGFIKFVLIPMFETVTKLFPMVEEIMLQPLWESRDRYEELKRIDDAMKELQKKTDSLTSGATEKSRERSRDVKNSEGDCA

SEQ ID NO: 780271 - protein, 137 aa, Homo sapiens
VNWRILSFSENSDLVMGHFCLYCHCLLHSLQSDREKSEGLPVAPFMDRDKVTKATAQIGFIKFVLIPMFETVTKLFPMVEEIMLQPLWESRDRYEELKRIDDAMKELQKKTDSLTSGATEKSRERSRDVKNSEGDCA

SEQ ID NO: 780272 - protein, 103 aa, Homo sapiens
MPVPLAALSFPASWPEAVVCQRQKRFGCRLHSQYSLPITLGLVMMGGGGLTSQRSQCIFDFITVTILSCSFGGYSRHQLNRAKEREATCIRQVLKWVQAAARV

SEQ ID NO: 780273 - protein, 103 aa, Homo sapiens; identical to SEQ ID NO: 780272

SEQ ID NO: 780274 - protein, 196 aa, Homo sapiens
  misc_feature (184)..(184): Xaa can be any naturally occurring amino acid
ASRGGWRRESTVKSPSAAAGRRMGSGSSSYRPKAIYLDIDGRIQKVIFSKYCNSSDIMDLFCIATGLPRNTTISLLTTDDAMVSIDPTMPANSERTPYKVRPVAIKQLSEREELIQSVLAQVAEQFSRAFKINELKAEVANHLAVLEKRVELEGLKVVEIEKCKSDIKKMREELAARSSRTNCXCKYSFLMLRRSG

SEQ ID NO: 780275 - protein, 78 aa, Homo sapiens
ARSHTVIFSQHCNTTDFIAMFCIATGSPWNTTISLLTTDDAMVSIDPTMPANSERTPYKVRPVAIKQLSDIHFSSTIC

SEQ ID NO: 780276 - protein, 555 aa, Homo sapiens; identical to SEQ ID NO: 780262

SEQ ID NO: 780277 - protein, 615 aa, Homo sapiens
ASRGGWRRESTVKSPSAAAGRRMGSGSSSYRPKAIYLDIDGRIQKVIFSKYCNSSDIMDLFCIATGLPRNTTISLLTTDDAMVSIDPTMPANSERTPYKVRPVAIKQLSAGVEDKRTTSRGQSAERPLRDRRVVGLEQPRREGAFESGQVEPRPREPQGCYQEGQRIPPEREELIQSVLAQVAEQFSRAFKINELKAEVANHLAVLEKRVELEGLKVVEIEKCKSDIKKMREELAARSSRTNCPCKYSFLDNHKKLTPRRDVPTYPKYLLSPETIEALRKPTFDVWLWEPNEMLSCLEHMYHDLGLVRDFSINPVTLRRWLFCVHDNYRNNPFHNFRHCFCVAQMMYSMVWLCSLQEKFSQTDILILMTAAICHDLDHPGYNNTYQINARTELAVRYNDISPLENHHCAVAFQILAEPECNIFSNIPPDGFKQIRQGMITLILATDMARHAEIMDSFKEKMENFDYSNEEHMTLLKMILIKCCDISNEVRPMEVAEPWVDCLLEEYFMQSDREKSEGLPVAPFMDRDKVTKATAQIGFIKFVLIPMFETVTKLFPMVEEIMLQPLWESRDRYEELKRIDDAMKELQKKTDSLTSGATEKSRERSRDVKNSEGDCA

SEQ ID NO: 780278 - protein, 386 aa, Homo sapiens
MREELAARSSRTNCPCKYSFLDNHKKLTPRRDVPTYPKYLLSPETIEALRKPTFDVWLWEPNEMLSCLEHMYHDLGLVRDFSINPVTLRRWLFCVHDNYRNNPFHNFRHCFCVAQMMYSMVWLCSLQEKFSQTDILILMTAAICHDLDHPGYNNTYQINARTELAVRYNDISPLENHHCAVAFQILAEPECNIFSNIPPDGFKQIRQGMITLILATDMARHAEIMDSFKEKMENFDYSNEEHMTLLKMILIKCCDISNEVRPMEVAEPWVDCLLEEYFMQSDREKSEGLPVAPFMDRDKVTKATAQIGFIKFVLIPMFETVTKLFPMVEEIMLQPLWESRDRYEELKRIDDAMKELQKKTDSLTSGATEKSRERSRDVKNSEGDCA

SEQ ID NO: 780279 - protein, 305 aa, Homo sapiens
LCGVLEDPIGAFCVHDNYRNNPFHNFRHCFCVAQMMYSMVWLCSLQEKFSQTDILILMTAAICHDLDHPGYNNTYQINARTELAVRYNDISPLENHHCAVAFQILAEPECNIFSNIPPDGFKQIRQGMITLILATDMARHAEIMDSFKEKMENFDYSNEEHMTLLKMILIKCCDISNEVRPMEVAEPWVDCLLEEYFMQSDREKSEGLPVAPFMDRDKVTKATAQIGFIKFVLIPMFETVTKLFPMVEEIMLQPLWESRDRYEELKRIDDAMKELQKKTDSLTSGATEKSRERSRDVKNSEGDCA

SEQ ID NO: 780280 - protein, 589 aa, Homo sapiens
ASRGGWRRESTVKSPSAAAGRRMGSGSSSYRPKAIYLDIDGRIQKVIFSKYCNSSDIMDLFCIATGLPRNTTISLLTTDDAMVSIDPTMPANSERTPYKVRPVAIKQLSEREELIQSVLAQVAEQFSRAFKINELKAEVANHLAVLEKRVELEGLKVVEIEKCKSDIKKMREELAARSSRTNCPCKYSFLDNHKKLTPRRDVPTYPKYLLSPETIEALRKPTFDVWLWEPNEMLSCLEHMYHDLGLVRDFSINPVTLRRWLFCVHDNYRNNPFHNFRHCFCVAQMMYSMVWLCSLQEKFSQTDILILMTAAICHDLDHPGYNNTYQINARTELAVRYNDISPLENHHCAVAFQILAEPECNIFSNIPPDGFKQIRQGMITLILATDMARHAEIMDSFKEKMENFDYSNEEHMTLLKMILIKCCDISNEVRPMEVAEPWVDCLLEEYFMQSDREKSEGLPVAPFMDRDKVTKATAQIGFIKFVLIPMFETVTKLFPMVEEIMLQPLWESRDRYEELKRIDDAMKELHKDPAQLGQPVQNCSHAPRFPQAQSPSLFFTSLLPSLDFLVAPDVKLSVFFLVDAAANLVVVGG

SEQ ID NO: 780281 - protein, 463 aa, Homo sapiens
ASRGGWRRESTVKSPSAAAGRRMGSGSSSYRPKAIYLDIDGRIQKVIFSKYCNSSDIMDLFCIATGLPRNTTISLLTTDDAMVSIDPTMPANSERTPYKVRPVAIKQLSEREELIQSVLAQVAEQFSRAFKINELKAEVANHLAVLEKRVELEGLKVVEIEKCKSDIKKMREELAARSSRTNCPCKYSFLDNHKKLTPRRDVPTYPKYLLSPETIEALRKPTFDVWLWEPNEMLSCLEHMYHDLGLVRDFSINPVTLRRWLFCVHDNYRNNPFHNFRHCFCVAQMMYSMVWLCSLQEKFSQTDILILMTAAICHDLDHPGYNNTYQINARTELAVRYNDISPLENHHCAVAFQILAEPECNIFSNIPPDGFKQIRQGMITLILATDMARHAEIMDSFKEKMENFDYSNEEHMTLLKMILIKCCDISNEVRPMEVAEPWVDCLLEEYFMQVRVLQSNQASSHSY

SEQ ID NO: 780282 - protein, 455 aa, Homo sapiens
ASRGGWRRESTVKSPSAAAGRRMGSGSSSYRPKAIYLDIDGRIQKVIFSKYCNSSDIMDLFCIATGLPRNTTISLLTTDDAMVSIDPTMPANSERTPYKVRPVAIKQLSEREELIQSVLAQVAEQFSRAFKINELKAEVANHLAVLEKRVELEGLKVVEIEKCKSDIKKMREELAARSSRTNCPCKYSFLDNHKKLTPRRDVPTYPKYLLSPETIEALRKPTFDVWLWEPNEMLSCLEHMYHDLGLVRDFSINPVTLRRWLFCVHDNYRNNPFHNFRHCFCVAQMMYSMVWLCSLQEKFSQTDILILMTAAICHDLDHPGYNNTYQINARTELAVRYNDISPLENHHCAVAFQILAEPECNIFSNIPPDGFKQIRQGMITLILATDMARHAEIMDSFKEKMENFDYSNEEHMTLVSGLFCLGGQPGGGLAKQVIHPAHTGSQEAEIISLLGTRCL

SEQ ID NO: 780283 - protein, 106 aa, Homo sapiens
SAGRCCRPGIHPSNSPLPISQSDREKSEGLPVAPFMDRDKVTKLFPMVEEIMLQPLWESRDRYEELKRIDDAMKELQKKTDSLTSGATEKSRERSRDVKNSEGDCA

SEQ ID NO: 780284 - protein, 246 aa, Homo sapiens
ASRGGWRRESTVKSPSAAAGRRMGSGSSSYRPKAIYLDIDGRIQKVIFSKYCNSSDIMDLFCIATGLPRNTTISLLTTDDAMVSIDPTMPANSERTPYKVRPVAIKQLSEREELIQSVLAQVAEQFSRAFKINELKAEVANHLAVLEKRVELEGLKVVEIEKCKSDIKKMREELAARSSSKTKKTNCPCKYIFWETTKKCLLNGCSISPKALFFKKTWKPWGTHFCIWVWGPPRKNCVLEPINPNP

SEQ ID NO: 780285 - protein, 35 aa, Homo sapiens
VVEIEKCKSDIKKMREELAARSSRGRVCAGATGGR

SEQ ID NO: 780286 - protein, 56 aa, Homo sapiens
SGRGTVSGSSPPIRCKQAQIREVAIGPGDAVRARCSGSGGEVDTRDKRAERGVADS

SEQ ID NO: 780287 - protein, 860 aa, Homo sapiens
RESTPDELLRPPAELALEHQPPQAGLPPLALSQLFNPDACGRRVQTVVLYGTVGTGKSTLVRKMVLDWCYGRLPAFELLIPFSCEDLSSLGPAPASLCQLVAQRYTPLKEVLPLMAAAGSHLLFVLHGLEHLNLDFRLAGTGLCSDPEEPQEPAAIIVNLLRKYMLPQASILVTTRPSAIGRIPSKYVGRYGEICGFSDTNLQKLYFQLRLNQPYCGYAVGGSGVSATPAQRDHLVQMLSRNLEGHHQIAAACFLPSYCWLVCATLHFLHAPTPAGQTLTSIYTSFLRLNFSGETLDSTDPSNLSLMAYAARTMGKLAYEGVSSRKTYFSEEDVCGCLEAGIRTEEEFQLLHIFRRDALRFFLAPCVEPGRAGTFVFTVPAMQEYLAALYIVLGLRKTTLQKVGKEVAELVGRVGEDVSLVLGIMAKLLPLRALPLLFNLIKVVPRVFGRMVGKSREAVAQAMVLEMFREEDYYNDDVLDQMGASILGVEGPRRHPDEPPEDEVFELFPMFMGGLLSAHNRAVLAQLGCPIKNLDALENAQAIKKKLGKLGRQVLPPSELLDHLFFHYEFQNQRFSAEVLSSLRQLNLAGVRMTPVKCTVVAAVLGSGRHALDEVNLASCQLDPAGLRTLLPVFLRARKLGLQLNSLGPEACKDLRDLLLHDQCQITTLRLSNNPLTEAGVAVLMEGLAGNTSVTHLSLLHTGLGDEGLELLAAQLDRNRQLQELNVAYNGAGDTAALALARAAREHPSLELLHLYFNELSSEGRQVLRDLGGAAEGGARVVVSLTEGTAVSEYWSVILSEVQRNLNSWDRARVQRHLELLLRDLEDSRGATLNPWRKAQLLRVEGEVRALLEQLGSSGS

SEQ ID NO: 780288 - protein, 410 aa, Homo sapiens
MVGKSREAVAQAMVLEMFREEDYYNDDVLDQMGASILGVEGPRRHPDEPPEDEVFELFPMFMGGLLSAHNRAVLAQLGCPIKNLDALENAQAIKKKLGKLGRQVLPPSELLDHLFFHYEFQNQRFSAEVLSSLRQLNLAGVRMTPVKCTVVAAVLGSGRHALDEVNLASCQLDPAGLRTLLPVFLRARKLGLQLNSLGPEACKDLRDLLLHDQCQITTLRLSNNPLTEAGVAVLMEGLAGNTSVTHLSLLHTGLGDEGLELLAAQLDRNRQLQELNVAYNGAGDTAALALARAAREHPSLELLHLYFNELSSEGRQVLRDLGGAAEGGARVVVSLTEGTAVSEYWSVILSEVQRNLNSWDRARVQRHLELLLRDLEDSRGATLNPWRKAQLLRVEGEVRALLEQLGSSGS

SEQ ID NO: 780289 - protein, 120 aa, Homo sapiens
MLSLWGFTLAPAFPNPCSSVLTLVWGTSPGAAHPIHELSQWLMITHTGCPTSGLGPGFQAQQVGKKGGRVQGRTAQEHCPLLAVAMETESSGPVTDSRSPPWEPGGGLESPYSHPGQGAG

SEQ ID NO: 780290 - protein, 166 aa, Homo sapiens
LRIYNYLIFDKPEKNKQWGKDSLFNKWCWENWLAICRKLKLDPFLTPYTKINSRWIKDLNVRPKTIKTLEENLGNTIQDIGMGKDFMSKTPKAMATKAKIDKWDLIKLKSFCTAKETTIRVNRQPTKWEKIFATYSSDKGLISRIYNELKFTRKKQTTPSKSGQRT

SEQ ID NO: 780291 - protein, 101 aa, Homo sapiens
MSLAYSRCPINICRTKEQSEESRQRGAPPMPGPHSGRLLPCPGHTADGRQAEHLQPLLCCPPLAPSSLPHRNMEAQRFKDLPKGTRPGRGRAGSGTQVFRL

SEQ ID NO: 780292 - protein, 141 aa, Homo sapiens
SLGISRELTSRAVGGGQELTWLSGRQPHILLPPCAECNHFCPFRKVLHTRGIEPTVRWIPGPLDAWDGEMLEKVLAVCSDLGTLQSAFLSPSRNALPFNPDTWALGLHLNTLGGEQLTTPLKTASPPCSMFLVTCYLMTAS

SEQ ID NO: 780293 - protein, 83 aa, Homo sapiens
VVVWLYGGSGDGCNGLVMMEAILEVVQLNDFGNYNNESSNIGTHEEEEILEAEALAPVAMEAYTLQNHETKVAIGSSSSCSEL

SEQ ID NO: 780294 - protein, 78 aa, Homo sapiens
AVLRVVNTGVGDVVVWMLPVGRGVLSVVLVVDEIVVWKVVSVADTEEGVTVTMGVSLAVVVEGEDVMADVPFSVVVIE

SEQ ID NO: 780295 - protein, 105 aa, Homo sapiens
MCSSLKCSQGVVGRENILPSGEGPHSGSTWAVRRVSSPLVSLLFWSMCSGQKALRKGGERALAAPVPSNRSPTCMGPEHQKACCSLRNAWNTHLAHLCHKMHNFV

SEQ ID NO: 780296 - protein, 247 aa, Homo sapiens
MDAFTRFTNQTQGRDRLFRATQYTCMLLRYLLEPKAGKEKVVMKLKKLESSVSTGRKWFRLGNVVHAIQATEQSIHATDLVPRLCLTLANLNRVIYFICDTILWVRSVGLTSGINKEKWRTRAAHHYYYSLLLSLVRDLYEISLQMKRVTCDRAKKEKSASQDPLWFSVAEEETEWLQSFLLLLFRSLKQHPPLLLDTVKNLCDILNPLDQLGIYKSNPGIIGLGGLVSSIAGMITVAYPQMKLKTR

SEQ ID NO: 780297 - protein, 192 aa, Homo sapiens
  misc_feature (167)..(167): Xaa can be any naturally occurring amino acid
  misc_feature (188)..(188): Xaa can be any naturally occurring amino acid
MDAFTRFTNQTQGRDRLFRATQYTCMLLRYLLEPKAGKEKVVMKLKKLESSVSTGRKWFRLGNVVHAIQATEQSIHATDLVPRLCLTLANLNRVIYFICDTILWVRSVGLTSGINKEKWRTRAAHHYYYSLLLSLVRDLYEISLQMKRVTCDRAKKEKSASQDPCSXGERTNGPSSLFSILTLSCLTXKLVI

SEQ ID NO: 780298 - protein, 247 aa, Homo sapiens; identical to SEQ ID NO: 780296

SEQ ID NO: 780299 - protein, 204 aa, Homo sapiens
TNEITVHYVWVLLAGFRLGNVVHAIQATEQSIHATDLVPRLCLTLANLNRVIYFICDTILWVRSVGLTSGINKEKWRTRAAHHYYYSLLLSLVRDLYEISLQMKRVTCDRAKKEKSASQDPLWFSVAEEETEWLQSFLLLLFRSLKQHPPLLLDTVKNLCDILNPLDQLGIYKSNPGIIGLGGLVSSIAGMITVAYPQMKLKTR

SEQ ID NO: 780300 - protein, 204 aa, Homo sapiens; identical to SEQ ID NO: 780299

SEQ ID NO: 780301 - protein, 253 aa, Homo sapiens
CLEDFNFDGRIHPLLSQTQGGRLFRATQYTCMLLRYLLEPKAGKEKVVMKLKKLESSVSTGRKWFRLGNVVHAIQATEQSIHATDLVPRLCLTLANLNRVIYFICDTILWVRSVGLTSGINKEKWRTRAAHHYYYSLLLSLVRDLYEISLQMKRVTCDRAKKEKSASQDPLWFSVAEEETEWLQSFLLLLFRSLKQHPPLLLDTVKNLCDILNPLDQLGIYKSNPGIIGLGGLVSSIAGMITVAYPQMKLKTR

SEQ ID NO: 780302 - protein, 112 aa, Homo sapiens
MRCGGRNPSCRIRQTWVQILSCYPGARWSQASCSFSLASVYSSGKCSYEVSYQVQNILPSEIAIRNRIWKLPAQSLVHSRLLKTRGNITVSGRSTRVEYPVTFLSWLMALHA

SEQ ID NO: 780303 - protein, 102 aa, Homo sapiens
AGITGVRHHTQQIFVVLVATGFHLDGQAGLELLASGDLPASALQSAGITGVSHQPDIKFYMDYLIHSLDSSWEVHEVVSPFTEGETEAQGRRGDFNPGRQPS

SEQ ID NO: 780304 - protein, 104 aa, Homo sapiens
SGDLPALASQSAGITGVSHRAWPLEFFVDLFPLMEAPLPSGPFITASLCSHGFQTLLLSFGKSALASLFPNPSFSTWSSTKGPGASPHSSLSSPHPELFRSLTP

SEQ ID NO: 780305 - protein, 108 aa, Homo sapiens
PGSHTLATSTSLFSKHSTERRFLSTKQSIFSSLENSHTGFSTWPKCYLLQEAFSDCLSHPSLPGSELLPSVVFSRRRQKEKEVFQDCGVKWRERGRGEGRQGGAEGWE

SEQ ID NO: 780306 - protein, 107 aa, Homo sapiens
PGGNGASSDTPRPEVHPVTKPTLPQGRGHRSVRPGPSLGGGFLMGHLRQMPQSSRCLGFQGGPNLRWPGLDSSTCEESGLVCHVETTLSTPLPASPTLPSPPMSIQS

SEQ ID NO: 780307 - protein, 72 aa, Homo sapiens
QLNNYLFKAKGLRTWRGLVVQFPELRGQKIWSSDVQRQKEKGVPASIEREVSSALPFYSIWALSQLDDACTQ

SEQ ID NO: 780308 - protein, 114 aa, Homo sapiens
PAPGTGNVGYAVLPAQYVTQLQQSSYVSIASNSTFTGTSGIQTQARLPFNGIIPSESASRPRKPCNCTKSLCLKLYCDCFANGEFCNNCNCTNCYNNLEHENERQKAIKVIIFY

SEQ ID NO: 780309 - protein, 260 aa, Homo sapiens
GPGGASGALAPCQFGCSDLLRPPRRRAQRRAGGLARALPRPACVPRPAPPPPSRSPPRAPGSAGPMPAGRRGPAAQSARRPPPLLPLLLLLCVLGAPRAGSGAHTAVISPQDPTLLIGSSLLATCSVHGDPPGATAEGLYWTLNGRRLPPELSRVLNASTLALALANLNGSRQRSGDNLVCHARDGRSCQISCRGSGHPPCHVETQRPNPNWGHLCTLTSGHLSHPQQELGWPLSSNGHNSSDSHVRPPLGAPQWVCVCV

SEQ ID NO: 780310 - protein, 487 aa, Homo sapiens
GPGGASGALAPCQFGCSDLLRPPRRRAQRRAGGLARALPRPACVPRPAPPPPSRSPPRAPGSAGPMPAGRRGPAAQSARRPPPLLPLLLLLCVLGAPRAGSGAHTAVISPQDPTLLIGSSLLATCSVHGDPPGATAEGLYWTLNGRRLPPELSRVLNASTLALALANLNGSRQRSGDNLVCHARDGSILAGSCLYVGLPPEKPVNISCWSKNMKDLTCRWTPGAHGETFLHTNYSLKYKLRWYGQDNTCEEYHTVGPHSCHIPKDLALFTPYEIWVEATNRLGSARSDVLTLDILDVVTTDPPPDVHVSRVGGLEDQLSVRWVSPPALKDFLFQAKYQIRYRVEDSVDWKVVDDVSNQTSCRLAGLKPGTVYFVQVRCNPFGIYGSKKAGIWSEWSHPTAASTPRSERPGPGGGACEPRGGEPSSGPVRRELKQFLGWLKKHAYCSNLSFRLYDQWRAWMQKSHKTRNQDEGILPSGRRGTARGPAR

SEQ ID NO: 780311 - protein, 473 aa, Homo sapiens
GPGGASGALAPCQFGCSDLLRPPRRRAQRRAGGLARALPRPACVPRPAPPPPSRSPPRAPGSAGPMPAGRRGPAAQSARRPPPLLPLLLLLCVLGAPRAGSGAHTAVISPQDPTLLIGSSLLATCSVHGDPPGATAEGLYWTLNGRRLPPELSRVLNASTLALALANLNGSRQRSGDNLVCHARDGSILAGSCLYVGLPPEKPVNISCWSKNMKDLTCRWTPGAHGETFLHTNYSLKYKLRWYGQDNTCEEYHTVGPHSCHIPKDLALFTPYEIWVEATNRLGSARSDVLTLDILDVVTTDPPPDVHVSRVGGLEDQLSVRWVSPPALKDFLFQAKYQIRYRVEDSVDWKVVDDVSNQTSCRLAGLKPGTVYFVQVRCNPFGIYGSKKAGIWKRPGPGGGACEPRGGEPSSGPVRRELKQFLGWLKKHAYCSNLSFRLYDQWRAWMQKSHKTRNQDEGILPSGRRGTARGPAR

SEQ ID NO: 780312 - protein, 206 aa, Homo sapiens
GAGRGQRRISALSIRLLRLAPASASPRPATCGRPGPRPPAPGLRPAPCATAAEPQPAARPRQRRPHARRPPGPRRPIRAAAAAVAAPAAAALRPRGAASRIRSPHSCDQSPGSHASHRLLPAGHLLSARRPTRSHRRGPLLDPQRAPRRELKQFLGWLKKHAYCSNLSFRLYDQWRAWMQKSHKTRNQDEGILPSGRRGTARGPAR

SEQ ID NO: 780313 - protein, 93 aa, Homo sapiens
AFPSVGHEARVDPGLCPRCPHNRWGCGVNETGCSSSWEPGNGTFCHIVFALGLKGFQMSGPSRAIYGSPDATRVLRRGSGLEPMEAEPGATWS

SEQ ID NO: 780314 - protein, 33 aa, Homo sapiens
SVQWGDFRDDDTKHCFTDSLQHCEAAPANVCTL

SEQ ID NO: 780315 - protein, 65 aa, Homo sapiens
MAGCRLRQFRPLVHPSWARDLDDLESGSDWLLMTSSEMRAKMTGPHSIGLGAHSWVCRHPPVCLC

SEQ ID NO: 780316 - protein, 107 aa, Homo sapiens
MSQGDECYEEKSHLLKKSQKKKKKQKHTWVGRGPGPCGKKALPEATIPVGRGRAPQGEGSGDQGAKQRAAQREELRGQRTLGRGLSLHQFKKTPGGATRSGFVKNPE

SEQ ID NO: 780317 - protein, 179 aa, Homo sapiens
RERSLDGLSGFCLCWGLSTLHLSLAASGGCIHHAGQASFLIPCLLASRSPESTYSGFKIQSPQRDCLITDFVNVKSKAILEMNPFQSKSWKLCLVVILGMSLDQFSCNFLLMKTHAGESLWHVCLCHSFISVFWVRPRRTRMGSLCHRGFGGDGSCGKRVSCQPQNKRGKKRAQHRPKA

SEQ ID NO: 780318 - protein, 80 aa, Homo sapiens
DLYGEDDNAKSRKRCQDTRALCAGTVGILWCRFVAGLTVYWQEQIKIAKVSLFNGRGKTSVCSKHKVVFCALMKIDNNRS

SEQ ID NO: 780319 - protein, 129 aa, Homo sapiens
VARTVGTHHHAQLIFCIFSIVEVSPCWPGWSPSLELVIRLPRPSTVLGLQASATTPGPICIHFYVKHMHQFFCMKTFGHYCGTTEDQVSTIFFFHMYTDFYFVLDIVLHTIDIQYLLKLMKEKRNMKTV

SEQ ID NO: 780320 - protein, 97 aa, Homo sapiens
MCYSPKTPVLDVAKTKDAQTLTPGATEHPWPSGSEKTQHQDVPKLPASRSAVMSPRGQDTAHGGGTAKSCCFSPVNTELLHSPLLVSVPATQLVDRD

SEQ ID NO: 780321 - protein, 94 aa, Homo sapiens
DSLGTSPVSRGFLPGLRKGPDQMENSVTCSSSGVYFPGSSIRGNKARGTLRRPSVLEAGRQTLGILSPAVFLGPHWMTLSKLLPRLTFSSVEWR

SEQ ID NO: 780322 - protein, 109 aa, Homo sapiens
MTLVPPVLAPGPCSYCSTPSLGAPLLPRALGLCSRGLGTCMSLVRRPHKRAWPTSRSLPDSHFEIKIINTHTYRGRRVRGELSGVEAKAQGFTKHRAAVTWQPTKGVSE

SEQ ID NO: 780323 - protein, 739 aa, Homo sapiens
MEQSNDSLRVNHNDGEESKTSAQVFEHLICMDSRDSSFGQNDSPTVLPITTREANNSLISQNIPGPLTQTQTLSAEQFHLVDQNGQAIQYELQSLGESNAQMMIVASPTENGQVLRVIPPTQTGMAQVIIPQGQLVDVNSPRDVPEEKPSNRNLPTVRVDTLADNTSNYILHPQTSFPLPKKSVTGMLEEPLLGPLQPLSSNTPIWACRLRSCEKIGDSYRGYCVSETELESVLTFHKQQTQSVWGTRQSPSPAKPATRLMWKSQYVPYDGIPFVNAGSRAVVMECQYGPRRKGFQLKKVSEQESRSCQLYKATCPARIYIKKVQKFPEYRVPTDPKIDKKIIRMEQEKAFNMLKKNLVDAGGVLRWYVQLPTQQAHQYHELETPCLTLSPSPFPVSSLEEEETAVRDENCALPSRLHPQVAHKIQELVSQGIEQVYAVRKQLRKFVERELFKPDEVPERHNLSFFPTVNDIKNHIHEVQKSLRNGDTVYNSEIIPATLQWTTDSGNILKETMTVTFAEGNSPGESITTKVETNQTRGSLSPEPTHLLSSLSSFQPKIFTQLQGLQLQPRYTSPDESPAVVSVNNQPSSSPSGLLDTIGSAVMNNNSLLLGQSHSLQRDTCLTQNNSTASTMGNLPEPDQNLVAMDELVEVGDVEDTGNLEGTVHRILLGDVQTIPIQIIDNHSALIEENPESTISVSQVKQEPKEPALSMEAKKLWTIRNYLLHKLLKLFRIYNSGDF

SEQ ID NO: 780324 - protein, 216 aa, Homo sapiens
RSTVADSGPTVVGLLCALPVGRACALCWSPWRGLGAKTRLSRLVLNFLPSAPADFPCRLVGLSAAAGLGESEVWQRCLRRPTGRYLPTPLSSSCLLLLPSPPDPPELRATAGLRLQPQPVTGGAFRAKLGGLFGVPHGTASDPRPGTGLAGPRGAGWRRRRLGVFRRVAEPKDAPSPRRRSRTPWAERPMCGPSRRPAPCFLGFFFRFLSPFIPYV

SEQ ID NO: 780325 - protein, 207 aa, Homo sapiens
MIVASPTENGQVLRVIPPTQTGMAQVIIPQGQLVDVNSPRDVPEEKPSNRNLPTVRVDTLADNTSNYILHPQTSFPLPKKSVTGMLEEPLLGPLQPLSSNTPIWACRLRSCEKIGDSYRGYCVSETELESVLTFHKQQTQSVWGTRQSPSPAKPATRLMWKSQYVPYDGIPFVNAGTFLKNYFKRFSSSHSPLSKCDFPKVITFLFW

SEQ ID NO: 780326 - protein, 739 aa, Homo sapiens; identical to SEQ ID NO: 780323

SEQ ID NO: 780327 - protein, 709 aa, Homo sapiens
MDSRDSSFGQNDSPTVLPITTREANNSLISQNIPGPLTQTQTLSAEQFHLVDQNGQAIQYELQSLGESNAQMMIVASPTENGQVLRVIPPTQTGMAQVIIPQGQLVDVNSPRDVPEEKPSNRNLPTVRVDTLADNTSNYILHPQTSFPLPKKSVTGMLEEPLLGPLQPLSSNTPIWACRLRSCEKIGDSYRGYCVSETELESVLTFHKQQTQSVWGTRQSPSPAKPATRLMWKSQYVPYDGIPFVNAGSRAVVMECQYGPRRKGFQLKKVSEQESRSCQLYKATCPARIYIKKVQKFPEYRVPTDPKIDKKIIRMEQEKAFNMLKKNLVDAGGVLRWYVQLPTQQAHQYHELETPCLTLSPSPFPVSSLEEEETAVRDENCALPSRLHPQVAHKIQELVSQGIEQVYAVRKQLRKFVERELFKPDEVPERHNLSFFPTVNDIKNHIHEVQKSLRNGDTVYNSEIIPATLQWTTDSGNILKETMTVTFAEGNSPGESITTKVETNQTRGSLSPEPTHLLSSLSSFQPKIFTQLQGLQLQPRYTSPDESPAVVSVNNQPSSSPSGLLDTIGSAVMNNNSLLLGQSHSLQRDTCLTQNNSTASTMGNLPEPDQNLVAMDELVEVGDVEDTGNLEGTVHRILLGDVQTIPIQIIDNHSALIEENPESTISVSQVKQEPKEPALSMEAKKLWTIRNYLLHKLLKLFRIYNSGDF

SEQ ID NO: 780328 - protein, 739 aa, Homo sapiens; identical to SEQ ID NO: 780323

SEQ ID NO: 780329 - protein, 128 aa, Homo sapiens [sequence omitted]

SEQ ID NO: 780330 - protein, 139 aa, Homo sapiens
GKDGKACSVLGVGRGRGVDGPYRAAKDKELLFETAFLLPNLPPTQQVLHILYWEEGHTRLHHCPPSLSLPCPASRSTPSWGSFCDSPYNSLGWSGVCEQMQKAVLGRSADMPLACGWEVAEAKVLPRSGVARSSTGSVR

SEQ ID NO: 780331 - protein, 126 aa, Homo sapiens
KVRGRCYVCLRQGLVQSPSWSAGHNHSVLQPPPCRLNPSSHLSFPSSCIYGMHHACLIFGFLVEKSSRYVAQAGLELLASKRLVLLWPKYWDYRHETSYLAFFSFLFFFPQCYLFTFHILPLHIPQ

SEQ ID NO: 780332 - protein, 155 aa, Homo sapiens
LLSSSNPLGENAGGSGCCLVAAVSDQVPASASGHPLSRIQHHSLNSNFPPTRGLLCGLQPARMLSAAPVPYPLHSHTLPGHGYTVTHTPHSHTVTQSHVATQSHAVTQSHAVTQSHTVTQSHTVTQSHAVTQSHAATQSHAATRHTRSHSHTWPH

SEQ ID NO: 780333 - protein, 103 aa, Homo sapiens
ENIFMYGGRIETNDGNVTDELWVFNIHSQSWSTKTPTVLGHGQQYAVEGHSAHIMELDSRDVVMIIIFGYSAIYGYTSSIQEYHICELLKNCNFFIDWECFSL

SEQ ID NO: 780334 - protein, 117 aa, Homo sapiens
MTDFDRFKVMKAKKMRNRIIKNEVKKLQKAALLKASPKKAPGTKGTAAAAAAAAAAAAAAAKVPAKKITAASKKAPAQKVPAQKATGQKAAPAPKAQKGQKAPAQKAPAPKASGKKA

SEQ ID NO: 780335 - protein, 68 aa, Homo sapiens
QLSGCGGWPAALRNAALPLSQPTASLAQKHSAPPWLAALSPGLMDRTPTRAFAGPCCPGPALLCNREE

SEQ ID NO: 780336 - protein, 63 aa, Homo sapiens
MAFQLYFAKSSLYVVRVVLLTRQFRFTRLKLAYKEAKKAGQRSHNQHKVLSVAVSVVQSPCFN

SEQ ID NO: 780337 - protein, 119 aa, Homo sapiens
MYTAASWYPERCLAQGFPTPRPRISTSHGLLGTRSTAGGEPRASWHYCLSSASCQISSVALDSPRSLNPTVNCAWEGSRLHTPYDNLMPDDLRWNSFMLKPSCPISGKIVFHETGPWCQ

SEQ ID NO: 780338 - protein, 106 aa, Homo sapiens
HVSMQLAFPSFFSIGLSSPFHLEIFFASFKFQLCVNYLVKSPLISSPSSPAHTHYVELIIPFHILLICLVNASILICITPNHNYYKLLEGQDCALFIFTFPLSGPS

SEQ ID NO: 780339 - protein, 158 aa, Homo sapiens
PSDSQMSDSSGVSPMTNSSELKPESRDDPFCIGNLKSELLLNILKQDQHSQKITGVFELMRELTHMEYDLEKRGITSKVLPLQLENIFYKLLADGYSEKIEHVGDFNQKACSTSEMMEEKPHILGDIKSKEGNYYSPNLETVKEIGLESSTVWASTLP

SEQ ID NO: 780340 - protein, 136 aa, Homo sapiens
CIFQQQLTGIPLGKLPPSKCSFILYLQNPVTHINKQMGAFQLRITDKPSIIIDKLKNISSHYCLRRHLLCISLNPWLCSPCSSDSLPSTSSCLLISSPIVSEIGGFLVSLTSRMKPRTLVVSVTVLKGGVSRVCSF

SEQ ID NO: 780341 - protein, 58 aa, Homo sapiens
MDGNLLQWVPKYAGVSPRDRCKLFCRARGRSEFKVFEAKVRITLGLRSRDGEEGRLSP

SEQ ID NO: 780342 - protein, 890 aa, Homo sapiens [sequence omitted]

SEQ ID NO: 780343 - protein, 642 aa, Homo sapiens
MFPAPAAPRWLPFLLLLLLLLLPLARGAPARPAAGGQASELVVPTRLPGSAGELALHLSAFGKGFVLRLAPDDSFLAPEFKIERLGGSGRATGGERGLRGCFFSGTVNGEPESLAAVSLCRGLSGSFLLDGEEFTIQPQGAGGSLAQPHRLQRWGPAGARPLPRGPEWEVETGEGQRQERGDHQEDSEEESQEEEAEGASEPPPPLGATSRTKRFVSEARFVETLLVADASMAAFYGADLQNHILTLMSVAARIYKHPSIKNSINLMVVKVLIVEDEKWGPEVSDNGGLTLRNFCNWQRRFNQPSDRHPEHYDTAILLTRQNFCGQEGLCDTLGVADIGTICDPNKSCSVIEDEGLQAAHTLAHELGHVLSMPHDDSKPCTRLFGPMGKHHVMALIDGTLCGPETLAICVRGQCVKAGCDHVVDSPRKLDKCGVCGGKGNSCRKVSGSLTPTNYGYNDIVTIPAGATNIDVKQRSHPGVQNDGNYLALKTADGQYLLNGNLAISAIEQDILVKGTILKYSGSIATLERLQSFRPLPEPLTVQLLTVPGEVFPPKVKYTFFVPNDVDFSMQSSKERATTNIIQPLLHAQWVLGDWSECSSTCGAGWQRRTVECRDPSGQASATCNKALKPEDAKPCESQLCPL

SEQ ID NO: 780344 - protein, 342 aa, Homo sapiens
SGVRCVSRRARAPPWRLRRRVLLRRPVAPSRKLGSARAPAPALQIRKGTSSGLPGRGGGSGPGNNLSSVAGNWRGSSFAVERPGMAKYQGEVQSLKLDDDSVIEGVSDQVLVAVVVSFALIATLVYALFRNVHQNIHPENQELVRVLREQLQTEQDAPAATRQQFYTDMYCPICLHQASFPVETNCGHLFCGACIIAYWRYGSWLGAISCPICRQTVTLLLTVFGEDDQSQDVLRLHQDINDYNRRFSGQPRSIMERIMDLPTLLRHAFREMFSVGGLFWMFRIRIILCLMGAFFYLISPLDFVPEALFGILGFLDDFFVIFLLLIYISIMYREVITQRLTR

SEQ ID NO: 780345 - protein, 342 aa, Homo sapiens; identical to SEQ ID NO: 780344

SEQ ID NO: 780346 - protein, 277 aa, Homo sapiens
SGVRCVSRRARAPPWRLRRRVLLRRPVAPSRKLGSARAPAPALQIRKGTSSGLPGRGGGSGPGNNLSSVAGNWRGSSFAVERPGMAKYQGEVQSLKLDDDSVIEGVSDQVLVAVVVSFALIATLVYALFRNVHQNIHPENQELVRVLREQLQTEQDAPAATRQQFYTDMYCPICLHQASFPVETNCGHLFCGACIIAYWRYGSWLGAISCPICRQTVTLLLTVFGEDDQSQDVLRLHQDINDYNRRFSGQPRSVSNAKACSKLEEDTFLLFCKVRFT

SEQ ID NO: 780347 - protein, 94 aa, Homo sapiens
AEFAACRGEHALRPGGCGDGSSSAVRSRPRGSSAVRVRPHPHSKLERGRLVGCPGGVAGAVLEIICPLSPGTGEVVPSRWRDLEWPNIKVKFKV

SEQ ID NO: 780348 - protein, 418 aa, Homo sapiens
AEFAACRGEHALRPGGCGDGSSSAVRSRPRGSSAVRVRPHPHSKLERGRLVGCPGGVAGAVLEIICPLSPGTGEVVPSRWRGTSGARRHAHPIGARGAADGGVWPSWGSSGRRGSAGRRESPPPSPRAPPSSGSPRIAPRLSGVAGDGGGADAESGSRPGMAKYQGEVQSLKLDDDSVIEGVSDQVLVAVVVSFALIATLVYALFRNVHQNIHPENQELVRVLREQLQTEQDAPAATRQQFYTDMYCPICLHQASFPVETNCGHLFCGACIIAYWRYGSWLGAISCPICRQTVTLLLTVFGEDDQSQDVLRLHQDINDYNRRFSGQPRSIMERIMDLPTLLRHAFREMFSVGGLFWMFRIRIILCLMGAFFYLISPLDFVPEALFGILGFLDDFFVIFLLLIYISIMYREVITQRLTR

SEQ ID NO: 780349 - protein, 166 aa, Homo sapiens
NWRGSSFAVERYVRRAAATPTLSGPAEPRTAGSGLLGVALAAEALRGGGSRRLLPPGPLPRLEAPESPRGCPESPATVEGPTRRAALGGFGGGEDTAAPSRVARSVTLRTLLNAGGVCARSPIRKDTGRPRACVSQRSELPSLNGEADRSGASTSLEARICLLGCR

SEQ ID NO: 780350 - protein, 200 aa, Homo sapiens
SGVRCVSRRARAPPWRLRRRVLLRRPVAPSRKLGSARAPAPALQIRKGTSSGLPGRGGGSGPGNNLSSVAGNWRGSSFAVERPGMAKYQGEVQSLKLDDDSVIEGVSDQVLVAVVVSFALIATLVYALFRNVHQNIHPENQELVRVLREQLQTEQDAPAATRQQFYTDMYCPICLHQASFPVETNCGHLFCGNLTPNSIW

SEQ ID NO: 780351 - protein, 284 aa, Homo sapiens
SGVRCVSRRARAPPWRLRRRVLLRRPVAPSRKLGSARAPAPALQIRKGTSSGLPGRGGGSGPGNNLSSVAGNWRGSSFAVERPGMAKYQGEVQSLKLDDDSVIEGVSDQVLVAVVVSFALIATLVYALFRNVHQNIHPENQELVRVLREQLQTEQDAPAATRQQFYTDMYCPICLHQASFPVETNCGHLFCGACIIAYWRYGSWLGAISCPICRQTGSSEKSSRASEQTHQEAVACLDTQNSPACTVGCRSGPQHIPHDRMLPSASPRLCFTLLDCVSILWFSG

SEQ ID NO: 780352 - protein, 418 aa, Homo sapiens; identical to SEQ ID NO: 780348

SEQ ID NO: 780353 - protein, 41 aa, Homo sapiens
VPLCSDHFSENPGCPSKGTEKQGASQSARSLCGFLSLHPEA

SEQ ID NO: 780354 - protein, 113 aa, Homo sapiens
ARLGLLKCWDYRHEPPCPAETAFLKAPGEVAAVMLRVPGLHICCRALPFPTPAAFLTFPPLSLSLCTDCLLPSGLRTQFFLSGMSCYSPLPYTPHLLFPQQHPVLKPSQDLPG

SEQ ID NO: 780355 - protein, 109 aa, Homo sapiens
VILFLYLESKLPAVQCAVGAGQESTSGSHHFLSHIISVSGKQASSSPVCCWSRTRIHIGKPPLPESYYFCIWKASFQQSSVLLEGSTFIKRKEVLGHETHLPCLLCEGR

SEQ ID NO: 780356 - protein, 168 aa, Homo sapiens
RQRLFKRWDGGYGLHMQNPPGLREEPRAPWAQQEGTHSTAQGLYMRGKELTAKSQPGCDCALPSSLNSTYPISLNSTYPISLMLPPPTVTAPTGPRGPALRFRSEPHVHTDRPERCLRCHLHLDALKWEEAVQGPPDRDLCGCYSVSSVLPGCAEPWNHGKTFTCTAA

SEQ ID NO: 780357 - protein, 35 aa, Homo sapiens
MGLSQDSGWLGLLVLCLSPLPSYYSYQYDAVRSGL

SEQ ID NO: 780358 - protein, 176 aa, Homo sapiens
MDQVFHTRDQAKTRLPLPLLGPHCPQKAAAVIMGNIFGNLLKSLIGKKEMRILMVGLDAAGKTTILYKLKLGEIVTTIPTIGLIFVVDSNDRERVNEAREELMRMLAEDELRDAVLLVFANKQDLPNAMNAAEITDKLGLHSLRHRNWYIQATCATSGDGLYEGLDWLANQLKNKK

SEQ ID NO: 780359 - protein, 181 aa, Homo sapiens
MGNIFGNLLKSLIGKKEMRILMVGLDAAGKTTILYKLKLGEIVTTIPTIGFNVETVEYKNISFTVWDVGGQDKIRPLWRHYFQNTQGLIFVVDSNDRERVNEAREELMRMLAEDELRDAVLLVFANKQDLPNAMNAAEITDKLGLHSLRHRNWYIQATCATSGDGLYEGLDWLANQLKNKK

SEQ ID NO: 780360 - protein, 56 aa, Homo sapiens
SLVNWASLRSEGKLTSFHWVSILGHSRCQAVGPELGRWVWLRCSLPSAADLGRPPC

SEQ ID NO: 780361 - protein, 47 aa, Homo sapiens
MGTQVAGNRVIAREHRSKVWNLPRSTEQAFLPSAHGFVYQLCARLRL

SEQ ID NO: 780362 - protein, 116 aa, Homo sapiens
LNRLIQRIRSEIGNVKKQCADLETAIADAEQRGDCALKDARAKLDELEGALHQAKEELARMLREYQELVSLKLALDMEIATYRKLLESEECRMSGEYPNFVSISVISSTNAGAGGA

SEQ ID NO: 780363 - protein, 213 aa, Homo sapiens
EGGRTAQPTAVLRKFLEPRLISTEENTQAAETMGPLSAPPCTQHIKWKGVLLTASLLNFWNPPTIAQVTTEAQPPKVSEGKDVLLLVHNLPQNLTGYMWYKGQIRDLYHYITSYVVDGQRITYGPAYSGRETVYSNASLLIQNVTREDGVSYTLHIIQRGDGTRGVTGNFTFTLYPKLPKPYITINNSKPRENKDVLPFTCDPKSENYTYTWW

SEQ ID NO: 780364 - protein, 117 aa, Homo sapiens
SVSGLLPPIRQYPMPWDSGGSGIPAFHLFFHLFVLFTLCTKKRGLYYHRLLFLNRNSGWAQWNTPVIPALWEAEAGGSPEVSSSRPAWPTWPNPVSTKNRKISWAWWCASVIPATRE

SEQ ID NO: 780365 - protein, 130 aa, Homo sapiens
MRTLNTAGWLRNCWRTVKYRENGETELAMGSWHCPIPNARRGPCPAAAASSRRLRRGPAGTGPANRGHSQLRDSPGSTVRQDLGTLPKLEMGILAMAVWTALGGHCRWHSAWLGGSCCCFSSCWSLTGGS

SEQ ID NO: 780366 - protein, 246 aa, Homo sapiens
MSGAGEALAPGPVGPQRVAEAGGGQLGSTAQGKCDKDNTEKDITQATNSHFTHGEMQDQSIWGNPSDGELIRTQPQRLPQLQTSAQVPSGEEIGKIKNGHTGLSNGNGIHHGAKHGSADNRKLSAPVSQKMHRKIQSSLSVNSDISKKSKVNAVFSQKTGSSPEDCCVHCILACLFCEFLTLCNIVLGQASCGICTSEACCCCCGDEMGDDCNCPCDMDCGIMDACCESSDCLEICMECCGICFPS

SEQ ID NO: 780367 - protein, 246 aa, Homo sapiens; identical to SEQ ID NO: 780366

SEQ ID NO: 780368 - protein, 70 aa, Homo sapiens
SCLSQQLHAPPCCAISTGSPWGVLGDKREGTDFEDQHLHSYPGSTTHQCHSLGTLTQPYFRKERMEPHGN

SEQ ID NO: 780369 - protein, 76 aa, Homo sapiens
MEGHLEITGVGMKVVVFLFVFYSETPNFKYAQLNVSYSGLVNDNWKLGMNKRSLRYIKRCLGALPAACMLGPEGVP

SEQ ID NO: 780370 - protein, 49 aa, Homo sapiens
MRTDNNPLSGPADAPAPPVESSPPPTQTLPGAQCPLGEAASQGGAIPRR

SEQ ID NO: 780371 - protein, 126 aa, Homo sapiens
MRSQQHKYSRMNVSYSIVLTINMMSTKGLRYISPALLTTLEYIRFTLVYIGIDHNMIKLPQYQRRMLLYEIRTSLHAGLSTGQFSRIISTSHCVLPVMFKEYDNFILGPRYHTVFREFTKIELALL

SEQ ID NO: 780372 - protein, 55 aa, Homo sapiens
WPSVLSFALVAPPESRAVAKPGACLLLGHPGMSCLLASARWSGRNPWPWWDRQAS

SEQ ID NO: 780373 - protein, 78 aa, Homo sapiens [sequence omitted]

SEQ ID NO: 780374 - protein, 107 aa, Homo sapiens
MGTLCLLVQGVEEPRHRGWIQQSGAGLRGIPRFLGWVLVSGFLPALVASFYEAPSGSLWVQAILRVWTLWLGTSSGMAFGGGVWPMVRQWRRAQGGPAESPGKLHSF

SEQ ID NO: 780375 - protein, 113 aa, Homo sapiens
AGGQQIGFLLGSCGIALALTSEVCLKGLPKTQNGEIVQFKGWPRLKWVVTDSKYLSKPPKDWQPHISPAGTEPAYIEYKTSKEGSVMGVTVSRLAMLSHCQALSQACNYSEGQ

SEQ ID NO: 780376 - protein, 76 aa, Homo sapiens
PCLTLSKPRNVDRGYAATGLTKAALASPWRAGPGAAGTEWTPTWELLHGKTHAKVDLLDCSVIPLELDGLVAHGLE

SEQ ID NO: 780377 - protein, 112 aa, Homo sapiens
EQSLIFPQVHRAGDLGIGKNCSVPGPRVPCSTKMAAVITGLGNSSAHFEFLEGPLKDRYKQDLTAKAGINTLSFNAQILTNINSINNIEANMTSTNGPSKALSDQPWRDGDV

SEQ ID NO: 780378 - protein, 129 aa, Homo sapiens
ELFRPTWACPGQTRGIPPCQQEGLTFTFKLITKGVRELCGESGAPASMIPVGRFSVLIPSPWMDKLQNPQATASRLGQRGRPGAIQWLAGSLTHLPTNSSCREIGSTCPRWSCFGVMSAGVPVMLTEQQ

SEQ ID NO: 780379 - protein, 112 aa, Homo sapiens
RPDQTRGIGGSGPLSWASKNHSHRVRLCRPRGKAAWLPQTPDTPLLACRLPSPMATLDRDTTRDTLREPDFHMQRGIWGWFGSVSTGGGFSDHPPPTSFSARGVGSLPGGVE

SEQ ID NO: 780380 - protein, 79 aa, Homo sapiens
LLDLLTVSLSIVQARLDSFDNSDIKALLGAMQSAFGVPASHRTHLEKNNGPTLRTLGFTGNYSSPDDAGPDQDFTHQLA

SEQ ID NO: 780381 - protein, 79 aa, Homo sapiens; identical to SEQ ID NO: 780380

SEQ ID NO: 780382 - protein, 455 aa, Homo sapiens
MDETQGPLAMTVHLLANSGHGSLLQRTLDQLLDCICPEVRLFQVSERASPVKYCEKSHSKRYRFPGMSVLLFLHESPGEDRLFRVLDSLQHSPWQCYPTQDTRGRLCPYFFANQEFYSLDSQLPIWGVRQVHCGSEILRVTLYCSFDNYEDAIRLYEMILQREATLQKSNFCFFVLYASKSFALQLSLKQLPPGMSVDPKESSVLQFKVQEIGQLVPLLPNPCMPISSTRWQTQDYDGNKILLQVQLNPELGVKNGILGAGMLPLGSRLTSVSAKRTSEPRSQRNQGKRSQGHSLELPEPSGSPTSDRCAGTSWKSPGRSFQVSSPAMGAHLHLSSHHLESGARMKVLNRENSFQKLEAETNVDTGLTIINSEPRQTYFGGFPRDLQTSQPPFCLPASSLGVATSKNNSVLKERVSPLPLAGQRDLGTRKTISECLLHLQVQGEEKEEDEEEFFI

SEQ ID NO: 780383 - protein, 114 aa, Homo sapiens
NFCHFFLQVKTWFQNQRMKSKRWQKNNWLKNSNGVTQGCLVNPTGNLPMWSNQTWNNSTWSNQTQNIQSWSNHSWNTQTWCTQSWNNQAWNSPFYNCGEESLQSCMQFQPNSPA

SEQ ID NO: 780384 - protein, 68 aa, Homo sapiens
ALPILPFRLTKNFSHDSEKYHSAIRADLLLPNCCQSGEAIALGGAEYENMRCRLGVVANVCNPSTLGG

SEQ ID NO: 780385 - protein, 124 aa, Homo sapiens
AQRDFPSRFSAPGSPVPQVPTDPPVRPILRAPSVAVLRSTVLRLKPCDVLATTLRICRVLKFLRTPHSCPVRKRPWPGSSDARPRLGALSSLARRRGELAREPLVVCRQRCYVVALILHAWSRL

SEQ ID NO: 780386 - protein, 61 aa, Homo sapiens
AAGSGAAGTERTQDPRDIYLELTTVGNDLELSGLAYQEEGKTDGNAGYMVLETELRPPGFM

SEQ ID NO: 780387 - protein, 101 aa, Homo sapiens
CSTLNCHWPGVGTHIVLYQDCCQSRVTEADGQTGSKVWTATFCAEPSLRVVRVDEQGDPGPRLAWLQASQEGEERRPKRRSTCLRPCVGLCPAFCQPRLLS

SEQ ID NO: 780388 - protein, 114 aa, Homo sapiens
GFEAESSLLPSIIGSFTGRWPLMPVGLSGVRGPAWPGGRPSFQFSRTPAASCWGPILPWEFKASNPEPGVLVRSSRGAVSRHWMREGPLRVFPGSGLVLLAGGEAAHPAVSLAP

SEQ ID NO: 780389 - protein, 95 aa, Homo sapiens
MKHSLGTRAVRSILPDHLTVETSLSHPPGQRPNSLTAGTSLPYPAGQQALPPTPLLPSPMITPACERQLVLAVSWFPPLQGFASNKGVAVEAVKS

SEQ ID NO: 780390 - protein, 116 aa, Homo sapiens
FFTYRKKESSDTGPVLHTLVRMKHSLGTRAVRSILPDHLTVETSLSHPPGQRPNSLTAGTSLPYPAGQQALPPTPLLPSPMITPACERQLVLAVSWFPPLQGFASNKGVAVEAVKS

SEQ ID NO: 780391 - protein, 95 aa, Homo sapiens; identical to SEQ ID NO: 780389

SEQ ID NO: 780392 - protein, 39 aa, Homo sapiens
SKVFESSLRILNGTSGPTQGLRDPDTLKEEHRLGWLFHL

SEQ ID NO: 780393 - protein, 52 aa, Homo sapiens
MLKVRSNSRTPRQASSTDNTPKLKLNEQVLISHGFTEASTSEPTHSDSPAWL

SEQ ID NO: 780394 - protein, 99 aa, Homo sapiens
VLACRLSFLPTLSSSSASPQLCQEVGCGCRTDLSGLSVAGKLDQERQVGGQAGEPSVQGGSGEGGGWGQRGRAGEALDGAMRLCREDQDEGASSDSFTN

SEQ ID NO: 780395 - protein, 111 aa, Homo sapiens
MPSLSQPPPTTEQTSSAQEGCLTTATDITHTMPTAQGLKSLPTCLAHCCHSWCLSKPFGGPIIGLPGPTDTSASIHHPETQRQTCSAHCCHHWDLKIGLPDIPLPNRTCLH

SEQ ID NO: 780396 - protein, 107 aa, Homo sapiens
MVNKDSQRRNVQVIFTSLCPCSLGKIWPSVTVIFILSLLESATLSRPTVMALVEMLASSTETDSASCLQVTLPLALVPDLNLFASITSCGFLNLWPFESQSLCSETL

SEQ ID NO: 780397 - protein, 112 aa, Homo sapiens
AHTFHRAQGSFGGQRSGENATGRRKSPASSVTTGIQPEPPGQNSGEGANPVRFAKDLNLRPETINIIEDNIGKTLLDIGLGKDFMTKYPKPRAKDINRKFSKEDTQMANKHM

SEQ ID NO: 780398 - protein, 97 aa, Homo sapiens
RGDSTGSCVWASLFYKHRQVAALLCPLYPESGCADALSYCPGKRPVNAILQMQMITLSCSYSPRGEQAIEGTQSKLLALTKNLMHLGKDAPGTQHGP

SEQ ID NO: 780399 - protein, 75 aa, Homo sapiens
NSQLWAPSYVTLLKPILNSWSQGPGVPGPLAQVTTTHSGRQAAATQTFCPNIFPQSLWLLGRFSGTSVWTTLFML

SEQ ID NO: 780400 - protein, 87 aa, Homo sapiens
FVPRPRPDADRAHGCRAEAGGFSLVPCTASGPVWPLLGLGWGCSRPRDAQAEARDLHEQSGDTPNSSVSRLRDPTVGVGRGSPCQGW

SEQ ID NO: 780401 - protein, 79 aa, Homo sapiens
AAVRMWHHSIGLRPERHQTIPNGGAFCKMTASNFQSSWLRKCFRLKETEDTELNAICDSGLDPPFSRMQLGQPEKSDGV

SEQ ID NO: 780402 - protein, 53 aa, Homo sapiens
MATEGPQVQQLWTDCCKNTPLPWSQPACHSRCHPRGPSTGDLVEGQVTRGRDR

SEQ ID NO: 780403 - protein, 334 aa, Homo sapiens
ERLGHHLQGLRAAFLGCLTDVRQALAAPRVAGKEGPGLAELLANVASSILSHIKASLAAVHLFTAKEVSFSNKPYFRGEFCSQGVREGLIVGFVHSMCQTAQSFCDSPGEKGGATPPALLLLLSRLCLDYETATISYILTLTDEQFLVQDQFPVTPVSTLCAEARETARRLLTHYVKVQGLVISQMLRKSVETRDWLSTLEPRNVRAVMKRVVEDTTAIDVQVGLLYERGCSQGPEQRLQQEDFLRVQQLSASRAVRPSYTPSAPMDTNLLSNIQKLFSERIDVFSPVEIQQGVGADRHHQDQPEDAAMHRSVPAPHGTQDLVSVVLPRRQLSG

SEQ ID NO: 780404 - protein, 379 aa, Homo sapiens
  misc_feature (228)..(228): Xaa can be any naturally occurring amino acid
  misc_feature (241)..(241): Xaa can be any naturally occurring amino acid
  misc_feature (253)..(253): Xaa can be any naturally occurring amino acid
  misc_feature (313)..(313): Xaa can be any naturally occurring amino acid
  misc_feature (317)..(317): Xaa can be any naturally occurring amino acid
  misc_feature (319)..(319): Xaa can be any naturally occurring amino acid
  misc_feature (377)..(377): Xaa can be any naturally occurring amino acid
ERLGHHLQGLRAAFLGCLTDVRQALAAPRVAGKEGPGLAELLANVASSILSHIKASLAAVHLFTAKEVSFSNKPYFRGEFCSQGVREGLIVGFVHSMCQTAQSFCDSPGEKGGATPPALLLLLSRLCLDYETATISYILTLTDEQFLVQDQFPVTPVSTLCAEARETARRLLTHYVKVQGLVISQMLRKSVETRDWLSTLEPRNVRAVKKRKMKIPPPSTYKKPLHQXGVPKAQNNNPNKXTSPLQQQPPPPXPYPPTQTPSAPMDTNLLSNIQKLFSERIDVFSPVEIQQGVGADRHHQDQPEDPPGVCAPXTFGXFXLQQVQVDCHFLQLYLWRFVADEELVHLLLDEEVASAALRSPNPVPMEPSVVEVICERXQA

SEQ ID NO: 780405 - protein, 75 aa, Homo sapiens
AHGWGWARAKHLGSGFFPGPSAGRRGDLGRGWGFLASCDFGRLAPLLVQSGKAQGEPGEVPPPLWAELAISSSSL

SEQ ID NO: 780406 - protein, 114 aa, Homo sapiens
LPRPGVGGCVCAWQVATQACSPAPRCSFLAWIPFSSPSAREVDLNLPLLRNAQVLMSQFILSMWNEMVISWLSPDRCGWPQAGPLTSLSAFISRVWPSPGLAVGLRQDTVRRAF

SEQ ID NO: 780407 - protein, 114 aa, Homo sapiens
LPSPVWAPAAQGAEQKPPASRAGGGSACAPRPAWSGPAGREARRGAGPVTGRGDPAGGGRGTRRAFAPEPGPRPDAERCRSAWPPPASTALQTKPARDPAPGDLKAEALNSPLI

SEQ ID NO: 780408 - protein, 83 aa, Homo sapiens
SGGATGTRPGEQSLLEPGREGHPRLQHAPSALPASLPPEWGPRRPLVPVTQQRRVSLRRVSGDAAARIRTGDLKAEALNSPLI

SEQ ID NO: 780409 - protein, 114 aa, Homo sapiens; identical to SEQ ID NO: 780407

SEQ ID NO: 780410 - protein, 74 aa, Homo sapiens
AGGATGTRPGEQSLLEPGREGHPRLQHAPSALPASLPPEWGPRRPLVPVTQQRRVSLRRVSGDAAARIRTGAVE

SEQ ID NO: 780411 - protein, 102 aa, Homo sapiens
KSGAAVGGVLQALLPRKSCCPEWRGSRMKEGMSNNSTTSISQARKAVEQLKMEACMDRVKVSQAAADLLAYCEAHVREDPLIIPVPASENPFREKKFFCTIL

SEQ ID NO: 780412 - protein, 31 aa, Homo sapiens
MHQPLLAPDVASVPVLGPYSSRQAPHLPYSI

SEQ ID NO: 780413 - protein, 116 aa, Homo sapiens
TGFRLSWAAPRGPHTGCAFLRPPAASKSSGRSASLPASRHLCLALLMVLPKRLFAVGHPVHRGTSCALWGVEPHPWSPPTDDNDTPSYETRNDSTHCQMSPRAKSPTWALCYPLMI

SEQ ID NO: 780414 - protein, 115 aa, Homo sapiens
MSSSELLSKPLTVVYKSLHDLSCYIFHSRSRPDLRGFSLNLLNMLLPEGPFPLPLPGMLFPRHASAWIISMPPQVFALMKPSLTTLFKIVIPSHSGPYLLETECFCPPKIPMLKP

SEQ ID NO: 780415 - protein, 38 aa, Homo sapiens
CDTNRHHSVSSQENKKDWATGKTQLQEITEEMKHAPRV

SEQ ID NO: 780416 - protein, 104 aa, Homo sapiens
PSAPLCLPAFQAPHPDVASPPPSAASATAALSQLAFLALSCHPPTVHHHPCPGSCCSLFCLFSAPWTSLLASTLLTAIQVTVLKTKPTEILLSPKLPKVPISTG

SEQ ID NO: 780417 - protein, 342 aa, Homo sapiens
  misc_feature (335)..(335): Xaa can be any naturally occurring amino acid
APPPALPSPPRRVQAGAGRPGVAALGGRAAPERAVGWRGSCARPAMEVEEAFQAVGEMGIYQMYLCFLLAVLLQLYVATEAILIALVGATPSYHWDLAELLPNQSHGNQSAGEDQAFGDWLLTANGSEIHKHVHFSSSFTSIASEWFLIANRSYKVSAASSFFFSGVFVGVISFGQLSDRFGRKKVYLTGFALDILFAIANGFSPSYEFFAVTRFLVGMMNGGMSLVAFVLLNECVGTAYWALAGSIGGLFFAVGIAQYALLGYFIRSWRTLAILVNLQGTVVFLLSLFHSLNHLVGYTPRGRLSEAEEGLYLIAKRNRKLKCTFSLTHPANRSXRETGSFL

SEQ ID NO: 780418 - protein, 33 aa, Homo sapiens
MCSIVAIVIHKGIAEPPQLSAVILLASIPAVRG

SEQ ID NO: 780419 - protein, 38 aa, Homo sapiens
YDMTQETSQTIEKSEYYYIKYVGLIGHLYTNLDVYLIP

SEQ ID NO: 780420 - protein, 86 aa, Homo sapiens
DRAGTAKQRLGRILKIHRNGKLLLRQVIVQAECRQAIHEPKLKRRDAQSVKEQTIHPILPFPCPSFVDCLHCPDSAPISHLDVFVT

SEQ ID NO: 780421 - protein, 106 aa, Homo sapiens
MAPSSPTPSGSGHPRQLGHTLSSRLHIVLAPAPRTRCPPDPTGQRFKGRSDVSSICASSVNKDVEPGAQVKGLLQAKLLHEERNIINAAPVTVTDSKAYDQNEFLT

SEQ ID NO: 780422 - protein, 364 aa, Homo sapiens
GGKLFVQDEKGAFNFDQETVINPETGEQIQSWYRSGETWDSKFSTIASSYEECRAESVGLYLCLHPQVLEIFGFEGADAEDVIYVNWLNMVRAGLLAPESSTDLKAFNVVTRHHMQARLVTPDESAVRLEREIVIIDFLTTGSDGSPDVPVSASTCSKIRSVGNPALERFLRRLQVLKSTGDVAGGRALYEGYATVTDAPPECFLTLRDTVLLRKESRKLIVQPNTRLEGSDVQLLEYEASAAGLIRSFSERFPEDGPELEEILTQLATADARFWKAPVRPHLAKLEEDVWPCPQFHQTKAASGPPFVCVFRGWGGGGAGAWTLVLPQLRVVTQPLPFVSTFQPANCFPSVISFHLHCRTWSEQ

SEQ ID NO: 780423 - protein, 110 aa, Homo sapiens
HIRTEAGSHPLSVPTLHLGTFPPQSLITSVLSMLYHALGWVPLWPFHLHSLLSGPSFSNADLTRSLSCFKSLRDGCQPRGRREHGLGRWPCLPMVSYHLLAVSSGAMLGS

SEQ ID NO: 780424 - protein, 81 aa, Homo sapiens
STCLCLGRGDFSWQATSRGWNVNLHWASGSSPCLPVGTPGITTAAFMDAQLSPHDSDSGRVGWRRGFYNPQVTDAQPGFTE

SEQ ID NO: 780425 - protein, 59 aa, Homo sapiens
IEQKPTVMWYTDLQGFPLLSASPNNLIWKILPKVLHTPFPLSKPQPKGKRGSGKGMRGG

SEQ ID NO: 780426 - protein, 532 aa, Homo sapiens
MACVTLLPTWLGGAPPGPPGPDISSPCGSYNPHSQGLVTFATQLFNLLSGEGYLEWSPLFYGFYPPRPRLAVTYLCWAFAVGLICLLLILHRSVSGLKQTLLAESEALTSYSHRVFSAWDFGLCGDVHVRLRQRIILYELKVELEETVVRRQAAVRTLGQQARVWLVRVLLNLLVVALLGAAFYGVYWATGCTVELQEMPLVQELPLLKLGVNYLPSIFIAGVNFVLPPVFKLIAPLEGYTRSRQIVFILLRTVFLRLASLVVLLFSLWNQITCGGDSEAEDCKTCGYNYKQLPCWETVLGQEMYKLLLFDLLTVLAVALLIQFPRKLLCGLCPGALGRLAGTQEFQVPDEVLGLIYAQTVVWVGSFFCPLLPLLNTVKFLLLFYLKKLTLFSTCSPAARTFRASAANFFFPLVLLLGLAISSVPLLYSIFLIPPSKLCGPFRGQSSIWAQIPESISSLPETTQNFLFFLGTQAFAVPLLLISSILMAYTVALANSYGRLISELKRQRQTEAQNKVFLARRAVALTSTKPAL

SEQ ID NO: 780427 - protein, 507 aa, Homo sapiens
MACVTLLPTWLGGAPPGPPGPDISSPCGSYNPHSQGLVTFATQLFNLLSGEGYLEWSPLFYGFYPPRPRLAVTYLCWAFAVGLICLLLILHRSVSGLKQTLLAESEALTSYSHRVFSAWDFGLCGDVHVRLRQRIILYELKVELEETVVRRQAAVRTLGQQARVWLVRVLLNLLVVALLGAAFYGVYWATGCTVELQEMPLVQELPLLKLGVNYLPSIFIAGVNFVLPPVFKLIAPLEGYTRSRQIVFILLRTVFLRLASLVVLLFSLWNQITCGGDSEAEDCKTCGYNYKQLPCWETVLGQEMYKLLLFDLLTVLAVALLIQFPRKLLCGLCPGALGRLAGTQEFQVPDEVLGLIYAQTVVWVGSFFCPLLPLLNTVKFLLLFYLKKLTLFSTCSPAARTFRASAANFFFPLVLLLGLAISSVPLLYSIFLIPPSKLCGPFRGQSSIWAQIPESISSLPETTQNFLFFLGTQAFAVPLLLISRSQTFGYNGRACQEWLPFLSPSAS

SEQ ID NO: 780428 - protein, 712 aa, Homo sapiens
RDSPAWAMEENPTLESEAWGSSRGWLAPREARGGPSLSSVLNELPSAATLRYRDPGVLPWGALEEEEEDGGRSRKAFTEVTQTELQDPHPSRELPWPMQARRAHRQRNASRDQVVYGSGTKTDRWARLLRRSKEKTKEGLRSLQPWAWTLKRIGGQFGAGTESYFSLLRFLLLLNALAYSTCLVTLLPTWLGGAPPGPPGPDISSPCGSYNPHSQGLVTFATQLFNLLSGEGYLEWSPLFYGFYPPRPRLAVTYLCWAFAVGLICLLLILHRSVSGLKQTLLAESEALTSYSHRVFSAWDFGLCGDVHVRLRQRIILYELKVELEETVVRRQAAVRTLGQQARVWLVRVLLNLLVVALLGAAFYGVYWATGCTVELQEMPLVQELPLLKLGVNYLPSIFIAGVNFVLPPVFKLIAPLEGYTRSRQIVFILLRTVFLRLASLVVLLFSLWNQITCGGDSEAEDCKTCGYNYKQLPCWETVLGQEMYKLLLFDLLTVLAVALLIQFPRKLLCGLCPGALGRLAGTQEFQVPDEVLGLIYAQTVVWVGSFFCPLLPLLNTVKFLLLFYLKKLTLFSTCSPAARTFRASAANFFFPLVLLLGLAISSVPLLYSIFLIPPSKLCGPFRGQSSIWAQIPESISSLPETTQNFLFFLGTQAFAVPLLLISSILMAYTVALANSYGRLISELKRQRQTEAQNKVFLARRAVALTSTKPAL

SEQ ID NO: 780429 - protein, 453 aa, Homo sapiens
ETAASVHVKEDLWRARPGEPGGPRLGKWSPSGHLSCLQVELEETVVRRQAAVRTLGQQARVWLVRVLLNLLVVALLGAAFYGVYWATGCTVELQEMPLVQELPLLKLGVNYLPSIFIAGVNFVLPPVFKLIAPLEGYTRSRQIVFILLRFQPHGDGWEMMKGGGGQRDVGADRTVFLRLASLVVLLFSLWNQITCGGDSEAEDCKTCGYNYKQLPCWETVLGQEMYKLLLFDLLTVLAVALLIQFPRKLLCGLCPGALGRLAGTQEFQVPDEVLGLIYAQTVVWVGSFFCPLLPLLNTVKFLLLFYLKKLTLFSTCSPAARTFRASAANFFFPLVLLLGLAISSVPLLYSIFLIPPSKLCGPFRGQSSIWAQIPESISSLPETTQNFLFFLGTQAFAVPLLLISSILMAYTVALANSYGRLISELKRQRQTEAQNKVFLARRAVALTSTKPAL

SEQ ID NO: 780430 - protein, 71 aa, Homo sapiens
PGYHTPHLLTSPLRSGSWSQDHKRPLLECEERKGEAGQGAAWTTGNSETPLAGVPAPAALTALWAGHCVTM

SEQ ID NO: 780431 - protein, 229 aa, Homo sapiens [sequence omitted]

SEQ ID NO: 780432 - protein, 229 aa, Homo sapiens [sequence omitted]

SEQ ID NO: 780433 - protein, 104 aa, Homo sapiens
MADTTPNGPQGAGAVQFMMTNKLDTAMWLSRLFTVYCSALFVLPLLGVQMSCFKKERSSALSILTPVNYIQMEFNQETTYLSSEYLPSLVILFASCCHIYEKGP

SEQ ID NO: 780434 - protein, 229 aa, Homo sapiens [sequence omitted]

SEQ ID NO: 780435 - protein, 221 aa, Homo sapiens
MADTTPNGPQGAGAVQFMMTNKLDTAMWLSRLFTVYCSALFVLPLLGLHEAASFYQRALLANALTSALRLHQRLPHFQLSRAFLAQALLEDSCHYLLYSLIFVNSYPVTMSIFPVLLFSLLHAATYTKKVLDARGSNSLPLLRSVLDKLSANQQNILKFIACNEIFLMPATVFMLFSGQGSLLQPFIYYRFLTLRYSSRRNPYCRLWCPKTVTIVTPKRSP

SEQ ID NO: 780436 - protein, 229 aa, Homo sapiens [sequence omitted]

SEQ ID NO: 780437 - protein, 229 aa, Homo sapiens [sequence omitted]

SEQ ID NO: 780438 - protein, 106 aa, Homo sapiens
KSGINAEGPLRPENILKFIACNEIFLMPATVFMLFSGQGSLLQPFIYYRFLTLRYSSRRNPYCRTLFNELRIVVEHIIMKPACPLFVRRLCLQSIAFISRLAPTVP

SEQ ID NO: 780439 - protein, 229 aa, Homo sapiens [sequence omitted]

SEQ ID NO: 780440 - protein, 40 aa, Homo sapiens
FVWFQEHEKNFKKYRRFHTKQTKMDPELPLPCLYNMSTTH

SEQ ID NO: 780441 - protein, 50 aa, Homo sapiens
NSSPLSTNHLTLASNSVNYKFLAPALPGFTGCMPPTSVSLATSPTTPSPA

SEQ ID NO: 780442 - protein, 46 aa, Homo sapiens
CRDDRCEPPRLAHGQILKHGFPATAPWPFELDQFLEQGRPGHCRVL

SEQ ID NO: 780443 - protein, 998 aa, Homo sapiens
MNRRRKFLLASVLALQNSSFIYPSCQKCFSRIILVSKRSNCPKCGSTGESGNANYRYKLSLKVAESNKLFVITVFGSCLDTFFGLTATGLHRYIQDPNKIPETLDNDTTQNLLTKAVETCFVGQSFIFGVTNFENQPGQGSDASNFLQQCSDHKRKAKALVACQIVLPDPGIAGFTVIDYFHQLLQTFNFRKLQCDSQAPNNHLLALDHSNSDLSSIYTSDSTSDFFKSCSKDTFSKFWQPSLEFTCIVSQLTDNDDFSASEQSKAFGTLQQNRKSISIAEATGSSSCHDPIQDSWSLVSYMDKKSTAEKLGKELGLQAKELSAVHSSHHEIGVNDSNLFSLEMREPLESSNTKSFHSAVEIKNRSQHELPCFQHHGIDTPTSLQKRSACCPPSLLRLEETASSSQDGDPQIWDDLPFSESLNKFLAVLESEIAVTQADVSSRKHHVDNDIDKFHADHSRLSVTPQRTTGALHTPPIALRSSQVIVKANCSKDDFLFNCKGNLSPSVEKESQPDNKVEAVSVNHNGRDMSEYFLPNPYLSALSSSSKDLETIVTLKKTIRISPHRESDHSSLNNKYLNGCGEISVSEMNEKLTTLCYRKYNDVSDLCKLENKQYCRWSKNQDDSFTICRKLTYPLETLCNSPNRSTNTLKEMPWGHINNNVTQSYSIGYEGSYDASADLFDDIAKEMDIATEITKKSQDILLKWGTSLAESHPSESDFSLRSLSEDFIQPSQKLSLQSLSDSRHSRTCSPTPHFQSDSEYNFENSQDFVPCSQSTPISGFHQTRIHGINRAFKKPVFYSDLDGNYEKIRIFPENDKQQASPSCPKNIKTPSQKIRSPIVSGVSQPDVFNHYPFAECHETDSDEWVPPTTQKIFPSDMLGFQGIGLGKCLAAYHFPDQQELPRKKLKHIRQGTNKGLIKKKLKNMLAAVVTKKKTHKYNCKSSGWISKCPDIQVLAAPQLHPILGPDSCSEVKCCLPFSEKGPPSVCETRSAWSPELFS

SEQ ID NO: 780444 - protein, 761 aa, Homo sapiens
MNRRRKFLLASVLALQNSSFIYPSCQKCFSRIILVSKRSNCPKCGSTGESGNANYRYKLSLKVAESNKLFVITVFGSCLDTFFGLTATGLHRYIQDPNKIPETLDNDTTQNLLTKAVETCFVGQSFIFGVTNFENQPGQGSDASNFLQQCSDHKRKAKALVACQIVLPDPGIAGFTVIDYFHQLLQTFNFRKLQCDSQAPNNHLLALDHSNSDLSSIYTSDSTSDFFKSCSKDTFSKFWQPSLEFTCIVSQLTDNDDFSASEQSKAFGTLQQNRKSISIAEATGSSSCHDPIQDSWSLVSYMDKKSTAEKLGKELGLQAKELSAVHSSHHEIGVNDSNLFSLEMREPLESSNTKSFHSAVEIKNRSQHELPCFQHHGIDTPTSLQKRSACCPPSLLRLEETASSSQDGDPQIWDDLPFSESLNKFLAVLESEIAVTQADVSSRKHHVDNDIDKFHADHSRLSVTPQRTTGALHTPPIALRSSQVIVKANCSKDDFLFNCKGNLSPSVEKESQPDNKVEAVSVNHNGRDMSEYFLPNPYLSALSSSSKDLETIVTLKKTIRISPHRESDHSSLNNKYLNGCGEISVSEMNEKLTTLCYRKYNDVSDLCKLENKQYCRWSKNQDDSFTICRKLTYPLETLCNSPNRSTNTLKEMPWGHINNNVTQSYSIGYEGSYDASADLFDDIAKEMDIATEITKKSQDILLKWGTSLAESHPSESDFSLRSLSEDFIQPSQKLSLQSLSDSRHSRTCSPTPHFQSEKENS

SEQ ID NO: 780445 - protein, 103 aa, Homo sapiens
  misc_feature (97)..(97): Xaa can be any naturally occurring amino acid
  misc_feature (103)..(103): Xaa can be any naturally occurring amino acid
MRNKNIVHMLVKALDRDNFELLILVVSFLKKLSIFMENKNDMVEMDIVEKLVRMILVEHEDLLNITLRLLLNLSFDTGLKEYRWYKLDCFPSSLHSXGNDNYX

SEQ ID NO: 780446 - protein, 97 aa, Homo sapiens
MVIRLSGGLRQRESRGPGRRKVRGAGPSGTQAGDGETEQARRKLYTRQRFAGIIEVRQHSRKNRNQATMKDPEVEEKEGRRTKGAKKNAEKDTTTHR

SEQ ID NO: 780447 - protein, 68 aa, Homo sapiens
VQRSIWSPLEALMFHTENDITTQREGTEKGTRFARGREEAMDGTGLRINFLPDRQKLIKFLIETYKSM

SEQ ID NO: 780448 - protein, 37 aa, Homo sapiens
GPRDPVLGQVPMAECLGAVWFGPQSPVANKRGGGGRS

SEQ ID NO: 780449 - protein, 83 aa, Homo sapiens
WGPSPPGRIQEQAGVAAPRGGRGRPCPPALLVPLALRGGASCHSVTMHHLWPLEFELIKMKYSWPGVVASACNPSTLRSRGGR

SEQ ID NO: 780450 - protein, 91 aa, Homo sapiens
RSRLQDSVSKQQQQQQQQQQQTHTHTHTHNRRKENVLTLRTEGLGSAFRTGYIRVLTQCHQKSLCILTLLSSALASFSGRFFPVGRPPLMN

SEQ ID NO: 780451 - protein, 108 aa, Homo sapiens
MLQGYSNQNSMVLVPKQRYRPMEQNRASEIMLHIYHYLIFDKPDKNKKWGEDSLFNKWCWENWLAICRKLKLDPFLTPYTKINSRWIKDLNVRPKTIKALEENLGNTI

SEQ ID NO: 780452 - protein, 114 aa, Homo sapiens
PLLWAVVQASRLFAELLRLEGTKAFMTSFISDASCANSLRWVNAINPVLQRGEEPQRGQMLPSRSCSMCGAEVISPSLSVGPRDKEGVRCRGLGRPLLMILELGLQETRDGHGG

SEQ ID NO: 780453 - protein, 83 aa, Homo sapiens
MQELWRHGFLSRFQKTSQRAWGSRQKLFRRAEPHSSSYYSNTWWSHGEKAIPQIPELLSYQGTPPACKKLQAPDSNSKSYVGC

SEQ ID NO: 780454 - protein, 86 aa, Homo sapiens
SGSSVYCPRLARQVHDSLPQPSLLALLQPALPTGPEAHCFCFWGTLNSQLPALFQPTSGTLVHNRKSWRGHAGGVQGQDLSKPPTF

SEQ ID NO: 780455 - protein, 177 aa, Homo sapiens
RDSPAWAMEENPTLESEAWGSSRGWLAPREARGGPSLSSVLNELPSAATLRYRDPGVLPWGALEEEEEDGGRSRKAFTEVTQTELQDPHPSRELPWPMQARRAHRQRNASRDQVVYGSGTKTDRWARLLRRSKEKTKEGLRSLQPWAWTLKRIGGQFGAVHGVLLLPACASCYLLNV

SEQ ID NO: 780456 - protein, 90 aa, Homo sapiens
SLQDPRRSSWNQAIPLLSLPSSLNYKHTPLHLTNVCVFICRDEFSLMLSGLITSAQEFDTSLDNTGRLCLYYKFYNISQARWHVSSPSYL

SEQ ID NO: 780457 - protein, 129 aa, Homo sapiens
GSLCLEATRDSGTCVVERHEEGPKTQPRGACVHRATCRGCRRMGAGTGQLEGIGIEAGLLPLPAVDKAEGGGLAPTVRPGCAEVGGEMHCYSPAKCGLPEGRDEAESLLCCRAQVELGTGGGCRNRGAR

SEQ ID NO: 780458 - protein, 101 aa, Homo sapiens
HHKRIFNININIRKMSPTQDHHSSEKFRTAYVCVWIMASGVENEEEMACVSFTPTTCRPFTYSISLCLGNISDLDTAKPLCGFSLLLSFFHLTITHWAPAI

SEQ ID NO: 780459 - protein, 75 aa, Homo sapiens
KAQQPDCRNILAISCRAASSTAHTPPSCPAGWAGQWDSLCAHFVASRSDTSFLGGPVVPAKPNPRILPEVVLPNP

SEQ ID NO: 780460 - protein, 103 aa, Homo sapiens
LRLAGRSWLNSASPSPSSTPTTSPRKGHGRFLQLPGKCPLPSSPPSPEETPGRREGGLASRYQSHLAFIGMAFSVAPATAICPASSKQASLGAHLTLRKTRAT

SEQ ID NO: 780461 - protein, 195 aa, Homo sapiens
KLFSGGAACRLPFSEPTLPTADPSAAPGTRHFTWGQLGPRLLRCVADEENQARGQQAGVLLGTEEESVEHSDQMTFHFTGGSSFSVQFPNPKADPAPHLNTARACWFTLGRAVPLGQAPIVTTSPRMGKHVSGRDVGHVWTARPSQSIFRGCSVLLLRRECISLGRTHCTKFKAKSSEFWRQLPQDFLQLQVPFH

SEQ ID NO: 780462 - protein, 211 aa, Homo sapiens
GQVLTCLGSRDGKSPVKMANASINTLLEALDCILLPICPTDKPLCLSLQNIYKIGGIGTISVGQVETGVSIEVTLAPVNVTTKAKSVAIYHEALSEVFPGNNGGFNIKNVSVKNVHHGNVAGDRKNDPPMEAAGFTAQVIILNHPVQISAGYAPVMDCHMAHTACKFPELKGKTDCHSGKVKDGPKFLKSGNAPIFDKIPGKPTRVLRASD

SEQ ID NO: 780463 - protein, 129 aa, Homo sapiens
LVEASSLNLDSVTPRPLHLHLPGWQDQWRTDPKPELKSVLIPARVGSPQIKGSSLTPPAPPSPRGWQEQAWHVPAVPAQAWVGRNSSWVLAHTALSEAGKPGESWRKSPSPSTLNYALPSAPPGYGSCP

SEQ ID NO: 780464 - protein, 109 aa, Homo sapiens
GSPCGPSAPQMHQRPWNPNPRQASHHCRSPDVRAWSLSRGPLTGQGTYEDCLGPGRPQHPDGGVTLPMGIPQSLAVMTTCCSDPRAAWHPSIVVDSSCPSTFRQLWTHP

SEQ ID NO: 780465 - protein, 127 aa, Homo sapiens
  misc_feature (16)..(16): Xaa can be any naturally occurring amino acid
MRVSVLVWEKAQCQNXSLVRLVAFPASLLAVEERMGSAWFSYFQAIQWLVALEYEPDLTPTTSLLFQMGEKDKETDTETFFCCFSFLFLSRSLRHSLPTALPLLEYNGIQKRLLSPHLPFPYYYFSY

SEQ ID NO: 780466 - protein, 85 aa, Homo sapiens
YLEIRRVMVMLYPSICEHVADHSQEREQLTMVNPVLIKMYINKPGWWAPVIPATWEAEAGELLEPGRWRLQSAKIVPLHSSLCDR

SEQ ID NO: 780467 - protein, 207 aa, Homo sapiens
DLALQGSNRQLVSITTNLVDLVWGSERPPVPNQPIYALQEAFTGSTWQEKVSGVRSQMQKHQKVPTAVLLSALEETAWLFNLRASDIPYNPFFYSYTLLTDSSIRLFANKSRFSSETLSYLNSSCTGPMCVQIEDYSQVRDSIQAYSLGDVRIWIGTSYTMYGIYEMIPKEKLVTDTYSPVMMTKAVKNSKEQALLKASHVSPRSGR

SEQ ID NO: 780468 - protein, 118 aa, Homo sapiens
LEDHRRRHQFSKRIVLPEPSIRSVMQKYLAERNEITFDKIFNQKIGFLLFKDFCLNEINEAVPQVKFYEEVRSNSFYKAGTRGRGASVSGRGTSVYKSSEAGHSLWCSRKRKAWCMIT

SEQ ID NO: 780469 - protein, 74 aa, Homo sapiens
CLSLPKCWDYRHSHCTRLEVHFDQGSTCQSLAFYIFRDYKSTINLCFSTRWPLICPTKEPVRVHGPYVLTAPTW

SEQ ID NO: 780470 - protein, 105 aa, Homo sapiens
MGNSSLHFRWHSPNVPGLGRQPQAPSSAAPEALAVAAPGVSSEPRLVLVPAPRPPPSGGSVKPGGEGGGGGSSTRAGAGGGGGPAGGDLAANTFPMVSGRGACSR

SEQ ID NO: 780471 - protein, 124 aa, Homo sapiens [sequence omitted]

SEQ ID NO: 780472 - protein, 120 aa, Homo sapiens
MRGQEEPDRLGTGQESQDEVRGEGTEKGRNGRVAPKQGKRTGATWRLKCGGGEWGRRAGNVKGEGTSLPLRSLLGCIDIPSHPPPLSIPLSRCLLLGSGQPQLSALRPGGRGRSREKECR

SEQ ID NO: 780473 - protein, 115 aa, Homo sapiens
MSVPRAGTVPGFLYLDLRTLSLQPCERFARVTGGNVPASVPAFPDGTLQQSPPLPVLPPNHFPPATAEGASSPAARAPSSSRAPALPAPFPTLFHMTPPPHILNFVFPRRPLSTS

SEQ ID NO: 780474 - protein, 130 aa, Homo sapiens
LAALSSAALLRCLFCLSCLSQSLPRTAVWPALTCLQGQQLNSFSGHELLYSVNRAIIPFTDNSGLEPSDGLPCYGYMAVITSGVIHLCSKLTESLWPGCPPWPILDQSTAMYLKPSCMQWHRNDFSERSI

SEQ ID NO: 780475 - protein, 98 aa, Homo sapiens
QKHCQSPQMERPEWPKANGVEFTGCPPPPPALAQEAQWVSSKAACFISRSCGTPGPRDTLVWAPPAPLLSEAEMNLLRQTVTEPYKFSLWARRGGSHL

SEQ ID NO: 780476 - protein, 119 aa, Homo sapiens
MESSPGGYRCTRVKRKLSISSLTMIVSKFSPKPGSWIHGQCSADSSLSTHVISCLCFLITCPFSVAPRATQANKCGHRKGSSNEEKHFIISSHKPQSCFPKSLLCPPVPELWKRTSGIS

SEQ ID NO: 780477 - protein, 345 aa, Homo sapiens
PRAEFGTRLKRSYEKLQKKQMREFRGNTKNHREDRSEIERLTAKIEEFRQKSLDWEKQRLIYQQQVSSLEAQRKALAEQSEIIQAQLVNRKQKLESVELSSQSEIQHLSSKLERANDTICANELEIERLTMRVNDLVGTSMTVLQEQQQKEEKLRESEKLLEALQEEKRELKAALQSQENLIHEARIQKEKLQEKVKATNTQHAVEAISLESVSATCKQLSQELMEKYEELKRMEAHNNEYKAEIKKLKEQILQGEQSYSSALEGMKMEISHLTQELHQRDITIASTKGSSSDMEKRLRAEMQKAEDKAVEHKEILDQLESLKLENRHLSEMVMKLELGLHEVHK

SEQ ID NO: 780478 - protein, 215 aa, Homo sapiens
MRVNDLVGTSMTVLQEQQQKEEKLRESEKLLEALQEEKRELKAALQSQENLIHEARIQKEKLQEKVKATNTQHAVEAISLESVSATCKQLSQELMEKYEELKRMEAHNNEYKAEIKKLKEQILQGEQSYSSALEGMKMEISHLTQELHQRDITIASTKGSSSDMEKRLRAEMQKAEDKAVEHKEILDQLESLKLENRHLSEMVMKLELGLHEVHK

SEQ ID NO: 780479 - protein, 374 aa, Homo sapiens
PRAEFGTRLKRSYEKLQKKQMREFRGNTKNHREDRSEIERLTAKIEEFRQKSLDWEKQRLIYQQQVSSLEAQRKALAEQSEIIQAQLVNRKQKLESVELSSQSEIQHLSSKLERANDTICANELEIERLTMRVNDLVGTSMTVLQEQQQKEEKLRESEKLLEALQEEKRELKAALQSQENLIHEARIQKEKLQEKVKATNTQHAVEAISLESVSATCKQLSQELMEKYEELKRMEAHNNEYKAEIKKLKEQILQGEQSYSSALEGMKMEISHLTQELHQRDITIASTKGSSSDMEKRLRAEMQKAEDKAVEHKEILDQLESLKLENRHLSEMVMKLELGLHERWGFTMLSSLVLNFGIQAIRQPQRPKVLELQV

SEQ ID NO: 780480 - protein, 229 aa, Homo sapiens
PRAEFGTRLKRSYEKLQKKQMREFRGNTKNHREDRSEIERLTAKIEEFRQKSLDWEKQRLIYQQQVSSLEAQRKALAEQSEIIQAQLVNRKQKLESVELSSQSEIQHLSSKLERANDTICANELEIERLTMRVNDLVGTSMTVLQEQQQKEEKLRESEKLLEALQEEKRELKAALQSQENLIHEARIQKKKKKMTHTTKIAWWADLETHKKNVFDETPHCVLWGTGSPQ

SEQ ID NO: 780481 - protein, 394 aa, Homo sapiens
PRAEFGTRLKRSYEKLQKKQMREFRGNTKNHREDRSEIERLTAKIEEFRQKSLDWEKQRLIYQQQVSSLEAQRKALAEQSEIIQAQLVNRKQKLESVELSSQSEIQHLSSKLERANDTICANELEIERLTMRVNDLVGTSMTVLQEQQQKEEKLRESEKLLEALQEEKRELKAALQSQENLIHEARIQKEKLQEKVKATNTQHAVEAISLESVSATCKQLSQELMEKYEELKRMEAHNNEYKAEIKKLKEQILQGEQSYSSALEGMKMEISHLTQELHQRDITIASTKGSSSDMEKRLRAEMQKAEDKAVEHKEILDQLESLKLENRHLSEMVMKLELGLHECSLPVSPLGSIATRFLEEEELRSHHILERLDAHIEELKRESEKTVRQFTALK

SEQ ID NO: 780482 - protein, 283 aa, Homo sapiens
PRAEFGTRLKRSYEKLQKKQMREFRGNTKNHREDRSEIERLTAKIEEFRQKSLDWEKQRLIYQQQVSSLEAQRKALAEQSEIIQAQLVNRKQKLESVELSSQSEIQHLSSKLERANDTICANELEIERLTMRVNDLVGTSMTVLQEQQQKEEKLRESEKLLEALQEEKRELKAALQSQENLIHEARIQKEKLQEKVKATNTQHAVEAISLESVSATCKQLSQELMEKYEELKRMEAHNNEYKAEIKKLKEQILQGEQSYSSALEGMKMEISHLTQVVGVRAEF

SEQ ID NO: 780483 - protein, 131 aa, Homo sapiens
SPSTGALRTFLHIEGTLRAALSVIAILFIPGIGKLFLEGPKSRHFWLCGHRVSVSNSLCHGGWKADIENRCTSEHSLVPIKLYLQNREQWTSESPRTRARLPENFQAHPLEAGETTKAEERAFPSRSPKAR

SEQ ID NO: 780484 - protein, 105 aa, Homo sapiens
CLQGLSTSQTKSLMLPPTSVSSEGPFKSKELCPEQLETLREVDSHLKCALAHVLSSRKSNGRINRRFRAKLIIINNPRHIHANPEGSLGEQDFYNHTTILRSHRE

SEQ ID NO: 780485 - protein, 112 aa, Homo sapiens
MMWEAGGSGRSTLGGLASSLTLMEPLQAWPPDSGPTTSQLSFQLHSQGSLGSWGWAGGSGMSQRPVPATGALHHPPRGGGPWGESGGHLTLLCWEQELHLGDQRCVSAAPGR

SEQ ID NO: 780486 - protein, 50 aa, Homo sapiens
QVWWHAPVVPAMQEAEVEGLLDPRKSRLQCLTRLQCLTRLQCLTRLQCLT

SEQ ID NO: 780487 - protein, 48 aa, Homo sapiens
MGQSLVSTHTAPADMPAHAKAHKHTQLCRATQAQSHTRSHMLMHTYTP

SEQ ID NO: 780488 - protein, 95 aa, Homo sapiens
EPHAGLGSPSPDAAPPPSPEVSATEIPLVPEAGGEDPGGCALEAGPSWGLSVPTFPPFKSYHCQAQLLRPANPALWDGKTGGSLEPRSLRTAWTT

SEQ ID NO: 780489 - protein, 81 aa, Homo sapiens
EKPSMGKLLKMTQTMAIPRGLWEAESKYSGILKEWRKMTDTNPTTITATAAAKCGGKKNRSDRYCVYVEKGRHKKLHFDLY

SEQ ID NO: 780490 - protein, 75 aa, Homo sapiens
VFLFIGMRRGGRVELGLVVLEILGLKHMESPSPVSMSLDRPLLLELEMGAQADVARDGHFPGTLMVDVRRSISSL

SEQ ID NO: 780491 - protein, 36 aa, Homo sapiens
MNNDSHVHKHIAAEDKWAFVFFHDILVQCFLIGYRS

SEQ ID NO: 780492 - protein, 87 aa, Homo sapiens
MRTAHHSHHLEKSPISCCYGPLTPCSPTSRASSSGKQCSCFTLWLNTPSSSSSTFLRDGAPRGNQKSLCHCLSSLTSLFTLELGKEQ

SEQ ID NO: 780493 - protein, 43 aa, Homo sapiens
MSRKPRASSPLSNNHPPTPKRLPRQPGREQGPVKEVPGTKGSP

SEQ ID NO: 780494 - protein, 369 aa, Homo sapiens
GRPVGTDARHFFSADSRQMCNTNMSVPTDGAVTTSQIPASEQETLESSDSGTSVSENRCHLEGGSDQKDLVQELQEEKPSSSHLVSRPSTSSRRRAISETDLDAGVSEHSGDWLDQDSVSDQFSVEFEVESLDSEDYSLSEEGQELSDEDDEVYQVTVYQAGESDTDSFEEDPEISLADYWKCTSCNEMNPPLPSHCNRCWALRENWLPEDKGKDKGEISEKAKLENSTQAEEGFDVPDCKKTIVNDSRESCVEENDDKITQASQSQESEDYSQPSTSSSIIYSSQEDVKEFEREETQDKEESVESSLPLNAIEPCVICQGRPKNGCIVHGKTGHLMACFTCAKKLKKRNKPCPVCRQPIQMIVLTYFP

SEQ ID NO: 780495 - protein, 497 aa, Homo sapiens
MVRSRQMCNTNMSVPTDGAVTTSQIPASEQETLVRPKPLLLKLLKSVGAQKDTYTMKEVLFYLGQYIMTKRLYDEKQQHIVYCSNDLLGDLFGVPSFSVKEHRKIYTMIYRNLVVVNQQESSDSGTSVSENRCHLEGGSDQKDLVQELQEEKPSSSHLVSRPSTSSRRRAISETEENSDELSGERQRKRHKSDSISLSFDESLALCVIREICCERSSSSESTGTPSNPDLDAGVSEHSGDWLDQDSVSDQFSVEFEVESLDSEDYSLSEEGQELSDEDDEVYQVTVYQAGESDTDSFEEDPEISLADYWKCTSCNEMNPPLPSHCNRCWALRENWLPEDKGKDKGEISEKAKLENSTQAEEGFDVPDCKKTIVNDSRESCVEENDDKITQASQSQESEDYSQPSTSSSIIYSSQEDVKEFEREETQDKEESVESSLPLNAIEPCVICQGRPKNGCIVHGKTGHLMACFTCAKKLKKRNKPCPVCRQPIQMIVLTYFP

SEQ ID NO: 780496 - protein, 209 aa, Homo sapiens
GRPVGTDARHFFSADSRQMCNTNMSVPTDGAVTTSQIPASEQETLVRPKPLLLKLLKSVGAQKDTYTMKEVLFYLGQYIMTKRLYDEKQQHIVYCSNDLLGDLFGVPSFSVKEHRKIYTMIYRNLVVVNQQESSDSGTSVSENRCHLEGGSDQKDLVQELQEEKPSSSHLVSRPSTSSRRRAISETEENSDELSGERQRKRHKSDSKRS

SEQ ID NO: 780497 - protein, 240 aa, Homo sapiens
GRPVGTDARHFFSADSRQMCNTNMSVPTDGAVTTSQIPASEQETLVRPKPLLLKLLKSVGAQKDTYTMKERWSFTMLPRLVWNSWAQGICLPRPPKVLDLQVLFYLGQYIMTKRLYDEKQQHIVYCSNDLLGDLFGVPSFSVKEHRKIYTMIYRNLVVVNQQESSDSGTSVSENRCHLEGGSDQKDLVQELQEEKPSSSHLVSRPSTSSRRRAISETEENSDELSGERQRKRHKSDSKRS

SEQ ID NO: 780498 - protein, 146 aa, Homo sapiens
RVLWAGPAPTLLSAWLLASLGAMPPPAALGGMSWGITEACVFLTLSASHLSPSLFLPFSFSLSLPFHSFSPCLASHHSVSGTLSLPICLSFLCLCLCLSLSHPPSFSSSLFLHVSFPHPANIYSVLLRLGGYWDVLRDGRANTKFT

SEQ ID NO: 780499 - protein, 50 aa, Homo sapiens
RNSTDLKANTQSKQCKLVYYLWEVVWNLGMWPPPRSASFGITEWWWPECP

SEQ ID NO: 780500 - protein, 40 aa, Homo sapiens
AIEQVRQKRIGFLHSQFISTNSRIKTIIQFWDKVHLYSFS

SEQ ID NO: 780501 - protein, 104 aa, Homo sapiens
MSATTGWQLPPSRSGPASEHLSPHLRAEAAACVADQGWVGAMGRGPTCPRLPVIWAPLTRPPLVDPRGRTTACKKRVPAGPGHRMLGASLPAAGHVRVLGWQEP

SEQ ID NO: 780502 - protein, 245 aa, Homo sapiens
VKVFHKYSNAKRHKIRHTGKNPFKCKECGKSFCMLSQLTQHEIIHTGEKPYKCEECGKAFKKSSNLTNHKIIHTGEKPYKCEECGKAFNQSSTLTRHKIIHTGEKLYKCEECGKAFNRSSNLTKHKIVHTGEKPYKCEECGKAFKQSSNLTNHKKIHTGEKPYKCGECGKAFTLSSHLTTHKRIHTGEKPYKCEECGKAFSVFSTLTKHKIIHTEEKPYKCEECGKAFNRSSHLTNHKVIHTGEK

SEQ ID NO: 780503 - protein, 44 aa, Homo sapiens
MLVRYWAFDSLLSWKPVSWFPETSRPPSSLPGMAMAATQQNPCQ

SEQ ID NO: 780504 - protein, 146 aa, Homo sapiens
QLCSFGFQLMGKWPPWVSVFQEETVTLHCEVLHLPGSSSTQWFLNGTALRPRPPATESPLPVSMTVVNTGAREVSQGEVTPYQLEIHRGWPLLQVSSRVFTEGEPLALRCHAWKDKLVYNVLYYRNGKAFKFFHWNSNLTILKTNI

SEQ ID NO: 780505 - protein, 129 aa, Homo sapiens
MASAKDARLQLWKEPWEVGDLCIKIGTQTIIPIRDIYAHITPDSKLRSGLSGEIKVSLSLSLYLTHTHTHTHTQRERERERERERERPAFKIPMLRESIGTSPQDVLNSRKLSLGVAETAAVMSLLTRT

SEQ ID NO: 780506 - protein, 66 aa, Homo sapiens
QLNVNITLVIMHIIITTSSTFMTTISTTSITAIISTATLTIVAIILVNQEVSETSLNQFRSLFCQG

SEQ ID NO: 780507 - protein, 79 aa, Homo sapiens
GQGKVSTGESFLAIRIPQQTSSCCLLPPTSTDQLYPFSVIFNIFLFLEIPATFGERWLPGATKRGMLLHTSLLSANTQT

SEQ ID NO: 780508 - protein, 255 aa, Homo sapiens
MALMQELYSTPASRLDSFVAQWLQPHREWKEEVLDAVRTVEEFLRQEHFQGKRGLDQDVRVLKVVKVGSFGNGTVLRSTREVELVAFLSCFHSFQEAAKHHKDVLRLIWKTMWQSQDLLDLGLEDLRMEQRVPDALVFTIQTRGTAEPITVTIVPAYRALGPSLPNSQPPPEVYVSLIKACGGPGNFCPSFSELQRNFVKHRPTKLKSLLRLVKHWYQQAHHPGSGRPHPQRGRRVQMGHRCSEGLPVPETGLLL

SEQ ID NO: 780509 - protein, 102 aa, Homo sapiens
CECGSLLDSSWDKQKNSCNAESLGTSMPSETGVSACVSFSPTSLCCDPSVYSLVTFPLQEGGPGVSPSHLVSSLLGSLLPQSTGGQLRRSYLKKGGVCQGAG

SEQ ID NO: 780510 - protein, 79 aa, Homo sapiens
IYAWEMGTEEDENFMLDEGFTTVMDLLLEYEVICIYWTKYYTLHNAIIEDCVRKQLKKERYWTTVCPPNLTEKKRDGLV

SEQ ID NO: 780511 - protein, 514 aa, Homo sapiens
MALMQELYSTPASRLDSFVAQWLQPHREWKEEVLDAVRTVEEFLRQEHFQGKRGLDQDVRVLKVVKVGSFGNGTVLRSTREVELVAFLSCFHSFQEAAKHHKDVLRLIWKTMWQSQDLLDLGLEDLRMEQRVPDALVFTIQTRGTAEPITVTIVPAYRALGPSLPNSQPPPEVYVSLIKACGGPGNFCPSFSELQRNFVKHRPTKLKSLLRLVKHWYQQYVKARSPRANLPPLYALELLTIYAWEMGTEEDENFMLDEGFTTVMDLLLEYEVICIYWTKYYTLHNAIIEDCVRKQLKKERPIILDPADPTLNVAEGYRWDIVAQRASQCLKQDCCYDNRENPISSWNVKRARDIHLTVEQRGYPDFNLIVNPYEPIRKVKEKIRRTRGYSGLQRLSFQVPGSERQLLSSRCSLAKYGIFSHTHIYLLETIPSEIQVFVKNPDGGSYAYAINPNSFILGLKQQIEDQQGLPKKQQQLEFQGQVLQDWLGLGIYGIQDSDTLILSKKKGEALFPAS

SEQ ID NO: 780512 - protein, 496 aa, Homo sapiens
MALMQELYSTPASRLDSFVAQWLQPHREWKEEVLDAVRTVEEFLRQEHFQGKRGLDQDVRVLKVVKVGSFGNGTVLRSTREVELVAFLSCFHSFQEAAKHHKDVLRLIWKTMWQSQDLLDLGLEDLRMEQRVPDALVFTIQTRGTAEPITVTIVPAYRALGPSLPNSQPPPEVYVSLIKACGGPGNFCPSFSELQRNFVKHRPTKLKSLLRLVKHWYQQYVKARSPRANLPPLYALELLTIYAWEMGTEEDENFMLDEGFTTVMDLLLEYEVICIYWTKYYTLHNAIIEDCVRKQLKKERPIILDPADPTLNVAEGYRWDIVAQRASQCLKQDCCYDNRENPISSWNVKRARDIHLTVEQRGYPDFNLIVNPYEPIRKVKEKIRRTRGYSGLQRLSFQVPGSERQLLSSRCSLAKYGIFSHTHIYLLETIPSEIQVFVKNPDGGSYAYAINPNSFILGLKQQIEDQQGLPLGIYGIQDSDTLILSKKKGEALFPAS

SEQ ID NO: 780513 - protein, 102 aa, Homo sapiens; identical to SEQ ID NO: 780509

SEQ ID NO: 780514 - protein, 168 aa, Homo sapiens
ATFTIPLLQSQLQKSFQNYCQVSSSSLVRGPPSRPGPHQGETYHRRQHRWPRVEDMMGAKVAGALASSIPIWHFQKFFFISHCYLSLLQLQPRISLRTSGHLQESLSQTKLWPDLPTLPPTHRDPILKRQFGFLTLAPNCIRSHSQPSNKLPVCQALSLFLPVRPSSR

SEQ ID NO: 780515 - protein, 104 aa, Homo sapiens
RNTIRNTYTHIHTHTHTAEIKTFPIKIQRGLTGPTSWSYKGWQVLSVGWRKVLFPQLHSRGNTLQALHCEPVWLGSEACQHIQEVKSERGRISNRASCTQMPRQ

SEQ ID NO: 780516 - protein, 84 aa, Homo sapiens
GGEPRTNSFTKAVEKQEALAIHALFSQFTNLVQNEVSDLLANGVVPSGIVTGSIFLACDELLRVEELVVGASANFIINYHGFQV

SEQ ID NO: 780517 - protein, 107 aa, Homo sapiens [sequence omitted]

SEQ ID NO: 780518 - protein, 124 aa, Homo sapiens
GYSIDTFRHVNSWEGRGMPAIFIIALPPPNTIRGPALIISLQVYPAAPERQRPARRGHDDGGGFVKTKMGICREKKERSDCYCVYIEREDIRDSILKKTCTLNNCFAEMLLICSFAPATLPQPL

SEQ ID NO: 780519 - protein, 263 aa, Homo sapiens
YLKRTFIFKVFVVYLKFTFTWASSILSGSPCSLSVEQLGCPLAAIWPHDAHRTALGGGGSAPGRLLRGLLLSVDTWGSRGQGGAVAWQEPGDPGLGEIGGGQAPRPKLVDPKVRSTDQRHQHPRSLLEIQILRLLPDLLRLRLRGGARPQALLMPIQTSELLTTLPAQVPLLSHFTDEKPRVRGVKELRPWPPCDPQVRAPGGWEEKQIWGLSLLHLPGGTPAFMSECHRPPRPENWEPPCAASLTPQETEAREGNGLLDAAE

SEQ ID NO: 780520 - protein, 127 aa, Homo sapiens
VSLGGDSVQPGLGPLCGDSRAASRMLFVWPQDRGSVSLLADAVAAATPQGTKSQPRGPSNLAADLRVAEESSGMENLFLKMSFDSIRPAQVICLLLKVKYYNNNCQASSQVMAPGVCEHEHMLEGRP

SEQ ID NO: 780521 - protein, 109 aa, Homo sapiens [sequence omitted]

SEQ ID NO: 780522 - protein, 167 aa, Homo sapiens
QLCSTPEFSSPSAAFPPCWLAGWLALDAVSLFLPRILLSLSLIPSPGRWGLISPFPHQSSPSISQLPFPMFPLAYSSSPSLFSSSPLSSSWVRTSAISSFYPPLPPPSSPTTCFPFSSLLTASSSLQSREAWFLGPSILQSTFHLPLPPSPLLGTQDGEDWRAPGKL

SEQ ID NO: 780523 - protein, 322 aa, Homo sapiens
MPLLTLPQTRQRAKNIYDILPWRQEDLGRHESRSMRIFSTESLLSRNSESPEHVPSQAGNAFQEHTAHIHATEYAAGIYDNAMVPQMCGNLTPSAHCINVRASRDCASVSSEDSHDYVNVPTAEEIAETLASTKSPSRNLFVLPSTQKLEFTEERDEGCGDAGDCTSLYSPGAEDSDSLSNGEGSSQISNDYVNMTGLDLSAIQERQLWVAFQCCRDYENVPAADPSGSQQQAEKDVPSSNIGHVEDKTDDPGTHVQCVKRTFLASGDYADFQPFTQSEDSQMKHREEMSNEDSSDYENVLTAKLGGRDSEQGPGTQLLPDE

SEQ ID NO: 780524 - protein, 398 aa, Homo sapiens
MDGVTPTLSTIRGRTLESSTLHVTPRSLDRNKDQITNIFSGFAGLLAILLVVAVFCILWNWNKRKKRQVPYLRVTVMPLLTLPQTRQRAKNIYDILPWRQEDLGRHESRSMRIFSTESLLSRNSESPEHVPSQAGNAFQEHTAHIHATEYAAGIYDNAMVPQMCGNLTPSAHCINVRASRDCASVSSEDSHDYVNVPTAEEIAETLASTKSPSRNLFVLPSTQKLEFTEERDEGCGDAGDCTSLYSPGAEDSDSLSNGEGSSQISNDYVNMTGLDLSAIQERQLWVAFQCCRDYENVPAADPSGSQQQAEKDVPSSNIGHVEDKTDDPGTHVQCVKRTFLASGDYADFQPFTQSEDSQMKHREEMSNEDSSDYENVLTAKLGGRDSEQGPGTQLLPDE

SEQ ID NO: 780525 - protein, 112 aa, Homo sapiens
MCFWKSWNWSEPRAGTSVSKATPQLSEGPYSFQIHHPQDRHGPDTVPPRVTGQRTLTYWCSSDIRNCHHQALFAMKLNSKICHLTLKVWGTCNSLLKGPSAYKQHAIYLPWP

SEQ ID NO: 780526 - protein, 75 aa, Homo sapiens
RDYGLKVTQGSEYTSDYSLTKLLSEVYSVHHAGDDFVQLGDKLHRAEDKEICGDLVLLSFPISSPTLLLCPSTPR

SEQ ID NO: 780527 - protein, 235 aa, Homo sapiens
EKSGLRRRRRWRRLGEARVLADFSIETRRNKNGCRGTSVYNKEMSNPRRARLERRGFGLFQLAGQRCIEEGHTDQLLEIIQNEKNKVIIKNMGWNLLVLLFDAFCVKIKRIMTLCPIETLRKKSLAMLQLYINKLDSQGKYTLFRCLLNTSNHSGVEAFIIQNIKNQIDMSLKRTRNNKWFTGPQLISLLDLVLFLPEGAETDLLQNSDGLWFINYEVMVSRYEMKSNGYGRMGI

SEQ ID NO: 780528 - protein, 108 aa, Homo sapiens
GCPRMGQGEGMKRPRKHVPGCCSSGAPGASVSPSHWQSESGAGGCQGCLQWDQGLVCEDSPAFHFEGGSAWDSKQASRGMFTSHPPTHRQPSFQCTCPQEGASPLVIC

SEQ ID NO: 780529 - protein, 107 aa, Homo sapiens
RQILYQTPVKELASLKWKRHGRPYFCMLGAIYLLYIIWFTMCCIYCPCLPGPDHRLSDVNSGSPQPDSAPAFISQTWAMPRTNRNNANNQVGETGVHLGCTTDPEQE

SEQ ID NO: 780530 - protein, 127 aa, Homo sapiens
GPRSGRSHIDAELSADTLIGIAHYSPELLASSNSFALASRVAGTTGMHHYAQLIFEFLVEMGFHHVVQPGVEFLTSGDPPASASQSAGITGMSHRAQPTRILNLRNYLSQTHRRALCRCILTIFNNY

SEQ ID NO: 780531 - protein, 76 aa, Homo sapiens
MAELLEAPLFCSDLIVGLPWTRLYADLVLSVLLLTQDVAQIEHPLASTSLLKLLSKCHWCPSNHQSLTSAPALPTI

SEQ ID NO: 780532 - protein, 118 aa, Homo sapiens
PAVDDRDEAQPEVIVLSRLDPGDLSVHRETTWKTRLRRNSYGNCFLVCGILYAVDTYNQQEGQVAYAFDTHTGTDARPQLPFLNEHAYTTQIDYNPKERVLYAWDNGHQLTYTLHFVV

SEQ ID NO: 780533 - protein, 94 aa, Homo sapiens
VCVQECVSRCVCLGVLVGNCFLVCGILYAVDTYNQQEGQVAYAFDTHTGTDARPQLPFLNEHAYTTQIDYNPKERVLYAWDNGHQLTYTLHFVV

SEQ ID NO: 780534 - protein, 118 aa, Homo sapiens
QKQFRLFKTAALVIQQNFRAWTAGRKQCMEYIELRHAVLVLQSMWKGKTLRRQLQRQHKCAIIIQSYYRMHVQQKKWKIMKKAALLIQKYYRAYSIGREQNHLYLKTKAAVVTLQSAY

SEQ ID NO: 780535 - protein, 50 aa, Homo sapiens
GSYGPSFVDHLLWQQVPHALPLQCKPSTLPSEQNADVSSSLVLNPIWKKK

SEQ ID NO: 780536 - protein, 81 aa, Homo sapiens
SPLPLQLFTSLDASGNIAILYAASLCNAVLPSSVPLPVGTLLMHLCMVSPSSPQCPVLASMPTMHLCEIHPHSTDIFCSGL

SEQ ID NO: 780537 - protein, 118 aa, Homo sapiens
GWQGREEKHRQCQVPEIQDALRELCDRGAVTLLRSPCWSIEEPGLEPRSCNSKSTSHLPTPLNAPMSLLVPYHMVSNGSGGPKLVLYSETHGLGRYLQRSSFFEKTLPLSLKRLLPNK

SEQ ID NO: 780538 - protein, 91 aa, Homo sapiens
LASSVGHTLESSLPVHWALLLLQGAGGWGLREGTSQQPWALGLWAPAEHECSHLSLPRLPKHPRLCSHAGPDGQEVHPEGQGTHDVTQLPQ

SEQ ID NO: 780539 - protein, 52 aa, Homo sapiens
RGKLENLFLQCLKPTLQQISHIAQQISHISQCAHKPTLQQISRLGWRGCGPS

SEQ ID NO: 780540 - protein, 72 aa, Homo sapiens
MKFIKALNNQVGKAGAHNCHLLVSEHLRLGEDNDSRTRSNCRWGVKLIPNSVLQPLALRKDMEGLHRLFLAG

SEQ ID NO: 780541 - protein, 255 aa, Homo sapiens
RQARSAARSAVEAARTVRGRPMALRGPAGLGPGSRRPLDEAVAGAEGREAPALVAAGGAPEDDEEDDGRGRGLLRWDSFSAWLHCVCVVGFDLELGQAVEATLPNFISEATSGPIDVEGTPSCYGTQKLRHRTALTDFPQGHHLIRNQNMVWVPSTVLSILPQCLLRVGQNAELYHSFWPKVKGNLSSESKLTDREKPNICYGSFPDSTFKVVLADTQYSDQISDKSSGEEGVACIGSVDPFDKDLPALLHSTGS

SEQ ID NO: 780542 - protein, 171 aa, Homo sapiens
RQARSAARSAVEAARTVRGRPMALRGPAGLGPGSRRPLDEAVAGAEGREAPALVAAGGAPEDDEEDDGRGRGLLRWDSFSAWLHCVCVVGFDLELGQAVEEFILSIPNLLTEKKPIFAIGSFPDSTFKVVLADTQYSDQISDKSSGEEGVACIGSWINLTKIYQLYFTAKD

SEQ ID NO: 780543 - protein, 55 aa, Homo sapiens
MPAQGLQPLAIVLKLDADLVSLAGVEVVGGEQKVDAEQKVDAEQKVDAEQKVDAV

SEQ ID NO: 780544 - protein, 73 aa, Homo sapiens
RIELGTESRQAQGDIRQKLQKLEGFEAMNITQLIQVATKVFVNPEEEAKKEAKHKAKEKADLLAAALVERLVL

SEQ ID NO: 780545 - protein, 465 aa, Homo sapiens
GVTSLPAMAAQGAAAAVAAGTSGVAGEGEPGPGENAAAEGTAPSPGRVSPPTPARGEPEVTVEIGETYLCRRPDSTWHSAEVIQSRVNDQEGREEFYVHYVGFNRRLDEWVDKNRLALTKTVKDAVQKNSEKYLSELAEQPERKITRNQKRKHDEINHVQKTYAEMDPTTAALEKEHEAITKVKYVDKIHIGNYEIDAWYFSPFPEDYGKQPKLWLCEYCLKYMKYEKSYRFHLGQCQWRQPPGKEIYRKSNISVYEVDGKDHKIYCQNLCLLAKLFLDHKTLYFDVEPFVFYILTEVDRQGAHIVGYFSKEKESPDGNNVACILTLPPYQRRGYGKFLIAFSYELSKLESTVGSPEKPLSDLGKLSYRSYWSWVLLEILRDFRGTLSIKDLSQMTSITQNDIISTLQSLNMVKYWKGQHVICVTPKLVEEHLKSAQYKKPPITVDSVCLKWAPPKHKQVKLSKK

SEQ ID NO: 780546 - protein, 393 aa, Homo sapiens
GVTSLPAMAAQGAAAAVAAGTSGVAGEGEPGPGENAAAEGTAPSPGRVSPPTPARGEPEVTVEIGETYLCRRPDSTWHSAEVIQSRVNDQEGREEFYVHYVGFNRRLDEWVDKNRLALTKTVKDAVQKNSEKYLSELAEQPERKITRNQKRKHDEINHVQKTYAEMDPTTAALEKEHEAITKVKYVDKIHIGNYEIDAWYFSPFPEDYGKQPKLWLCEYCLKYMKYEKSYRFHLGQCQWRQPPGKEIYRKSNISVYEVDGKDHKIYCQNLCLLAKLFLDHKTLYFDVEPFVFYILTEVDRQGAHIVGYFSKEKESPDGNNVACILTLPPYQRRGYGKFLIAFSYELSKLESTVGSPEKPLSDLGKLSYRSYWSWVLLEILRDFRGTLSIKDLR

SEQ ID NO: 780547 - protein, 474 aa, Homo sapiens
GVTSLPAMAAQGAAAAVAAGTSGVAGEGEPGPGENAAAEGTAPSPGRVSPPTPARGEPEVTVEIGETYLCRRPDSTWHSAEVIQSRVNDQEGREEFYVHYVGFNRRLDEWVDKNRLALTKTVKDAVQKNSEKYLSELAEQPERKITRNQKRKHDEINHVQKTYAEMDPTTAALEKEHEAITKVKYVDKIHIGNYEIDAWYFSPFPEDYGKQPKLWLCEYCLKYMKYEKSYRFHLGQCQWRQPPGKEIYRKSNISVYEVDGKDHKIYCQNLCLLAKLFLDHKTLYFDVEPFVFYILTEVDRQGAHIVGYFSKEKESPDGNNVACILTLPPYQRRGYGKFLIAFSYELSKLESTVGSPEKPLSDLGKLSYRSYWSWVLLEILRDFRGTLSIKDLSQMTSITQNDIISTLQSLNMVKYWKGQHVICVTPKLVEEHLKSAQYKKPPITGGWGAAVCRGRWGSVSIWTGRSQGLLIAVT

SEQ ID NO: 780548 - protein, 393 aa, Homo sapiens; identical to SEQ ID NO: 780546

SEQ ID NO: 780549 - protein, 190 aa, Homo sapiens
GVTSLPAMAAQGAAAAVAAGTSGVAGEGEPGPGENAAAEGTAPSPGRVSPPTPARGEPEVTVEIGETYLCRRPDSTWHSAEVIQSRVNDQEGREEFYVHYVGFNRRLDEWVDKNRLALTKTVKDAVQKNSEKYLSELAEQPERKITRNQKRKHDEINHVQKVRIPSHPRAQEAQLLCQFPWVSRAPVPKP

SEQ ID NO: 780550 - protein, 190 aa, Homo sapiens; identical to SEQ ID NO: 780549

SEQ ID NO: 780551 - protein, 125 aa, Homo sapiens
  misc_feature (1)..(1): Xaa can be any naturally occurring amino acid
  misc_feature (9)..(9): Xaa can be any naturally occurring amino acid
  misc_feature (37)..(37): Xaa can be any naturally occurring amino acid
XLPGQPSVXWVARVTRAASATRALSCRGSLWKWATRXAWAAHGSWGTEFSGQSGAAGALELLGQPLATGVLELPGQPGAPELPGQPVATVALEISVQSVVTTSEAVNDDRVAVPGGALDDSAGIL

SEQ ID NO: 780552 - protein, 465 aa, Homo sapiens; identical to SEQ ID NO: 780545

SEQ ID NO: 780553 - protein, 474 aa, Homo sapiens; identical to SEQ ID NO: 780547

SEQ ID NO: 780554 - protein, 420 aa, Homo sapiens
MCGPELWKLLLSVQDSFCSSLTFLMTLPFSITDSAEVIQSRVNDQEGREEFYVHYVGFNRRLDEWVDKNRLALTKTVKDAVQKNSEKYLSELAEQPERKITRNQKRKHDEINHVQKTYAEMDPTTAALEKEHEAITKVKYVDKIHIGNYEIDAWYFSPFPEDYGKQPKLWLCEYCLKYMKYEKSYRFHLGQCQWRQPPGKEIYRKSNISVYEVDGKDHKIYCQNLCLLAKLFLDHKTLYFDVEPFVFYILTEVDRQGAHIVGYFSKEKESPDGNNVACILTLPPYQRRGYGKFLIAFSYELSKLESTVGSPEKPLSDLGKLSYRSYWSWVLLEILRDFRGTLSIKDLSQMTSITQNDIISTLQSLNMVKYWKGQHVICVTPKLVEEHLKSAQYKKPPITVDSVCLKWAPPKHKQVKLSKK

SEQ ID NO: 780555 - protein, 369 aa, Homo sapiens
  misc_feature (313)..(313): Xaa can be any naturally occurring amino acid
  misc_feature (317)..(317): Xaa can be any naturally occurring amino acid
  misc_feature (347)..(347): Xaa can be any naturally occurring amino acid
  misc_feature (368)..(368): Xaa can be any naturally occurring amino acid
GVTSLPAMAAQGAAAAVAAGTSGVAGEGEPGPGENAAAEGTAPSPGRVSPPTPARGEPEVTVEIGETYLCRRPDSTWHSAEVIQSRVNDQEGREEFYVHYVGFNRRLDEWVDKNRLALTKTVKDAVQKNSEKYLSELAEQPERKITRNQKRKHDEINHVQKTYAEMDPTTAALEKEHEAITKVKYVDKIHIGNYEIDAWYFSPFPEDYGKQPKLWLCEYCLKYMKYEKSYRFHLGQCQWRQPPGKEIYRKSNISVYEVDGKDHKIYCQNLCLLAKLFLDHKTLYFDVEPFVFYILTEVDRQGAHIVGYFSKEXESPXGNNVAAVAELAQVRQRLLRGADCVSSLESXELKAMRNFPEPRRWYGGQGQXS

SEQ ID NO: 780556 - protein, 190 aa, Homo sapiens; identical to SEQ ID NO: 780549

SEQ ID NO: 780557 - protein, 172 aa, Homo sapiens
SDFNLIVQNLEAENYNIESAIIAVLRMNQGKRNNAEENLEPSGRVLKQCGPLWEEGGSGARIFGNQGLNEGRTENNKAQASPSEENKANKNQLAKVTNKQRREQQWMEKKKRQEERHRHKALESRGSHRDNNRSEAEANTQVTLVKTFAALNICLFGLLGVVRSGWKRIAVC

SEQ ID NO: 780558 - protein, 117 aa, Homo sapiens
LWIRGISHLSTLQTRLRIAPLPLLFLTLVSGSIILWLLDAKLFFSFSPIAHSVHHQPDHPNHVHSHLCVCQATTLLCLDYVGGLLTVSLLQLSCCLRLPPLNRQLSYLHECYGHCLE

SEQ ID NO: 780559 - protein, 96 aa, Homo sapiens
TLIALSSTRQLKSPGQIWNFFCLCPLATEEIPNMVAWAITPQMKEIFLSSDPSLRLQDTCSKQQLLHVLGSDTLRSLCSPKCFLHIFIHPRPSPSS

SEQ ID NO: 780560 - protein, 121 aa, Homo sapiens
TVDALGVLTGAQLFSLQREELRAVSPEEGARVYSQVTVQRSLLEDKEKVSELEAVMEKQKKKVEGEVEMEVIVTCQAPFAKSDEAPWENGLLRLSPIAEVDLLKDGQSAPALVFPHPGGQT

SEQ ID NO: 780561 - protein, 64 aa, Homo sapiens
MQNAPFTTKKGPSWSLIPGGTTLLCDRGMTAPMKESRTETCGENMRCPRSRGERLKVTESIIRL

SEQ ID NO: 780562 - protein, 101 aa, Homo sapiens
NDVREKRSHAHGCCPSQKTCKLKCFFLDRAGNLNLWNMQNAPFTTKKGPSWSLIPGGTTLLCDRGMTAPMKESRTETCGENMRCPRSRGERLKVTESIIRL

SEQ ID NO: 780563 - protein, 64 aa, Homo sapiens; identical to SEQ ID NO: 780561

SEQ ID NO: 780564 - protein, 78 aa, Homo sapiens
MHLSLPAVSSPPHLESRDDIDSAKECKFKVALVSQSGLPCFLKPPACLLPLQEPHFLLSAAPGLPDASDGKQAQPHFL

SEQ ID NO: 780565 - protein, 100 aa, Homo sapiens
SGPVRSLNCPCPSFTILCSLPPLPHCTFSLPHMSQIHSHLQALKASIPSLNCSPHSCETAVPPPHSGFTQTLPAQRSFFHPSKAAFTPQLSVLFSLQCSL

SEQ ID NO: 780566 - protein, 77 aa, Homo sapiens
GGGITTEFCSMARCLLRVKKGKSASGKRNQMCQSLGCGEAQQIQAAGQRGTGGTRGRYGGLRQSSRVSSQGGHGPQI

SEQ ID NO: 780567 - protein, 76 aa, Homo sapiens
ARLLTCARALSVAGCRPGRRCSAGQSRGTRPLVGATEKPAPGGREQAESVEGTHWSGPGGWEGFQEKPRLLLILIA

SEQ ID NO: 780568 - protein, 39 aa, Homo sapiens
RFSASDKGWEQQSSCKESTQGFLTSDSNSTLKGFPSQLQ

SEQ ID NO: 780569 - protein, 128 aa, Homo sapiens
HISHVHPHISHAHSHISHVHPQISHVHSHISHTHPHRTRAPSHISHTHISHMHPHISHVNPHTSHMCTLTSHMRTHISHAHSHITRVPTNLTHAPTNLTRALTSHTRTHTSHTCTLTHLTCAPSHISR

SEQ ID NO: 780570 - protein, 66 aa, Homo sapiens
QKMYYTTFKVLLGKLWDSTRGGSAIRRPCCLHASYLRTALRAEMRTDHAAGSSRGMAGLSPRPFPD

SEQ ID NO: 780571 - protein, 83 aa, Homo sapiens
LEPNSQVTEGNQKCHSDEHTKKKSTLLLIWKKFAGLDTGSNQPQHASSQSLIQNKALTLFISMKIERGEEAKGEKFQASRGWS

SEQ ID NO: 780572 - protein, 105 aa, Homo sapiens
MGRGWERLTFCSDSRLWSWALEQPHLAAVSWPQGPAECQVPAHPHSPWGLAVALALLRVLANLLGKWGLRGRALLWGVDSTASAGCCGSLFCGDVGPANVSTSCD

SEQ ID NO: 780573 - protein, 196 aa, Homo sapiens
GFAVAAWLGGGRLAWRGSDRLAWHFWLGGPPFADWKPRAILLGGCGRGSSSLLMASWGGEKRGGAEGSPKLAVYATRKTRSVRSQEDQWYLGYPGDQWSSGFSYSWWKNSVGSESKHGEGALDQPQHDVRLEDLGELHRAARSGDVPGVEHVLAPGDTGVDKRDRKKSIQQLVPEYKEKQTPESLPQNNNPDGHPY

SEQ ID NO: 780574 - protein, 75 aa, Homo sapiens
LTPVSADGYGWVLTPVSADGYGRVLTPVSADEYGRVLTPVSTNRYGWVLTPVNLAVLGSIRSQEDREAGCCGSCP

SEQ ID NO: 780575 - protein, 68 aa, Homo sapiens
LYPEGEYWYQASCLDSGHSEASSSAQTAPVSPCWLSICPKMCVGHVKLNAPQLSAYYPLFQNLCQQPS

SEQ ID NO: 780576 - protein, 104 aa, Homo sapiens [sequence omitted]

SEQ ID NO: 780577 - protein, 92 aa, Homo sapiens
KRRRGPASSHCQLAHSSSNTVSEDGPQAVSSGHRCENKAGTAPGQTLAPRGGSPRSQASRPHINTALHVEDKAISDCRPSRPSHTLSSLATE

SEQ ID NO: 780578 - protein, 76 aa, Homo sapiens
MLESPLLHSCQVVTAYWIHLGGCHYGLDRCISPSALCLLPSSPSPLRASWGTVLTLSQPEEPQQVFPRRLHDAAPH

SEQ ID NO: 780579 - protein, 112 aa, Homo sapiens
LRGVDTLSPSLRGVDTLSPSLRGVDTLSPSLRGVDTLSPSLRGVDTLPSSLRGVDTLSIVRGVDILSPSLRGVDTPSPSLRGVDTLSPSLRGADTPSPSLRGWKPLSITQQV

SEQ ID NO: 780580 - protein, 105 aa, Homo sapiens
MVWLCVPTQISSYSSHNSHTWWEGAGGSSPCCPRESEWVSRDLTAVKAGVSPHKPSPCLLPSTLRCDLLLLAFHHDCEASPAMWNAKSSKPLSSVNCPVSGMSLS

SEQ ID NO: 780581 - protein, 105 aa, Homo sapiens; identical to SEQ ID NO: 780580

SEQ ID NO: 780582 - protein, 102 aa, Homo sapiens [sequence omitted]

SEQ ID NO: 780583 - protein, 58 aa, Homo sapiens
ESWKASVLSQYTRCRTTVEQKVHLRGTVALKSRCAWALGSQDVPTASSWAQGSSTGTA

SEQ ID NO: 780584 - protein, 219 aa, Homo sapiens
PSARRLRPAGGPRAPPRPGPPEALYYPGALLPLYPTRAMGSPFPLVNLPTPLYPMMCPMEHPLSADIAMATRADEDGDTPLHIAVVQGNLPAVHRLVNLFQQGGRELDIYNNLRQTPLHLAVITTLPSVVRLLVTAGASPMALDRHGQTAAHLACEHRSPTCLRALLDSAAPGTLDLEARNYDGLTALHVAVNTECQETVQLLLERGADIDAVDIKSGR

SEQ ID NO: 780585 - protein, 121 aa, Homo sapiens
VSQVSVPGEDCRMRNKGSENLREAGLESRAGHRSLTVTVPQTPLHLAVITTLPSVVRLLVTAGASPMALDRHGQTAAHLACEHRSPTCLRALLDSAAPGTLDLEARNYDGKHLPRGTAGLS

SEQ ID NO: 780586 - protein, 162 aa, Homo sapiens
EDCSALNPEPQIHASPSNGVSNWHLQPSFFLVLPKTHASPRDLATFINSVFSVAEAPNPVSLDSSCRSYPIISHPEILVAPSSKCIRNLSISHWSEPPSSLAPHCSPSSCPSPWRLLYHSSQSDPLSTQVRPCHISAQPSPGLPNTSLRVKSKVLPLLQICH

SEQ ID NO: 780587 - protein, 113 aa, Homo sapiens
MIHSFLQSIHPSIIQLSNPFLLNAYYMPGIMVGTTSMSIYKKSLPSGRRTLLRGGSSLLFRGRSTVVEADNDISKAWLSTSCLTRHSKILGDRESVKVFIHFKFADPGTVCGL

SEQ ID NO: 780588 - protein, 116 aa, Homo sapiens
PRESARSLNLVPSGDFSPSSSGACSLERGSVVGFSFPTLSFHPSLLWLTDDSDSWQGEGEKRRGRKGAGSPYLVNAVASWHFSGRFWWVCKPSSFSLGTILWILQRAPLFLIFGDL

SEQ ID NO: 780589 - protein, 30 aa, Homo sapiens
MQHHKALPTSAPQEPPIELSPQADCASLSQ

SEQ ID NO: 780590 - protein, 84 aa, Homo sapiens
RLSTGHFWDLRLMPFPPFNDRVPPYPHSQLMIWFLIWLREQKPWTQSQLIPASASSTEAPPCPSLLGEPPLLLWQEAPSSCVPG

SEQ ID NO: 780591 - protein, 80 aa, Homo sapiens
LDAKTQAWLWISPQKEVQGASLAGGTWAALRIVYPLGDLPSLLPEARNPTTPCATETLKPEERQTPPLALGSGGFPFALT

SEQ ID NO: 780592 - protein, 111 aa, Homo sapiens
RKGNRISIRICICIRIYNSIDARGQWDQRENDFEPSILQLGKLSIKYPFRQRLFEDILHAKLERNLKDRKAWGRTNSGISAVWCPERKSQLRAAQEPESQFRTFPTDYKSG

SEQ ID NO: 780593 - protein, 870 aa, Homo sapiens
MFFACYCALRTNVKKYRYQDEDAPHDHSLPRLTHEVRGPELVHVSEKNLSQIENVHGYVLQSHISPLKASPAPIIVNTDTLDTIPYVNGTEIEYEFEEITLERGNSGLGFSIAGGTDNPHIGDDPGIFITKIIPGGAAAEDGRLRVNDCILRVNEVDVSEVSHSKAVEALKEAGSIARLYVRRRRPILETVVEIKLFKGPKGLGFSIAGGVGNQHIPGDNSIYVTKIIDGGAAQKDGRLQVGDRLLMVNNYSLEEVTHEEAVAILKNTSEVVYLKVGNPTTIYMTDPYGPPDITHSYSPPMENHLLSGNNGTLEYKTSLPPISPGRYSPIPKHMLVDDDYTRPPEPVYSTVNKLCDKPASPRHYSPVECDKSFLLSAPYSHYHLGLLPDSEMTSHSQHSTATRQPSMTLQRAVSLEGEPRKVVLHKGSTGLGFNIVGGEDGEGIFVSFILAGGPADLSGELQRGDQILSVNGIDLRGASHEQAAAALKGAGQTVTIIAQYQPEDYARFEAKIHDLREQMMNHSMSSGSGSLRTNQKRSLYVRAMFDYDKSKDSGLPSQGLSFKYGDILHVINASDDEWWQARRVMLEGDSEEMGVIPSKRRVERKERARLKTVKFNAKPGVIDSKGSFNDKRKKSFIFSRKFPFYKNKEQSEQETSDPERGQEDLILSYEPVTRQEINYTRPVIILGPMKDRINDDLISEFPDKFGSCVPHTTRPKRDYEVDGRDYHFVISREQMEKDIQEHKFIEAGQYNDNLYGTSVQSVRFVAERGKHCILDVSGNAIKRLQVAQLYPIAIFIKPRSLEPLMEMNKRLTEEQAKKTYDRAIKLEQEFGEYFTAIVQGDTLEDIYNQCKLVIEEQSGPFIWIPSKEKL

SEQ ID NO: 780594 - protein, 182 aa, Homo sapiens
KGKCEPEQQTGEPGTKETEKLPLVPPASSLLCSNNFVLDYARFEAKIHDLREQMMNHSMSSGSGSLRTNQKRSLYVRAMFDYDKSKDSGLPSQGLSFKYGDILHVINASDDEWWQARRVMLEGDSEEMGVIPSKRRVERKERARLKTVKFNAKPGVIDSKGDIPGLGDDGYGTKTLNTFFIC

SEQ ID NO: 780595 - protein, 787 aa, Homo sapiens
MTKVNGTEIEYEFEEITLERGNSGLGFSIAGGTDNPHIGDDPGIFITKIIPGGAAAEDGRLRVNDCILRVNEVDVSEVSHSKAVEALKEAGSIARLYVRRRRPILETVVEIKLFKGPKGLGFSIAGGVGNQHIPGDNSIYVTKIIDGGAAQKDGRLQVGDRLLMVNNYSLEEVTHEEAVAILKNTSEVVYLKVGNPTTIYMTDPYGPPDITHSYSPPMENHLLSGNNGTLEYKTSLPPISPGRYSPIPKHMLVDDDYTRPPEPVYSTVNKLCDKPASPRHYSPVECDKSFLLSAPYSHYHLGLLPDSEMTSHSQHSTATRQPSMTLQRAVSLEGEPRKVVLHKGSTGLGFNIVGGEDGEGIFVSFILAGGPADLSGELQRGDQILSVNGIDLRGASHEQAAAALKGAGQTVTIIAQYQPEDYARFEAKIHDLREQMMNHSMSSGSGSLRTNQKRSLYVRAMFDYDKSKDSGLPSQGLSFKYGDILHVINASDDEWWQARRVMLEGDSEEMGVIPSKRRVERKERARLKTVKFNAKPGVIDSKGSFNDKRKKSFIFSRKFPFYKNKEQSEQETSDPERGQEDLILSYEPVTRQEINYTRPVIILGPMKDRINDDLISEFPDKFGSCVPHTTRPKRDYEVDGRDYHFVISREQMEKDIQEHKFIEAGQYNDNLYGTSVQSVRFVAERGKHCILDVSGNAIKRLQVAQLYPIAIFIKPRSLEPLMEMNKRLTEEQAKKTYDRAIKLEQEFGEYFTAIVQGDTLEDIYNQCKLVIEEQSGPFIWIPSKEKL

SEQ ID NO: 780596 - protein, 920 aa, Homo sapiens
FFKLLFELTDCSGSKENASCIEQNKENQSFENETDETTTQNQGRCPAQNCSVEAPAWMPVHHCTKYRYQDEDAPHDHSLPRLTHEVRGPELVHVSEKNLSQIENVHGYVLQSHISPLKASPAPIIVNTDTLDTIPYVNGTEIEYEFEEITLERGNSGLGFSIAGGTDNPHIGDDPGIFITKIIPGGAAAEDGRLRVNDCILRVNEVDVSEVSHSKAVEALKEAGSIARLYVRRRRPILETVVEIKLFKGPKGLGFSIAGGVGNQHIPGDNSIYVTKIIDGGAAQKDGRLQVGDRLLMVNNYSLEEVTHEEAVAILKNTSEVVYLKVGKPTTIYMTDPYGPPDITHSYSPPMENHLLSGNNGTLEYKTSLPPISPGRYSPIPKHMLVDDDYTRPPEPVYSTVNKLCDKPASPRHYSPVECDKSFLLSAPYSHYHLGLLPDSEMTSHSQHSTATRQPSMTLQRAVSLEGEPRKVVLHKGSTGLGFNIVGGEDGEGIFVSFILAGGPADLSGELQRGDQILSVNGIDLRGASHEQAAAALKGAGQTVTIIAQYQPEDYARFEAKIHDLREQMMNHSMSSGSGSLRTNQKRSLYVRAMFDYDKSKDSGLPSQGLSFKYGDILHVINASDDEWWQARRVMLEGDSEEMGVIPSKRRVERKERARLKTVKFNAKPGVIDSKGSFNDKRKKSFIFSRKFPFYKNKEQSEQETSDPERGQEDLILSYEPVTRQEINYTRPVIILGPMKDRINDDLISEFPDKFGSCVPHTTRPKRDYEVDGRDYHFVISREQMEKDIQEHKFIEAGQYNDNLYGTSVQSVRFVAERGKHCILDVSGNAIKRLQVAQLYPIAIFIKPRSLEPLMEMNKRLTEEQAKKTYDRAIKLEQEFGEYFTAIVQGDTLEDIYNQCKLVIEEQSGPFIWIPSKEKL

SEQ ID NO: 780597 - protein, 746 aa, Homo sapiens
MTKVNGTEIEYEFEEITLERGNSGLGFSIAGGTDNPHIGDDPGIFITKIIPGGAAAEDGRLRVNDCILRVNEVDVSEVSHSKAVEALKEAGSIARLYVRRRRPILETVVEIKLFKGPKGLGFSIAGGVGNQHIPGDNSIYVTKIIDGGAAQKDGRLQVGDRLLMVNNYSLEEVTHEEAVAILKNTSEVVYLKVGNPTTIYMTDPYGPPDITHSYSPPMENHLLSGNNGTLEYKTSLPPISPGRYSPIPKHMLVDDDYTRPPEPVYSTVNKLCDKPASPRHYSPVECDKSFLLSAPYSHYHLGLLPDSEMTSHSQHSTATRQPSMTLQRAVSLEGEPRKVVLHKGSTGLGFNIVGGEDGEGIFVSFILAGGPADLSGELQRGDQILSVNGIDLRGASHEQAAAALKGAGQTVTIIAQYQPEDYARFEAKIHDLREQMMNHSMSSGSGSLRTNQKRSLYVRAMFDYDKSKDSGLPSQGLSFKYGDILHVINASDDEWWQARRVMLEGDSEEMGVIPSKRRVERKERARLKTVKFNAKPGVIDSKGDIPGLGDDGYGTKTLRGQEDLILSYEPVTRQEINYTRPVIILGPMKDRINDDLISEFPDKFGSCVPHTTRPKRDYEVDGRDYHFVISREQMEKDIQEHKFIEAGQYNDNLYGTSVQSVRFVAERGKHCILDVSGNAIKRLQVAQLYPIAIFISNIAGGTDNPHIGDEPWHIYYEDYIQEMLQQRMAESGSMRYLAVNENSSEL

SEQ ID NO: 780598 - protein, 73 aa, Homo sapiens
ETRVRLTQRYLRYFHPSPSHRFASLGSCEDLLTSLGSCEDLLTGLAAPAFALKPSIYPRRWFSPWRLLPGGVP

SEQ ID NO: 780599 - protein, 140 aa, Homo sapiens
LQETSKYVSLARAMSQGHPSCKEVWERGYLAKDYAHVFHEQICASSVKEKGRIILVGPGRVYPHTAWWRWSGVTEEQAGWSSSHPPHTCRICLQLRSHPDASMRMLSQESSLRVWTRGASSCSTANSACLFQLLTWFPIL

SEQ ID NO: 780600 - protein, 145 aa, Homo sapiens
MTTHAGQLPTSQNKHTLPHTQTTHLHHHPPRPPPHTPSLNTHSHRSGAQQRPPKRTPTPTHAHHHAAPRQDNPRGNDPIAPAETNPPTTQQAPTDRDNTPDTDAKTQAHPTEQQTTATATTTVGTVHTTNENNRENRGRYHNTTR

SEQ ID NO: 780601 - protein, 208 aa, Homo sapiens
SHMWIYVFMGNMLRGIGETPIVPLGISYIDDFAKEGHSSLYLGTVNVMGMTGLVFAFMLGSLFAKMYVDIGYVDLSTIRITPKDSRWVGAWWLGFLVSGIVSIISSIPFFFLPLNPNKPQKERKVSLFLHVLKTNDKRNQIANLTNRRKYITKNVTGFFQSLKSILTNPLYVIFVIFTLLHMSSYIASLTYIIKMVEQQYGWSASKTN

SEQ ID NO: 780602 - protein, 88 aa, Homo sapiens
MTLVRSNVAVVAHTEPSLFPGARPAPLCLPEVFPPLRSPETHPLRHVRGGGTLTPTSRPRPAEQPRPGQKGEGVAGKGRGRERGRPRT

SEQ ID NO: 780603 - protein, 236 aa, Homo sapiens
TGLALLPRLQCSGMKTAQGILQPQPPWGLALRARATHSYDTWVHSNDVDAEIEDPPIPEKPWKVHVKWILDTDIFNEWMNEEDYEVDENRKPVSFRQRISTKNEEPVRSPERRDRKASANARKRKHSPSPPPPTPTESRKKSGKKGQASLYGKRRSQKEEDEQEDLTKDMEDPTPVPNIEEVVLPKNVNLKKDSEHIHLFKGGTVADLDEQDEANSHKQEERKMKILPKVTQSQIR

SEQ ID NO: 780604 - protein, 178 aa, Homo sapiens
WAGPGSGSGGYARGGARGNDRETPRGPGWARLWGRRAATMAAAAGGGGPGTAVGATGSGIAAAAAGLAVYRRKDGGPATKFWESPETVSQLDSVRVWLGKHYKKYVHADAPTNKTLAGLVVQLLQFQEDAFGKHVTNPAFTKLPVSTSAYCYLGILSCCILLGVASSFFPLLLLACRI

SEQ ID NO: 780605 - protein, 1144 aa, Homo sapiens
WAGPGSGSGGYARGGARGNDRETPRGPGWARLWGRRAATMAAAAGGGGPGTAVGATGSGIAAAAAGLAVYRRKDGGPATKFWESPETVSQLDSVRVWLGKHYKKYVHADAPTNKTLAGLVVQLLQFQEDAFGKHVTNPAFTKLPAKCFMDFKAGGALCHILGAAYKYKNEQGWRRFDLQNPSRMDRNVEMFMNIEKTLVQNNCLTRPNIYLIPDIDLKLANKLKDIIKRHQGTFTDEKSKASHHIYPYSSSQDDEEWLRPVMRKEKQVLVHWGFYPDSYDTWVHSNDVDAEIEDPPIPEKPWKVHVKWILDTDIFNEWMNEEDYEVDENRKPVSFRQRISTKNEEPVRSPERRDRKASANARKRKHSPSPPPPTPTESRKKSGKKGQASLYGKRRSQKEEDEQEDLTKDMEDPTPVPNIEEVVLPKNVNLKKDSENTPVKGGTVADLDEQDEETVTAGGKEDEDPAKGDQSRSVDLGEDNVTEQTNHIIIPSYASWFDYNCIHVIERRALPEFFNGKNKSKTPEIYLAYRNFMIDTYRLNPQEYLTSTACRRNLTGDVCAVMRVHAFLEQWGLVNYQVDPESRPMAMGPPPTPHFNVLADTPSGLVPLHLRSPQVPAAQQMLNFPEKNKEKPVDLQNFGLRTDIYSKKTLAKSKGASAGREWTEQETLLLLEALEMYKDDWNKVSEHVGSRTQDECILHFLRLPIEDPYLENSDASLGPLAYQPVPFSQSGNPVMSTVAFLASVVDPRVASAAAKAALEEFSRVREEVPLELVEAHVKKVQEAARASGKVDPTYGLESSCIAGTGPDEPEKLEGAEEEKMEADPDGQQPEKAENKVENETDEGDKAQDGENEKNSEKEQDSEVSEDTKSEEKETEENKELTDTCKERESDTGKKKVEHEISEGNVATAAAAALASAATKAKHLAAVEERKIKSLVALLVETQMKKLEIKLRHFEELETIMDREKEALEQQRQQLLTERQNFHMEQLKYAELRARQQMEQQQHGQNPQQAHQHSGGPGLAPLGAAGHPGMMPHQQPPPYPLMHHQMPPPHPPQPGQIPGPGSMMPGQHMPGRMIPTVAANIHPSGSGPTPPGMPPMPGNILGPRVPLTAPNGMYPPPPQQQPPPPPPADGVPPPPAPGPPASAAP

SEQ ID NO: 780606 - protein, 1144 aa, Homo sapiens; identical to SEQ ID NO: 780605

SEQ ID NO: 780607 - protein, 974 aa, Homo sapiens
WAGPGSGSGGYARGGARGNDRETPRGPGWARLWGRRAATMAAAAGGGGPGTAVGATGSGIAAAAAGLAVYRRKDGGPATKFWESPETVSQLDSVRVWLGKHYKKYVHADAPTNKTLAGLVVQLLQFQEDAFGKHVTNPAFTKLPAKCFMDFKAGGALCHILGAAYKYKNEQGWRRFDLQNPSRMDRNVEMFMNIEKTLVQNNCLTRPNIYLIPDIDLKLANKLKDIIKRHQGTFTDEKSKASHHIYPYSSSQDDEEWLRPVMRKEKQVLVHWGFYPDSYDTWVHSNDVDAEIEDPPIPEKPWKVHVKWILDTDIFNEWMNEEDYEVDENRKPVSFRQRISTKNEEPVRSPERRDRKASANARKRKHSPSPPPPTPTESRKKSGKKGQASLYGKRRSQKEEDEQEDLTKDMEDPTPVPNIEEVVLPKNVNLKKDSENTPVKGGTVADLDEQDEETVTAGGKEDEDPAKGDQSRSVDLGEDNVTEQTNHIIIPSYASWFDYNCIHVIERRALPEFFNGKNKSKTPEIYLAYRNFMIDTYRLNPQEYLTSTACRRNLTGDVCAVMRVHAFLEQWGLVNYQVDPESRPMAMGPPPTPHFNVLADTPSGLVPLHLRSPQVPAAQQMLNFPEKNKEKPVDLQNFGLRTDIYSKKTLAKSKGASAGREWTEQETLLLLEALEMYKDDWNKVSEHVGSRTQDECILHFLRLPIEDPYLENSDASLGPLAYQPVPFSQSGNPVMSTVAFLASVVDPRVASAAAKAALEEFSRVREEVPLELVEAHVKKVQEAARASGKVDPTYGLESSCIAGTGPDEPEKLEGAEEEKMEADPDGQQPEKAENKVENETDEGDKAQDGENEKNSEKEQDSEVSEDTKSEEKETEENKELTDTCKERESDTGKKKVEHEISEGNVATAAAAALASAATKAKHLAAVEERKIKSLVALLVETQMKKLEIKLRHFEELETIMDREKEAAKTSTWNS

SEQ ID NO: 780608 - protein, 563 aa, Homo sapiens
MRQDRYGPPSYSHFNVLADTPPGPVPLHLRSPQVLAASPDAKFPEKTKEKPVDLQNFGLRTDISSKKTLAKEKGASAGREWTEQETLLLLEALEMSKDDWNKVSEHVGSRTQDECILHFLRLPIEDPYLENSDASLGPLAYQPVPFSQSGNPVMSTVAFLASVVDPRVASAAAKAALEEFSRVREEVPLELVEAHVKKVQEAARASGKVDPTYGLESSCIAGTGPDEPEKLEGAEEEKMEADPDGQQPEKAENKVENETDEGDKAQDGENEKNSEKEQDSEVSEDTKSEEKETEENKELTDTCKERESDTGKKKVEHEISEGNVATAAAAALASAATKAKHLAAVEERKIKSLVALLVETQMKKLEIKLRHFEELETIMDREKEALEQQRQQLLTERQNFHMEQLKYAELRARQQMEQQQHGQNPQQAHQHSGGPGLAPLGAAGHPGMMPHQQPPPYPLMHHQMPPPHPPQPGQIPGPGSMMPGQHMPGRMIPTVAANIHPSGSGPTPPGMPPMPGNILGPRVPLTAPNGMYPPPPQQQPPPPPPADGVPPPPAPGPPASAAP

SEQ ID NO: 780609 - protein, 470 aa, Homo sapiens
LSRGSARMQVSEHVGSRTQDECILHFLRLPIEDPYLENSDASLGPLAYQPVPFSQSGNPVMSTVAFLASVVDPRVASAAAKAALEEFSRVREEVPLELVEAHVKKVQEAARASGKVDPTYGLESSCIAGTGPDEPEKLEGAEEEKMEADPDGQQPEKAENKVENETDEGDKAQDGENEKNSEKEQDSEVSEDTKSEEKETEENKELTDTCKERESDTGKKKVEHEISEGNVATAAAAALASAATKAKHLAAVEERKIKSLVALLVETQMKKLEIKLRHFEELETIMDREKEALEQQRQQLLTERQNFHMEQLKYAELRARQQMEQQQHGQNPQQAHQHSGGPGLAPLGAAGHPGMMPHQQPPPYPLMHHQMPPPHPPQPGQIPGPGSMMPGQHMPGRMIPTVAANIHPSGSGPTPPGMPPMPGNILGPRVPLTAPNGMYPPPPQQQPPPPPPADGVPPPPAPGPPASAAP

SEQ ID NO: 780610 - protein, 303 aa, Homo sapiens
  misc_feature (6)..(6): Xaa can be any naturally occurring amino acid
MVRGWXVRENEKNSEKEQDSEVSEDTKSEEKETEENKELTDTCKERESDTGKKKVEHEISEGNVATAAAAALASAATKAKHLAAVEERKIKSLVALLVETQMKKLEIKLRHFEELETIMDREKEALEQQRQQLLTERQNFHMEQLKYAELRARQQMEQQQHGQNPQQAHQHSGGPGLAPLGAAGHPGMMPHQQPPPYPLMHHQMPPPHPPQPGQIPGPGSMMPGQHMPGRMIPTVAANIHPSGSGPTPPGMPPMPGNILGPRVPLTAPNGMYPPPPQQQPPPPPPADGVPPPPAPGPPASAAP

SEQ ID NO: 780611 - protein, 240 aa, Homo sapiens
GASTSPVPLASAATQPKHLAAVEERKIKSLVALLVETQMKKLEIKLRHFEELETIMDREKEALEQQRQQLLTERQNFHMEQLKYAELRARQQMEQQQHGQNPQQAHQHSGGPGLAPLGAAGHPGMMPHQQPPPYPLMHHQMPPPHPPQPGQIPGPGSMMPGQHMPGRMIPTVAANIHPSGSGPTPPGMPPMPGNILGPRVPLTAPNGMYPPPPQQQPPPPPPADGVPPPPAPGPPASAAP

SEQ ID NO: 780612 - protein, 210 aa, Homo sapiens
MVVFSSALGFSKSSCTIWAFSLHSREWREKEALEQQRQQLLTERQNFHMEQLKYAELRARQQMEQQQHGQNPQQAHQHSGGPGLAPLGAAGHPGMMPHQQPPPYPLMHHQMPPPHPPQPGQIPGPGSMMPGQHMPGRMIPTVAANIHPSGSGPTPPGMPPMPGNILGPRVPLTAPNGMYPPPPQQQPPPPPPADGVPPPPAPGPPASAAP

SEQ ID NO: 780613 - protein, 143 aa, Homo sapiens
DLKQVTKAHQHSGGPGLAPLGAAGHPGMMPHQQPPPYPLMHHQMPPPHPPQPGQIPGPGSMMPGQHMPGRMIPTVAANIHPSGSGPTPPGMPPMPGNILGPRVPLTAPNGMYPPPPQQQPPPPPPADGVPPPPAPGPPASAAP

SEQ ID NO: 780614 - protein, 1144 aa, Homo sapiens; identical to SEQ ID NO: 780605

SEQ ID NO: 780615 - protein, 612 aa, Homo sapiens
WAGPGSGSGGYARGGARGNDRETPRGPGWARLWGRRAATMAAAAGGGGPGTAVGATGSGIAAAAAGLAVYRRKDGGPATKFWESPETVSQLDSVRVWLGKHYKKYVHADAPTNKTLAGLVVQLLQFQEDAFGKHVTNPAFTKLPAKCFMDFKAGGALCHILGAAYKYKNEQGWRRFDLQNPSRMDRNVEMFMNIEKTLVQNNCLTRPNIYLIPDIDLKLANKLKDIIKRHQGTFTDEKSKASHHIYPYSSSQDDEEWLRPVMRKEKQVLVHWGFYPDSYDTWVHSNDVDAEIEDPPIPEKPWKVHVKWILDTDIFNEWMNEEDYEVDENRKPVSFRQRISTKNEEPVRSPERRDRKASANARKRKHSPSPPPPTPTESRKKSGKKGQASLYGKRRSQKEEDEQEDLTKDMEDPTPVPNIEEVVLPKNVNLKKDSENTPVKGGTVADLDEQDEETVTAGGKEDEDPAKGDQSRSVDLGEDNVTEQTNHIIIPSYASWFDYNCIHVIERRALPEFFNGKNKSKTPEIYLAYRNFMIDTYRLNPQEYLTSTACRRNLTGDVCAVMRVHAFLEQWGLVNYQVDPESRPMAMGPPPTPHFNVLSQQKQGSLWGAGGQ

SEQ ID NO: 780616 - protein, 525 aa, Homo sapiens
WAGPGSGSGGYARGGARGNDRETPRGPGWARLWGRRAATMAAAAGGGGPGTAVGATGSGIAAAAAGLAVYRRKDGGPATKFWESPETVSQLDSVRVWLGKHYKKYVHADAPTNKTLAGLVVQLLQFQEDAFGKHVTNPAFTKLPAKCFMDFKAGGALCHILGAAYKYKNEQGWRRFDLQNPSRMDRNVEMFMNIEKTLVQNNCLTRPNIYLIPDIDLKLANKLKDIIKRHQGTFTDEKSKASHHIYPYSSSQDDEEWLRPVMRKEKQVLVHWGFYPDSYDTWVHSNDVDAEIEDPPIPEKPWKVHVKWILDTDIFNEWMNEEDYEVDENRKPVSFRQRISTKNEEPVRSPERRDRKASANARKRKHSPSPPPPTPTESRKKSGKKGQASLYGKRRSQKEEDEQEDLTKDMEDPTPVPNIEEVVLPKNVNLKKDSENTPVKGGTVADLDEQDEETVTAGGKEDEDPAKGDQSRSVDLGEDNVTEQTNHIIIPSYASWFDYNCIHVIERRALPEFFNGKNKSKTPEM

SEQ ID NO: 780617 - protein, 67 aa, Homo sapiens
IEDLSQQAQLAAAEKFKVQGEAVSNIQENTQTPTVQEESEEEEFDETGVEVKDIELVMSQQMCREER

SEQ ID NO: 780618 - protein, 476 aa, Homo sapiens
WAGPGSGSGGYARGGARGNDRETPRGPGWARLWGRRAATMAAAAGGGGPGTAVGATGSGIAAAAAGLAVYRRKDGGPATKFWESPETVSQLDSVRVWLGKHYKKYVHADAPTNKTLAGLVVQLLQFQEDAFGKHVTNPAFTKLPAKCFMDFKAGGALCHILGAAYKYKNEQGWRRFDLQNPSRMDRNVEMFMNIEKTLVQNNCLTRPNIYLIPDIDLKLANKLKDIIKRHQGTFTDEKSKASHHIYPYSSSQDDEEWLRPVMRKEKQVLVHWGFYPDSYDTWVHSNDVDAEIEDPPIPEKPWKVHVKWILDTDIFNEWMNEEDYEVDENRKPVSFRQRISTKNEEPVRSPERRDRKASANARKRKHSPSPPPPTPTESRKKSGKKGQASLYGKRRSQKEEDEQEDLTKDMEDPTPVPNIEEVVLPKNVNLKKDSEHIHLFKGGTVADLDEQDEANSHKQEERKMKILPKVTQSQIS

SEQ ID NO: 780619 - protein, 67 aa, Homo sapiens; identical to SEQ ID NO: 780617

SEQ ID NO: 780620 - protein, 254 aa, Homo sapiens
MRIPAERHQGTFTDEKSKASHHIYPYSSSQDDEEWLRPVMRKEKQVLVHWGFYPDSYDTWVHSNDVDAEIEDPPIPEKPWKVHVKWILDTDIFNEWMNEEDYEVDENRKPVSFRQRISTKNEEPVRSPERRDRKASANARKRKHSPSPPPPTPTESRKKSGKKGQASLYGKRRSQKEEDEQEDLTKDMEDPTPVPNIEEVVLPKNVNLKKDSEHIHLFKGGTVADLDEQDEANSHKQEERKMKILPKVTQSQIS

SEQ ID NO: 780621 - protein, 67 aa, Homo sapiens; identical to SEQ ID NO: 780617

SEQ ID NO: 780622 - protein, 116 aa, Homo sapiens
ARQQMEQQQHGQNPQQAHQHSGGPGLAPLGAAGHPGMMPHQQPPPYPLMHHQMPPPHPPQPGKRKALLLEKAYGHYRGTEHHWGQPHSWCFLMKTAQNFHCHLENCRHVRFRVIAT

SEQ ID NO: 780623 - protein, 128 aa, Homo sapiens
MAAAAGGGGPGTAVGATGSGIAAAAAGLAVYRRKDGGPATKFWESPETVSQLDSVRVWLGKHYKKYVHADAPTNKTLAGLVVQLLQFQEDAFGKHVTNPDFTKHPCKVIMDFKAGGALCHILGAAYKS

SEQ ID NO: 780624 - protein, 1144 aa, Homo sapiens; identical to SEQ ID NO: 780605

SEQ ID NO: 780625 - protein, 1144 aa, Homo sapiens; identical to SEQ ID NO: 780605

SEQ ID NO: 780626 - protein, 1144 aa, Homo sapiens; identical to SEQ ID NO: 780605

SEQ ID NO: 780627 - protein, 1144 aa, Homo sapiens; identical to SEQ ID NO: 780605

SEQ ID NO: 780628 - protein, 1144 aa, Homo sapiens; identical to SEQ ID NO: 780605

SEQ ID NO: 780629 - protein, 366 aa, Homo sapiens
VIGRGYTDDDRPPRRIADEDRRNWRHADDDRPPRQGAEEEKMEADPDGQQPEKAENKVENETDEGDKAQDGENEKNSEKEQDSEVSEDTKSEEKETEENKELTDTCKERESDTGKKKVEHEISEGNVATAAAAALASAATKAKHLAAVEERKIKSLVALLVETQMKKLEIKLRHFEELETIMDREKEALEQQRQQLLTERQNFHMEQLKYAELRARQQMEQQQHGQNPQQAHQHSGGPGLAPLGAAGHPGMMPHQQPPPYPLMHHQMPPPHPPQPGQIPGPGSMMPGQHMPGRMIPTVAANIHPSGSGPTPPGMPPMPGNILGPRVPLTAPNGMYPPPPQQQPPPPPPADGVPPPPAPGPPASAAP

SEQ ID NO: 780630 - protein, 198 aa, Homo sapiens
MKLFGFRSRRGQTVLGSIDHLYTGSGYRIRYSELQKIHKAAVKGDAAEMERCLARRSGDLDALDKQHRLSIARKRLVPLFCWNMVPIQTLRISTATLLSIMLCIVRAPHWQKNCFSMVKILKHWTSDPFGAGVPDIDIWDPDTIDRSESSKFVPPRRNLHLHWEALATVPLKLLIPQMLMFATNSIVKWGLGTIQEIS

SEQ ID NO: 780631 - protein, 96 aa, Homo sapiens
MKLFGFRSRRGQTVLGSIDHLYTGSGYRIRYSELQKIHKAAVKGDAAEMERCLARRSGDLDALDKQHRTALHLACASGHVKVVTLLVNRKCQIDIY

SEQ ID NO: 780632 - protein, 114 aa, Homo sapiens
SNRVIVMKIPQHLRGAEAGLKLLTSGDPPASASQSAGITGMSHRARPLLVFSPCPALSRVSLSLTSPVWVPAFLTHGGAWIRGVPEAEDGSIASVVWMLEMLTDQSCALVGPTV

SEQ ID NO: 780633 - protein, 123 aa, Homo sapiens
HREPAKHLIIKIYNGKKPKGMELVLLQQGCSVCQFEARQISLHNGVHVSKAWSLQQGFLTLHLTPDSPSQAKEGGSSGGRGSLPFPTLHPQPSEPLLISFPLQGKGNAGRVWSFLQSCELCSG

SEQ ID NO: 780634 - protein, 36 aa, Homo sapiens
MEQDPISLKNNFLKRVDQIEMEQPVSGEKPKSVVPI

SEQ ID NO: 780635 - protein, 35 aa, Homo sapiens
MGQDRYLAGLGSGPGPRQGQGHNQVCAIARSNTVP

SEQ ID NO: 780636 - protein, 59 aa, Homo sapiens
MHQCNTHMMSSLRCEEEREEEYERRSGACSQGEANSVWVGGKRGSCLHQASISLDWESA

SEQ ID NO: 780637 - protein, 140 aa, Homo sapiens
VSLSFVCLLWFSFLLFPICRLSAVGVPLVVDRLQCCSSRCWGRPFPPVGVLAPGPCKLRWRHSLGFSSRASPAFFFGEPTTLYVAPGFSGNRLAQLSLTQSGPGPHESVLKSLPPPPKIFFFFFFFFLEYQRYLLLSQLT

SEQ ID NO: 780638 - protein, 119 aa, Homo sapiens
STKCITCILYFYTLSANLTGPSELPINPLMCHVPLSPLSCHSQTLVLSLHLSLTTLVVSLPSRMFLVKKENLDHQVVMPSSTYTILHQTRVHLLSYFNISLLFHHLLNDNLYIHLNSGS

SEQ ID NO: 780639 - protein, 141 aa, Homo sapiens
SFSPPCVSSLRLTSWILQIFPSAITWECLFLLEQSYLAAEGRERRDGLGLCAVATEILECQAIVVSLKIKFPNKKLQKGRGRGRRRFFSLCKYWFSFSIPIRPKKNILTKRENPFFRRKGNPWKRKRDEQPWFWQAIYFCF

SEQ ID NO: 780640 - protein, 75 aa, Homo sapiens
AHNTLFLTWLNPDKNRAFKLEAPMYFQVGVPCASARIGFSTLESTCFRSPTKIETGSLSVTQAGMQWHHHSSLQP

SEQ ID NO: 780641 - protein, 621 aa, Homo sapiens
MPEDQAGAAMEEASPYSLLDICLNFLTTHLEKFCSARQDGTLCLQEPGVFPQEVADRLLRTMAFHGLLNDGTVGIFRGNQMRLKRACIRKAKISAVAFRKAFCHHKLVELDATGVNADITITDIISGLGSNKWIQQNLQCLVLNSLTLSLEDPYERCFSRLSGLRALSITNVLFYNEDLAEVASLPRLESLDISNTSITDITALLACKDRLKSLTMHHLKCLKMTTTQILDVVRELKHLNHLDISDDKQFTSDIALRLLEQKDILPNLVSLDVSGRKHVTDKAVEAFIQQRPSMQFVGLLATDAGYSEFLTGEGHLKVSGEANETQIAEALKRYSERAFFVREALFHLFSLTHVMEKTKPEILKLVVTGMRNHPMNLPVQLAASACVFNLTKQDLAAGMPVRLLADVTHLLLKAMEHFPNHQQLQKNCLLSLCSDRILQDVPFNRFEAAKLVMQWLCNHEDQNMQRMAVAIISILAAKLSTEQTAQLGTELFIVRQLLQIVKQKTNQNSVDTTLKFTLSALWNLTDESPTTCRHFIENQGLELFMRVLESFPTESSIQQKVLGLLNNIAEVQELHSELMWKDFIDHISSLLHSVEVEVSYFAAGIIAHLISRGEPSLDIES

SEQ ID NO: 780642 - protein, 621 aa, Homo sapiens; identical to SEQ ID NO: 780641

SEQ ID NO: 780643 - protein, 104 aa, Homo sapiens
GRRYNGVCALPCLQGKGTSRSEQIFLLGSEVCRLAPVLPDRNRGPRCNRDSSPTHPGYALRENAKILANPDGPAKPYLFIYFFELRWSGSVAQAGAQWSNLSSL

SEQ ID NO: 780644 - protein, 216 aa, Homo sapiens
MEDSAVPTPDSREAGVWTVPHLNPHSLCLPLPRLAKKSWFGNFISLEKEEQIFVVIKDKPLSSIKADIVHAFLSIPSLSHSVISQTSFRAEYKATGGPAVFQKPVKFQVDITYTEGGEAQKENGIYSVTFTLLSGPSRRFKRVVETIQAQLLSTHDPPAAQHLSDTTNCMEMMTGRLSKCGKNPPRSPGTSTCHFTAHPQPAVAATCRPGCPGLPV

SEQ ID NO: 780645 - protein, 685 aa, Homo sapiens
GRPWPALGPRAMTSTGKDGGAQHAQYVGPYRLEKTLGKGQTGLVKLGVHCVTCQKVAIKIVNREKLSESVLMKVEREIAILKLIEHPHVLKLHDVYENKKYLYLVLEHVSGGELFDYLVKKGRLTPKEARKFFRQIISALDFCHSHSICHRDLKPENLLLDEKNNIRIADFGMASLQVGDSLLETSCGSPHYACPEVIRGEKYDGRKADVWSCGVILFALLVGALPFDDDNLRQLLEKVKRGVFHMPHFIPPDCQSLLRGMSEVDAARRLTLEHIQKHIWYIGGKNEPEPEQPIPRKVQIRSLPSLEDIDPDVLDSMHSLGCFRDRNKLLQDLLSEEENQEKMIYFLLLDRKERYPSQEDEDLPPRNEIDPPRKRVDSPMLNRHGKRRPERKSMEVLSVTDGGSPVPARRAIEMAQHGQRSRFISGASSGLSTSPLSSPRVTPHPSPRGSPLPTPKGTPVHTPKESPAGTPNPTPPSSPSVGGVPWRARLNSIKNSFLGSPRFHRRKLQVPTPEEMSNLTPESSPELAKKSWFGNFISLEKEEQIFVVIKDKPLSSIKADIVHAFLSIPSLSHSVISQTSFRAEYKATGGPAVFQKPVKFQVDITYTEGGEAQKENGIYSVTFTLLSGPSRRFKRVVETIQAQLLSTHDPPAAQHLSEPPPPAPGLSWGAGLKGQKVATSYESSL

SEQ ID NO: 780646 - protein, 226 aa, Homo sapiens
LGTRLGLNGRGESPAGTPNPTPPSSPSVGGVPWRARLNSIKNSFLGSPRFHRRKLQVPTPEEMSNLTPESSPELAKKSWFGNFISLEKEEQIFVVIKDKPLSSIKADIVHAFLSIPSLSHSVISQTSFRAEYKATGGPAVFQKPVKFQVDITYTEGGEAQKENGIYSVTFTLLSGPSRRFKRVVETIQAQLLSTHDPPAAQHLSDTTNCMEMMTGRLSKCGIIPKS

SEQ ID NO: 780647 - protein, 685 aa, Homo sapiens; identical to SEQ ID NO: 780645

SEQ ID NO: 780648 - protein, 186 aa, Homo sapiens
MEDSAVPTPDSREAGVWTVPHLNPHSLCLPLPRLAKKSWFGNFISLEKEEQIFVVIKDKPLSSIKADIVHAFLSIPSLSHSVISQTSFRAEYKATGGPAVFQKPVKFQVDITYTEGGEAQKENGIYSVTFTLLSGPSRRFKRVVETIQAQLLSTHDPPAAQHLSDTTNCMEMMTGRLSKCGIIPKS

SEQ ID NO: 780649 - protein, 679 aa, Homo sapiens
GRPWPALGPRAMTSTGKDGGAQHAQYVGPYRLEKTLGKGQTGLVKLGVHCVTCQKVAIKIVNREKLSESVLMKVEREIAILKLIEHPHVLKLHDVYENKKYLYLVLEHVSGGELFDYLVKKGRLTPKEARKFFRQIISALDFCHSHSICHRDLKPENLLLDEKNNIRIADFGMASLQVGDSLLETSCGSPHYACPEVIRGEKYDGRKADVWSCGVILFALLVGALPFDDDNLRQLLEKVKRGVFHMPHFIPPDCQSLLRGMSEVDAARRLTLEHIQKHIWYIGGKNEPEPEQPIPRKVQIRSLPSLEDIDPDVLDSMHSLGCFRDRNKLLQDLLSEEENQEKMIYFLLLDRKERYPSQEDEDLPPRNEIDPPRKRVDSPMLNRHGKRRPERKSMEVLSVTDGGSPVPARRAIEMAQHGQRSRFISGASSGLSTSPLSSPRVTPHPSPRGSPLPTPKGTPVHTPKESPAGTPNPTPPSSPSVGGVPWRARLNSIKNSFLGSPRFHRRKLQVPTPEEMSNLTPESSPELAKKSWFGNFISLEKEEQIFVVIKDKPLSSIKADIVHAFLSIPSLSHSVISQTSFRAEYKATGGPAVFQKPVKFQVDITYTEGGEAQKENGIYSVTFTLLSGPSRRFKRVVETIQAQLLSTHDPPAAQHLSDTTNCMEMMTGRLSKCGIIPKS

SEQ ID NO: 780650 - protein, 685 aa, Homo sapiens; identical to SEQ ID NO: 780645

SEQ ID NO: 780651 - protein, 679 aa, Homo sapiens; identical to SEQ ID NO: 780649

SEQ ID NO: 780652 - protein, 717 aa, Homo sapiens
GRPWPALGPRAMTSTGKDGGAQHAQYVGPYRLEKTLGKGQTGLVKLGVHCVTCQKVAIKIVNREKLSESVLMKVEREIAILKLIEHPHVLKLHDVYENKKYLYLVLEHVSGGELFDYLVKKGRLTPKEARKFFRQIISALDFCHSHSICHRDLKPENLLLDEKNNIRIADFGMASLQVGDSLLETSCGSPHYACPEVIRGEKYDGRKADVWSCGVILFALLVGALPFDDDNLRQLLEKVKRGVFHMPHFIPPDCQSLLRGMSEVDAARRLTLEHIQKHIWYIGGKNEPEPEQPIPRKVQIRSLPSLEDIDPDVLDSMHSLGCFRDRNKLLQDLLSEEENQEKMIYFLLLDRKERYPSQEDEDLPPRNEIDPPRKRVDSPMLNRHGKRRPERKSMEVLSVTDGGSPVPARRAIEMAQHGQRSRFISGASSGLSTSPLSSPRVTPHPSPRGSPLPTPKGTPVHTPKESPAGTPNPTPPSSPSVGGVPWRARLNSIKNSFLGSPRFHRRKLQVPTPEEMSNLTPESSPELAKKSWFGNFISLEKEEQIFVVIKDKPLSSIKADIVHAFLSIPSLSHSVISQTSFRAEYKATGGPAVFQKPVKFQVDITYTEGGEAQKENGIYSVTFTLLSGPSRRFKRVVETIQAQLLSTHDPPAAQHLSDTTNCMEMMTGRLSKCGSPLSNFFDVIKQLFSDEKNGQAAQAPSTPAKRSAHGPLGDSAA

SEQ ID NO: 780653 - protein, 152 aa, Homo sapiens
DIFALGLTIAVAAGAESLPTNGAAWHHIRKGNFPDVPQELSESFSSLLKNMIQPDAEQRPSAAALARNTVLRPSLGKTEELQQQLNLEKFKTATLERELREAQQAQSPQGYTHHGDTGVSGTHTGSRSTKRLVGGKSARSSSFTSGEREPLH

SEQ ID NO: 780654 - protein, 30 aa, Homo sapiens
GVAPYKAMPLGGQKPVVWLGEVAHAYNPST

SEQ ID NO: 780655 - protein, 361 aa, Homo sapiens
KETGGRVDLIFLVPQNPFSEVCLPWRSKMAESDSTDFDLLWYLENLSDKEFQSFKKYLARKILDFKLPQFPLIQMTKEELANVLPISYEGQYIWNMLFSIFSMMRKEDLCRKIIGRRNRNQEACKAVMRRKFMLQWESHTFGKFHYKFFRDVSSDVFYILQLAYDSTSYYSANNLNVFLMGERASGKTIVINLAVLRWIKGEMWQNMISYVVHLTSHEINQMTNSSLAELIAKDWPDGQAPIADILSDPKKLLFILEDLDNIRFELNVNESALCSNSTQKVPIPVLLVSLLKRKMAPGCWFLISSRPTRGNNVKTFLKEVDCCTTLQLSNGKREIYFNSFFKDRQRASAALQLVHEDEILV

SEQ ID NO: 780656 - protein, 128 aa, Homo sapiens
TRPGLSRENGAVHDCPGQQVRSRPGPASGYWLPWLWLWWLAAWKAVEPACCVKDSAMVTPGQIFMERWSWKGLRHLLDQHTHLGMRKLLPEGELPEVTALGKKVGWAPIEIPRKWDWNRSTFSIMAIR

SEQ ID NO: 780657 - protein, 36 aa, Homo sapiens
MSLSTILLLPRANGWFSGFLIGHRSNDWSSLECLRS

SEQ ID NO: 780658 - protein, 205 aa, Homo sapiens
  misc_feature (7)..(7): Xaa can be any naturally occurring amino acid
QAVRSGXWGSGPGGMSEVEAAAVATAVPAATVPATAAGVVAVVVPVPAGEPQKGGGAGGGGGAASGPAAGTPSAPGSRTPGNPATAVSGTPAPPARSQADKPVLDNPSPWARVQNGFNGPGMGYGFINQENDTKEKDVFCFTMSRLFKKENQTPRKVLLGDRRFGTNWGRAGGNLECRGKGRKKGAAKEGPTKNVTWGLGGKVPR

SEQ ID NO: 780659 - protein, 410 aa, Homo sapiens
PLASAPGPLPACGRGSGREDRAGRWVREPGGGAGAVAAVAGTGPGGMSEVEAAAVATAVPAATVPATAAGVVAVVVPVPAGEPQKGGGAGGGGGAASGPAAGTPSAPGSRTPGNPATAVSGTPAPPARSQADKPVLAIQVLGTVKWFNVRNGYGFINRNDTKEDVFVHQTAIKRNNPRKFLRSVGDGETVEFDVVEGEKGAEATNVTGPGGVPVKGSRYAPNRRKSRRFIPRPPSVAPPPMVAEIPSAGTGPGSKGERAEDSGQRPRRWCPPPFFYRRRFVRGPRPPNQQQPIEGTDRVEPKETAPLEGHQQQGDERVPPPRFRPRYRRPFRPRPRQQPTTEGGDGETKPSQGPADGSRPEPQRPRNRPYFQRRRQQAPGPQQAPGPRQPAAPETSAPVNSGDPTTTILE

SEQ ID NO: 780660 - protein, 242 aa, Homo sapiens
MTAIKRNNPRKFLRSVGDGETVEFDVVEGEKGAEATNVTGPGGVPVKGSRYAPNRRKSRRFIPRPPSVAPPPMVAEIPSAGTGPGSKGERAEDSGQRPRRWCPPPFFYRRRFVRGPRPPNQQQPIEGTDRVEPKETAPLEGHQQQGDERVPPPRFRPRYRRPFRPRPRQQPTTEGGDGETKPSQGPADGSRPEPQRPRNRPYFQRRRQQAPGPQQAPGPRQPAAPETSAPVNSGDPTTTILE

SEQ ID NO: 780661 - protein, 289 aa, Homo sapiens
GSGPRIFGKADKPVLAIQVLGTVKWFNVRNGYGFINRNDTKEDVFVHQTAIKRNNPRKFLRSVGDGETVEFDVVEGEKGAEATNVTGPGGVPVKGSRYAPNRRKSRRFIPRPPSVAPPPMVAEIPSAGTGPGSKGERAEDSGQRPRRWCPPPFFYRRRFVRGPRPPNQQQPIEGTDRVEPKETAPLEGHQQQGDERVPPPRFRPRYRRPFRPRPRQQPTTEGGDGETKPSQGPADGSRPEPQRPRNRPYFQRRRQQAPGPQQAPGPRQPAAPETSAPVNSGDPTTTILE

SEQ ID NO: 780662 - protein, 410 aa, Homo sapiens; identical to SEQ ID NO: 780659

SEQ ID NO: 780663 - protein, 199 aa, Homo sapiens
PLASAPGPLPACGRGSGREDRAGRWVREPGGGAGAVAAVAGTGPGGMSEVEAAAVATAVPAATVPATAAGVVAVVVPVPAGEPQKGGGAGGGGGAASGPAAGTPSAPGSRTPGNPATAVSGTPAPPARSQADKPVLAIQVLGTVKWFNVRNGYGFINRNDTKEDVFVHQTAIKRNNPRKFLRSVGDGETVEFDVVEGEK

SEQ ID NO: 780664 - protein, 203 aa, Homo sapiens
PLASAPGPLPACGRGSGREDRAGRWVREPGGGAGAVAAVAGTGPGGMSEVEAAAVATAVPAATVPATAAGVVAVVVPVPAGEPQKGGGAGGGGGAASGPAAGTPSAPGSRTPGNPATAVSGTPAPPARSQADKPVLAIQVLGTVKWFNVRNGYGFINRYPRNPGRGWNGCLPSWPVGLDTRPTSSTPAEAHGCNVQLMLVESL

SEQ ID NO: 780665 - protein, 199 aa, Homo sapiens
PLASAPGPLPACGRGSGREDRAGRWVREPGGGAGAVAAVAGTGPGGMSEVEAAAVATAVPAATVPATAAGVVAVVVPVPAGEPQKGGGAGGGGGAASGPAAGTPSAPGSRTPGNPATAVSGTPAPPARSQADKPVLAIQVLGTVKWFNVRNGYGFINRNDTKEDVFVHQEALRQFSEGEGPWVQWFSKRGPCTSGSSIT

SEQ ID NO: 780666 - protein, 300 aa, Homo sapiens
GKPKAAWPAGPERYLGWELRTKVDSPAIQVLGTVKWFNVRNGYGFINRNDTKEDVFVHQTAIKRNNPRKFLRSVGDGETVEFDVVEGEKGAEATNVTGPGGVPVKGSRYAPNRRKSRRFIPRPPSVAPPPMVAEIPSAGTGPGSKGERAEDSGQRPRRWCPPPFFYRRRFVRGPRPPNQQQPIEGTDRVEPKETAPLEGHQQQGDERVPPPRFRPRYRRPFRPRPRQQPTTEGGDGETKPSQGPADGSRPEPQRPRNRPYFQRRRQQAPGPQQAPGPRQPAAPETSAPVNSGDPTTTILE

SEQ ID NO: 780667 - protein, 257 aa, Homo sapiens
MLENHCLVERALTGTETAIKRNNPRKFLRSVGDGETVEFDVVEGEKGAEATNVTGPGGVPVKGSRYAPNRRKSRRFIPRPPSVAPPPMVAEIPSAGTGPGSKGERAEDSGQRPRRWCPPPFFYRRRFVRGPRPPNQQQPIEGTDRVEPKETAPLEGHQQQGDERVPPPRFRPRYRRPFRPRPRQQPTTEGGDGETKPSQGPADGSRPEPQRPRNRPYFQRRRQQAPGPQQAPGPRQPAAPETSAPVNSGDPTTTILE

SEQ ID NO: 780668 - protein, 216 aa, Homo sapiens
PLASAPGPLPACGRGSGREDRAGRWVREPGGGAGAVAAVAGTGPGGMSEVEAAAVATAVPAATVPATAAGVVAVVVPVPAGEPQKGGGAGGGGGAASGPAAGTPSAPGSRTPGNPATAVSGTPAPPARSQADKPVLAIQVLGTVKWFNVRNGYGFINRNDTKEDVFVHQTAIKRNNPRKFLRSVGDGETVEFDVVEGEKAFPPQATPAAYHRRWGW

SEQ ID NO: 780669 - protein, 111 aa, Homo sapiens
GRQCSWAGSLAPGGGVGQLGEPWGGSIPWSPQSLVPCLRPFRPRPRQQPTTEGGDGETKPSQGPADGSRPEPQRPRNRPYFQRRRQQAPGPQQAPGPRQPAAPEVRTSDVG

SEQ ID NO: 780670 - protein, 473 aa, Homo sapiens
MFRGAWMWPGKDAAALTICCCCCCWAPRPSDKPCADSERAQRWRLSLASLLFFTVLLADHLWLCAGARPRARELSSAMRPPWGAGRERQPVPPRAVLPVPPPPPGEPSAPPGTCGPRYSNLTKAAPAAGSRPVCGGVPEPTGLDAACTKLQSLQRLFEPTTPAPPLRPPDSPSRAPAEFPSAKKNLLKGHFRNFTLSFCDTYTVWDLLLGMDRPDSLDCSLDTLMGDLLAVVASPGSGAWEACSNCIEAYQRLDRHAQEKYDEFDLVLHKYLQAEEYSIRSCTKGCKAVYKAWLCSEYFSVTQQECQRWVPCKQYCLEVQTRCPFILPDNEEMVYGGLPGFICTGLLDTSPKRLETKCCDVQWVSCEAKKKKKFKESEAPKTHQQQFHHSYFHHYHQQYHHYHPHHDPPGRVSNKPALLPVSGGSRLSPSRIRLCVLVLMLLHTVVSFSSNQGGGGLGLETLPALEEGLTREE

SEQ ID NO: 780671 - protein, 473 aa, Homo sapiens; identical to SEQ ID NO: 780670

SEQ ID NO: 780672 - protein, 64 aa, Homo sapiens
NCLLSLCSDRILQDVPFNRFEAAKLVMQWLCNHEDQNMQRMAVAIISILAAKLSTEQTAQLGTE

SEQ ID NO: 780673 - protein, 102 aa, Homo sapiens
TEWAGEPSCSFGVHSAPAITQLRNMDEYTSRQVNTEWGAKEGRNSSEFHKHQAQIRAQRKKKEGLPLVCLCKLLQSNFTLCYLGSRNKCYLKVLLPSNLCHT

SEQ ID NO: 780674 - protein, 78 aa, Homo sapiens
ERGIHREARQPGVSRPLRDVELRQMSPKPRASGPPAKAKETGKRKSSPSARAAAGGASERGDPARPPESGERAGGTTE

SEQ ID NO: 780675 - protein, 144 aa, Homo sapiens
PSPLSSQEASPVLTWHNPPTRPPPLLRTRPCSQPPPSSSLNQSPSVISLLSFQTTKVAEKGEAVRGGRRGKKGAATKMAAVTAPEAESGPAAPGPSDQPSQELPQHELPPEEPVSEGTQHDPLSQESELEEPLSKGRPSTPLSP

SEQ ID NO: 780676 - protein, 149 aa, Homo sapiens
ERGIHREARQPGVSRPLRDVELRQMSPKPRASGPPAKAKETGKRKSSSQPSPSGPKKKTTKVAEKGEAVRGGRRGKKGAATKMAAVTAPEAESGPAAPGPSDQPSQELPQHELPPEEPVSEGTQHDPLSQESELEEPLSKGRPSTPLSP

SEQ ID NO: 780677 - protein, 126 aa, Homo sapiens
MPEPSKSAPAPKKGSKKAVTKAQKKDGKKRKRSRKESYSVYVYKVLKQVHPDTGISSKAMGIMNSFVNDIFERIAGEASRLAHYNKRSTITSREIQTAVRLLLPGELAKHAVSEGTKAVTKYTSSK

SEQ ID NO: 780678 - protein, 126 aa, Homo sapiens; identical to SEQ ID NO: 780677

SEQ ID NO: 780679 - protein, 126 aa, Homo sapiens; identical to SEQ ID NO: 780677

SEQ ID NO: 780680 - protein, 166 aa, Homo sapiens
MPEPSKSAPAPKKGSKKAVTKAQKKDGKKRKRSRKESYSVYVYKVLKQVHPDTGISSKAMGIMNSFVNDIFERIAGEASRLAHYNKRSTITSREIQTAVRLLLPGELAKHAVSEGTKAVTKYTSSKKRKRRFTESIKKAHGFRKLKIWLKLRVSNQSPDDIYIARD

SEQ ID NO: 780681 - protein, 126 aa, Homo sapiens; identical to SEQ ID NO: 780677

SEQ ID NO: 780682 - protein, 126 aa, Homo sapiens; identical to SEQ ID NO: 780677

SEQ ID NO: 780683 - protein, 75 aa, Homo sapiens
PKGWWTEKWINTLWSIHTVEYYSAMKRKGILTQATVRRHLEDLRLSERSQTQRDKCRVIPLLGSPWSHQIHRDRK

SEQ ID NO: 780684 - protein, 109 aa, Homo sapiens
KKGNEVWATYRSENKLCDVPAPAQALVVSSQLWAQWYHVGGQFRSIYITKSTSAANQGFSILECWLINNSLNIYQNTIKQFSDHKVIIHSGTSSSLKWDNVILQTGREC

SEQ ID NO: 780685 - protein, 319 aa, Homo sapiens
MTNSSFFCPVYKDLEPFTYFFYLVFLVGIIGSCFATWAFIQKNTNHRCVSIYLINLLTADFLLTLALPVKIVVDLGVAPWKLKIFHCQVTACLIYINMYLSIIFLAFVSIDRCLQLTHSCKIYRIQEPGFAKMISTVVWLMVLLIMVPNMMIPIKDIKEKSNVGCMEFKKEFGRNWHLLTNFICVAIFLNFSAIILISNCLVIRQLYRNKDNENYPNVKKALINILLVTTGYIICFVPYHIVRIPYTLSQTEVITDCSTRISLFKAKEATLLLAVSNLCFDPILYYHLSKAFRSKVTETFASPKETKAQKEKLRCENNA

SEQ ID NO: 780686 - protein, 301 aa, Homo sapiens
MTNSSFFCPVYKDLEPFTYFFYLVFLVGIIGSCFATWAFIQKNTNHRCVSIYLINLLTADFLLTLALPVKIVVDLGVAPWKLKIFHCQVTACLIYINMYLSIIFLAFVSIDRCLQLTHSCKIYRIQEPGFAMMIPIKDIKEKSNVGCMEFKKEFGRNWHLLTNFICVAIFLNFSAIILISNCLVIRQLYRNKDNENYPNVKKALINILLVTTGYIICFVPYHIVRIPYTLSQTEVITDCSTRISLFKAKEATLLLAVSNLCFDPILYYHLSKAFRSKVTETFASPKETKAQKEKLRCENNA

SEQ ID NO: 780687 - protein, 319 aa, Homo sapiens; identical to SEQ ID NO: 780685

SEQ ID NO: 780688 - protein, 116 aa, Homo sapiens
VSVYPSENWEAWKTPAALACQETVSSPAEAGELHLVTTRGYNSASCPAGLADSPSQQATCSLTQPGCTLFTDEKPEPEGSQGCLHRSETFPNQTAPNPPSGGTVCLLERVVPTTPE

SEQ ID NO: 780689 - protein, 123 aa, Homo sapiens
MGSAHSGFRPGGAPLDAACPPGPEDMQLWTCIAQSPQLLDESRNVPGCPSSEPSNSKSRGRPKNLDFIQLRGGNGEPDARENLHLEEQQKLGAHRALCAMRAPPEGHPMHQEMPGRRALSSHY

SEQ ID NO: 780690 - protein, 186 aa, Homo sapiens
MSGELSGCHTLGCSWHLLGRGHGCCPTPHSAQDSPPMAKNYPTPSANGSEAEEPYPSLLFFNPFMLCVPLLVQEPQLLLSSWGYVSHCAQIFFFALWLLCRARALHPPRFPEYGALTGVSHQVGPTKEFGCPRGEQPHWVAPGRNRGPEVSLEPSLLGSYQRWHAPTPSPRPVPTIRTNWWPVKTV

SEQ ID NO: 780691 - protein, 49 aa, Homo sapiens
GQAAPPWVLFRVPRLGLLFQEKSGPNLEMQLCYLHSSPRIHTGLLMSAG

SEQ ID NO: 780692 - protein, 157 aa, Homo sapiens [sequence omitted]

SEQ ID NO: 780693 - protein, 49 aa, Homo sapiens
SSPKIHLGRKRPGKECLEGKHEQVSSGVLLTAWPTVGQRAEWGGCGKAR

SEQ ID NO: 780694 - protein, 87 aa, Homo sapiens
SDTDRSEGLSPWPRSPGNSPLGDEFPGMFTYDYDTALQSKAAEWHCSLRDLEFSNVDVLQQTPPCSAEVPSDPDKAAFHERDSDILK

SEQ ID NO: 780695 - protein, 82 aa, Homo sapiens
KDRNDLLSGIDEFLDQVTVLPPGEWDPSIRIEPPKSVPSQEKRKIPVFHNGSTPTLGETPKEAAHHAGPELQRTGRWVQILI

SEQ ID NO: 780696 - protein, 92 aa, Homo sapiens
GPACCTAQLPVVWQWAPSGLSGAAGAPAACGCWTLEAWLGRTRARLLNFTGFVISVEPHMVGGFHLGPGLCRGGQVWVAGSPGREVTVSSGE

SEQ ID NO: 780697 - protein, 103 aa, Homo sapiens
PHQACPKVRQILDIWASGCGVVSLHCFQHVVAVEAYTREACIVEALGIQTLTNQKQGHCYGVVAGWPPARRRRLGVHLLHRALLVFLAEGERQLHPQDIQARG

SEQ ID NO: 780698 - protein, 105 aa, Homo sapiens
SWITSLRTQECSLRKAQGLTMCTQPLWSAFQTAPCCLILSLIHSTMGLPAASLLQGLKCNPWAPTLRPLNLVPSARNPLPQHGHWASPHFIQVSVPVSFSRPVLA

SEQ ID NO: 780699 - protein, 74 aa, Homo sapiens
QACPIPKRILALGLSLAQSGRKAGLSNRPTCLHTLPPRSTQGLQNQLRPPLRAESLFRYREPALKASSDTENQH

SEQ ID NO: 780700 - protein, 118 aa, Homo sapiens [sequence omitted]

SEQ ID NO: 780701 - protein, 72 aa, Homo sapiens
MGRDVLDGNMVLEVPYLHPAAPPPTTLECKIASLLTLTLFPGPTPRQVQDSPWCSLRVQTSEALAIPVLAAP

SEQ ID NO: 780702 - protein, 105 aa, Homo sapiens [sequence omitted]

SEQ ID NO: 780703 - protein, 165 aa, Homo sapiens [sequence omitted]

SEQ ID NO: 780704 - protein, 107 aa, Homo sapiens
SHPKAHLRTHTGERPFACSWQDCNKKFARSDELARHYRTHTGEKKFSCPICEKRFMRSDHLTKHARRHANFHPGMLQRRGGGSRTGSLSDYSRSDASSPTISPASSP

SEQ ID NO: 780705 - protein, 107 aa, Homo sapiens; identical to SEQ ID NO: 780704

SEQ ID NO: 780706 - protein, 107 aa, Homo sapiens; identical to SEQ ID NO: 780704

SEQ ID NO: 780707 - protein, 72 aa, Homo sapiens; identical to SEQ ID NO: 780701

SEQ ID NO: 780708 - protein, 123 aa, Homo sapiens
MVTDPEAFTCSCLSGSSPLPHGGALPMNELMLREVKRLPGQGAGNQEGKDLTQVILMPNHEHPTTVSADGLRMRHDFFPGHCSFVTVMGPFSALTLALAQHRGRQDSREERVALMAMQGGEWA

SEQ ID NO: 780709 - protein, 94 aa, Homo sapiens
GLEEQQVSLSGPSSILSAASPGAKLPRVSLSRPSSSCLPVASFSPAQPSSWLSAAFPGPAFDFWRPLQAQNLPSSGPLQARPRPRPHSGLSTPS

SEQ ID NO: 780710 - protein, 245 aa, Homo sapiens
GKYTLTLENSSGTKSAFVTVRVLDTPSPPVNLKVTEITKDSVSITWEPPLLDGGSKIKNYIVEKREATRKSYAAVVTNCHKNSWKIDQLQEGCSYYFRVTAENEYGIGLPAQTADPIKVAEVPQPPGKITVDDVTRNSVSLSWTKPEHDGGSKIIQYIVEMQAKHSEKWSECARVKSLQAVITNLTQGEEYLFRVVAVNEKGRSDPRSLAVPIVAKDLVIEPDVKPAFSSYSVQVGQDLKIEVPI

SEQ ID NO: 780711 - protein, 59 aa, Homo sapiens
LRDSLREAPAQVGNKTNIVSLSLETDWGLNFALTIASCVSWDELFNLHKLQSLNTLDTN

SEQ ID NO: 780712 - protein, 160 aa, Homo sapiens
RGGRGGMEVAAAATRPGRTESPAIPSRPGMGNGVKEGPVRLHEDAEAVLSSSVIIKVSSKRFSAKEAFRVLYYTYLNEGFLSLWRGNSATMVRVVPYAAIQFSAHEEYKRILGSYYGFRGEALPPWPRLFAGALAGTTAASLTYPLDLVRARMAVTPKEM

SEQ ID NO: 780713 - protein, 127 aa, Homo sapiens
MAVTPKEMYSNIFHVFIRISREEGLKTLYHGFMPTVLGVIPYAGLSFFTYETLKSLHRGKGAGSMRRGRSGSIPWGQQLHLGHIDLETRRSGVRPLGGAGCRPTSKSGENTLCAAATEEPGLTALNA

SEQ ID NO: 780714 - protein, 111 aa, Homo sapiens
MASAARACRAELRTESPAIPSRPGMGNGVKEGPVRLHEDAEAVLSSSVSSKRDHRQVLSSLLSGALAGALAKTAVAPLDRTKIIFQVSSKRFSAKVSHYVTAPAWGQSPLP

SEQ ID NO: 780715 - protein, 259 aa, Homo sapiens [sequence omitted]

SEQ ID NO: 780716 - protein, 273 aa, Homo sapiens
MIFLLLMLSLELQLHQIAALFTVTVPKELYIIEHGSNVTLECNFDTGSHVNLGAITASLQKVENDTSPHRERATLLEEQLPLGKASFHIPQVQVRDEGQYQCIIIYGVAWDYKYLTLKVKASYRKINTHILKVPETDEVELTCQATGYPLAEVSWPNVSVPANTSHSRTPEGLYQVTSVLRLKPPPGRNFSCVFWNTHVRELTLASIDLQSQMEPRTHPTWLLHIFIPSCIIAFIFIATVIALRKQLCQKLYSSKDTTKRPVTTTKREVNSAI

SEQ ID NO: 780717 - protein, 119 aa, Homo sapiens
MVALLKLLWPPFCCDCVPVRGLQGSARPPFFLSHHTSPNAFSMPGPLAPHSSLPMWPLPPPNALIHKSGLSRETEQTGCMWREERGEQGERRKESREREDRKVGEMRGEERERGGRDRC

SEQ ID NO: 780718 - protein, 44 aa, Homo sapiens
MVGRCCGREHDSHLHIDKELYHCSKNAHTVCILATLESSSQPLM

SEQ ID NO: 780719 - protein, 75 aa, Homo sapiens
GVQRSLSVRRAVLINSHLEKDHSGKNTENEQLRAGVMACNPSTWEAERVDHLGQKFETNILLTTYKINSPVPQKQ

SEQ ID NO: 780720 - protein, 104 aa, Homo sapiens
MELTGSPTCERWLVHWPWPPRAMTLIHWLHPPPCSMALGVTCSCPLPSVWILPMRTPSRRWGLSYLTERLSSTQRFCLQPTQHDEIKTRGCSLLRVDHPAHLVT

SEQ ID NO: 780721 - protein, 223 aa, Homo sapiens
MASKLLRAVILGPPGSGKGTVCQRIAQNFGLQHLSSGHFLRENIKASTEVGEMAKQYIEKSLLVPDHVITRLMMSELENRRGQHWLLDGFPRTLGQAEALDKICEVDLVISLNIPFETLKDRLSRRWIHPPSGRVYNLDFNPPHVHGIDDVTGEPLVQQEDDKPEAVAARLRQYKDVAKPVIELYKSRGVLHQFSGTETNKIWPYVYTLFSNKITPIQSKEAY

SEQ ID NO: 780722 - protein, 223 aa, Homo sapiens; identical to SEQ ID NO: 780721

SEQ ID NO: 780723 - protein, 291 aa, Homo sapiens
VRLLLGPGAGLRGGVVLKVSPSPCRGGRRVPVRAEGARGRGPRNKVPGASSGAAVGAARLTAPLLAKAMASKLLRAVILGPPGSGKGTVCQRIAQNFGLQHLSSGHFLRENIKASTEVGEMAKQYIEKSLLVPDHVITRLMMSELENRRGQHWLLDGFPRTLGQAEALDKICEVDLVISLNIPFETLKDRLSRRWIHPPSGRVYNLDFNPPHVHGIDDVTGEPLVQQEDDKPEAVAARLRQYKDVAKPVIELYKSRGVLHQFSGTETNKIWPYVYTLFSNKITPIQSKEAY

SEQ ID NO: 780724 - protein, 84 aa, Homo sapiens
ESKQCPESKQCPESKQCPDPNLCPPSACRATVEAVTRGDSLPVLSFPRITPLLPSSSQTQMSSIVTLGVPISLVGKEKGKNSHQ

SEQ ID NO: 780725 - protein, 291 aa, Homo sapiens; identical to SEQ ID NO: 780723

SEQ ID NO: 780726 - protein, 291 aa, Homo sapiens; identical to SEQ ID NO: 780723

SEQ ID NO: 780727 - protein, 223 aa, Homo sapiens; identical to SEQ ID NO: 780721

SEQ ID NO: 780728 - protein, 223 aa, Homo sapiens; identical to SEQ ID NO: 780721

SEQ ID NO: 780729 - protein, 79 aa, Homo sapiens
LFSLIRTNPTQLSLVRNNGEPLPRLGAAMGPASLDLKCSRYPAGSGGVEVSGGVCNNSNQHVVDGERKLSSNQNNTRTT

SEQ ID NO: 780730 - protein, 83 aa, Homo sapiens
RSEYSSYMDKAIRQQLSLVRNNGEPLPRLGAAMGPASLDLKCSRYPAGSGGVEVSGGVCNNSNQHVVDGERKLSSNQNNTRTT

SEQ ID NO: 780731 - protein, 118 aa, Homo sapiens
TQTHEHKHTCTQTHTYTYAHKHKQHMSTTHTSINTDAHTCTNMSTTQTYKHKHTDAHTCTNTHTNNTHTCTHTNTHANTRTQAQNTNTCRNTHTSRNTHAHTCTNIYTQSHTSTHKHM

SEQ ID NO: 780732 - protein, 101 aa, Homo sapiens
KNLNANTNQFKAVVSILISDEAGFRAMMSIHQKNITIPKVYDLNNRVLKYMKQKLIALQGEIGKCTVMLGDCNIHVSINDKTSGQMIGKDIDALGQHNIPT

SEQ ID NO: 780733 - protein, 112 aa, Homo sapiens
FLFPFHIPQLSFLLPPGGHPVLDTRLCPVLWVMLGGIAYQREGGTEVHLLQKSVLPSSRQMPASQSWLTKTLCLMSCPGPSLSLFCPHPDHKHWGSTSVFLAAASGACVSAC

SEQ ID NO: 780734 - protein, 66 aa, Homo sapiens
FCKDISFFRFPGGFFDRLFLPTYFFLLLIIFIIIIFIIFVVVVILVLIISFFFYATFVIYVSITWR

SEQ ID NO: 780735 - protein, 80 aa, Homo sapiens
FPKSAGSCDSGHQLVLLDSISSLGETSLFMATCVEVDMGVRLGEHYSESSKSQNTGQLGHKITTWNPSTQSPGTLPPHEL

SEQ ID NO: 780736 - protein, 103 aa, Homo sapiens
MPINSSPSAVSRYSLYSLYSLSPEPGDAATQLLSSPLQAVYSPNSMLLRPGSGLSVFQLIASPPSGLFEVKYHATAHLVSYLPFSTLTQDFHTCLSPRSPSLS

SEQ ID NO: 780737 - protein, 76 aa, Homo sapiens
SSGLQRSVLHRYSVFRILLSPVCSHPPGVASGYKGAVGKLYGSDAIPCLLLVFTPTWSLGICPRALRIMVEPTKMG

SEQ ID NO: 780738 - protein, 104 aa, Homo sapiens
NSGLESSLARLGLKRPWQILEPQIPSLALYTATNPTCLRFLKIKPVKERKERQALLSNPQPRSVPQSCICWDLKSALCSSVMAHASMGRVSGLLRASLAASLLL

SEQ ID NO: 780739 - protein, 209 aa, Homo sapiens
MAETKDAAQMLVTFKDVAVTFTREEWRQLDLAQRTLYREVMLETCGLLVSLGHRVPKPELVHLLEHGQELWIVKRGLSHATCAGDRAQVHTREPTTYPPVLSERAFLRGSLTLESSTSSDSRLGRARDEEGLLEMQKGKVTPETDLHKETHLGKVSLEGEGLGTDDGLHSRALQEWLSADVLHECDSQQPGKDALIHAGTNPYKCKQCG

SEQ ID NO: 780740 - protein, 200 aa, Homo sapiens
MLVTFKDVAVTFTREEWRQLDLAQRTLYREVMLETCGLLVSLGHRVPKPELVHLLEHGQELWIVKRGLSHATCAGDRAQVHTREPTTYPPVLSERAFLRGSLTLESSTSSDSRLGRARDEEGLLEMQKGKVTPETDLHKETHLGKVSLEGEGLGTDDGLHSRALQEWLSADVLHECDSQQPGKDALIHAGTNPYKCKQCG

SEQ ID NO: 780741 - protein, 56 aa, Homo sapiens
GTWPSPGGHSDQHLYVQEAECLSGDGPPAIQDGDTKGCSEIVISERENGGHRGKRY

SEQ ID NO: 780742 - protein, 96 aa, Homo sapiens
PSSGGDRATKTVSYRTTPSGLQIMPLKKSQNGMENGDAGSEKDERHFGNGSHQPGLDLNDHVGEQDMGECDVNHATLAENGLGSALTNGGLNLHSP

SEQ ID NO: 780743 - protein, 179 aa, Homo sapiens
ILYPVTLIMHLLVHSVFCFFCSFLVNALGFSFSPDSPPSSSSFSSALGFSFSSFSSFSSSSSSSSSFFFLLLLLFFVFKLRQGLTLLPRLEYSDAILTHCSLKLLGSSDPPTSASQVARTTGVHHHAWLIFICFVEIGSCYVARAGLELLSSSDLLTSASPHVGITGLSYCAKLNFLHA

SEQ ID NO: 780744 - protein, 106 aa, Homo sapiens
LCLVDTDAEFGYALSLPIFVARVVQRHTAATRSLYSYSWVPVTCTIFVGSFEHLLRLWHHKMLNSSYILPARPYDSAISQGSPGSLCWRIVLETKKPGAGHGGLHL

SEQ ID NO: 780745 - protein, 44 aa, Homo sapiens
MELVWVWVFPIDIQLINCLTMDLVVLIWVQALLLSTHTTVSGMV

SEQ ID NO: 780746 - protein, 99 aa, Homo sapiens
MLSDISKRIPCLMRSKEERMTQKRPRRAHSALSRMLSDMESSDSNSAWRHFYTYGHRHMHTHTPHHHNKTCCTDGSSLTEQSVRMNFEPGTVAHFCNPS

SEQ ID NO: 780747 - protein, 161 aa, Homo sapiens
  misc_feature (64)..(64): Xaa can be any naturally occurring amino acid
TQTTCTACTHIRARKYTHVLTAHAHCTCTHGTHTACTHICTVLQACALTAYMYSYCMHRPSLHXSDHACTHIHTVHTGMYSEHLHTLYTCSCTHALTTHDTVHTQHTPPHSVHTHHTPPHIHTIHPQCTHTHTIHPHTVYTHTHHTPPQCTHTHIHPHTVY

SEQ ID NO: 780748 - protein, 152 aa, Homo sapiens
MGAAGGIDCWEFAMGKRGKRELGLGMPVGSGLVFRNGSGLWPADNPSLLPWGVREGSSPDLDPPLLPSDHLSTSLFHLLHLISTSALLFSHRIKLASSSLLLKHQSLVSGDVPKAAFPTIFSPCTGVPSQRASKLPIPPPSLFPLSWLIFVP

SEQ ID NO: 780749 - protein, 83 aa, Homo sapiens
TSRRNVMLTWLVVSLYHARLWTGKNPWATIIKKHSITWMEPVKFLEGGSIAWIIGSPVSSLSVSFSLLLPSCGTSDMSPNRSQ

SEQ ID NO: 780750 - protein, 155 aa, Homo sapiens
VCCFDDLLSSCCLPYVWQCAVNLLNPILDCVIARIAIIPHYLRDSAVVRFLRPLGSEVSFVLLVFTDAVCYAWVPAFYFFMGDFHLIALLHRYKATDLQNENSWGTLSGVRVEWRRWWYLLKGVLMVEGSSFFLGRIPFVLSKETSLHHGLWTCL

SEQ ID NO: 780751 - protein, 106 aa, Homo sapiens
SLKISWVRGQLLTCTSANVSSYAWVPAFYFFMGDFHLIALLHRYKATDLQNENSWGTLSGVRVEWRRWWYLLKGVLMVEGSSFFLGRIPFVLSKETSLHHGLWTCL

SEQ ID NO: 780752 - protein, 111 aa, Homo sapiens
MVKPHLYRKIQKLAGCGGTTCSPRYLGGWGGRMLEPRSQTGLKLLASRDLPTLDPKVLGYRCEPPCLASYLFQESFIDYILKYFKYIFLNCDKRYIKVAILSIFKCTVQCH

SEQ ID NO: 780753 - protein, 107 aa, Homo sapiens
RCIGSGSRAGFPDEGTPELRLGGSMLPTDGRESRGPEAGRGLCWTSPVGPVIHSESGGGAGRARPRRTLWDKVRLGSLSQGQGRPLKVSGRGMTCSFLYSKKTTLPL

SEQ ID NO: 780754 - protein, 108 aa, Homo sapiens
LSQQRPTPYINITNLYIHKQSTVSAWFPLILVCPLIFSHQTWVGSQCPTGFLCLVPLGRNEYPLSPSISLGRILPLDPGMVMEASFKTSSTALAYFSQDGVIYSPLGP

SEQ ID NO: 780755 - protein, 96 aa, Homo sapiens
HFPAVTTYAHKNMPLAKDLLHPSPEEEKRKHKKKRLVQSPNSYFMDVKCPGCYKITTVFSHAQMVVLCVGCSTVLCQPTGGKARLTEGCSFRRKQH

SEQ ID NO: 780756 - protein, 72 aa, Homo sapiens
TLCGDELISWRCPPPTPHIPSSPGSDIRQGWNGTSDVSSQPETRAHCLPRGQVAGTAFTLAPRFSVFETVMI

SEQ ID NO: 780757 - protein, 83 aa, Homo sapiens
PGSAIPSMSLSPPSAGAEGKEEDFQFKFDHVVRRRNRQTDARDLVGGLNPERGLTCQKGKGAFVGPSSKGTNPIHGGSTLMTS

SEQ ID NO: 780758 - protein, 161 aa, Homo sapiens
GNATAICSDKTGTLTTNRMTVVQAYVGDVHYKEIPDPSSINTKTMELLINAIAINSAYTTKILPPEKEGALPRQVGNKTECGLLGFVLDLKQDYEPVRSQMPEEKLYKVYTFNSVRKSMSTVIKLPDESFRMYSKGASEIVLKKCCKILNGAGEPRVFRPR

SEQ ID NO: 780759 - protein, 74 aa, Homo sapiens
LSTGGIFLLVTLVTVCACWKPSKRKQKKLEKQNSLEYMDQNDDRLKPEADTLPRSGEQERKNPMALYILKDKVS

SEQ ID NO: 780760 - protein, 114 aa, Homo sapiens [sequence omitted]

SEQ ID NO: 780761 - protein, 106 aa, Homo sapiens
MAVTWGQFFSPQGSLPSLQTAWVVITGRGHHWHLVGGGQGRCSTTFESRMPHWPQVSPGPSLCMLFPQEIITISRDSRVNHPLPFLMVLLHVCVSRSRLALPVFEL

SEQ ID NO: 780762 - protein, 131 aa, Homo sapiens
PQQNGISPRMFKAFVSKSHPEFSSNRQQDAQEFFLHLVNLVERNRIGSENPSDVFRFLVEERIQCCQTRKVRYTERVDYLMQLPVAMEAATNKDELIAYELREGKQKQTEDPFLMWVRAKIPFSACLQAFS

SEQ ID NO: 780763 - protein, 117 aa, Homo sapiens
CYKQITPVFSASFFGIPTGPISGQFGALPGRNSTATTFGVIPAASPEGQNRCPEVPPMFYDSLGCNGRHNFKNHFRATSLQILMIPFHVCHVCHVAVPATAVILRVKFPQVLSRTFY

SEQ ID NO: 780764 - protein, 210 aa, Homo sapiens
RFLLPTCEERRVCFPFHHDCKINKEGDEHSSVKFLATIISTFVSMILNTLSTSYYSHPNGCHFHARPCEETTKQALCEQQGCLFHLAAEVGRPNRRIMSDRREEMTAVTFSDPVGKTSTYPVKVSTQTKRGLPRRLGKISLQPLSREDLGRSQRALGPQFQGSESGCSLLTVKTMRVKTFMMIHFHFMNRKYVFSLPYDFLKTFSFLLHA

SEQ ID NO: 780765 - protein, 318 aa, Homo sapiens
MPNIKIFSGSSHQDLSQKIADRLGLELGKVVTKKFSNQETCVEIGESVRGEDVYIVQSGCGEINDNLMELLIMINACKIASASRVTAVIPCFPYARQDKKDKSRAPISAKLVANMLSVAGADHIITMDLHASQIQGFFDIPVDNLYAEPAVLKWIRENISEWRNCTIVSPDAGGAKRVTSIADRLNVDFALIHKERKKANEVDRMVLVGDVKDRVAILVDDMADTCGTICHAADKLLSAGATRVYAILTHGIFSGPAISRINNACFEAVVVTNTIPQEDKMKHCSKIQVIDISMILAEAIRRTHNGESVSYLFSHVPL

SEQ ID NO: 780766 - protein, 318 aa, Homo sapiens; identical to SEQ ID NO: 780765

SEQ ID NO: 780767 - protein, 172 aa, Homo sapiens
MPNIKIFSGSSHQDLSQKIADRLGLELGKVVTKKFSNQETCVEIGESVRGEDVYIVQSGCGEINDNLMELLIMINACKIASASRVTAVIPCFPYARQDKKDKSRAPISAKLVANMLSVAGADHIITMDLHASQIQVSVEAKYWCLTRWEERTDDAEDCREAKNYAQVHLKIN

SEQ ID NO: 780768 - protein, 114 aa, Homo sapiens
MVLVGDVKDRVAILVDDMADTCGTICHAADKLLSAGATRVYAILTHGIFSGPAISRINNACFEAVVVTNTIPQEDKMKHCSKIQVIDISMILAEAIRRTHNGESVSYLFSHVPL

SEQ ID NO: 780769 - protein, 99 aa, Homo sapiens
ESKQCPESKQCPESKQCPESKQCPESKQCPESKTVPPFKRHRVASWIKKQDPVICCLQETHLICNDTHRLKINGWRNICQANGNQKNARVAILVSDKTF

SEQ ID NO: 780770 - protein, 119 aa, Homo sapiens
QRLCNSVDSTAHGASSPHITQPSHGEPLPQLSHHSGHQTSGLGQEGHCYLLQSGRHILFTSQKDWLISSLTSCVALAKFLNLSGPDLPHLQNGKNTSPTGLPPSANEITSMKELCKSSV

SEQ ID NO: 780771 - protein, 457 aa, Homo sapiens
EWDCLDPVQRDLYRDVMLENYGNLVSMGLYTPKPQVISLLEQGKEPWMVGRELTRGLCSDLESMCETKLLSLKKEVYEIELCQREIMGLTKHGLEYSSFGDVLEYRSHLAKQLGYPNGHFSQEIFTPEYMPTFIQQTFLTLHQIINNEDRPYECKKCGKAFSQNSQFIQHQRIHIGEKSYECKECGKFFSCGSHVTRHLKIHTGEKPFECKECGKAFSCSSYLSQHQRIHTGKKPYECKECGKAFSYCSNLIDHQRIHTGEKPYECKVCGKAFTKSSQLFQHARIHTGEKPYECKECGKAFTQSSKLVQHQRIHTGEKPYECKECGKAFSSGSALTNHQRIHTGEKPYDCKECGKAFTQSSQLRQHQRIHAGEKPFECLECGKAFTQNSQLFQHQRIHTDEKPYECNECGKAFNKCSNLTRHLRIHTGEKPYNCKECGKAFSSGSDLIRHQGIHTNK

SEQ ID NO: 780772 - protein, 132 aa, Homo sapiens
DEVEGLKRLMTEILGRQDGVCKTGSLTMHGNWWRPNFEPPAPRRSSHHLPCCYQVQPTVISCLDSCNYLLIDSPTPTPPPDLLSRQEPTLSSENVLQVIQSSAEHSQMAFCGPLSKSRSHPSQPTQLPSFPL

SEQ ID NO: 780773 - protein, 85 aa, Homo sapiens
VSGEAQGGGTGHQQTCAGAPVYSSGGDGSSSSRPPQDPLHLALAGGHASIRRTLGHAAKRQQDKSGDPGRCSLENRVVGQRLDPT

SEQ ID NO: 780774 - protein, 196 aa, Homo sapiens
QPSWAAQAQIPGPKRKASPQITRRVRGVRGEGLETQEGLPKMRRWPRREVQLQKQALTAGLSSLEPPQRCQAQASLRAGQRHTGPQQTIVMNGSLQGGDCQVPSGRGGSHGRGWSMMDGADLKQEAGQLARKGLGSECRGGEDNRAGEDRNSRWPERKSVGSPAGLACLRQAGGRPMAEHAAVEVGSEAWNGHQED

SEQ ID NO: 780775 - protein, 107 aa, Homo sapiens
GERIIGAWKSRLQWAMIASLHSSLGDRVRPCLKKKVTDNYEHVLAPCVNNQISKGRMRSKSTQIRNFYVILLSKTILSPTDHEEKRLSKPHQILGSTGLVNLVVQKY

SEQ ID NO: 780776 - protein, 173 aa, Homo sapiens
KDLKAEIAFDPDNPINCVYIQKDYKLFCYEDTCILMFIAAPFTIAKTWNQPKCPSMIDWIKKMSCIYTMEYYVAIKRNEFMSFAGHIDEAGNHLCGNHHSQQANTGTENQTPPVLITWELNNENIWAQGGKHNNRGILSNITNKGSLISVWEALLSRIWQGGEHHTPGLMCVF

SEQ ID NO: 780777 - protein, 290 aa, Homo sapiens
MAAVEKRRQAVPPPAGFTDSGRQSVSRAAGAAESEEDFLRQVGVTEMLRAALLKVLEARPEEPIAFLAHYFENMGLRSPVNGGAGEPPGQLLLQQQRLGRALWHLRLAHHSQRAAFNNNVSVAYECLSAGGRRKRPGLDGRTYSELLRRICRDGQAPEEVVAPLLRKVQCRDHEAVPLSVFRAGTLTCFVLLEFVARAGALFQLLEDSAAAVADRRVGQAVLDTLEGALQASDAAAPARFLEAGSRLGPDSLALALDRAVGGRRPSAPMTREEFLERAAALFIAKVKPVG

SEQ ID NO: 780778 - protein, 290 aa, Homo sapiens; identical to SEQ ID NO: 780777

SEQ ID NO: 780779 - protein, 173 aa, Homo sapiens
  misc_feature (155)..(155): Xaa can be any naturally occurring amino acid
  misc_feature (167)..(167): Xaa can be any naturally occurring amino acid
MAAVEKRRQAVPPPAGFTDSGRQSVSRAAGAAESEEDFLRQVGVTEMLRAALLKVLEARPEEPIAFLAHYFENMGLRSPVNGGAGEPPGQLLLQQQRLGRALWHLRLAHHSQRAAFNNNVSVAYECLSAGGRRKRPGLDGLFFFFFFFFFFFFFXFFFFFFFFFFFXFFFFFF

SEQ ID NO: 780780 - protein, 330 aa, Homo sapiens
MAAVEKRRQAVPPPAGFTDSGRQSVSRAAGAAESEEDFLRQVGVTEMLRAALLKVLEARPEEPIAFLAHYFENMGLRSPVNGGAGEPPGQLLLQQQRLGRALWHLRLAHHSQRCPRQMPAVDSRHLLSTYCGQGSVLGTRAITKTNFLALEGRAAFNNNVSVAYECLSAGGRRKRPGLDGRTYSELLRRICRDGQAPEEVVAPLLRKVQCRDHEAVPLSVFRAGTLTCFVLLEFVARAGALFQLLEDSAAAVADRRVGQAVLDTLEGALQASDAAAPARFLEAGSRLGPDSLALALDRAVGGRRPSAPMTREEFLERAAALFIAKVKPVG

SEQ ID NO: 780781 - protein, 277 aa, Homo sapiens
GLIGGEKPNQNVITLDGNFVQVKEDEEFSPSLKGQINERKTDDGTTRTERTRHGEPNRTDGRTTTGHDNRNPNGRHDTTQTKTKRTDDRDGKNDDNRTRQQRTTSDEDKNRKDRPRHGRTDDTEKDRRRDTEAHGQNEQLTKNARQDGDEGQDRHGTNGHDGRRTKKTAKGGEDERNEPNARRRKQRTDTTRQQRTRRKKKSQKEESNLRKKNGRTDRHETPHDNTDTDTEGARGNGAHDRRKNESAKATASGAPTYRTENKRARNDEKRKQDRKKN

SEQ ID NO: 780782 - protein, 136 aa, Homo sapiens
MRHEELNSLRTLLAAFLLSICPLPPSFLTSVNSIPGRPVPQPASGRGMSSTQAEPLGALCTPVTVTGSEFNTWLEPDRRRVNPRLAKTKMLSFLMGVNQPVYITLGAAGRACVSHEADSPQVGQRNKPQMTLWRSW

SEQ ID NO: 780783 - protein, 110 aa, Homo sapiens
ADAGRAGKEAGAGRAALPRGLVQSQQDLLLGAPGRGHGGQGATSLCPAWLCTTVWLPLCVFTWPSCPSPLQKQHGGKGAADSDLRSVGLLGAGSTARDSLRQHRHLLWFL

SEQ ID NO: 780784 - protein, 157 aa, Homo sapiens
QRLREAAEGLRVATNAAAQNAIKKKIVNRLEVAAKQAAAAATQTIAASQNAAVSNKNPAAQQQLVQSCKAVADHIPQLVQGVRGSQAQAEDLSAQLALIISSQNFLQPGSKMVSSAKAAVPTVSDQAAAMQLSQCAKNLATSLAELRTASQKASGAC

SEQ ID NO: 780785 - protein, 103 aa, Homo sapiens
GFPNAAPAPTDGSTQGSHWHLSSWADPDYSNGHVNPQYPHSVGLRKELLPKSEELVVWYILLPFSWPWRALGITSSHQHYPLFKFSSCLISAYPVLVQAKEMP

SEQ ID NO: 780786 - protein, 219 aa, Homo sapiens
EAKSPARHRRRVGQPAPVEGRAEGTGRREQAAQHQHVLVPGGHCVSKLRGKLKQDVGPEWEEENVQAVPFSWAGVIFPVGRLMRYLKKGTFKYRISVGAPVYMAAVIEYLAAGNSRIGGNAARDNKKARIAPRHILLAVANDEELNQLLKGVTIASGGVCPEFTPTAGKKRGTKGKSETILSPPPEKRGRKATSGKKGGKKSKAAKPRTSKKVQTKGQR

SEQ ID NO: 780787 - protein, 178 aa, Homo sapiens
MSSDISEVEDKNEFLTEQLSKTEIKFNTLNDKFRKKRDDSQKKVIGFRNSPSDLSQTQQQIKEMKEMYENAEAKVNNSTGKWSCVEERICQLQHENPCIEQQLDDVHQKEDHKEIVTNIQRGFIESEKKDLMLEEKNKKLMNECDHLKESLFQYEREKAEKVVSIKEDKYFQTFRKKI

SEQ ID NO: 780788 - protein, 122 aa, Homo sapiens
NIERSFVYFAQFPPMVTFYKLTRYHNHDVCSLVWVCVLSSGQFNHLGGFSHHQSIHYTVPTPQGSLVLPPLSATLTRKLWQPLQHPPFLKFCHFKIIHNISKMEPYSMNLFGIGFLHSAYRL

SEQ ID NO: 780789 - protein, 62 aa, Homo sapiens
PHIEGRAANKMVGPCLLELTFWGGETGSKSIYTRQKVRWRYQGEAVVHDGGVLLDQVVEQRP

SEQ ID NO: 780790 - protein, 144 aa, Homo sapiens
GTWRLDSTVLFQVPATLHAQGSRSRRLCSLPLQLHSWASGTECEPPLPSFPFFPSPQHAGITACCALGLQYPLLSLSHPTSTLTEMAKSSSAATLFMKLLSFTALKKIASFLWILKDFTSFSCKVLTFYCGLLLDVSTVSFSPA

SEQ ID NO: 780791 - protein, 230 aa, Homo sapiens
RFWITPDPYHKDDNIQIGREVKISCQVEAVPSEELTFSWFKNGRPLRSSERMVITQTDPDVSPGTTNLDIIDLKFTDFGTYTCVASLKGGGISDISIDVNISSSTVPPNLTVPQEKSPLVTREGDTIELQCQVTGKPKPIILWSRADKEVAMPDGSMQMESYDGTLRIVNVSREMSGMYRCQTSQYNGFNVKPREALVQLIVQYPPAVEPAFLEIRQGQDRSVTMSCRVL

SEQ ID NO: 780792 - protein, 117 aa, Homo sapiens
ASKEADVWSVCHLPLQEWGLAVIQRLTVMTCSQGSRSYVPRVFREACECEMFGLSRAFFLSRLQRAGQQVIWFFSVICFPPQDSSPLSPPLLVLRQMDTEIHSLFYPSSLLTPVGSL

SEQ ID NO: 780793 - protein, 71 aa, Homo sapiens
MVRYRVYGCFPHFEPKTLEILGSRLEGWSRTANTHVGTRLTGIETDGGHEIRKGRSGKWHGDTGSPSGVSL

SEQ ID NO: 780794 - protein, 36 aa, Homo sapiens
NQATEGLLSSSKSETDSGRDGMRSQAFWLRALVFVA

SEQ ID NO: 780795 - protein, 405 aa, Homo sapiens
MDSLVTANTKFCFDLFQEIGKDDRHKNIFFSPLSLSAALGMVRLGARSDSAHQIDEVLHFNEFSQNESKEPDPCLKSNKQKAGSLNNESGLVSCYFGQLLSKLDRIKTDYTLSIANRLYGEQEFPICQEYLDGVIQFYHTTIESVDFQKNPEKSRQEINFWVECQSQGKIKELFSKDAINAETVLVLVNAVYFKAKWETYFDHENTVDAPFCLNANENKSVKMMTQKGLYRIGFIEEVKAQILEMRYTKGKLSMFVLLPSHSKDNLKGLEELERKITYEKMVAWSSSENMSEESVVLSFPRFTLEDSYDLNSILQDMGITDIFDETRADLTGISPSPNLYLSKIIHKTFVEVDENGTQAAAATGAVVSERSLRSWVEFNANHPFLFFIRHNKTQTILFYGRVCSP

SEQ ID NO: 780796 - protein, 425 aa, Homo sapiens
MDSLVTANTKFCFDLFQEIGKDDRHKNIFFSPLSLSAALGMVRLGARSDSAHQIDEVLHFNEFSQNESKEPDPCLKSNKQKVLADSSLEGQKKTTEPLDQQAGSLNNESGLVSCYFGQLLSKLDRIKTDYTLSIANRLYGEQEFPICQEYLDGVIQFYHTTIESVDFQKNPEKSRQEINFWVECQSQGKIKELFSKDAINAETVLVLVNAVYFKAKWETYFDHENTVDAPFCLNANENKSVKMMTQKGLYRIGFIEEVKAQILEMRYTKGKLSMFVLLPSHSKDNLKGLEELERKITYEKMVAWSSSENMSEESVVLSFPRFTLEDSYDLNSILQDMGITDIFDETRADLTGISPSPNLYLSKIIHKTFVEVDENGTQAAAATGAVVSERSLRSWVEFNANHPFLFFIRHNKTQTILFYGRVCSP

SEQ ID NO: 780797 - protein, 81 aa, Homo sapiens
KGQKPHDYLHTIKKKVFDKSPHPHTFMVKTFNKLGKESFPNAIKDICEKLLVTIVLNGKRLNVFPPMIRNKTKKSTISTFI

SEQ ID NO: 780798 - protein, 39 aa, Homo sapiens
VPTPSIISITKELVRNAKLAWTSDLWNQNSGGGAHQSVF

SEQ ID NO: 780799 - protein, 562 aa, Homo sapiens
MSYIKSNLELYQQYTAMAPKLLARISKLLMICQNAGISVPKGIRNIFEFTWEELISDPSVPTPSDILGLEVSFGAPLVVLMEPTFVQVPTLKKPLPPPPPAPPRPVLLATTGAAKRSTLSPTMARQVRTHQETLNRFQQQSIHLLTELLRLKMKAMVESMSVGANPLDITRRFVEASQLLHLNAKEMAFNCLISTAGRSGYSSGQLWKESLANMSAIGVNSPYQLIYHSSTACLSFSLSAGKEAKKKIGKSRTTEDVSMPPLHRGVGTPANSLEFSDPCPEAREKLQELCRHIEAERATWKGRNISYPMILRNYKAKMPSHLMLARKGDSQTPGLHYPPTAGAQTLSPTSHPSSANHHFSQHCQEGKAPKKAFKFHYTFYDGSSFVYYPSGNVAVCQIPTCCRGRTITCLFNDIPGFSLLALFNTEGQGCVHYNLKTSCPYVLILDEEGGTTNDQQGYVVHKWSWTSRTETLLSLEYKVNEEMKLKVLGQDSITVTFTSLNETVTLTVSANNCPHGMAYDKRFQAWLDPGPEMIPPDLRISWLCFPLCWLHSQGVSLLLMTR

SEQ ID NO: 780800 - protein, 562 aa, Homo sapiens; identical to SEQ ID NO: 780799

SEQ ID NO: 780801 - protein, 782 aa, Homo sapiens
MARQVRTHQETLNRFQQQSIHLLTELLRLKMKAMVESMSVGANPLDITRRFVEASQLLHLNAKEMAFNCLISTAGRSGYSSGQLWKESLANMSAIGVNSPYQLIYHSSTACLSFSLSAGKEAKKKIGKSRTTEDVSMPPLHRGVGTPANSLEFSDPCPEAREKLQELCRHIEAERATWKGRNISYPMILRNYKAKMPSHLMLARKGDSQTPGLHYPPTAGAQTLSPTSHPSSANHHFSQHCQEGKAPKKAFKFHYTFYDGSSFVYYPSGNVAVCQIPTCCRGRTITCLFNDIPGFSLLALFNTEGQGCVHYNLKTSCPYVLILDEEGGTTNDQQGYVVHKWSWTSRTETLLSLEYKVNEEMKLKVLGQDSITVTFTSLNETVTLTVSANNCPHGMAYDKRLNRRISNMDDKVYKMSRALAEIKKRFQKTVTQFINSILLAAGLFTIEYPTKKEEEEFVRFKMRSRTHPERLPKLSLYSGESLLRSQSGHLESSIAETLKDEPESAPVSPVRKTTKIHTKAKVTSRGKAREGRSPTRWAALPSDCPLVLRKLMLKEDTRAGCKCLVKAPLVSDVELERFLLAPRDPSQVLVFGIISSQNYTSTGQLQWLLNTLYNHQQRGRGSPCIQCRYDSYRLLQYDLDSPLQEDPPLMVKKNSVVQGMILMFAGGKLIFGGRVLNGYGLSKQNLLKQIFRSQQDYKMGYFLPDDYKFSVPNSVLSLEDSESVKKAESEDIQGSSSSLALEDYVEKELSLEAEKTREPEVELHPLSRDSKITSWKKQASKK

SEQ ID NO: 780802 - protein, 440 aa, Homo sapiens
MARQVRTHQETLNRFQQQSIHLLTELLRLKMKAMVESMSVGANPLDITRRFVEASQLLHLNAKEMAFNCLISTAGRSGYSSGQLWKESLANMSAIGVNSPYQLIYHSSTACLSFSLSAGKEAKKKIGKSRTTEDVSMPPLHRGVGTPANSLEFSDPCPEAREKLQELCRHIEAERATWKGRNISYPMILRNYKAKMPSHLMLARKGDSQTPGLHYPPTAGAQTLSPTSHPSSANHHFSQHCQEGKAPKKAFKFHYTFYDGSSFVYYPSGNVAVCQIPTCCRGRTITCLFNDIPGFSLLALFNTEGQGCVHYNLKTSCPYVLILDEEGGTTNDQQGYVVHKWSWTSRTETLLSLEYKVNEEMKLKVLGQDSITVTFTSLNETVTLTVSANNCPHGMAYDKRFQAWLDPGPEMIPPDLRISWLCFPLCWLHSQGVSLLLMTR

SEQ ID NO: 780803 - protein, 156 aa, Homo sapiens
MKYGNEIMNKDPVFRISPRSRGTHTNPEEPEEDVQAERVQAANALTTPNLEEEPVITASCLHKEYYETKKVAFQQQRRKQPSEMFRFVLKSEVLGLLGHNGAGKSTSIKMITGCTVPTAGVVVLQGNRASVRQQRDNSLKFLGTALRRTHCVPNLQ

SEQ ID NO: 780804 - protein, 207 aa, Homo sapiens [sequence omitted]

SEQ ID NO: 780805 - protein, 156 aa, Homo sapiens; identical to SEQ ID NO: 780803

SEQ ID NO: 780806 - protein, 156 aa, Homo sapiens; identical to SEQ ID NO: 780803

SEQ ID NO: 780807 - protein, 125 aa, Homo sapiens
LTSDLPTLWEAEAGGSFETSLDNIVRPCSLNCPGRFPQLVLEVCGPMKPIVTVHPERRWLWGSHACCGAAPGDGHPVSPGAGAARVLSNCGGCPVLFASYKPLPDYIFLFNLAARKLKVRLVAHQ

SEQ ID NO: 780808 - protein, 101 aa, Homo sapiens
HQHEVHSSLPSQGCQGKEYGGGSRKGVPTSWPPRRSPWRSFQSTDLTMASLLQHPSLVHRWLQNKVRIPCLAFKVCFPSKTSSPFRTGPVFSPVPGTSMLD

SEQ ID NO: 780809 - protein, 271 aa, Homo sapiens
MVPLQSSLGHRARPCIKRKGLLWKGLQSPGLGCRGRCSSPAFYMCRDVSSHPWRSSPLLCRTRSWAARDWGLGALLVCVCVCVCVCVCVFPGRRPPQSSSCSPGPSGKELEVGWREMWSRAGTSFLGRSLRGTLQGVPRFPRRPRVCCQRGRWGWESVHVFSLGLVSSGSLNLVENEPLCVFPNLQLTRASADPAVAGVGAPRAICWGHLTHHLRSARVAAAGATRPCKYSDAHICSSVSPCGCASDLTRLKRPSEKGPQAGATHCHGTMA

SEQ ID NO: 780810 - protein, 504 aa, Homo sapiens
ASRSPLARCRVAVTTVRSPARWPRARRGGAGRTLLHARGSAGEVGRAGRERERGWRRARRRLGEDGSPQDPELSSLARGGQGAQDRSLAVPPGAQHRSRAATMIPPSSPREDGVDGLPKEAVGAEQPPSPASTSSQESKLQKLKRSLSFKTKSLRSKSADNFFQRTNSEDMKLQAHMVAEISPSSSPLPAPGSLTSTPARAGLHPGGKAHAFQEYIFKKPTFCDVCNHMIVGTNAKHGLRCKACKMSIHHKCTDGLAPQRCMGKLPKGFRRYYSSPLLIHEQFGCIKEVMPIACGNKVDPVYETLRFGTSLAQRTKKGSSGSGSDSPHRTSTSDLVEVPEEANGPGGGYDLRKRSNSVFTYPENGTDDFRDPAKNINHQGSLSKDPLQMNTYVALYKFVPQENEDLEMRPGDIITLLEDSNEDWWKGKIQDRIGFFPANFVQRLQQNEKIFRCVRTFIGCKEQGQITLKENQICVSSEEEQDGFIRVLSGKKKGLIPLDVLENI

SEQ ID NO: 780811 - protein, 493 aa, Homo sapiens
ASRSPLARCRVAVTTVRSPARWPRARRGGAGRTLLHARGSAGEVGRAGRERERGWRRARRRLGEDGSPQDPELSSLARGGQGAQDRSLAVPPGAQHRSRAATMIPPSSPREDGVDGLPKEAVGAEQPPSPASTSSQESKTKSLRSKSADNFFQRTNSEDMKLQAHMVAEISPSSSPLPAPGSLTSTPARAGLHPGGKAHAFQEYIFKKPTFCDVCNHMIVGTNAKHGLRCKACKMSIHHKCTDGLAPQRCMGKLPKGFRRYYSSPLLIHEQFGCIKEVMPIACGNKVDPVYETLRFGTSLAQRTKKGSSGSGSDSPHRTSTSDLVEVPEEANGPGGGYDLRKRSNSVFTYPENGTDDFRDPAKNINHQGSLSKDPLQMNTYVALYKFVPQENEDLEMRPGDIITLLEDSNEDWWKGKIQDRIGFFPANFVQRLQQNEKIFRCVRTFIGCKEQGQITLKENQICVSSEEEQDGFIRVLSGKKKGLIPLDVLENI

SEQ ID NO: 780812 - protein, 432 aa, Homo sapiens
ASRSPLARCRVAVTTVRSPARWPRARRGGAGRTLLHARGSAGEVGRAGRERERGWRRARRRLGEDGSPQDPELSSLARGGQGAQDRSLAVPPGAQHRSRAATMIPPSSPREDGVDGLPKEAVGAEQPPSPASTSSQESKTKSLRSKSADNFFQRTNSEDMKLQAHMVAEISPSSSPLPAPGSLTSTPARAGLHPGGKAHAFQEYIFKKPTFCDVCNHMIVACGNKVDPVYETLRFGTSLAQRTKKGSSGSGSDSPHRTSTSDLVEVPEEANGPGGGYDLRKRSNSVFTYPENGTDDFRDPAKNINHQGSLSKDPLQMNTYVALYKFVPQENEDLEMRPGDIITLLEDSNEDWWKGKIQDRIGFFPANFVQRLQQNEKIFRCVRTFIGCKEQGQITLKENQICVSSEEEQDGFIRVLSGKKKGLIPLDVLENI

SEQ ID NO: 780813 - protein, 254 aa, Homo sapiens
ASRSPLARCRVAVTTVRSPARWPRARRGGAGRTLLHARGSAGEVGRAGRERERGWRRARRRLGEDGSPQDPELSSLARGGQGAQDRSLAVPPGAQHRSRAATMIPPSSPREDGVDGLPKEAVGAEQPPSPASTSSQESKLQKLKRSLSFKTKSLRSKSADNFFQRTNSEDMKLQAHMVAEISPSSSPLPAPGSLTSTPARAGLHPGGKAHAFQEYIFKKPTFCDVCNHMIVASLLKPARPRAHREEGTTPDASP

SEQ ID NO: 780814 - protein, 348 aa, Homo sapiens
ASRSPLARCRVAVTTVRSPARWPRARRGGAGRTLLHARGSAGEVGRAGRERERGWRRARRRLGEDGSPQDPELSSLARGGQGAQDRSLAVPPGAQHRSRAATMIPPSSPREDGVDGLPKEAVGAEQPPSPASTSSQESKLQKLKRSLSFKTKSLRSKSADNFFQRTNSEDMKLQAHMVAEISPSSSPLPAPGSLTSTPARAGLHPGGKAHAFQEYIFKKPTFCDVCNHMIVACGNKVDPVYETLRFGTSLAQRTKKGSSGSGSDSPHRTSTSDLVEVPEEANGPGGGYDLRKRSNSVFTYPENGTDDFRDPAKNINHQGSLSKDPLQMNTYVALYKFVPQENEDLEMR

SEQ ID NO: 780815 - protein, 409 aa, Homo sapiens
ASRSPLARCRVAVTTVRSPARWPRARRGGAGRTLLHARGSAGEVGRAGRERERGWRRARRRLGEDGSPQDPELSSLARGGQGAQDRSLAVPPGAQHRSRAATMIPPSSPREDGVDGLPKEAVGAEQPPSPASTSSQESKLQKLKRSLSFKTKSLRSKSADNFFQRTNSEDMKLQAHMVAEISPSSSPLPAPGSLTSTPARAGLHPGGKAHAFQEYIFKKPTFCDVCNHMIVGTNAKHGLRCKACKMSIHHKCTDGLAPQRCMGKLPKGFRRYYSSPLLIHEQFGCIKEVMPIACGNKVDPVYETLRFGTSLAQRTKKGSSGSGSDSPHRTSTSDLVEVPEEANGPGGGYDLRKRSNSVFTYPENGTDDFRDPAKNINHQGSLSKDPLQMNTYVALYKFVPQENEDLEMR

SEQ ID NO: 780816 - protein, 89 aa, Homo sapiens
PLPPPCGAPHNDHCCDASTGAWGSGSCPHSALRCRSRPLRPCWAVHLVPGRCDGWLWPRGPMVQDPVAHEPSATLLRSPRSHVEILSLG

SEQ ID NO: 780817 - protein, 108 aa, Homo sapiens
VLSQEELECVFLGKVIASGTSGMMLITNCGRVPRAWKQSSTWHSSFPSSQVVAQNRPAETLSQLLLLVTGRGEPPGNGGWSFSNFQVPKNDLEHLNKNFHIRGPAPDA

SEQ ID NO: 780818 - protein, 123 aa, Homo sapiens
GSLEPLTPWFKQFSCLSLPSSWDYRHAPPCPDIPFFFFFWIFSRDWISPYQPGWLPGWSQSPDLVICLPWLPKVQLQDLGFLQPPPPGSCTLCLRWAELRWDRLTRRGREATWPEDPVSKIRF

SEQ ID NO: 780819 - protein, 134 aa, Homo sapiens
SPPIAGQKQKGISGIILLLSAKKDRLPRNIHVPELSLKSLFEKYVFIGLYEKMEQVPKLVQWLISIGASVETIGPYPLHALMRLCIQARENHLFRWLMDHKPEWKGRINQKDGDGCTVLHVVAAHSPGYLVKRE

SEQ ID NO: 780820 - protein, 100 aa, Homo sapiens
ARLTPPFPQSCCGSKNEHQCSVVPGRFPAFSPSAQLLCAPSICPQHLPSEDVLEAHQSSQALRGSCIIWLHLAGHPALPIHMNFLFLSLSLLLRTRALAL

SEQ ID NO: 780821 - protein, 141 aa, Homo sapiens
VRTEGKAAGVCFASSVVDYRSSSLHSGSLIISLRPFFKSVPTLPTPVIFLPSGLPPPRIPRIRIFLWNLLQEIWLDSQIKDFQNPILPRIPLLGDPLPESFSPQSPFPSESPFHQNVLPFSFLFPECFPSFSQMANPKCPS

SEQ ID NO: 780822 - protein, 48 aa, Homo sapiens
MITAGLPPAISPPLTDTPESVSTPGLFLSLFAMALGHFRGLGKAGGVE

SEQ ID NO: 780823 - protein, 70 aa, Homo sapiens
VTNTQLKIQDVPISTEGSLLPLLSCCPLTVNQDPDLCHHGLVLPVLELHINGIIQYVRVCGWLLSFNRIL

SEQ ID NO: 780824 - protein, 122 aa, Homo sapiens
HVEVIYVDYFCAVWNLEAEAQKAKIIYSGPQCCLTAEARCLSIIPKCFEHKCCQNPSLPMDPKRYVFICLDDEEEIHSFKNSLSFLFPPFILRCSSCFPYYVPPLCFPFILTCTTSISENTV

SEQ ID NO: 780825 - protein, 67 aa, Homo sapiens
LQHSDGEITLQENSPEAEQCLRQSTRFSLKFPNLISEGISEKQRGFIAGPAMETTMPRLKAQKCGLS

SEQ ID NO: 780826 - protein, 34 aa, Homo sapiens
GSTGKGLGEEPTPAYVTQEGSQWPPQTHLSSSHL

SEQ ID NO: 780827 - protein, 53 aa, Homo sapiens
MAEQGPRFLHGGGAAGTQADETATLARGKLPVRRPGKPGTAAAAIWASHTTLG

SEQ ID NO: 780828 - protein, 384 aa, Homo sapiens
RFQRRCGLFPAPDEGPRENGADPTERAARVPGVEHLPAANGKGGEAPANGLRRAAAPEAYVQKYVVKNYFYYYLFQFSAALGQEVFYITFLPFTHWNIDPYLSRRLIIIWVLVMYIGQVAKDVLKWPRPSSPPVVKLEKRLIAEYGMPSTHAMAATAIAFTLLISTMDRYQYPFVLGLVMAVVFSTLVCLSRLYTGMHTVLDVLGGVLITALLIVLTYPAWTFIDCLDSASPLFPVCVIVVPFFLCYNYPVSDYYSPTRADTTTILAAGAGVTIGFWINHFFQLVSKPAESLPVIQNIPPLTTYMLVLGLTKFAVGIVLILLVRQLVQNLSLQVLYSWFKVVTRNKEARRRLEIEVPYKFVTYTSVGICATTFVPMLHRFLGLP

SEQ ID NO: 780829 - protein, 384 aa, Homo sapiens; identical to SEQ ID NO: 780828

SEQ ID NO: 780830 - protein, 384 aa, Homo sapiens; identical to SEQ ID NO: 780828

SEQ ID NO: 780831 - protein, 293 aa, Homo sapiens
RFQRRCGLFPAPDEGPRENGADPTERAARVPGVEHLPAANGKGGEAPANGLRRAAAPEAYVQKYVVKNYFYYYLFQFSAALGQEVFYITFLPFTHWNIDPYLSRRLIIIWVLVMYIGQVAKDVLKWPRPSSPPVVKLEKRLIAEYGMPSTHAMAATAIAFTLLISTMDRYQYPFVLGLVMAVVFSTLVCLSRLYTGMHTVLDVLGGVLITALLIVLTYPAWTFIDCLDSASPLFPVCVIVVPFFLCYNYPVSDYYSPTRADTTTILAAGAGVTIGFWINHFFQLSYGCLATTR

SEQ ID NO: 780832 - protein, 102 aa, Homo sapiens
ASAAGTAVGCQSSAISSFRYDPSCGSCLAQGHALAETDHIQGLIQEEAQTSGLLCPRWNDSDGPFLPSELPLGSEEALVGPAVWMHFSLCPLLLPSLPFLRG

SEQ ID NO: 780833 - protein, 331 aa, Homo sapiens
SLRNVNWLHALPVMGPELGWGHPRGGDVCSSDSFNEDNTAFAKQVRSERPFFSSNPELDNLMIQAIQVLRFHLLELEKGKMPIDLVIEDRDGGCREDFEDYPASCPSLPDQNNIWIRDHEDSGSVHLGTPGPSSGGLASQSGDNSSDQGVGLDTSVASPSSGGEDEDLDQEPRRNKKRGIFPKVATNIMRAWLFQHLSHPYPSEEQKKQLAQDTGLTILQVNNWFINARRRIVQPMIDQSNRTGQGAAFSPEGQPIGGYTETEPHVAFRAPASVGMSLKLGRRMALSIEADAGETQPPAVTPSLTPGSGSRLVLWLQDPTSKGLSAQRLPP

SEQ ID NO: 780834 - protein, 331 aa, Homo sapiens; identical to SEQ ID NO: 780833

SEQ ID NO: 780835 - protein, 262 aa, Homo sapiens
SLRNVNWLHALPVMGPELGWGHPRGGDVCSSDSFNEDNTAFAKQVWIRDHEDSGSVHLGTPGPSSGGLASQSGDNSSDQGVGLDTSVASPSSGGEDEDLDQEPRRNKKRGIFPKVATNIMRAWLFQHLSHPYPSEEQKKQLAQDTGLTILQVNNWFINARRRIVQPMIDQSNRTGQGAAFSPEGQPIGGYTETEPHVAFRAPASVGMSLKLGRRMALSIEADAGETQPPAVTPSLTPGSGSRLVLWLQDPTSKGLSAQRLPP

SEQ ID NO: 780836 - protein, 262 aa, Homo sapiens; identical to SEQ ID NO: 780835

SEQ ID NO: 780837 - protein, 336 aa, Homo sapiens
TGRQIEDRVALLLSEEVELSSTPPLPASRILKEGWERAGQCPPPPERKQSFLWEGSALTGAWAMEDFYTARLVPPLVPQRPAQGLMQEPVPPLVPPEHSELSERRSPALHGTPTAGCGSRGPSPSASQREHQALQDLVDLAREGLSASPWPGSGGLAGSEGTAGLDVVPGGLPLTGFVVPSQDKHPDRGGRTLVRTGSGPRSLVPAIPLAMCVVGLAHRWPLAPNASAVASQGLCFPEGCHILTSVSRATDPQPPQRPSGGSATRLLPFLSVTPWGTLGLRPQSLPCPGSQECRGTTVSQRGCPIQARSARSSVVGSSPRACSPSPLCGSWAPEHS

SEQ ID NO: 780838 - protein, 124 aa, Homo sapiens
LFLVFFQEVTLPVSSQNLRDKSWLASGASSQALLWLWDPQALEQACSEFFPARVRDPHLTLHCQGPNPRSLSSSPSGPCFSTVGFASAVPSPCSQPSPPVSDFGTPPHLGFQLCDCPHPNSLLS

SEQ ID NO: 780839 - protein, 113 aa, Homo sapiens
GAVPPRPPEFRMAWPVCQGSLSQATETLSACPQNSYRAWASPEADAGQETGQTSMSMGRSGLPARIQEKRCWDNRQPAPESEVKVASSSSCHHPARACPTLQFVPANFHLCVP

SEQ ID NO: 780840 - protein, 145 aa, Homo sapiens
KEPDIGLCRGYAGEPSRHANRAAPVKGLDNWQPLIDTRHAHPRKHPISTYPTPISTLSTQTQHTHQASNLNSSYNTKTHSSTRHPISTSSNTRHTHPPGIQSQLIQHQARSSNLNSSNTRHTHPTSTHPTPGTLIQSQLIQHQAR

SEQ ID NO: 780841 - protein, 105 aa, Homo sapiens
CFSFPLCLGPWADLSQQERLQGFSAGEDASRAPWCAAPLAVLLSPASQKVCGGRQRGHSARGALPFASHPILLFHAGLELWGHIVSLGFFPFQPGVFVRPGKVGP

SEQ ID NO: 780842 - protein, 74 aa, Homo sapiens
RIPSLSLWIGLSWTFHRNGISRCAAFCVWRLSLSVTSSGASSGASALWPAPASLLFLAGGPTAYTCRRLFCCCF

SEQ ID NO: 780843 - protein, 121 aa, Homo sapiens
GRSKGAGRCLRRATRRDKMADKEKKKKESILDLSKYIDKTIRVKFQGGREASGILKGFDPLLNLVLDGTIEYMRDPDDQYKLTEDTRQLGLVVCRGTSVVLICPQDGMEAIPNPFIQQQDA

SEQ ID NO: 780844 - protein, 114 aa, Homo sapiens
CHWSLGAMGLSRGSRGPAPQSASRLRSLRARGACRVQVGRSERGSWVGGGSRRLPGGPSVLSICSSPDPDDQYKLTEDTRQLGLVVCRGTSVVLICPQDGMEAIPNPFIQQQDA

SEQ ID NO: 780845 - protein, 149 aa, Homo sapiens
GEVKGRGAVPAKSHTARQDGGERAAESGAGGRGARAALQVSCALLSPQDKEKKKKESILDLSKYIDKTIRVKFQGGREASGILKGFDPLLNLVLDGTIEYMRDPDDQYKLTEDTRQLGLVVCRGTSVVLICPQDGMEAIPNPFIQQQDA

SEQ ID NO: 780846 - protein, 121 aa, Homo sapiens; identical to SEQ ID NO: 780843

SEQ ID NO: 780847 - protein, 199 aa, Homo sapiens
IVNIKWFPSAIPAQVSRDGRQNQATQGSHDEVWGSLRKPPKSLTPPRNLHTPGGPCKMRVGLIKWSIRGDRIQGEGTGSTLVYWPAGTEEEAQDAKMADKEKKKKESILDLSKYIDKTIRVKFQGGREASGILKGFDPLLNLVLDGTIEYMRDPDDQYKLTEDTRQLGLVVCRGTSVVLICPQDGMEAIPNPFIQQQDA

SEQ ID NO: 780848 - protein, 121 aa, Homo sapiens; identical to SEQ ID NO: 780843

SEQ ID NO: 780849 - protein, 141 aa, Homo sapiens
AAVPRTPPPRSPNPSPERPRSALAAAILATTLTGRTVAIPQPRQRSRSESDVSSVEQDSFIEPYATTSQLRPRPNGRVRWEEDLLLPSFETLDYGDEEDIETQLSSSGKEWGMSVPGRTEEATVMTCTLCHTEIRCHCYMR

SEQ ID NO: 780850 - protein, 207 aa, Homo sapiens
LTQIETGENVTGMELEFKRLASSKAHTSRFISANLPCNKFKNRLVNIMPYESTRVCLQPIRGVEGSDYINASFIDGYRQQKAYIATQGPLAETTEDFWRMLWEHNSTIVVMLTKLREMGREKCHQYWPAERSARYQYFVVDPMAEYNMPQYILREFKVTDARDGQSRTVRQFQFTDWPEQGVPESGEGLLTSSASHKTKNSWQDGPF

SEQ ID NO: 780851 - protein, 117 aa, Homo sapiens
CTFWLPELHTCRTPGFPVPGATWEPFKNSALKLAISSLKKSVRNDRPGVMALGNRRRPLETKGEALPNLWFPWFLSPLQLQRGRSSNARVAAHLCWRPPGRDAMPALAGAESHCICS

SEQ ID NO: 780852 - protein, 84 aa, Homo sapiens
SPRGIPVNAFIFGCGYLRTQLGEAQDEKCPHCSLDGKILPSLPQEAGSSRRLLSPEASWLEQSHSTDTLPEYPHPAHYNSSGKR

SEQ ID NO: 780853 - protein, 70 aa, Homo sapiens
PFDPKFITYPFDQNRFVQYKATSLEKQHKHDLLTEPDLGVTIDLINPDTYRIDPNVLLDPADEKLLEEEL

SEQ ID NO: 780854 - protein, 76 aa, Homo sapiens
GGRGSHQALTESQGVKMAASRRPHRTLRKQRRETAQKVHWAGEGRGTAAEVCWPRHPVKSARNGFPEVDKDRSLWI

SEQ ID NO: 780855 - protein, 38 aa, Homo sapiens
MLRITYPFASCCSPSNVHFGLCFHTLFKHGLADESARR

SEQ ID NO: 780856 - protein, 91 aa, Homo sapiens
VKMPWAAELRGFWAVGRARPFRRRRSWASFQAGVEAPPRARLASGAFSLDLGPARLPRRGPKERLPCWTASTSSLALPLSKEAFKALGLQV

SEQ ID NO: 780857 - protein, 117 aa, Homo sapiens
QSVRLSSLLCLPGLLVVFAPVVLGLKAITLAALLLALATYSEEPWARRCQDHRPSRSHEHLSMEQGSRVRGQPQSEDPLSWRGARAPQPFPYLQSQPLGAPRPHDKLLDPYIWFWST

SEQ ID NO: 780858 - protein, 58 aa, Homo sapiens
MAEGEFGEIQRVREPEGDHMESMKRTVGLKAGPWQITSRETGALSLQLHELNSANGLS

SEQ ID NO: 780859 - protein, 395 aa, Homo sapiens
VKIIDKISTFSSSLQKLFREVRIMKVLNHPNIVKLFEVIETEKTLYLVMEYASGGEVFDYLVAHGRMKEKEARAKFRQIVSAVQYCHQKFIVHRDLKAENLLLDADMNIKIADFGFSNEFTFGNKLDTFCGSPPYAAPELFQGKKYDGPEVDVWSLGVILYTLVSGSLPFDGQNLKELRRTGTEEGKYRNTINMSTDCENLAKEIPHTKTQQERHNRATHATIEDDCGTEKMDELKPNVRHIQTTRTRRTELMKAKTKHGKNTEIQKSQNTPRERHQHRQGKQRPDNDSRDNRKQIEPPGTLEYRETHRREPQHKHTRANEQEQLHNQIEERHYHTSSDKYPHRDLKREEKPERCDCKCKPQHNKADTDERRTHASCKLSCVRASRRTYNRKTHA

SEQ ID NO: 780860 - protein, 79 aa, Homo sapiens
MAGDPCLSAHIEEGDNKLTGSNRLIGVGFVDSGIPETAASLETPNISCQILHRIFSSPGWKHKPGYQHSDSQVGESAKH

SEQ ID NO: 780861 - protein, 112 aa, Homo sapiens
MLAIRLIKRFCVVSEWGSQASGGSPGHSSSRAGPSELPGCSRQGLEEVRRSRAVSVPGSPFPEQRPWVGSGNWGHQEGPGEWGCWEWPGGGHEVGQGWSWVFWAGLCSPLAF

SEQ ID NO: 780862 - protein, 45 aa, Homo sapiens
MVGRKVCRNSNSTGIHNFPLVRAGLNAPSIGTSPTGPVGFSPRVW

SEQ ID NO: 780863 - protein, 153 aa, Homo sapiens
EICCACPRKHPMCSEWPRRDLSHSLAPGPGRKQPSLKNSDKERLIKTRQEKQQWVSEQPDWQELPPTPEAEGQGWAMVAPEPIRTWTLEGAGRPWARQALRSAARKSLCGVAWVVGTEPGGCLSHRQPWPSAMGGAGTSVIGWRKCYQLLRSI

SEQ ID NO: 780864 - protein, 70 aa, Homo sapiens
GTSAPSPVCSEPPKASSPAPSPTSATAVTCAHGALGPALCLLITGLRVFCCGKKGKEGEEGRETGNHHKV

SEQ ID NO: 780865 - protein, 105 aa, Homo sapiens
MRQKEKRVKREDSGWEERGGGRSTEGEERKQPENLLEGREEREEPDRESRSEKKEGGHREDSEKKRTGIVCSPCRNSLSLSLRQLMLLQMLTDARTAMSQTSPTA

SEQ ID NO: 780866 - protein, 115 aa, Homo sapiens [sequence omitted]

SEQ ID NO: 780867 - protein, 1085 aa, Homo sapiens
LFFIVVMDDDDDSCLLDLIGDPQALNYFLHGPSNKSSNDDLTNAGYSAANSNSIFANSSNADPKSSLKGVSNQLGEGPSDGLPLSSSLQFLEDELESSPLPDLTEDQPFDILQKSLQEANITEQTLAEEAYLDASIGSSQQFAQAQLHPSSSASFTQASNVSNYSGQTLQPIGVTHVPVGASFASNTVGVQHGFMQHVGISVPSQHLSNSSQISGSGQIQLIGSFGNHPSMMTINNLDGSQIILKGSGQQAPSNVSGGLLVHRQTPNGNSLFGNSSSSPVAQPVTVPFNSTNFQTSLPVHNIIIQRGLAPNSNKVPINIQPKPIQMGQQNTYNVNNLGIQQHHVQQGISFASASSPQGSVVGPHMSVNIVNQQNTRKPVTSQAVSSTGGSIVIHSPMGQPHAPQSQFLIPTSLSVSSNSVHHVQTINGQLLQTQPSQLISGQVASEHVMLNRNSSNMLRTNQPYTGPMLNNQNTAVHLVSGQTFAASGSPVIANHASPQLVGGQMPLQQASPTVLHLSPGQSSVSQGRPGFATMPSVTSMSGPSRFPAVSSASTAHPSLGSAVQSGSSGSNFTGDQLTQPNRTPVPVSVSHRLPVSSSKSTSTFSNTPGTGTQQQFFCQAQKKCLNQTSPISAPKTTDGLRQAQIPGLLSTTLPGQDSGSKVISASLGTAQPQQEKVVGSSPGHPAVQVESHSGGQKRPAAKQLTKGAFILQQLQRDQAHTVTPDKSHFRSLSDAVQRLLSYHVCQGSMPTEEDLRKVDNEFETVATQLLKRTQAMLNKYRCLLLEDAMRINPSAEMVMIDRMFNQEERASLSRDKRLALVDPEGFQADFCCSFKLDKAAHETQFGRSDQHGSKASSSLQPPAKAQGRDRAKTGVTEPMNHDQFHLVPNHIVVSAEGNISKKTECLGRALKFDKVGLVQYQSTSEEKASRREPLKASQCSPGPEGHRKTSSRSDHGTESKLSSILADSHLEMTCNNSFQDKSLRNSPKNEVLHTDIMKGSGEPQPDLQLTKSLETTFKNILELKKAGRQPQSDPTVSGSVELDFPNFSPMASQENCLEKFIPDHSEGVVETDSILEAAVNSILEC

SEQ ID NO: 780868 - protein, 1085 aa, Homo sapiens; identical to SEQ ID NO: 780867

SEQ ID NO: 780869 - protein, 825 aa, Homo sapiens
TVERDTMTLPAYTVHHPLTPPTHNLTHSELNGPPPSLPVHNIIIQRGLAPNSNKVPINIQPKPIQMGQQNTYNVNNLGIQQHHVQQGISFASASSPQGSVVGPHMSVNIVNQQNTRKPVTSQAVSSTGGSIVIHSPMGQPHAPQSQFLIPTSLSVSSNSVHHVQTINGQLLQTQPSQLISGQVASEHVMLNRNSSNMLRTNQPYTGPMLNNQNTAVHLVSGQTFAASGSPVIANHASPQLVGGQMPLQQASPTVLHLSPGQSSVSQGRPGFATMPSVTSMSGPSRFPAVSSASTAHPSLGSAVQSGSSGSNFTGDQLTQPNRTPVPVSVSHRLPVSSSKSTSTFSNTPGTGTQQQFFCQAQKKCLNQTSPISAPKTTDGLRQAQIPGLLSTTLPGQDSGSKVISASLGTAQPQQEKVVGSSPGHPAVQVESHSGGQKRPAAKQLTKGAFILQQLQRDQAHTVTPDKSHFRSLSDAVQRLLSYHVCQGSMPTEEDLRKVDNEFETVATQLLKRTQAMLNKYRCLLLEDAMRINPSAEMVMIDRMFNQEERASLSRDKRLALVDPEGFQADFCCSFKLDKAAHETQFGRSDQHGSKASSSLQPPAKAQGRDRAKTGVTEPMNHDQFHLVPNHIVVSAEGNISKKTECLGRALKFDKVGLVQYQSTSEEKASRREPLKASQCSPGPEGHRKTSSRSDHGTESKLSSILADSHLEMTCNNSFQDKSLRNSPKNEVLHTDIMKGSGEPQPDLQLTKSLETTFKNILELKKAGRQPQSDPTVSGSVELDFPNFSPMASQENCLEKFIPDHSEGVVETDSILEAAVNSILEC

SEQ ID NO: 780870 - protein, 625 aa, Homo sapiens
LFFIVVMDDDDDSCLLDLIGDPQALNYFLHGPSNKSSNDDLTNAGYSAANSNSIFANSSNADPKSSLKGVSNQLGEGPSDGLPLSSSLQFLEDELESSPLPDLTEDQPFDILQKSLQEANITEQTLAEEAYLDASIGSSQQFAQAQLHPSSSASFTQASNVSNYSGQTLQPIGVTHVPVGASFASNTVGVQHGFMQHVGISVPSQHLSNSSQISGSGQIQLIGSFGNHPSMMTINNLDGSQIILKGSGQQAPSNVSGGLLVHRQTPNGNSLFGNSSSSPVAQPVTVPFNSTNFQTSLPVHNIIIQRGLAPNSNKVPINIQPKPIQMGQQNTYNVNNLGIQQHHVQQGISFASASSPQGSVVGPHMSVNIVNQQNTRKPVTSQAVSSTGGSIVIHSPMGQPHAPQSQFLIPTSLSVSSNSVHHVQTINGQLLQTQPSQLISGQVASEHVMLNRNSSNMLRTNQPYTGPMLNNQNTAVHLVSGQTFAASGSPVIANHASPQLVGGQMPLQQASPTVLHLSPGQSSVSQGRPGFATMPSVTSMSGPSRFPAVSSASTAHPSLGSAVQSGSSGSNFTGDQLTQPNRTPVPVSVSHRLPVSSSKSTSTFSNTPGTGTQQQFFCQVMPFPK

SEQ ID NO: 780871 - protein, 87 aa, Homo sapiens
VGNFHGWAAAWLEESAEMEARSQPRRGGPPIVHWDFPGYILRGRVARSGAALLQNHNSGSNYSDCPGPGNLRPWIWLKVVPDWYDPN

SEQ ID NO: 780872 - protein, 66 aa, Homo sapiens
GDSRGPPPTSPTGRKLLLSAAKQWPWSLSLWSSPSIPNGQDKRAAWNGWRSQMPYLKSLVSELSTS

SEQ ID NO: 780873 - protein, 86 aa, Homo sapiens
KHAAVAELSPGTECRTKASPTYALKPRQWTLDRRKLLLSAAKQWPWSLSLWSSPSIPNGQDKRAAWNGWRSQMPYLKSLVSELSTS

SEQ ID NO: 780874 - protein, 240 aa, Homo sapiens
GCRIRHEKHMETFIPIDLTTENQEMDKEETKTKPRLLRYEEKKYEDVKPLETQPAEIAEKETLEYKTVRTFSESLKSEKTEDYLRESIIQQHMVSPEPASLKEKGKSRRKKDQTHACPNVRKARPVSYDRTEPKDDDVIRNIIRLREKLGWQTILPQHSLKYGSSKIAIQKITLKKPLEDDGEFVYCLPRKSPKSLYNPYDLQVVSAHTAKHCKEFWVITASFISKVMFNGCFKLSELYY

SEQ ID NO: 780875 - protein, 279 aa, Homo sapiens
METFIPIDLTTENQEMDKEETKTKPRLLRYEEKKYEDVKPLETQPAEIAEKETLEYKTVRTFSESLKSEKTEDYLRESIIQQHMVSPEPASLKEKGKSRRKKDQTHACPNVRKARPVSYDRTEPKDDDVIRNIIRLREKLGWQTILPQHSLKYGSSKIAIQKITLKKPLEDDGEFVYCLPRKSPKSLYNPYDLQVVSAHTAKHCKEFWVITASFISKVINIVGSVKEVELIPTLEWLSERRHYYLLRQFKIFSDFRKSGTPNGGTGRSHGRRTWIVKIS

SEQ ID NO: 780876 - protein, 178 aa, Homo sapiens
METFIPIDLTTENQEMDKEETKTKPRLLRYEEKKYEDVKPLETQPAEIAEKETLEYKTVRTFSESLKSEKTEEPKDDDVIRNIIRLREKLGWQTILPQHSLKYGSSKIAIQKITLKKPLEDDGEFVYCLPRKSPKSLYNPYDLQVVSAHTAKHCKEFWVITASFISKRYLVICGAVYI

SEQ ID NO: 780877 - protein, 256 aa, Homo sapiens
METFIPIDLTTENQEMDKEETKTKPRLLRYEEKKYEDVKPLETQPAEIAEKETLEYKTVRTFSESLKSEKTEDYLRESIIQQHMVSPEPASLKEKGKSRRKKDQTHACPNVRKARPVSYDRTEPKDDDVIRNIIRLREKLGWQTILPQHSLKYGSSKIAIQKITLKKPLEDDGEFVYCLPRKSPKSLYNPYDLQVVSAHTAKHCKEFWVITASFISKVINIVGSVKEVELIPTLEWLSERRHYYLLRQFKIFSDFR

SEQ ID NO: 780878 - protein, 228 aa, Homo sapiens
METFIPIDLTTENQEMDKEETKTKPRLLRYEEKKYEDVKPLETQPAEIAEKETLEYKTVRTFSESLKSEKTEDYLRESIIQQHMVSPEPASLKEKGKSRRKKDQTHACPNVRKARPVSYDRTEPKDDDVIRNIIRLREKLGWQTILPQHSLKYGSSKIAIQKITLKKPLEDDGEFVYCLPRKSPKSLYNPYDLQVVSAHTAKHCKEFWVITASFISKRYLVICGAVYI

SEQ ID NO: 780879 - protein, 295 aa, Homo sapiens
LMQWIGLLHTGWASGRLDSSAGGEQEIKINGNIQKGELITYNLTELIKPEAYEVRLTPLTKFGEGDSTIRVIKYSAPVNPHLREFHCGFEDGNICLFTQDDTDNFDWTKQSTATRNTKYTPNTGPNADRSGSKEGFYMYIETSRPRLEGEKARLLSPVFSIAPKNPYGPTNTAYCFSFFYHMYGQHIGVLNVYLRLKGQTTIENPLWSSSGNKGQRWNEAHVNIYPITSFQLIFEGIRGPGIEGDIAIDDVSIAEGECAKQDLATKNSVDGAVGILVHIWLFPIIVLISILSPRR

SEQ ID NO: 780880 - protein, 295 aa, Homo sapiens; identical to SEQ ID NO: 780879

SEQ ID NO: 780881 - protein, 202 aa, Homo sapiens
LMQWIGLLHTGWASGRLDSSAGGEQEIKINGNIQKGELITYNLTELIKPEAYEVRLTPLTKFGEGDSTIRVIKYSAPVNPHLREFHCGFEDGNICLFTQDDTDNFDWTKQSTATRNTKYTPNTGPNADRSGSKEGFYMYIETSRPRLEGEKARLLSPVFSIAPKNPYGPTNTAYCFSFFYHMYGQHIGEIAIITDSYKINDN

SEQ ID NO: 780882 - protein, 116 aa, Homo sapiens
MATDTTVRPVTSSLPDTHISTVPGTQPLTIHIHNSNYAATHTPCHVSSVYTTTNASYTVTKSSHTHIYATYTHTPPIPPQQHSQGHIQLHTHNALHLRSQWEEIQETVTISIDQYF

SEQ ID NO: 780883 - protein, 138 aa, Homo sapiens
  misc_feature (130)..(130): Xaa can be any naturally occurring amino acid
  misc_feature (136)..(136): Xaa can be any naturally occurring amino acid
MARMKVWLQTPLHTEPQTRPSPQPHRHAQPSWPQIRLCALSHPASLTPTYPQSQAHSHSQYTYTIPIMQPRIHRAMCLLFIPPQMHHTQSQNHHTHTYTQHTHIMPLVNPNATGQPHNATVSTLQCHWSXPLIGYXDA

SEQ ID NO: 780884 - protein, 39 aa, Homo sapiens
MNLEGLEMVAVLVVLALFVKVLEQFGLFEPVSLEGNPGV

SEQ ID NO: 780885 - protein, 83 aa, Homo sapiens
MRQSQKVHVRRGFINPQSIPGSHWTQDKEETKGRAAPAAPPAPTWEWGHPSTTQQRWRDLLQGFCIRGDPHGSVVTMVTKGPQ

SEQ ID NO: 780886 - protein, 140 aa, Homo sapiens
EHSLLNKKNKDDSTYNVRPSEDINLDIKYKERSTCMKETQKPYYGEVIKKSFSTFRSLNIGALEELPEVNKPAFLLDPEKYFRKEPEEERPQILEAPSLFKTLKAVFDEKNLFPKEILHHERKAKQLCQEKSCEVKKNKK

SEQ ID NO: 780887 - protein, 220 aa, Homo sapiens
MKLSVNEAQLGFYLGSLSHLSACPGIDPRSSEDQPESLKTGQMMDESDEDFKELCASFFQRVKKHGIKEVSGERKTQKAASNGTQIRSKLKRTKQTATKTKTLQGPAEKKPPSGSQAPRTKKQRVTKWQASEPAHSVNGEGGVLASAPDPPVLRETAQNTQTGNQQEPSPNLSREKTRENVPNSDSQPPPSCLTTAVPSPSKPRTAQLVLQRMQQFKRAD

SEQ ID NO: 780888 - protein, 190 aa, Homo sapiens
FVEVEVVDVNENLHTPYFPDFAVVGSVKENSRIGTSVLQVTARDEDSGRDGEIQYSIRDGSGLGRFSIDDESGVITAADILDRETMGSYWLTVYATDRGVVPLYSTIEVYIEVEDVNDNAPLTSEPIYYPVVMENSPKDVSVIQIQAEDPDSSSNEKLTYRITSGNPQNFFAINIKTGSLLCCPGGNAGA

SEQ ID NO: 780889 - protein, 458 aa, Homo sapiens
MEATGTDEVDKLKTKFISAWNNMKYSWVLKTKTYFSRNSPVLLLGKCYHFKYEDEDKTLPAESGCTIEDHVIAGNVEEFRKDFISRIWLTYREEFPQIEGSALTTDCGWGCTLRTGQMLLAQGLILHFLGRAWTWPDALNIENSDSESWTSHTVKKFTASFEASLSGEREFKTPTISLKETIGKYSDDHEMRNEVYHRKIISWFGDSPLALFGLHQLIEYGKKSGKKAGDWYGPAVVAHILRKAVEEARHPDLQGITIYVAQDCTVYNSDVIDKQSASMTSDNADDKAVIILVPVRLGGERTNTDYLEFVKGILSLEYCVGIIGGKPKQSYYFAGFQDDSLIYMDPHYCQSFVDVSIKDFPLETFHCPSPKKMSFRKMDPSCTIGFYCRNVQDFKRASEEITKMLKFSSKEKYPLFTFVNGHSRDYDFTSTTTNEEDLFSEDEKKQLKRFSTEEFVLL

SEQ ID NO: 780890 - protein, 69 aa, Homo sapiens
VTRLRGVSVREVRRLQLQFFFEKYPLFTFVNGHSRDYDFTSTTTNEEDLFSEDEKKQLKRFSTEEFVLL

SEQ ID NO: 780891 - protein, 458 aa, Homo sapiens; identical to SEQ ID NO: 780889

SEQ ID NO: 780892 - protein, 458 aa, Homo sapiens; identical to SEQ ID NO: 780889

SEQ ID NO: 780893 - protein, 366 aa, Homo sapiens
MEATGTDEVDKLKTKFISAWNNMKYSWVLKTKTYFSRNSPVLLLGKCYHFKYEDEDKTLPAESGCTIEDHVIAGNVEEFRKDFISRIWLTYREEFPQIEGSALTTDCGWGCTLRTGQMLLAQGLILHFLGRAWTWPDALNIENSDSESWTSHTVKKFTASFEASLSGEREFKTPTISLKETIGKYSDDHEMRNEVYHRKIISWFGDSPLALFGLHQLIEYGKKSGKKAGDWYGPAVVAHILRKAVEEARHPDLQGITIYVAQDCTVYNSDVIDKQSASMTSDNADDKAVIILVPVRLGGERTNTDYLEFVKGILSLEYCVGIIGGKPKQSYYFAGFQDDSLIYMDPHYCQSFVDVSIKDFPLEVIL

SEQ ID NO: 780894 - protein, 458 aa, Homo sapiens; identical to SEQ ID NO: 780889

SEQ ID NO: 780895 - protein, 458 aa, Homo sapiens; identical to SEQ ID NO: 780889

SEQ ID NO: 780896 - protein, 139 aa, Homo sapiens
GVLKVPVAAALRSERLRVCGLVLWRLLLELEHLPDVSIKDFPLETFHCPSPKKMSFRKMDPSCTIGFYCRNVQDFKRASEEITKMLKFSSKEKYPLFTFVNGHSRDYDFTSTTTNEEDLFSEDEKKQLKRFSTEEFVLL

SEQ ID NO: 780897 - protein, 88 aa, Homo sapiens
MAAGGARLDPAEDLQPTMWLSLGRGSRVSRAYTCQGQGLVQVSGNRGGAHLRRVCASPAATYQVPGPCSCVQSKAETEYSPRASRNGH

SEQ ID NO: 780898 - protein, 113 aa, Homo sapiens
QVPFFVLTESSASLSCISKWHHHHPAARNKNRGVTPDASPFSSIIFSPSASPRICNLQNIPRVQPFTPSPLPAPEPSHHHLLPDRLSWPPAWSPCSTPVSLSSILHTTARPSI

SEQ ID NO: 780899 - protein, 467 aa, Homo sapiens
AYLPTNLHISNAEESFFLKEANQDLTRNSSLQARVEPFFIYRARTPPIINASYGPFSVEKIIPQELLLTSTAFGNMDKFPFNWKLKSHILDSSIYSNRPKVQTLFYVTGMGWDDSDLTEDLPCVKMFAFPEAREVAASCRLQGAPGLCVAELELLPEWFSSGLDLEPEEEIPALLGGTTMELFFTLYPADKAGQCPLEEEGKWENNIHSGLESPQQAFPARERIGSVVVYPTQDDLKWSLVSLDENVVISVPLNLVREGDTATFLVSLTSSSVADQFTLRIKAAAGVKITAVRVSSEDQWAVQEEIDNGSTQTSATLTCMGHRPDTQSRVNGSFYEILQVDFGIDNSSDLAGAQQITWQVEYPIEDSMSELVVSEIFVSQTTFVGIVPLAMDTEVLNTAILTGKPVSVPVKVVGVQEDGSVVDVSESVECKSADEDVIKVRGDLSTAVLSAQSFLSFLLLSPRSCSH

SEQ ID NO: 780900 - protein, 280 aa, Homo sapiens
AYLPTNLHISNAEESFFLKEANQDLTRNSSLQARVEPFFIYRARTPPIINASYGPFSVEKIIPQELLLTSTAFGNMDKFPFNWKLKSHILDSSIYSNRPKVQTLFYVTGMGWDDSDLTEDLPCVKMFAFPEAREVAASCRLQGAPGLCVAELELLPEWFSSGLDLEPEEEIPALLGGTTMELFFTLYPADKAGQCPLEEEGKWENNIHSGLESPQQAFPARERIGSVVVYPTQDDLKWSLVSLDENVVISVPLNLVREGDTATFLVSLTSSSVADQFTLR

SEQ ID NO: 780901 - protein, 70 aa, Homo sapiens
REAEDAQSVRRGLCRAQSGEVCRAQDGGGEHEAGVCAEHEAVGWRARGRVCRTQWLCSVARYQIRSLARS

SEQ ID NO: 780902 - protein, 284 aa, Homo sapiens
RGRGARGGKAEDKEWMPVTKLGRLVKDMKIKSLEEIYLFSLPIKESEIIDFFLGASLKDEVLKIMPVQERQGPCCRASCQPRVSRALCGPHRGALQMGQRPGPGVVKRCFQRMCGGHRTFPVVAQYNPVATKALPIRSPCCLASRAERGGGNNRIRRKAPNKWSPFGNCVDSASCKTLLVGLGYALIPLQTPGGTVGIFGLSDKRCWPKRRLLQLTGLGNPNDVYHPSMPGGCKCATLGNFAKATFDAISKTYSYLTPDLWKETVFTKSPYQEFTDHLVKTHTR

SEQ ID NO: 780903 - protein, 107 aa, Homo sapiens
SHFCTQAHFGTQAHFCTQAHFCTQATSGVHARGVFLLQGRPDGAQAVGALTPGALAVIGAADCTEVTGAFDFYTLPVGLRTVPVTESQWVRASFICGRGSRGCRNAP

SEQ ID NO: 780904 - protein, 66 aa, Homo sapiens
LTFYIPSKKGQLDSLKEKLHRGKLRFNPAPYTPPATCSPTIICRIPGAVCSLISNRATQGSREPNI

SEQ ID NO: 780905 - protein, 132 aa, Homo sapiens
VAEVSNISVIIVFIINIIAKICCMVITWQTLIPYNNLRTEFLFSFLFCRSENYRRGSGKLTCPRYLFHLASEPRFALFQSAAPSHHAEMCSVPTGTVVNMPTHLMQLKFGSCVDLTAYSKHFFPLTFPQYLA

SEQ ID NO: 780906 - protein, 73 aa, Homo sapiens
STAACRAGGGDLAGRNWDSGGALPFGVSAAQVEPSAPLLHRTCWRARQKLTAQRLECSGVIMAHCSLNLPGLR

SEQ ID NO: 780907 - protein, 76 aa, Homo sapiens
VHRCLPRRWGRPGWPELGFGGSIALRRKRCSGRAQRSASPQNVLARASEANRTESFSTLPRLVSNTLAGDPPDSAF

SEQ ID NO: 780908 - protein, 78 aa, Homo sapiens
GGGGGEASRCGYGGLLVLSFPADSPAMVAQASMQFVSQNAQMLFQGTDGPSLYHRSIVVIIITVIKKKNQARLCGSCL

SEQ ID NO: 780909 - protein, 53 aa, Homo sapiens
LVHSYEKPIYLGYLGLCFFNTETNGVWLSHHTAHPSNPLSDEEIQGCSFLEMC

SEQ ID NO: 780910 - protein, 36 aa, Homo sapiens
PIRRWTLGLPCAPSGGGHSVYPEPHQEVDTRFALCP

SEQ ID NO: 780911 - protein, 85 aa, Homo sapiens
ALRTLGGAQNHQGAIRTPEGLQNHQGALRTTRGCSGHDRPSGPPGDFQNTRKHSGHQRAIRTPGGTQILQGALRTTGSSQDTRVS

SEQ ID NO: 780912 - protein, 113 aa, Homo sapiens
MMPLHSSLGDRARLSLKKKGYPGSRRREPVFSCKCAQKLLCVLDDFHLPLQSTLHSHPLMGCISGYLALCHLVGLTKEASTGTGGQAEWKVRISILPVPFLLCCCELAVSIYL

SEQ ID NO: 780913 - protein, 104 aa, Homo sapiens
MVTPDIKSSPQIRGREVECHSGFGQVWKQCTSLLPTSSWPEFSHVPQPIARGWVATSQQQLCRREGGPDLGGQLAASATWTIFVFELLLVSVHLSYLLSISGVC

SEQ ID NO: 780914 - protein, 77 aa, Homo sapiens
MAELGFDCPAFPLALSIICTRAACLPLPSPSWGALGFTRFAAPSCQERLSMCSPTCTHGPSPPEARQSPQSLRGSGR

SEQ ID NO: 780915 - protein, 124 aa, Homo sapiens
MGKRDPRAQLFLPSAGLLQTSRLHCRLRHFLAEPPSFLLSFQLLLLHCPFLSPLSCTSASILASSSLKTQPDTISIITLFISQWRRWGSRQERQSVNMLPLKFCTALSLLGLWAKIKCKSLYYS

SEQ ID NO: 780916 - protein, 69 aa, Homo sapiens
  misc_feature (7)..(7): Xaa can be any naturally occurring amino acid
DPRGNPXLIDATGVYRRQLVFIDASVVYEMPLHSSLGDRARLHLKKTKKQACMYLAWDCLLKSVNWRCF

SEQ ID NO: 780917 - protein, 350 aa, Homo sapiens
AEPALGSQPQRPAPALRTWQAAAAGQVQGHMAEGDAGSDQRQNEEIEAMAAIYGEEWCVIDDCAKIFCIRISDDIDDPKWTLCLQVMLPNEYPGTAPPIYQLNAPWLKGQERADLSNSLEEIYIQNIGESILYLWVEKIRDVLIQKSQMTEPGPEVKKKTEEEDVECEDDLILACQPESSVKALDFDISETRTEVEVEELPPIDHGIPITDRRSTFQAHLAPVVCPKQVKMVLSKLYENKKIASATHNIYAYRIYCEDKQTFLQDCEDDGETAAGGRLLHLMEILNVKNVMVVVSRWYGGILLGPDRFKHINNCARNILVEKNYTNSPEESSKALGKNKKVRKDKKRNEH

SEQ ID NO: 780918 - protein, 89 aa, Homo sapiens
GDLEDPMAGVVNEGPEALVWEAGPPTKAAGPVKDPRLLAFKSSECSCQHTGFKGQLLCSRALLLFPASPVTSGCDCPVPCTLQFRSRLP

SEQ ID NO: 780919 - protein, 583 aa, Homo sapiens
FLVNSKLQLLFEGNTNSSSVTNSAAGVEDLNIVQVTVPDNEKERLSSIEKIKQLREQVNDLFSRKFGEAIGVDFPVKVPYRKITFNPGCVVIDGMPPGVVFKAPGYLEISSMRRILEAAEFIKFTVIRPLPGLELSNGEYSTVGKRKIDQEGRVFQEKWERAYFFVEVQNIPTCLICKQSMSVSKEYNLRRHYQTNHSKHYDQYMERMRDEKLHELKKGLRKYLLGLSDTECPEQKQVFANPSPTQKSPVQPVEDLAGNLWEKLREKIRSFVAYSIAIDEITDINNTTQLAIFIRGVDENFDVSEELLDTVPMTGTKSGNEIFSRVEKSLKKFCINWSKLVSVASTGTPAMVDANNGLVTKLKSRVATFCKGAELKSICCIIHPESLCAQKLKMDHVMDVVVKSVNWICSRGLNHSEFTTLLYELDSQYGSLLYYTEIKWLSRGLVLKRFFESLEEIDSFMSSRGKPLPQLSSIDWIRDLAFLVDMTMHLNALNISLQGHSQIVTQMYDLIRAFLAKLCLWETHLTRNNLAHFPTLKLASRNESDGLNYIPKIAELKTEFQKRLSDFKLYESELTLFSSPFST

SEQ ID NO: 780920 - protein, 161 aa, Homo sapiens
MIHLPRLPKVLGLQVGATAPGLTTTKIPKRRIGSSCGLLEGKNGSKSWGSCARTRSPVRAAKAIESGTEWNLSLLKLLRMTPGPGKMILSWSSLHLCISRTDVPPVKGAGSPFVTQAGVQWRDHDSLQASTSQAQVILLNSWDHRNTNSRMAPSLLKTSIN

SEQ ID NO: 780921 - protein, 124 aa, Homo sapiens
PASGKDGRSVRVGFSTESAHVWEGPTESIFNLTTLPWPALMNLVIELGFSSKGLKVPSGFFVLLIVNCKSDKLKEELLNMKEPRPDNFEKSQSLWTAKYARIKKWLLSTFRKTWYRHIATGKTT

SEQ ID NO: 780922 - protein, 118 aa, Homo sapiens
EGQSGKVLPQGGAHVWEGPTESIFNLTTLPWPALMNLVIELGFSSKGLKVPSGFFVLLIVNCKSDKLKEELLNMKEPRPDNFEKSQSLWTAKYARIKKWLLSTFRKTWYRHIATGKTT

SEQ ID NO: 780923 - protein, 122 aa, Homo sapiens
MCLEFLPSGGFVVSLTSRMKPQTVVVIVVALKGGVDPKSEQQQDFSSRGWSLALSPRLECSCPISAHYNLCLPGSSNSPASASQVARTTGAHHHTQLIIVFLLETRLHHGGQDGLNLLTLGS

SEQ ID NO: 780924 - protein, 309 aa, Homo sapiens
MSEILCQWLNKELKVSRTVSPKSFAKAFSSGYLLGEVLHKFELQDDFSEFLDSRVSSAKLNNFSRLEPTLNLLGVQFDQNVAHGIITEKPGVATKLLYQLYIALQKKKKSGLTGVEMQTMQRLTNLRLQNMKSDTFQERLRHMIPRQTDFNLMRITYRFQEKYKHVKEDLAHLHFEKLERFQKLKEEQRCFDIEKQYLNRRRQNEIMAKIQAAIIQIPKPASNRTLKALEAQKMMKKKKEAEDVADEIKKFEALIKKDLQAKESASKTSLDTAGQTTTDLLNTYSDDEYIKKIQKRLEEDAFAREQREK

SEQ ID NO: 780925 - protein, 316 aa, Homo sapiens
VSTVVPDSAHKLFIGGLPNYLNDDQVKELLTSFGPLKAFNLVKDSATGLSKGYAFCEYVDINVTDQAIAGLNGMQLGDKKLLVQRASVGAKNATLSTINQTPVTLQVPGLMSSQVQMGGHPTEVLCLMNMVLPEELLDDEEYEEIVEDVRDECSKYGLVKSIEIPRPVDGVEVPGCGKIFVEFTSVFDCQKAMQGLTGRKFANRVVVTKICDPDLITADFWYGGGEGGAGWLRALPHPRPLIPLKTRAESAAKQRKRSTWMRIVGPDLKEERDGMRKPQNATQAAESHTGRPPNLTNHQKVCKGDAKNTPKTPPIT

SEQ ID NO: 780926 - protein, 50 aa, Homo sapiens
EVAPPRHSEKSRLQEPVSSTNCTRKKRGREAPRHHRTFKRQAVAQACNPS

SEQ ID NO: 780927 - protein, 81 aa, Homo sapiens
RLNLSESLSVMCCGSHISRTMRAAVKGPPINMYWSQEKKGALGGIWVEEAGTPGSTEIISRVVSILVYTGSQRLGSIYLQR

SEQ ID NO: 780928 - protein, 152 aa, Homo sapiens
MSGFCWKSVPFLRGSPRPRVILGGAQGVTCLLKWKRRMKSTPVRQEHHTVISRKMLHRSASSQSQSPGLGSKLFYLGLTVFWHCRHSSGFCGPLISLRVSLLHVSLSSSLRFLPLALAPSDSFSFSFPSLLSPPFTNSFVCTHSCPSVDPCL

SEQ ID NO: 780929 - protein, 104 aa, Homo sapiens
NKQGSSLGYFIGCHRHYLQIFSHWGLGCNINLGALQHIDHTNQNYGGQVSVFYFKRLKQINIIKEHKQYSHTQREFMIVADNIAVFSMSQALFKRFYGYEYIYV

SEQ ID NO: 780930 - protein, 4147 aa, Homo sapiens
GAFPGPGRAGARAGAGLGGMAGSGAGVRCSLLRLQETLSAADRCGAALAGHQLIRGLGQECVLSSSPAVLALQTSLVFSRDFGLLVFVRKSLNSIEFRECREEILKFLCIFLEKMGQKIAPYSVEIKNTCTSVYTKDRAAKCKIPALDLLIKLLQTFRSSRLMDEFKIGELFSKFYGELALKKKIPDTVLEKVYELLGLLGEVHPSEMINNAENLFRAFLGELKTQMTSAVREPKLPVLAGCLKGLSSLLCNFTKSMEEDPQTSREIFNFVLKAIRPQIDLKRYAVPSAGLRLFALHASQFSTCLLDNYVSLFEVLLKWCAHTNVELKKAALSALESFLKQVSNMVAKNAEMHKNKLQYFMEQFYGIIRNVDSNNKELSIAIRGYGLFAGPCKVINAKDVDFMYVELIQRCKQMFLTQTDTGDDRVYQMPSFLQSVASVLLYLDTVPEVYTPVLEHLVVMQIDSFPQYSPKMQLVCCRAIVKVFLALAAKGPVLRNCISTVVHQGLIRICSKPVVLPKGPESESEDHRASGEVRTGKWKVPTYKDYVDLFRHLLSSDQMMDSILADEAFFSVNSSSESLNHLLYDEFVKSVLKIVEKLDLTLEIQTVGEQENGDEAPGVWMIPTSDPAANLHPAKPKDFSAFINLVEFCREILPEKQAEFFEPWVYSFSYELILQSTRLPLISGFYKLLSITVRNAKKIKYFEGVSPKSLKHSPEDPEKYSCFALFVKFGKEVAVKMKQYKDELLASCLTFLLSLPHNIIELDVRAYVPALQMAFKLGLSYTPLAEVGLNALEEWSIYIDRHVMQPYYKDILPCLDGYLKTSALSDETKNNWEVSALSRAAQKGFNKVVLKHLKKTKNLSSNEAISLEEIRIRVVQMLGSLGGQINKNLLTVTSSDEMMKSYVAWDREKRLSFAVPFREMKPVIFLDVFLPRVTELALTASDRQTKVAACELLHSMVMFMLGKATQMPEGGQGAPPMYQLYKRTFPVLLRLACDVDQVTRQLYEPLVMQLIHWFTNNKKFESQDTVALLEAILDGIVDPVDSTLRDFCGRCIREFLKWSIKQITPQQQEKSPVNTKSLFKRLYSLALHPNAFKRLGASLAFNNIYREFREEESLVEQFVFEALVIYMESLALAHADEKSLGTIQQCCDAIDHLCRIIEKKHVSLNKAKKRRLPRGFPPSASLCLLDLVKWLLAHCGRPQTECRHKSIELFYKFVPLLPGNRSPNLWLKDVLKEEGVSFLINTFEGGGCGQPSGILAQPTLLYLRGPFSLQATLCWLDLLLAALECYNTFIGERTVGALQVLGTEAQSSLLKAVAFFLESIAMHDIIAAEKCFGTGAAGNRTSPQEGERYNYSKCTVVVRIMEFTTTLLNTSPEGWKLLKKDLCNTHLMRVLVQTLCEPASIGFNIGDVQVMAHLPDVCVNLMKALKMSPYKDILETHLREKITAQSIEELCAVNLYGPDAQVDRSRLAAVVSACKQLHRAGLLHNILPSQSTDLHHSVGTELLSLVYKGIAPGDERQCLPSLDLSCKQLASGLLELAFAFGGLCERLVSLLLNPAVLSTASLGSSQGSVIHFSHGEYFYSLFSETINTELLKNLDLAVLELMQSSVDNTKMVSAVLNGMLDQSFRERANQKHQGLKLATTILQHWKKCDSWWAKDSPLETKMAVLALLAKILQIDSSVSFNTSHGSFPEVFTTYISLLADTKLDLHLKGQAVTLLPFFTSLTGGSLEELRRVLEQLIVAHFPMQSREFPPGTPRFNNYVDCMKKFLDALELSQSPMLLELMTEVLCREQQHVMEELFQSSFRRIARRGSCVTQVGLLESVYEMFRKDDPRLSFTRQSFVDRSLLTLLWHCSLDALREFFSTIVVDAIDVLKSRFTKLNESTFDTQITKKMGYYKILDVMYSRLPKDDVHAKESKINQVFHGSCITEGNELTKTLIKLCYDAFTENMAGENQLLERRRLYHCAAYNCAISVICCVFNELKFYQGFLFSEKPEKNLLIFENLIDLKRRYNFPVEVEVPMERKKKYIEIRKEAREAANGDSDGPSYMSSLSYLADSTLSEEMSQFDFSTGVQSYSYSSQDPRPATGRFRRREQRDPTVHDDVLELEMDELNRHECMAPLTALVKHMHRSLGPPQGEEDSVPRDLPSWMKFLHGKLGNPIVPLNIRLFLAKLVINTEEVFRPYAKHWLSPLLQLAASENNGGEGIHYMVVEIVATILSWTGLATPTGVPKDEVLANRLLNFLMKHVFHPKRAVFRHNLEIIKTLVECWKDCLSIPYRLIFEKFSGKDPNSKDNSVGIQLLGIVMANDLPPYDPQCGIQSSEYFQALVNNMSFVRYKEVYAAAAEVLGLILRYVMERKNILEESLCELVAKQLKQHQNTMEDKFIVCLNKVTKSFPPLADRFMNAVFFLLPKFHGVLKTLCLEVVLCRVEGMTELYFQLKSKDFVQVMRHRDDERQKVCLDIIYKMMPKLKPVELRELLNPVVEFVSHPSTTCREQMYNILMWIHDNYRDPESETDNDSQEIFKLAKDVLIQGLIDENPGLQLIIRNFWSHETRLPSNTLDRLLALNSLYSPKIEVHFLSLATNFLLEMTSMSPDYPNPMFEHPLSECEFQEYTIDSDWRFRSTVLTPMFVETQASQGTLQTRTQEGSLSARWPVAGQIRATQQQHDFTLTQTADGRSSFDWLTGSSTDPLVDHTSPSSDSLLFAHKRSERLQRAPLKSVGPDFGKKRLGLPGDEVDNKVKGAAGRTDLLRLRRRFMRDQEKLSLMYARKGVAEQKREKEIKSELKMKQDAQVVLYRSYRHGDLPDIQIKHSSLITPLQAVAQRDPIIAKQLFSSLFSGILKEMDKFKTLSEKNNITQKLLQDFNRFLNTTFSFFPPFVSCIQDISCQHAALLSLDPAAVSAGCLASLQQPVGIRLLEEALLRLLPAELPAKRVRGKARLPPDVLRWVELAKLYRSIGEYDVLRGIFTSEIGTKQITQSALLAEARSDYSEAAKQYDEALNKQDWVDGEPTEAEKDFWELASLDCYNHLAEWKSLEYCSTASIDSENPPDLNKIWSEPFYQETYLPYMIRSKLKLLLQGEADQSLLTFIDKAMHGELQKAILELHYSQELSLLYLLQDDVDRAKYYIQNGIQSFMQNYSSIDVLLHQSRLTKLQSVQALTEIQEFISFISKQGNLSSQVPLKRLLNTWTNRYPDAKMDPMNIWDDIITNRCFFLSKIEEKLTPLPEDNSMNVDQDGDPSDRMEVQEQEEDISSLIRSCKFSMKMKMIDSARKQNNFSLAMKLLKELHKESKTRDDWLVSWVQSYCRLSHCRSRSQGCSEQVLTVLKTVSLLDENNVSSYLSKNILAFRDQNILLGTTYRIIANALSSEPACLAEIEEDKARRILELSGSSSEDSEKVIAGLYQRAFQHLSEAVQAAEEEAQPPSWSCGPAAGVIDAYMTLADFCDQQLRKEEENASVIDSAELQAYPALVVEKMLKALKLNSNEARLKFPRLLQIIERYPEETLSLMTKEISSVPCWQFISWISHMVALLDKDQAVAVQHSVEEITDNYPQAIVYPFIISSESYSFKDTSTGHKNKEFVARIKSKLDQGGVIQDFINALDQLSNPELLFKDWSNDVRAELAKTPVNKKNIEKMYERMYAALGDPKAPGLGAFRRKFIQTFGKEFDKHFGKGGSKLLRMKLSDFNDITNMLLLKMNKDSKPPGNLKECSPWMSDFKVEFLRNELEIPGQYDGRGKPLPEYHVRIAGFDERVTVMASLRRPKRIIIRGHDEREHPFLVKGGEDLRQDQRVEQLFQVMNGILAQDSACSQRALQLRTYSVVPMTSRLGLIEWLENTVTLKDLLLNTMSQEEKAAYLSDPRAPPCEYKDWLTKMSGKHDVGAYMLMYKGANRTETVTSFRKRESKVPADLLKRAFVRMSTSPEAFLALRSHFASSHALICISHWILGIGDRHLNNFMVAMETGGVIGIDFGHAFGSATQFLPVPELMPFRLTRQFINLMLPMKETGLMYSIMVHALRAFRSDPGLLTNTMDVFVKEPSFDWKNFEQKMLKKGGSWIQEINVAEKNWYPRQKICYAKRKLAGANPAVITCDELLLGHEKAPAFRDYVAVARGSKDHNIRAQEPESGLSEETQVKCLMDQATDPNILGRTWEGWEPWM

SEQ ID NO: 780931 - protein, 91 aa, Homo sapiens
YLAIYNYPAIYNYLAIYNYLAIYNYLAIYNYLAIYNYLLESFLKQVSNMVAKNAEMHKNKLQYFMEQFYGIIRNVDSNNYLAIYNYLPGGF

SEQ ID NO: 780932 - protein, 4147 aa, Homo sapiens; identical to SEQ ID NO: 780930

SEQ ID NO: 780933 - protein, 4147 aa, Homo sapiens; identical to SEQ ID NO: 780930

SEQ ID NO: 780934 - protein, 4147 aa, Homo sapiens; identical to SEQ ID NO: 780930

SEQ ID NO: 780935 - protein, 3293 aa, Homo sapiens
DSPELTSNEAISLEEIRIRVVQMLGSLGGQINKNLLTVTSSDEMMKSYVAWDREKRLSFAVPFREMKPVIFLDVFLPRVTELALTASDRQTKVAACELLHSMVMFMLGKATQMPEGGQGAPPMYQLYKRTFPVLLRLACDVDQVTRQLYEPLVMQLIHWFTNNKKFESQDTVALLEAILDGIVDPVDSTLRDFCGRCIREFLKWSIKQITPQQQEKSPVNTKSLFKRLYSLALHPNAFKRLGASLAFNNIYREFREEESLVEQFVFEALVIYMESLALAHADEKSLGTIQQCCDAIDHLCRIIEKKHVSLNKAKKRRLPRGFPPSASLCLLDLVKWLLAHCGRPQTECRHKSIELFYKFVPLLPGNRSPNLWLKDVLKEEGVSFLINTFEGGGCGQPSGILAQPTLLYLRGPFSLQATLCWLDLLLAALECYNTFIGERTVGALQVLGTEAQSSLLKAVAFFLESIAMHDIIAAEKCFGTGAAGNRTSPQEGERYNYSKCTVVVRIMEFTTTLLNTSPEGWKLLKKDLCNTHLMRVLVQTLCEPASIGFNIGDVQVMAHLPDVCVNLMKALKMSPYKDILETHLREKITAQSIEELCAVNLYGPDAQVDRSRLAAVVSACKQLHRAGLLHNILPSQSTDLHHSVGTELLSLVYKGIAPGDERQCLPSLDLSCKQLASGLLELAFAFGGLCERLVSLLLNPAVLSTASLGSSQGSVIHFSHGEYFYSLFSETINTELLKNLDLAVLELMQSSVDNTKMVSAVLNGMLDQSFRERANQKHQGLKLATTILQHWKKCDSWWAKDSPLETKMAVLALLAKILQIDSSVSFNTSHGSFPEVFTTYISLLADTKLDLHLKGQAVTLLPFFTSLTGGSLEELRRVLEQLIVAHFPMQSREFPPGTPRFNNYVDCMKKFLDALELSQSPMLLELMTEVLCREQQHVMEELFQSSFRRIARRGSCVTQVGLLESVYEMFRKDDPRLSFTRQSFVDRSLLTLLWHCSLDALREFFSTIVVDAIDVLKSRFTKLNESTFDTQITKKMGYYKILDVMYSRLPKDDVHAKESKINQVFHGSCITEGNELTKTLIKLCYDAFTENMAGENQLLERRRLYHCAAYNCAISVICCVFNELKFYQGFLFSEKPEKNLLIFENLIDLKRRYNFPVEVEVPMERKKKYIEIRKEAREAANGDSDGPSYMSSLSYLADSTLSEEMSQFDFSTGVQSYSYSSQDPRPATGRFRRREQRDPTVHDDVLELEMDELNRHECMAPLTALVKHMHRSLGPPQGEEDSVPRDLPSWMKFLHGKLGNPIVPLNIRLFLAKLVINTEEVFRPYAKHWLSPLLQLAASENNGGEGIHYMVVEIVATILSWTGLATPTGVPKDEVLANRLLNFLMKHVFHPKRAVFRHNLEIIKTLVECWKDCLSIPYRLIFEKFSGKDPNSKDNSVGIQLLGIVMANDLPPYDPQCGIQSSEYFQALVNNMSFVRYKEVYAAAAEVLGLILRYVMERKNILEESLCELVAKQLKQHQNTMEDKFIVCLNKVTKSFPPLADRFMNAVFFLLPKFHGVLKTLCLEVVLCRVEGMTELYFQLKSKDFVQVMRHRDDERQKVCLDIIYKMMPKLKPVELRELLNPVVEFVSHPSTTCREQMYNILMWIHDNYRDPESETDNDSQEIFKLAKDVLIQGLIDENPGLQLIIRNFWSHETRLPSNTLDRLLALNSLYSPKIEVHFLSLATNFLLEMTSMSPDYPNPMFEHPLSECEFQEYTIDSDWRFRSTVLTPMFVETQASQGTLQTRTQEGSLSARWPVAGQIRATQQQHDFTLTQTADGRSSFDWLTGSSTDPLVDHTSPSSDSLLFAHKRSERLQRAPLKSVGPDFGKKRLGLPGDEVDNKVKGAAGRTDLLRLRRRFMRDQEKLSLMYARKGVAEQKREKEIKSELKMKQDAQVVLYRSYRHGDLPDIQIKHSSLITPLQAVAQRDPIIAKQLFSSLFSGILKEMDKFKTLSEKNNITQKLLQDFNRFLNTTFSFFPPFVSCIQDISCQHAALLSLDPAAVSAGCLASLQQPVGIRLLEEALLRLLPAELPAKRVRGKARLPPDVLRWVELAKLYRSIGEYDVLRGIFTSEIGTKQITQSALLAEARSDYSEAAKQYDEALNKQDWVDGEPTEAEKDFWELASLDCYNHLAEWKSLEYCSTASIDSENPPDLNKIWSEPFYQETYLPYMIRSKLKLLLQGEADQSLLTFIDKAMHGELQKAILELHYSQELSLLYLLQDDVDRAKYYIQNGIQSFMQNYSSIDVLLHQSRLTKLQSVQALTEIQEFISFISKQGNLSSQVPLKRLLNTWTNRYPDAKMDPMNIWDDIITNRCFFLSKIEEKLTPLPEDNSMNVDQDGDPSDRMEVQEQEEDISSLIRSCKFSMKMKMIDSARKQNNFSLAMKLLKELHKESKTRDDWLVSWVQSYCRLSHCRSRSQGCSEQVLTVLKTVSLLDENNVSSYLSKNILAFRDQNILLGTTYRIIANALSSEPACLAEIEEDKARRILELSGSSSEDSEKVIAGLYQRAFQHLSEAVQAAEEEAQPPSWSCGPAAGVIDAYMTLADFCDQQLRKEEENASVIDSAELQAYPALVVEKMLKALKLNSNEARLKFPRLLQIIERYPEETLSLMTKEISSVPCWQFISWISHMVALLDKDQAVAVQHSVEEITDNYPQAIVYPFIISSESYSFKDTSTGHKNKEFVARIKSKLDQGGVIQDFINALDQLSNPELLFKDWSNDVRAELAKTPVNKKNIEKMYERMYAALGDPKAPGLGAFRRKFIQTFGKEFDKHFGKGGSKLLRMKLSDFNDITNMLLLKMNKDSKPPGNLKECSPWMSDFKVEFLRNELEIPGQYDGRGKPLPEYHVRIAGFDERVTVMASLRRPKRIIIRGHDEREHPFLVKGGEDLRQDQRVEQLFQVMNGILAQDSACSQRALQLRTYSVVPMTSRLGLIEWLENTVTLKDLLLNTMSQEEKAAYLSDPRAPPCEYKDWLTKMSGKHDVGAYMLMYKGANRTETVTSFRKRESKVPADLLKRAFVRMSTSPEAFLALRSHFASSHALICISHWILGIGDRHLNNFMVAMETGGVIGIDFGHAFGSATQFLPVPELMPFRLTRQFINLMLPMKETGLMYSIMVHALRAFRSDPGLLTNTMDVFVKEPSFDWKNFEQKMLKKGGSWIQEINVAEKNWYPRQKICYAKRKLAGANPAVITCDELLLGHEKAPAFRDYVAVARGSKDHNIRAQEPESGLSEETQVKCLMDQATDPNILGRTWEGWEPWM

SEQ ID NO: 780936 - protein, 3247 aa, Homo sapiens
ELGPDHLSIRLSFAVPFREMKPVIFLDVFLPRVTELALTASDRQTKVAACELLHSMVMFMLGKATQMPEGGQGAPPMYQLYKRTFPVLLRLACDVDQVTRQLYEPLVMQLIHWFTNNKKFESQDTVALLEAILDGIVDPVDSTLRDFCGRCIREFLKWSIKQITPQQQEKSPVNTKSLFKRLYSLALHPNAFKRLGASLAFNNIYREFREEESLVEQFVFEALVIYMESLALAHADEKSLGTIQQCCDAIDHLCRIIEKKHVSLNKAKKRRLPRGFPPSASLCLLDLVKWLLAHCGRPQTECRHKSIELFYKFVPLLPGNRSPNLWLKDVLKEEGVSFLINTFEGGGCGQPSGILAQPTLLYLRGPFSLQATLCWLDLLLAALECYNTFIGERTVGALQVLGTEAQSSLLKAVAFFLESIAMHDIIAAEKCFGTGAAGNRTSPQEGERYNYSKCTVVVRIMEFTTTLLNTSPEGWKLLKKDLCNTHLMRVLVQTLCEPASIGFNIGDVQVMAHLPDVCVNLMKALKMSPYKDILETHLREKITAQSIEELCAVNLYGPDAQVDRSRLAAVVSACKQLHRAGLLHNILPSQSTDLHHSVGTELLSLVYKGIAPGDERQCLPSLDLSCKQLASGLLELAFAFGGLCERLVSLLLNPAVLSTASLGSSQGSVIHFSHGEYFYSLFSETINTELLKNLDLAVLELMQSSVDNTKMVSAVLNGMLDQSFRERANQKHQGLKLATTILQHWKKCDSWWAKDSPLETKMAVLALLAKILQIDSSVSFNTSHGSFPEVFTTYISLLADTKLDLHLKGQAVTLLPFFTSLTGGSLEELRRVLEQLIVAHFPMQSREFPPGTPRFNNYVDCMKKFLDALELSQSPMLLELMTEVLCREQQHVMEELFQSSFRRIARRGSCVTQVGLLESVYEMFRKDDPRLSFTRQSFVDRSLLTLLWHCSLDALREFFSTIVVDAIDVLKSRFTKLNESTFDTQITKKMGYYKILDVMYSRLPKDDVHAKESKINQVFHGSCITEGNELTKTLIKLCYDAFTENMAGENQLLERRRLYHCAAYNCAISVICCVFNELKFYQGFLFSEKPEKNLLIFENLIDLKRRYNFPVEVEVPMERKKKYIEIRKEAREAANGDSDGPSYMSSLSYLADSTLSEEMSQFDFSTGVQSYSYSSQDPRPATGRFRRREQRDPTVHDDVLELEMDELNRHECMAPLTALVKHMHRSLGPPQGEEDSVPRDLPSWMKFLHGKLGNPIVPLNIRLFLAKLVINTEEVFRPYAKHWLSPLLQLAASENNGGEGIHYMVVEIVATILSWTGLATPTGVPKDEVLANRLLNFLMKHVFHPKRAVFRHNLEIIKTLVECWKDCLSIPYRLIFEKFSGKDPNSKDNSVGIQLLGIVMANDLPPYDPQCGIQSSEYFQALVNNMSFVRYKEVYAAAAEVLGLILRYVMERKNILEESLCELVAKQLKQHQNTMEDKFIVCLNKVTKSFPPLADRFMNAVFFLLPKFHGVLKTLCLEVVLCRVEGMTELYFQLKSKDFVQVMRHRDDERQKVCLDIIYKMMPKLKPVELRELLNPVVEFVSHPSTTCREQMYNILMWIHDNYRDPESETDNDSQEIFKLAKDVLIQGLIDENPGLQLIIRNFWSHETRLPSNTLDRLLALNSLYSPKIEVHFLSLATNFLLEMTSMSPDYPNPMFEHPLSECEFQEYTIDSDWRFRSTVLTPMFVETQASQGTLQTRTQEGSLSARWPVAGQIRATQQQHDFTLTQTADGRSSFDWLTGSSTDPLVDHTSPSSDSLLFAHKRSERLQRAPLKSVGPDFGKKRLGLPGDEVDNKVKGAAGRTDLLRLRRRFMRDQEKLSLMYARKGVAEQKREKEIKSELKMKQDAQVVLYRSYRHGDLPDIQIKHSSLITPLQAVAQRDPIIAKQLFSSLFSGILKEMDKFKTLSEKNNITQKLLQDFNRFLNTTFSFFPPFVSCIQDISCQHAALLSLDPAAVSAGCLASLQQPVGIRLLEEALLRLLPAELPAKRVRGKARLPPDVLRWVELAKLYRSIGEYDVLRGIFTSEIGTKQITQSALLAEARSDYSEAAKQYDEALNKQDWVDGEPTEAEKDFWELASLDCYNHLAEWKSLEYCSTASIDSENPPDLNKIWSEPFYQETYLPYMIRSKLKLLLQGEADQSLLTFIDKAMHGELQKAILELHYSQELSLLYLLQDDVDRAKYYIQNGIQSFMQNYSSIDVLLHQSRLTKLQSVQALTEIQEFISFISKQGNLSSQVPLKRLLNTWTNRYPDAKMDPMNIWDDIITNRCFFLSKIEEKLTPLPEDNSMNVDQDGDPSDRMEVQEQEEDISSLIRSCKFSMKMKMIDSARKQNNFSLAMKLLKELHKESKTRDDWLVSWVQSYCRLSHCRSRSQGCSEQVLTVLKTVSLLDENNVSSYLSKNILAFRDQNILLGTTYRIIANALSSEPACLAEIEEDKARRILELSGSSSEDSEKVIAGLYQRAFQHLSEAVQAAEEEAQPPSWSCGPAAGVIDAYMTLADFCDQQLRKEEENASVIDSAELQAYPALVVEKMLKALKLNSNEARLKFPRLLQIIERYPEETLSLMTKEISSVPCWQFISWISHMVALLDKDQAVAVQHSVEEITDNYPQAIVYPFIISSESYSFKDTSTGHKNKEFVARIKSKLDQGGVIQDFINALDQLSNPELLFKDWSNDVRAELAKTPVNKKNIEKMYERMYAALGDPKAPGLGAFRRKFIQTFGKEFDKHFGKGGSKLLRMKLSDFNDITNMLLLKMNKDSKPPGNLKECSPWMSDFKVEFLRNELEIPGQYDGRGKPLPEYHVRIAGFDERVTVMASLRRPKRIIIRGHDEREHPFLVKGGEDLRQDQRVEQLFQVMNGILAQDSACSQRALQLRTYSVVPMTSRLGLIEWLENTVTLKDLLLNTMSQEEKAAYLSDPRAPPCEYKDWLTKMSGKHDVGAYMLMYKGANRTETVTSFRKRESKVPADLLKRAFVRMSTSPEAFLALRSHFASSHALICISHWILGIGDRHLNNFMVAMETGGVIGIDFGHAFGSATQFLPVPELMPFRLTRQFINLMLPMKETGLMYSIMVHALRAFRSDPGLLTNTMDVFVKEPSFDWKNFEQKMLKKGGSWIQEINVAEKNWYPRQKICYAKRKLAGANPAVITCDELLLGHEKAPAFRDYVAVARGSKDHNIRAQEPESGLSEETQVKCLMDQATDPNILGRTWEGWEPWM

SEQ ID NO: 780937 - protein, 4147 aa, Homo sapiens; identical to SEQ ID NO: 780930

SEQ ID NO: 780938 - protein, 1286 aa, Homo sapiens
MVQVPQAKQLVVCVVSQDISCQHAALLSLDPAAVSAGCLASLQQPVGIRLLEEALLRLLPAELPAKRVRGKARLPPDVLRWVELAKLYRSIGEYDVLRGIFTSEIGTKQITQSALLAEARSDYSEAAKQYDEALNKQDWVDGEPTEAEKDFWELASLDCYNHLAEWKSLEYCSTASIDSENPPDLNKIWSEPFYQETYLPYMIRSKLKLLLQGEADQSLLTFIDKAMHGELQKAILELHYSQELSLLYLLQDDVDRAKYYIQNGIQSFMQNYSSIDVLLHQSRLTKLQSVQALTEIQEFISFISKQGNLSSQVPLKRLLNTWTNRYPDAKMDPMNIWDDIITNRCFFLSKIEEKLTPLPEDNSMNVDQDGDPSDRMEVQEQEEDISSLIRSCKFSMKMKMIDSARKQNNFSLAMKLLKELHKESKTRDDWLVSWVQSYCRLSHCRSRSQGCSEQVLTVLKTVSLLDENNVSSYLSKNILAFRDQNILLGTTYRIIANALSSEPACLAEIEEDKARRILELSGSSSEDSEKVIAGLYQRAFQHLSEAVQAAEEEAQPPSWSCGPAAGVIDAYMTLADFCDQQLRKEEENASVIDSAELQAYPALVVEKMLKALKLNSNEARLKFPRLLQIIERYPEETLSLMTKEISSVPCWQFISWISHMVALLDKDQAVAVQHSVEEITDNYPQAIVYPFIISSESYSFKDTSTGHKNKEFVARIKSKLDQGGVIQDFINALDQLSNPELLFKDWSNDVRAELAKTPVNKKNIEKMYERMYAALGDPKAPGLGAFRRKFIQTFGKEFDKHFGKGGSKLLRMKLSDFNDITNMLLLKMNKDSKPPGNLKECSPWMSDFKVEFLRNELEIPGQYDGRGKPLPEYHVRIAGFDERVTVMASLRRPKRIIIRGHDEREHPFLVKGGEDLRQDQRVEQLFQVMNGILAQDSACSQRALQLRTYSVVPMTSRLGLIEWLENTVTLKDLLLNTMSQEEKAAYLSDPRAPPCEYKDWLTKMSGKHDVGAYMLMYKGANRTETVTSFRKRESKVPADLLKRAFVRMSTSPEAFLALRSHFASSHALICISHWILGIGDRHLNNFMVAMETGGVIGIDFGHAFGSATQFLPVPELMPFRLTRQFINLMLPMKETGLMYSIMVHALRAFRSDPGLLTNTMDVFVKEPSFDWKNFEQKMLKKGGSWIQEINVAEKNWYPRQKICYAKRKLAGANPAVITCDELLLGHEKAPAFRDYVAVARGSKDHNIRAQEPESGLSEETQVKCLMDQATDPNILGRTWEGWEPWM

SEQ ID NO: 780939 - protein, 1678 aa, Homo sapiens
  misc_feature (2)..(2): Xaa can be any naturally occurring amino acid
  misc_feature (4)..(4): Xaa can be any naturally occurring amino acid
  misc_feature (6)..(6): Xaa can be any naturally occurring amino acid
  misc_feature (9)..(9): Xaa can be any naturally occurring amino acid
  misc_feature (14)..(14): Xaa can be any naturally occurring amino acid
  misc_feature (17)..(17): Xaa can be any naturally occurring amino acid
  misc_feature (23)..(23): Xaa can be any naturally occurring amino acid
  misc_feature (28)..(28): Xaa can be any naturally occurring amino acid
  misc_feature (38)..(38): Xaa can be any naturally occurring amino acid
  misc_feature (46)..(48): Xaa can be any naturally occurring amino acid
  misc_feature (52)..(52): Xaa can be any naturally occurring amino acid
MXRXAXLHXAPPQXFNXFKVPGXGIVGXEICNGNTNFXPKENKLMXXXLQNXEARDPTFGLSAPLDFKLIIRNFWSHETRLPSNTLDRLLALNSLYSPKIEVHFLSLATNFLLEMTSMSPDYPNPMFEHPLSECEFQEYTIDSDWRFRSTVLTPMFVETQASQGTLQTRTQEGSLSARWPVAGQIRATQQQHDFTLTQTADGRSSFDWLTGSSTDPLVDHTSPSSDSLLFAHKRSERLQRAPLKSVGPDFGKKRLGLPGDEVDNKVKGAAGRTDLLRLRRRFMRDQEKLSLMYARKGVAEQKREKEIKSELKMKQDAQVVLYRSYRHGDLPDIQIKHSSLITPLQAVAQRDPIIAKQLFSSLFSGILKEMDKFKTLSEKNNITQKLLQDFNRFLNTTFSFFPPFVSCIQDISCQHAALLSLDPAAVSAGCLASLQQPVGIRLLEEALLRLLPAELPAKRVRGKARLPPDVLRWVELAKLYRSIGEYDVLRGIFTSEIGTKQITQSALLAEARSDYSEAAKQYDEALNKQDWVDGEPTEAEKDFWELASLDCYNHLAEWKSLEYCSTASIDSENPPDLNKIWSEPFYQETYLPYMIRSKLKLLLQGEADQSLLTFIDKAMHGELQKAILELHYSQELSLLYLLQDDVDRAKYYIQNGIQSFMQNYSSIDVLLHQSRLTKLQSVQALTEIQEFISFISKQGNLSSQVPLKRLLNTWTNRYPDAKMDPMNIWDDIITNRCFFLSKIEEKLTPLPEDNSMNVDQDGDPSDRMEVQEQEEDISSLIRSCKFSMKMKMIDSARKQNNFSLAMKLLKELHKESKTRDDWLVSWVQSYCRLSHCRSRSQGCSEQVLTVLKTVSLLDENNVSSYLSKNILAFRDQNILLGTTYRIIANALSSEPACLAEIEEDKARRILELSGSSSEDSEKVIAGLYQRAFQHLSEAVQAAEEEAQPPSWSCGPAAGVIDAYMTLADFCDQQLRKEEENASVIDSAELQAYPALVVEKMLKALKLNSNEARLKFPRLLQIIERYPEETLSLMTKEISSVPCWQFISWISHMVALLDKDQAVAVQHSVEEITDNYPQAIVYPFIISSESYSFKDTSTGHKNKEFVARIKSKLDQGGVIQDFINALDQLSNPELLFKDWSNDVRAELAKTPVNKKNIEKMYERMYAALGDPKAPGLGAFRRKFIQTFGKEFDKHFGKGGSKLLRMKLSDFNDITNMLLLKMNKDSKPPGNLKECSPWMSDFKVEFLRNELEIPGQYDGRGKPLPEYHVRIAGFDERVTVMASLRRPKRIIIRGHDEREHPFLVKGGEDLRQDQRVEQLFQVMNGILAQDSACSQRALQLRTYSVVPMTSRLGLIEWLENTVTLKDLLLNTMSQEEKAAYLSDPRAPPCEYKDWLTKMSGKHDVGAYMLMYKGANRTETVTSFRKRESKVPADLLKRAFVRMSTSPEAFLALRSHFASSHALICISHWILGIGDRHLNNFMVAMETGGVIGIDFGHAFGSATQFLPVPELMPFRLTRQFINLMLPMKETGLMYSIMVHALRAFRSDPGLLTNTMDVFVKEPSFDWKNFEQKMLKKGGSWIQEINVAEKNWYPRQKICYAKRKLAGANPAVITCDELLLGHEKAPAFRDYVAVARGSKDHNIRAQEPESGLSEETQVKCLMDQATDPNILGRTWEGWEPWM

SEQ ID NO: 780940 - protein, 4147 aa, Homo sapiens; identical to SEQ ID NO: 780930

SEQ ID NO: 780941 - protein, 679 aa, Homo sapiens
MLKALKLNSNEARLKFPRLLQIIERYPEETLSLMTKEISSVPCWQFISWISHMVALLDKDQAVAVQHSVEEITDNYPQAIVYPFIISSESYSFKDTSTGHKNKEFVARIKSKLDQGGVIQDFINALDQLSNPELLFKDWSNDVRAELAKTPVNKKNIEKMYERMYAALGDPKAPGLGAFRRKFIQTFGKEFDKHFGKGGSKLLRMKLSDFNDITNMLLLKMNKDSKPPGNLKECSPWMSDFKVEFLRNELEIPGQYDGRGKPLPEYHVRIAGFDERVTVMASLRRPKRIIIRGHDEREHPFLVKGGEDLRQDQRVEQLFQVMNGILAQDSACSQRALQLRTYSVVPMTSRLGLIEWLENTVTLKDLLLNTMSQEEKAAYLSDPRAPPCEYKDWLTKMSGKHDVGAYMLMYKGANRTETVTSFRKRESKVPADLLKRAFVRMSTSPEAFLALRSHFASSHALICISHWILGIGDRHLNNFMVAMETGGVIGIDFGHAFGSATQFLPVPELMPFRLTRQFINLMLPMKETGLMYSIMVHALRAFRSDPGLLTNTMDVFVKEPSFDWKNFEQKMLKKGGSWIQEINVAEKNWYPRQKICYAKRKLAGANPAVITCDELLLGHEKAPAFRDYVAVARGSKDHNIRAQEPESGLSEETQVKCLMDQATDPNILGRTWEGWEPWM

SEQ ID NO: 780942 - protein, 627 aa, Homo sapiens [sequence omitted]

SEQ ID NO: 780943 - protein, 3349 aa, Homo sapiens
GAFPGPGRAGARAGAGLGGMAGSGAGVRCSLLRLQETLSAADRCGAALAGHQLIRGLGQECVLSSSPAVLALQTSLVFSRDFGLLVFVRKSLNSIEFRECREEILKFLCIFLEKMGQKIAPYSVEIKNTCTSVYTKDRAAKCKIPALDLLIKLLQTFRSSRLMDEFKIGELFSKFYGELALKKKIPDTVLEKVYELLGLLGEVHPSEMINNAENLFRAFLGELKTQMTSAVREPKLPVLAGCLKGLSSLLCNFTKSMEEDPQTSREIFNFVLKAIRPQIDLKRYAVPSAGLRLFALHASQFSTCLLDNYVSLFEVLLKWCAHTNVELKKAALSALESFLKQVSNMVAKNAEMHKNKLQYFMEQFYGIIRNVDSNNKELSIAIRGYGLFAGPCKVINAKDVDFMYVELIQRCKQMFLTQTDTGDDRVYQMPSFLQSVASVLLYLDTVPEVYTPVLEHLVVMQIDSFPQYSPKMQLVCCRAIVKVFLALAAKGPVLRNCISTVVHQGLIRICSKPVVLPKGPESESEDHRASGEVRTGKWKVPTYKDYVDLFRHLLSSDQMMDSILADEAFFSVNSSSESLNHLLYDEFVKSVLKIVEKLDLTLEIQTVGEQENGDEAPGVWMIPTSDPAANLHPAKPKDFSAFINLVEFCREILPEKQAEFFEPWVYSFSYELILQSTRLPLISGFYKLLSITVRNAKKIKYFEGVSPKSLKHSPEDPEKYSCFALFVKFGKEVAVKMKQYKDELLASCLTFLLSLPHNIIELDVRAYVPALQMAFKLGLSYTPLAEVGLNALEEWSIYIDRHVMQPYYKDILPCLDGYLKTSALSDETKNNWEVSALSRAAQKGFNKVVLKHLKKTKNLSSNEAISLEEIRIRVVQMLGSLGGQINKNLLTVTSSDEMMKSYVAWDREKRLSFAVPFREMKPVIFLDVFLPRVTELALTASDRQTKVAACELLHSMVMFMLGKATQMPEGGQGAPPMYQLYKRTFPVLLRLACDVDQVTRQLYEPLVMQLIHWFTNNKKFESQDTVALLEAILDGIVDPVDSTLRDFCGRCIREFLKWSIKQITPQQQEKSPVNTKSLFKRLYSLALHPNAFKRLGASLAFNNIYREFREEESLVEQFVFEALVIYMESLALAHADEKSLGTIQQCCDAIDHLCRIIEKKHVSLNKAKKRRLPRGFPPSASLCLLDLVKWLLAHCGRPQTECRHKSIELFYKFVPLLPGNRSPNLWLKDVLKEEGVSFLINTFEGGGCGQPSGILAQPTLLYLRGPFSLQATLCWLDLLLAALECYNTFIGERTVGALQVLGTEAQSSLLKAVAFFLESIAMHDIIAAEKCFGTGAAGNRTSPQEGERYNYSKCTVVVRIMEFTTTLLNTSPEGWKLLKKDLCNTHLMRVLVQTLCEPASIGFNIGDVQVMAHLPDVCVNLMKALKMSPYKDILETHLREKITAQSIEELCAVNLYGPDAQVDRSRLAAVVSACKQLHRAGLLHNILPSQSTDLHHSVGTELLSLVYKGIAPGDERQCLPSLDLSCKQLASGLLELAFAFGGLCERLVSLLLNPAVLSTASLGSSQGSVIHFSHGEYFYSLFSETINTELLKNLDLAVLELMQSSVDNTKMVSAVLNGMLDQSFRERANQKHQGLKLATTILQHWKKCDSWWAKDSPLETKMAVLALLAKILQIDSSVSFNTSHGSFPEVFTTYISLLADTKLDLHLKGQAVTLLPFFTSLTGGSLEELRRVLEQLIVAHFPMQSREFPPGTPRFNNYVDCMKKFLDALELSQSPMLLELMTEVLCREQQHVMEELFQSSFRRIARRGSCVTQVGLLESVYEMFRKDDPRLSFTRQSFVDRSLLTLLWHCSLDALREFFSTIVVDAIDVLKSRFTKLNESTFDTQITKKMGYYKILDVMYSRLPKDDVHAKESKINQVFHGSCITEGNELTKTLIKLCYDAFTENMAGENQLLERRRLYHCAAYNCAISVICCVFNELKFYQGFLFSEKPEKNLLIFENLIDLKRRYNFPVEVEVPMERKKKYIEIRKEAREAANGDSDGPSYMSSLSYLADSTLSEEMSQFDFSTGVQSYSYSSQDPRPATGRFRRREQRDPTVHDDVLELEMDELNRHECMAPLTALVKHMHRSLGPPQGEEDSVPRDLPSWMKFLHGKLGNPIVPLNIRLFLAKLVINTEEVFRPYAKHWLSPLLQLAASENNGGEGIHYMVVEIVATILSWTGLATPTGVPKDEVLANRLLNFLMKHVFHPKRAVFRHNLEIIKTLVECWKDCLSIPYRLIFEKFSGKDPNSKDNSVGIQLLGIVMANDLPPYDPQCGIQSSEYFQALVNNMSFVRYKEVYAAAAEVLGLILRYVMERKNILEESLCELVAKQLKQHQNTMEDKFIVCLNKVTKSFPPLADRFMNAVFFLLPKFHGVLKTLCLEVVLCRVEGMTELYFQLKSKDFVQVMRHRDDERQKVCLDIIYKMMPKLKPVELRELLNPVVEFVSHPSTTCREQMYNILMWIHDNYRDPESETDNDSQEIFKLAKDVLIQGLIDENPGLQLIIRNFWSHETRLPSNTLDRLLALNSLYSPKIEVHFLSLATNFLLEMTSMSPDYPNPMFEHPLSECEFQEYTIDSDWRFRSTVLTPMFVETQASQGTLQTRTQEGSLSARWPVAGQIRATQQQHDFTLTQTADGRSSFDWLTGSSTDPLVDHTSPSSDSLLFAHKRSERLQRAPLKSVGPDFGKKRLGLPGDEVDNKVKGAAGRTDLLRLRRRFMRDQEKLSLMYARKGVAEQKREKEIKSELKMKQDAQVVLYRSYRHGDLPDIQIKHSSLITPLQAVAQRDPIIAKQLFSSLFSGILKEMDKFKTLSEKNNITQKLLQDFNRFLNTTFSFFPPFVSCIQDISCQHAALLSLDPAAVSAGCLASLQQPVGIRLLEEALLRLLPAELPAKRVRGKARLPPDVLRWVELAKLYRSIGEYDVLRGIFTSEIGTKQITQSALLAEARSDYSEAAKQYDEALNKQDWVDGEPTEAEKDFWELASLDCYNHLAEWKSLEYCSTASIDSENPPDLNKIWSEPFYQETYLPYMIRSKLKLLLQGEADQSLLTFIDKAMHGELQKAILELHYSQELSLLYLLQDDVDRAKYYIQNGIQSFMQNYSSIDVLLHQSRLTKLQSVQALTEIQEFISFISKQGNLSSQVPLKRLLNTWTNRYPDAKMDPMNIWDDIITNRCFFLSKIEEKLTPLPEDNSMNVDQDGDPSDRMEVQEQEEDISSLIRSCKFSMKMKMIDSARKQNNFSLAMKLLKELHKESKTRDDWLVSWVQSYCRLSHCRSRSQGCSEQVLTVLKTVSLLDENNVSSYLSKNILAFRVNIKIG

SEQ ID NO: 780944 - protein, 535 aa, Homo sapiens
VLDRDLELVKKNIEKMYERMYAALGDPKAPGLGAFRRKFIQTFGKEFDKHFGKGGSKLLRMKLSDFNDITNMLLLKMNKDSKPPGNLKECSPWMSDFKVEFLRNELEIPGQYDGRGKPLPEYHVRIAGFDERVTVMASLRRPKRIIIRGHDEREHPFLVKGGEDLRQDQRVEQLFQVMNGILAQDSACSQRALQLRTYSVVPMTSRLGLIEWLENTVTLKDLLLNTMSQEEKAAYLSDPRAPPCEYKDWLTKMSGKHDVGAYMLMYKGANRTETVTSFRKRESKVPADLLKRAFVRMSTSPEAFLALRSHFASSHALICISHWILGIGDRHLNNFMVAMETGGVIGIDFGHAFGSATQFLPVPELMPFRLTRQFINLMLPMKETGLMYSIMVHALRAFRSDPGLLTNTMDVFVKEPSFDWKNFEQKMLKKGGSWIQEINVAEKNWYPRQKICYAKRKLAGANPAVITCDELLLGHEKAPAFRDYVAVARGSKDHNIRAQEPESGLSEETQVKCLMDQATDPNILGRTWEGWEPWM

SEQ ID NO: 780945 - protein, 400 aa, Homo sapiens [sequence omitted]

SEQ ID NO: 780946 - protein, 264 aa, Homo sapiens
PSALTLSGITAAAQLCLFCRRAFVRMSTSPEAFLALRSHFASSHALICISHWILGIGDRHLNNFMVAMETGGVIGIDFGHAFGSATQFLPVPELMPFRLTRQFINLMLPMKETGLMYSIMVHALRAFRSDPGLLTNTMDVFVKEPSFDWKNFEQKMLKKGGSWIQEINVAEKNWYPRQKICYAKRKLAGANPAVITCDELLLGHEKAPAFRDYVAVARGSKDHNIRAQEPESGLSEETQVKCLMDQATDPNILGRTWEGWEPWM

SEQ ID NO: 780947 - protein, 3565 aa, Homo sapiens
GAFPGPGRAGARAGAGLGGMAGSGAGVRCSLLRLQETLSAADRCGAALAGHQLIRGLGQECVLSSSPAVLALQTSLVFSRDFGLLVFVRKSLNSIEFRECREEILKFLCIFLEKMGQKIAPYSVEIKNTCTSVYTKDRAAKCKIPALDLLIKLLQTFRSSRLMDEFKIGELFSKFYGELALKKKIPDTVLEKVYELLGLLGEVHPSEMINNAENLFRAFLGELKTQMTSAVREPKLPVLAGCLKGLSSLLCNFTKSMEEDPQTSREIFNFVLKAIRPQIDLKRYAVPSAGLRLFALHASQFSTCLLDNYVSLFEVLLKWCAHTNVELKKAALSALESFLKQVSNMVAKNAEMHKNKLQYFMEQFYGIIRNVDSNNKELSIAIRGYGLFAGPCKVINAKDVDFMYVELIQRCKQMFLTQTDTGDDRVYQMPSFLQSVASVLLYLDTVPEVYTPVLEHLVVMQIDSFPQYSPKMQLVCCRAIVKVFLALAAKGPVLRNCISTVVHQGLIRICSKPVVLPKGPESESEDHRASGEVRTGKWKVPTYKDYVDLFRHLLSSDQMMDSILADEAFFSVNSSSESLNHLLYDEFVKSVLKIVEKLDLTLEIQTVGEQENGDEAPGVWMIPTSDPAANLHPAKPKDFSAFINLVEFCREILPEKQAEFFEPWVYSFSYELILQSTRLPLISGFYKLLSITVRNAKKIKYFEGVSPKSLKHSPEDPEKYSCFALFVKFGKEVAVKMKQYKDELLASCLTFLLSLPHNIIELDVRAYVPALQMAFKLGLSYTPLAEVGLNALEEWSIYIDRHVMQPYYKDILPCLDGYLKTSALSDETKNNWEVSALSRAAQKGFNKVVLKHLKKTKNLSSNEAISLEEIRIRVVQMLGSLGGQINKNLLTVTSSDEMMKSYVAWDREKRLSFAVPFREMKPVIFLDVFLPRVTELALTASDRQTKVAACELLHSMVMFMLGKATQMPEGGQGAPPMYQLYKRTFPVLLRLACDVDQVTRQLYEPLVMQLIHWFTNNKKFESQDTVALLEAILDGIVDPVDSTLRDFCGRCIREFLKWSIKQITPQQQEKSPVNTKSLFKRLYSLALHPNAFKRLGASLAFNNIYREFREEESLVEQFVFEALVIYMESLALAHADEKSLGTIQQCCDAIDHLCRIIEKKHVSLNKAKKRRLPRGFPPSASLCLLDLVKWLLAHCGRPQTECRHKSIELFYKFVPLLPGNRSPNLWLKDVLKEEGVSFLINTFEGGGCGQPSGILAQPTLLYLRGPFSLQATLCWLDLLLAALECYNTFIGERTVGALQVLGTEAQSSLLKAVAFFLESIAMHDIIAAEKCFGTGAAGNRTSPQEGERYNYSKCTVVVRIMEFTTTLLNTSPEGWKLLKKDLCNTHLMRVLVQTLCEPASIGFNIGDVQVMAHLPDVCVNLMKALKMSPYKDILETHLREKITAQSIEELCAVNLYGPDAQVDRSRLAAVVSACKQLHRAGLLHNILPSQSTDLHHSVGTELLSLVYKGIAPGDERQCLPSLDLSCKQLASGLLELAFAFGGLCERLVSLLLNPAVLSTASLGSSQGSVIHFSHGEYFYSLFSETINTELLKNLDLAVLELMQSSVDNTKMVSAVLNGMLDQSFRERANQKHQGLKLATTILQHWKKCDSWWAKDSPLETKMAVLALLAKILQIDSSVSFNTSHGSFPEVFTTYISLLADTKLDLHLKGQAVTLLPFFTSLTGGSLEELRRVLEQLIVAHFPMQSREFPPGTPRFNNYVDCMKKFLDALELSQSPMLLELMTEVLCREQQHVMEELFQSSFRRIARRGSCVTQVGLLESVYEMFRKDDPRLSFTRQSFVDRSLLTLLWHCSLDALREFFSTIVVDAIDVLKSRFTKLNESTFDTQITKKMGYYKILDVMYSRLPKDDVHAKESKINQVFHGSCITEGNELTKTLIKLCYDAFTENMAGENQLLERRRLYHCAAYNCAISVICCVFNELKFYQGFLFSEKPEKNLLIFENLIDLKRRYNFPVEVEVPMERKKKYIEIRKEAREAANGDSDGPSYMSSLSYLADSTLSEEMSQFDFSTGVQSYSYSSQDPRPATGRFRRREQRDPTVHDDVLELEMDELNRHECMAPLTALVKHMHRSLGPPQGEEDSVPRDLPSWMKFLHGKLGNPIVPLNIRLFLAKLVINTEEVFRPYAKHWLSPLLQLAASENNGGEGIHYMVVEIVATILSWTGLATPTGVPKDEVLANRLLNFLMKHVFHPKRAVFRHNLEIIKTLVECWKDCLSIPYRLIFEKFSGKDPNSKDNSVGIQLLGIVMANDLPPYDPQCGIQSSEYFQALVNNMSFVRYKEVYAAAAEVLGLILRYVMERKNILEESLCELVAKQLKQHQNTMEDKFIVCLNKVTKSFPPLADRFMNAVFFLLPKFHGVLKTLCLEVVLCRVEGMTELYFQLKSKDFVQVMRHRDDERQKVCLDIIYKMMPKLKPVELRELLNPVVEFVSHPSTTCREQMYNILMWIHDNYRDPESETDNDSQEIFKLAKDVLIQGLIDENPGLQLIIRNFWSHETRLPSNTLDRLLALNSLYSPKIEVHFLSLATNFLLEMTSMSPDYPNPMFEHPLSECEFQEYTIDSDWRFRSTVLTPMFVETQASQGTLQTRTQEGSLSARWPVAGQIRATQQQHDFTLTQTADGRSSFDWLTGSSTDPLVDHTSPSSDSLLFAHKRSERLQRAPLKSVGPDFGKKRLGLPGDEVDNKVKGAAGRTDLLRLRRRFMRDQEKLSLMYARKGVAEQKREKEIKSELKMKQDAQVVLYRSYRHGDLPDIQIKHSSLITPLQAVAQRDPIIAKQLFSSLFSGILKEMDKFKTLSEKNNITQKLLQDFNRFLNTTFSFFPPFVSCIQDISCQHAALLSLDPAAVSAGCLASLQQPVGIRLLEEALLRLLPAELPAKRVRGKARLPPDVLRWVELAKLYRSIGEYDVLRGIFTSEIGTKQITQSALLAEARSDYSEAAKQYDEALNKQDWVDGEPTEAEKDFWELASLDCYNHLAEWKSLEYCSTASIDSENPPDLNKIWSEPFYQETYLPYMIRSKLKLLLQGEADQSLLTFIDKAMHGELQKAILELHYSQELSLLYLLQDDVDRAKYYIQNGIQSFMQNYSSIDVLLHQSRLTKLQSVQALTEIQEFISFISKQGNLSSQVPLKRLLNTWTNRYPDAKMDPMNIWDDIITNRCFFLSKIEEKLTPLPEDNSMNVDQDGDPSDRMEVQEQEEDISSLIRSCKFSMKMKMIDSARKQNNFSLAMKLLKELHKESKTRDDWLVSWVQSYCRLSHCRSRSQGCSEQVLTVLKTVSLLDENNVSSYLSKNILAFRDQNILLGTTYRIIANALSSEPACLAEIEEDKARRILELSGSSSEDSEKVIAGLYQRAFQHLSEAVQAAEEEAQPPSWSCGPAAGVIDAYMTLADFCDQQLRKEEENASVIDSAELQAYPALVVEKMLKALKLNSNEARLKFPRLLQIIERYPEETLSLMTKEISSVPCWQFISWISHMVALLDKDQAVAVQHSVEEITDNYPQGTEEISFVMRLKVSSGYRL

SEQ ID NO: 780948 - protein, 3506 aa, Homo sapiens
GAFPGPGRAGARAGAGLGGMAGSGAGVRCSLLRLQETLSAADRCGAALAGHQLIRGLGQECVLSSSPAVLALQTSLVFSRDFGLLVFVRKSLNSIEFRECREEILKFLCIFLEKMGQKIAPYSVEIKNTCTSVYTKDRAAKCKIPALDLLIKLLQTFRSSRLMDEFKIGELFSKFYGELALKKKIPDTVLEKVYELLGLLGEVHPSEMINNAENLFRAFLGELKTQMTSAVREPKLPVLAGCLKGLSSLLCNFTKSMEEDPQTSREIFNFVLKAIRPQIDLKRYAVPSAGLRLFALHASQFSTCLLDNYVSLFEVLLKWCAHTNVELKKAALSALESFLKQVSNMVAKNAEMHKNKLQYFMEQFYGIIRNVDSNNKELSIAIRGYGLFAGPCKVINAKDVDFMYVELIQRCKQMFLTQTDTGDDRVYQMPSFLQSVASVLLYLDTVPEVYTPVLEHLVVMQIDSFPQYSPKMQLVCCRAIVKVFLALAAKGPVLRNCISTVVHQGLIRICSKPVVLPKGPESESEDHRASGEVRTGKWKVPTYKDYVDLFRHLLSSDQMMDSILADEAFFSVNSSSESLNHLLYDEFVKSVLKIVEKLDLTLEIQTVGEQENGDEAPGVWMIPTSDPAANLHPAKPKDFSAFINLVEFCREILPEKQAEFFEPWVYSFSYELILQSTRLPLISGFYKLLSITVRNAKKIKYFEGVSPKSLKHSPEDPEKYSCFALFVKFGKEVAVKMKQYKDELLASCLTFLLSLPHNIIELDVRAYVPALQMAFKLGLSYTPLAEVGLNALEEWSIYIDRHVMQPYYKDILPCLDGYLKTSALSDETKNNWEVSALSRAAQKGFNKVVLKHLKKTKNLSSNEAISLEEIRIRVVQMLGSLGGQINKNLLTVTSSDEMMKSYVAWDREKRLSFAVPFREMKPVIFLDVFLPRVTELALTASDRQTKVAACELLHSMVMFMLGKATQMPEGGQGAPPMYQLYKRTFPVLLRLACDVDQVTRQLYEPLVMQLIHWFTNNKKFESQDTVALLEAILDGIVDPVDSTLRDFCGRCIREFLKWSIKQITPQQQEKSPVNTKSLFKRLYSLALHPNAFKRLGASLAFNNIYREFREEESLVEQFVFEALVIYMESLALAHADEKSLGTIQQCCDAIDHLCRIIEKKHVSLNKAKKRRLPRGFPPSASLCLLDLVKWLLAHCGRPQTECRHKSIELFYKFVPLLPGNRSPNLWLKDVLKEEGVSFLINTFEGGGCGQPSGILAQPTLLYLRGPFSLQATLCWLDLLLAALECYNTFIGERTVGALQVLGTEAQSSLLKAVAFFLESIAMHDIIAAEKCFGTGAAGNRTSPQEGERYNYSKCTVVVRIMEFTTTLLNTSPEGWKLLKKDLCNTHLMRVLVQTLCEPASIGFNIGDVQVMAHLPDVCVNLMKALKMSPYKDILETHLREKITAQSIEELCAVNLYGPDAQVDRSRLAAVVSACKQLHRAGLLHNILPSQSTDLHHSVGTELLSLVYKGIAPGDERQCLPSLDLSCKQLASGLLELAFAFGGLCERLVSLLLNPAVLSTASLGSSQGSVIHFSHGEYFYSLFSETINTELLKNLDLAVLELMQSSVDNTKMVSAVLNGMLDQSFRERANQKHQGLKLATTILQHWKKCDSWWAKDSPLETKMAVLALLAKILQIDSSVSFNTSHGSFPEVFTTYISLLADTKLDLHLKGQAVTLLPFFTSLTGGSLEELRRVLEQLIVAHFPMQSREFPPGTPRFNNYVDCMKKFLDALELSQSPMLLELMTEVLCREQQHVMEELFQSSFRRIARRGSCVTQVGLLESVYEMFRKDDPRLSFTRQSFVDRSLLTLLWHCSLDALREFFSTIVVDAIDVLKSRFTKLNESTFDTQITKKMGYYKILDVMYSRLPKDDVHAKESKINQVFHGSCITEGNELTKTLIKLCYDAFTENMAGENQLLERRRLYHCAAYNCAISVICCVFNELKFYQGFLFSEKPEKNLLIFENLIDLKRRYNFPVEVEVPMERKKKYIEIRKEAREAANGDSDGPSYMSSLSYLADSTLSEEMSQFDFSTGVQSYSYSSQDPRPATGRFRRREQRDPTVHDDVLELEMDELNRHECMAPLTALVKHMHRSLGPPQGEEDSVPRDLPSWMKFLHGKLGNPIVPLNIRLFLAKLVINTEEVFRPYAKHWLSPLLQLAASENNGGEGIHYMVVEIVATILSWTGLATPTGVPKDEVLANRLLNFLMKHVFHPKRAVFRHNLEIIKTLVECWKDCLSIPYRLIFEKFSGKDPNSKDNSVGIQLLGIVMANDLPPYDPQCGIQSSEYFQALVNNMSFVRYKEVYAAAAEVLGLILRYVMERKNILEESLCELVAKQLKQHQNTMEDKFIVCLNKVTKSFPPLADRFMNAVFFLLPKFHGVLKTLCLEVVLCRVEGMTELYFQLKSKDFVQVMRHRDDERQKVCLDIIYKMMPKLKPVELRELLNPVVEFVSHPSTTCREQMYNILMWIHDNYRDPESETDNDSQEIFKLAKDVLIQGLIDENPGLQLIIRNFWSHETRLPSNTLDRLLALNSLYSPKIEVHFLSLATNFLLEMTSMSPDYPNPMFEHPLSECEFQEYTIDSDWRFRSTVLTPMFVETQASQGTLQTRTQEGSLSARWPVAGQIRATQQQHDFTLTQTADGRSSFDWLTGSSTDPLVDHTSPSSDSLLFAHKRSERLQRAPLKSVGPDFGKKRLGLPGDEVDNKVKGAAGRTDLLRLRRRFMRDQEKLSLMYARKGVAEQKREKEIKSELKMKQDAQVVLYRSYRHGDLPDIQIKHSSLITPLQAVAQRDPIIAKQLFSSLFSGILKEMDKFKTLSEKNNITQKLLQDFNRFLNTTFSFFPPFVSCIQDISCQHAALLSLDPAAVSAGCLASLQQPVGIRLLEEALLRLLPAELPAKRVRGKARLPPDVLRWVELAKLYRSIGEYDVLRGIFTSEIGTKQITQSALLAEARSDYSEAAKQYDEALNKQDWVDGEPTEAEKDFWELASLDCYNHLAEWKSLEYCSTASIDSENPPDLNKIWSEPFYQETYLPYMIRSKLKLLLQGEADQSLLTFIDKAMHGELQKAILELHYSQELSLLYLLQDDVDRAKYYIQNGIQSFMQNYSSIDVLLHQSRLTKLQSVQALTEIQEFISFISKQGNLSSQVPLKRLLNTWTNRYPDAKMDPMNIWDDIITNRCFFLSKIEEKLTPLPEDNSMNVDQDGDPSDRMEVQEQEEDISSLIRSCKFSMKMKMIDSARKQNNFSLAMKLLKELHKESKTRDDWLVSWVQSYCRLSHCRSRSQGCSEQVLTVLKTVSLLDENNVSSYLSKNILAFRDQNILLGTTYRIIANALSSEPACLAEIEEDKARRILELSGSSSEDSEKVIAGLYQRAFQHLSEAVQAAEEEAQPPSWSCGPAAGVIDAYMTLADFCDQQLRKEEENASGELKIKKLVFHYVSIKSYEFCTYLWSPLCLFSNYKYFENPTVFLRDNGSRVQWIT

SEQ ID NO: 780949 - protein, 2957 aa, Homo sapiens
  misc_feature (2903)..(2903): Xaa can be any naturally occurring amino acid
  misc_feature (2914)..(2914): Xaa can be any naturally occurring amino acid
GAFPGPGRAGARAGAGLGGMAGSGAGVRCSLLRLQETLSAADRCGAALAGHQLIRGLGQECVLSSSPAVLALQTSLVFSRDFGLLVFVRKSLNSIEFRECREEILKFLCIFLEKMGQKIAPYSVEIKNTCTSVYTKDRAAKCKIPALDLLIKLLQTFRSSRLMDEFKIGELFSKFYGELALKKKIPDTVLEKVYELLGLLGEVHPSEMINNAENLFRAFLGELKTQMTSAVREPKLPVLAGCLKGLSSLLCNFTKSMEEDPQTSREIFNFVLKAIRPQIDLKRYAVPSAGLRLFALHASQFSTCLLDNYVSLFEVLLKWCAHTNVELKKAALSALESFLKQVSNMVAKNAEMHKNKLQYFMEQFYGIIRNVDSNNKELSIAIRGYGLFAGPCKVINAKDVDFMYVELIQRCKQMFLTQTDTGDDRVYQMPSFLQSVASVLLYLDTVPEVYTPVLEHLVVMQIDSFPQYSPKMQLVCCRAIVKVFLALAAKGPVLRNCISTVVHQGLIRICSKPVVLPKGPESESEDHRASGEVRTGKWKVPTYKDYVDLFRHLLSSDQMMDSILADEAFFSVNSSSESLNHLLYDEFVKSVLKIVEKLDLTLEIQTVGEQENGDEAPGVWMIPTSDPAANLHPAKPKDFSAFINLVEFCREILPEKQAEFFEPWVYSFSYELILQSTRLPLISGFYKLLSITVRNAKKIKYFEGVSPKSLKHSPEDPEKYSCFALFVKFGKEVAVKMKQYKDELLASCLTFLLSLPHNIIELDVRAYVPALQMAFKLGLSYTPLAEVGLNALEEWSIYIDRHVMQPYYKDILPCLDGYLKTSALSDETKNNWEVSALSRAAQKGFNKVVLKHLKKTKNLSSNEAISLEEIRIRVVQMLGSLGGQINKNLLTVTSSDEMMKSYVAWDREKRLSFAVPFREMKPVIFLDVFLPRVTELALTASDRQTKVAACELLHSMVMFMLGKATQMPEGGQGAPPMYQLYKRTFPVLLRLACDVDQVTRQLYEPLVMQLIHWFTNNKKFESQDTVALLEAILDGIVDPVDSTLRDFCGRCIREFLKWSIKQITPQQQEKSPVNTKSLFKRLYSLALHPNAFKRLGASLAFNNIYREFREEESLVEQFVFEALVIYMESLALAHADEKSLGTIQQCCDAIDHLCRIIEKKHVSLNKAKKRRLPRGFPPSASLCLLDLVKWLLAHCGRPQTECRHKSIELFYKFVPLLPGNRSPNLWLKDVLKEEGVSFLINTFEGGGCGQPSGILAQPTLLYLRGPFSLQATLCWLDLLLAALECYNTFIGERTVGALQVLGTEAQSSLLKAVAFFLESIAMHDIIAAEKCFGTGAAGNRTSPQEGERYNYSKCTVVVRIMEFTTTLLNTSPEGWKLLKKDLCNTHLMRVLVQTLCEPASIGFNIGDVQVMAHLPDVCVNLMKALKMSPYKDILETHLREKITAQSIEELCAVNLYGPDAQVDRSRLAAVVSACKQLHRAGLLHNILPSQSTDLHHSVGTELLSLVYKGIAPGDERQCLPSLDLSCKQLASGLLELAFAFGGLCERLVSLLLNPAVLSTASLGSSQGSVIHFSHGEYFYSLFSETINTELLKNLDLAVLELMQSSVDNTKMVSAVLNGMLDQSFRERANQKHQGLKLATTILQHWKKCDSWWAKDSPLETKMAVLALLAKILQIDSSVSFNTSHGSFPEVFTTYISLLADTKLDLHLKGQAVTLLPFFTSLTGGSLEELRRVLEQLIVAHFPMQSREFPPGTPRFNNYVDCMKKFLDALELSQSPMLLELMTEVLCREQQHVMEELFQSSFRRIARRGSCVTQVGLLESVYEMFRKDDPRLSFTRQSFVDRSLLTLLWHCSLDALREFFSTIVVDAIDVLKSRFTKLNESTFDTQITKKMGYYKILDVMYSRLPKDDVHAKESKINQVFHGSCITEGNELTKTLIKLCYDAFTENMAGENQLLERRRLYHCAAYNCAISVICCVFNELKFYQGFLFSEKPEKNLLIFENLIDLKRRYNFPVEVEVPMERKKKYIEIRKEAREAANGDSDGPSYMSSLSYLADSTLSEEMSQFDFSTGVQSYSYSSQDPRPATGRFRRREQRDPTVHDDVLELEMDELNRHECMAPLTALVKHMHRSLGPPQGEEDSVPRDLPSWMKFLHGKLGNPIVPLNIRLFLAKLVINTEEVFRPYAKHWLSPLLQLAASENNGGEGIHYMVVEIVATILSWTGLATPTGVPKDEVLANRLLNFLMKHVFHPKRAVFRHNLEIIKTLVECWKDCLSIPYRLIFEKFSGKDPNSKDNSVGIQLLGIVMANDLPPYDPQCGIQSSEYFQALVNNMSFVRYKEVYAAAAEVLGLILRYVMERKNILEESLCELVAKQLKQHQNTMEDKFIVCLNKVTKSFPPLADRFMNAVFFLLPKFHGVLKTLCLEVVLCRVEGMTELYFQLKSKDFVQVMRHRDDERQKVCLDIIYKMMPKLKPVELRELLNPVVEFVSHPSTTCREQMYNILMWIHDNYRDPESETDNDSQEIFKLAKDVLIQGLIDENPGLQLIIRNFWSHETRLPSNTLDRLLALNSLYSPKIEVHFLSLATNFLLEMTSMSPDYPNPMFEHPLSECEFQEYTIDSDWRFRSTVLTPMFVETQASQGTLQTRTQEGSLSARWPVAGQIRATQQQHDFTLTQTADGRSSFDWLTGSSTDPLVDHTSPSSDSLLFAHKRSERLQRAPLKSVGPDFGKKRLGLPGDEVDNKVKGAAGRTDLLRLRRRFMRDQEKLSLMYARKGVAEQKREKEIKSELKMKQDAQVVLYRSYRHGDLPDIQIKHSSLITPLQAVAQRDPIIAKQLFSSLFSGILKEMDKFKTLSEKNNITQKLLQDFNRFLNTTFSFFPPFVSCIQDTKQMMSSFMLSISAVVMSYLQNPXAHDAPMVIPAXEGSHFGPCLSTRPGLWLLNLLPSAAILDFPEMRPSRCPQLDRG

SEQ ID NO: 780950 - protein, 1099 aa, Homo sapiens
GAFPGPGRAGARAGAGLGGMAGSGAGVRCSLLRLQETLSAADRCGAALAGHQLIRGLGQECVLSSSPAVLALQTSLVFSRDFGLLVFVRKSLNSIEFRECREEILKFLCIFLEKMGQKIAPYSVEIKNTCTSVYTKDRAAKCKIPALDLLIKLLQTFRSSRLMDEFKIGELFSKFYGELALKKKIPDTVLEKVYELLGLLGEVHPSEMINNAENLFRAFLGELKTQMTSAVREPKLPVLAGCLKGLSSLLCNFTKSMEEDPQTSREIFNFVLKAIRPQIDLKRYAVPSAGLRLFALHASQFSTCLLDNYVSLFEVLLKWCAHTNVELKKAALSALESFLKQVSNMVAKNAEMHKNKLQYFMEQFYGIIRNVDSNNKELSIAIRGYGLFAGPCKVINAKDVDFMYVELIQRCKQMFLTQTDTGDDRVYQMPSFLQSVASVLLYLDTVPEVYTPVLEHLVVMQIDSFPQYSPKMQLVCCRAIVKVFLALAAKGPVLRNCISTVVHQGLIRICSKPVVLPKGPESESEDHRASGEVRTGKWKVPTYKDYVDLFRHLLSSDQMMDSILADEAFFSVNSSSESLNHLLYDEFVKSVLKIVEKLDLTLEIQTVGEQENGDEAPGVWMIPTSDPAANLHPAKPKDFSAFINLVEFCREILPEKQAEFFEPWVYSFSYELILQSTRLPLISGFYKLLSITVRNAKKIKYFEGVSPKSLKHSPEDPEKYSCFALFVKFGKEVAVKMKQYKDELLASCLTFLLSLPHNIIELDVRAYVPALQMAFKLGLSYTPLAEVGLNALEEWSIYIDRHVMQPYYKDILPCLDGYLKTSALSDETKNNWEVSALSRAAQKGFNKVVLKHLKKTKNLSSNEAISLEEIRIRVVQMLGSLGGQINKNLLTVTSSDEMMKSYVAWDREKRLSFAVPFREMKPVIFLDVFLPRVTELALTASDRQTKVAACELLHSMVMFMLGKATQMPEGGQGAPPMYQLYKRTFPVLLRLACDVDQVTRQLYEPLVMQLIHWFTNNKKFESQDTVALLEAILDGIVDPVDSTLRDFCGRCIREFLKWSIKQITPQQQEKSPVNTKSLFKRLYSLALSPPASPPHPNCF

SEQ ID NO: 780951 - protein, 86 aa, Homo sapiens
HFGKGGSKLLRMKLSDFNDITNMLLLKMNKDSKPPGNLKECSPWMSDFKVEFLRNELEIPGELTSRGDKTVLSGAQHCNKNSWFLE

SEQ ID NO: 780952 - protein, 4116 aa, Homo sapiens
GAFPGPGRAGARAGAGLGGMAGSGAGVRCSLLRLQETLSAADRCGAALAGHQLIRGLGQECVLSSSPAVLALQTSLVFSRDFGLLVFVRKSLNSIEFRECREEILKFLCIFLEKMGQKIAPYSVEIKNTCTSVYTKDRAAKCKIPALDLLIKLLQTFRSSRLMDEFKIGELFSKFYGELALKKKIPDTVLEKVYELLGLLGEVHPSEMINNAENLFRAFLGELKTQMTSAVREPKLPVLAGCLKGLSSLLCNFTKSMEEDPQTSREIFNFVLKAIRPQIDLKRYAVPSAGLRLFALHASQFSTCLLDNYVSLFEVLLKWCAHTNVELKKAALSALESFLKQVSNMVAKNAEMHKNKLQYFMEQFYGIIRNVDSNNKELSIAIRGYGLFAGPCKVINAKDVDFMYVELIQRCKQMFLTQTDTGDDRVYQMPSFLQSVASVLLYLDTVPEVYTPVLEHLVVMQIDSFPQYSPKMQLVCCRAIVKVFLALAAKGPVLRNCISTVVHQGLIRICSKPVVLPKGPESESEDHRASGEVRTGKWKVPTYKDYVDLFRHLLSSDQMMDSILADEAFFSVNSSSESLNHLLYDEFVKSVLKIVEKLDLTLEIQTVGEQENGDEAPGVWMIPTSDPAANLHPAKPKDFSAFINLVEFCREILPEKQAEFFEPWVYSFSYELILQSTRLPLISGFYKLLSITVRNAKKIKYFEGVSPKSLKHSPEDPEKYSCFALFVKFGKEVAVKMKQYKDELLASCLTFLLSLPHNIIELDVRAYVPALQMAFKLGLSYTPLAEVGLNALEEWSIYIDRHVMQPYYKDILPCLDGYLKTSALSDETKNNWEVSALSRAAQKGFNKVVLKHLKKTKNLSSNEAISLEEIRIRVVQMLGSLGGQINKNLLTVTSSDEMMKSYVAWDREKRLSFAVPFREMKPVIFLDVFLPRVTELALTASDRQTKVAACELLHSMVMFMLGKATQMPEGGQGAPPMYQLYKRTFPVLLRLACDVDQVTRQLYEPLVMQLIHWFTNNKKFESQDTVALLEAILDGIVDPVDSTLRDFCGRCIREFLKWSIKQITPQQQEKSPVNTKSLFKRLYSLALHPNAFKRLGASLAFNNIYREFREEESLVEQFVFEALVIYMESLALAHADEKSLGTIQQCCDAIDHLCRIIEKKHVSLNKAKKRRLPRGFPPSASLCLLDLVKWLLAHCGRPQTECRHKSIELFYKFVPLLPGNRSPNLWLKDVLKEEGVSFLINTFEGGGCGQPSGILAQPTLLYLRGPFSLQATLCWLDLLLAALECYNTFIGERTVGALQVLGTEAQSSLLKAVAFFLESIAMHDIIAAEKCFGTGAAGNRTSPQEGERYNYSKCTVVVRIMEFTTTLLNTSPEGWKLLKKDLCNTHLMRVLVQTLCEPASIGFNIGDVQVMAHLPDVCVNLMKALKMSPYKDILETHLREKITAQSIEELCAVNLYGPDAQVDRSRLAAVVSACKQLHRAGLLHNILPSQSTDLHHSVGTELLSLVYKGIAPGDERQCLPSLDLSCKQLASGLLELAFAFGGLCERLVSLLLNPAVLSTASLGSSQGSVIHFSHGEYFYSLFSETINTELLKNLDLAVLELMQSSVDNTKMVSAVLNGMLDQSFRERANQKHQGLKLATTILQHWKKCDSWWAKDSPLETKMAVLALLAKILQIDSSVSFNTSHGSFPEVFTTYISLLADTKLDLHLKGQAVTLLPFFTSLTGGSLEELRRVLEQLIVAHFPMQSREFPPGTPRFNNYVDCMKKFLDALELSQSPMLLELMTEVLCREQQHVMEELFQSSFRRIARRGSCVTQVGLLESVYEMFRKDDPRLSFTRQSFVDRSLLTLLWHCSLDALREFFSTIVVDAIDVLKSRFTKLNESTFDTQITKKMGYYKILDVMYSRLPKDDVHAKESKINQVFHGSCITEGNELTKTLIKLCYDAFTENMAGENQLLERRRLYHCAAYNCAISVICCVFNELKFYQGFLFSEKPEKNLLIFENLIDLKRRYNFPVEVEVPMERKKKYIEIRKEAREAANGDSDGPSYMSSLSYLADSTLSEEMSQFDFSTGVQSYSYSSQDPRPATGRFRRREQRDPTVHDDVLELEMDELNRHECMAPLTALVKHMHRSLGPPQGEEDSVPRDLPSWMKFLHGKLGNPIVPLNIRLFLAKLVINTEEVFRPYAKHWLSPLLQLAASENNGGEGIHYMVVEIVATILSWTGLATPTGVPKDEVLANRLLNFLMKHVFHPKRAVFRHNLEIIKTLVECWKDCLSIPYRLIFEKFSGKDPNSKDNSVGIQLLGIVMANDLPPYDPQCGIQSSEYFQALVNNMSFVRYKEVYAAAAEVLGLILRYVMERKNILEESLCELVAKQLKQHQNTMEDKFIVCLNKVTKSFPPLADRFMNAVFFLLPKFHGVLKTLCLEVVLCRVEGMTELYFQLKSKDFVQVMRHRDDERQKVCLDIIYKMMPKLKPVELRELLNPVVEFVSHPSTTCREQMYNILMWIHDNYRDPESETDNDSQEIFKLAKDVLIQGLIDENPGLQLIIRNFWSHETRLPSNTLDRLLALNSLYSPKIEVHFLSLATNFLLEMTSMSPDYPNPMFEHPLSECEFQEYTIDSDWRFRSTVLTPMFVETQASQGTLQTRTQEGSLSARWPVAGQIRATQQQHDFTLTQTADGRSSFDWLTGSSTDPLVDHTSPSSDSLLFAHKRSERLQRAPLKSVGPDFGKKRLGLPGDEVDNKVKGAAGRTDLLRLRRRFMRDQEKLSLMYARKGVAEQKREKEIKSELKMKQDAQVVLYRSYRHGDLPDIQIKHSSLITPLQAVAQRDPIIAKQLFSSLFSGILKEMDKFKTLSEKNNITQKLLQDFNRFLNTTFSFFPPFVSCIQDISCQHAALLSLDPAAVSAGCLASLQQPVGIRLLEEALLRLLPAELPAKRVRGKARLPPDVLRWVELAKLYRSIGEYDVLRGIFTSEIGTKQITQSALLAEARSDYSEAAKQYDEALNKQDWVDGEPTEAEKDFWELASLDCYNHLAEWKSLEYCSTASIDSENPPDLNKIWSEPFYQETYLPYMIRSKLKLLLQGEADQSLLTFIDKAMHGELQKAILELHYSQELSLLYLLQDDVDRAKYYIQNGIQSFMQNYSSIDVLLHQSRLTKLQSVQALTEIQEFISFISKQGNLSSQVPLKRLLNTWTNRYPDAKMDPMNIWDDIITNRCFFLSKIEEKLTPLPEDNSMNVDQDGDPSDRMEVQEQEEDISSLIRSCKFSMKMKMIDSARKQNNFSLAMKLLKELHKESKTRDDWLVSWVQSYCRLSHCRSRSQGCSEQVLTVLKTVSLLDENNVSSYLSKNILAFRDQNILLGTTYRIIANALSSEPACLAEIEEDKARRILELSGSSSEDSEKVIAGLYQRAFQHLSEAVQAAEEEAQPPSWSCGPAAGVIDAYMTLADFCDQQLRKEEENASVIDSAELQAYPALVVEKMLKALKLNSNEARLKFPRLLQIIERYPEETLSLMTKEISSVPCWQFISWISHMVALLDKDQAVAVQHSVEEITDNYPQAIVYPFIISSESYSFKDTSTGHKNKEFVARIKSKLDQGGVIQDFINALDQLSNPELLFKDWSNDVRAELAKTPVNKKNIEKMYERMYAALGDPKAPGLGAFRRKFIQTFGKEFDKHFGKGGSKLLRMKLSDFNDITNMLLLKMNKDSKPPGNLKECSPWMSDFKVEFLRNELEIPGQYDGRGKPLPEYHVRIAGFDERVTVMASLRRPKRIIIRGHDEREHPFLVKGGEDLRQDQRVEQLFQVMNGILAQDSACSQRALQLRTYSVVPMTSSDPRAPPCEYKDWLTKMSGKHDVGAYMLMYKGANRTETVTSFRKRESKVPADLLKRAFVRMSTSPEAFLALRSHFASSHALICISHWILGIGDRHLNNFMVAMETGGVIGIDFGHAFGSATQFLPVPELMPFRLTRQFINLMLPMKETGLMYSIMVHALRAFRSDPGLLTNTMDVFVKEPSFDWKNFEQKMLKKGGSWIQEINVAEKNWYPRQKICYAKRKLAGANPAVITCDELLLGHEKAPAFRDYVAVARGSKDHNIRAQEPESGLSEETQVKCLMDQATDPNILGRTWEGWEPWM

SEQ ID NO: 780953 - protein, 4147 aa, Homo sapiens; identical to SEQ ID NO: 780930

SEQ ID NO: 780954 - protein, 3810 aa, Homo sapiens
MYLQVSNMVAKNAEMHKNKLQYFMEQFYGIIRNVDSNNKELSIAIRGYGLFAGPCKVINAKDVDFMYVELIQRCKQMFLTQTDTGDDRVYQMPSFLQSVASVLLYLDTVPEVYTPVLEHLVVMQIDSFPQYSPKMQLVCCRAIVKVFLALAAKGPVLRNCISTVVHQGLIRICSKPVVLPKGPESESEDHRASGEVRTGKWKVPTYKDYVDLFRHLLSSDQMMDSILADEAFFSVNSSSESLNHLLYDEFVKSVLKIVEKLDLTLEIQTVGEQENGDEAPGVWMIPTSDPAANLHPAKPKDFSAFINLVEFCREILPEKQAEFFEPWVYSFSYELILQSTRLPLISGFYKLLSITVRNAKKIKYFEGVSPKSLKHSPEDPEKYSCFALFVKFGKEVAVKMKQYKDELLASCLTFLLSLPHNIIELDVRAYVPALQMAFKLGLSYTPLAEVGLNALEEWSIYIDRHVMQPYYKDILPCLDGYLKTSALSDETKNNWEVSALSRAAQKGFNKVVLKHLKKTKNLSSNEAISLEEIRIRVVQMLGSLGGQINKNLLTVTSSDEMMKSYVAWDREKRLSFAVPFREMKPVIFLDVFLPRVTELALTASDRQTKVAACELLHSMVMFMLGKATQMPEGGQGAPPMYQLYKRTFPVLLRLACDVDQVTRQLYEPLVMQLIHWFTNNKKFESQDTVALLEAILDGIVDPVDSTLRDFCGRCIREFLKWSIKQITPQQQEKSPVNTKSLFKRLYSLALHPNAFKRLGASLAFNNIYREFREEESLVEQFVFEALVIYMESLALAHADEKSLGTIQQCCDAIDHLCRIIEKKHVSLNKAKKRRLPRGFPPSASLCLLDLVKWLLAHCGRPQTECRHKSIELFYKFVPLLPGNRSPNLWLKDVLKEEGVSFLINTFEGGGCGQPSGILAQPTLLYLRGPFSLQATLCWLDLLLAALECYNTFIGERTVGALQVLGTEAQSSLLKAVAFFLESIAMHDIIAAEKCFGTGAAGNRTSPQEGERYNYSKCTVVVRIMEFTTTLLNTSPEGWKLLKKDLCNTHLMRVLVQTLCEPASIGFNIGDVQVMAHLPDVCVNLMKALKMSPYKDILETHLREKITAQSIEELCAVNLYGPDAQVDRSRLAAVVSACKQLHRAGLLHNILPSQSTDLHHSVGTELLSLVYKGIAPGDERQCLPSLDLSCKQLASGLLELAFAFGGLCERLVSLLLNPAVLSTASLGSSQGSVIHFSHGEYFYSLFSETINTELLKNLDLAVLELMQSSVDNTKMVSAVLNGMLDQSFRERANQKHQGLKLATTILQHWKKCDSWWAKDSPLETKMAVLALLAKILQIDSSVSFNTSHGSFPEVFTTYISLLADTKLDLHLKGQAVTLLPFFTSLTGGSLEELRRVLEQLIVAHFPMQSREFPPGTPRFNNYVDCMKKFLDALELSQSPMLLELMTEVLCREQQHVMEELFQSSFRRIARRGSCVTQVGLLESVYEMFRKDDPRLSFTRQSFVDRSLLTLLWHCSLDALREFFSTIVVDAIDVLKSRFTKLNESTFDTQITKKMGYYKILDVMYSRLPKDDVHAKESKINQVFHGSCITEGNELTKTLIKLCYDAFTENMAGENQLLERRRLYHCAAYNCAISVICCVFNELKFYQGFLFSEKPEKNLLIFENLIDLKRRYNFPVEVEVPMERKKKYIEIRKEAREAANGDSDGPSYMSSLSYLADSTLSEEMSQFDFSTGVQSYSYSSQDPRPATGRFRRREQRDPTVHDDVLELEMDELNRHECMAPLTALVKHMHRSLGPPQGEEDSVPRDLPSWMKFLHGKLGNPIVPLNIRLFLAKLVINTEEVFRPYAKHWLSPLLQLAASENNGGEGIHYMVVEIVATILSWTGLATPTGVPKDEVLANRLLNFLMKHVFHPKRAVFRHNLEIIKTLVECWKDCLSIPYRLIFEKFSGKDPNSKDNSVGIQLLGIVMANDLPPYDPQCGIQSSEYFQALVNNMSFVRYKEVYAAAAEVLGLILRYVMERKNILEESLCELVAKQLKQHQNTMEDKFIVCLNKVTKSFPPLADRFMNAVFFLLPKFHGVLKTLCLEVVLCRVEGMTELYFQLKSKDFVQVMRHRDDERQKVCLDIIYKMMPKLKPVELRELLNPVVEFVSHPSTTCREQMYNILMWIHDNYRDPESETDNDSQEIFKLAKDVLIQGLIDENPGLQLIIRNFWSHETRLPSNTLDRLLALNSLYSPKIEVHFLSLATNFLLEMTSMSPDYPNPMFEHPLSECEFQEYTIDSDWRFRSTVLTPMFVETQASQGTLQTRTQEGSLSARWPVAGQIRATQQQHDFTLTQTADGRSSFDWLTGSSTDPLVDHTSPSSDSLLFAHKRSERLQRAPLKSVGPDFGKKRLGLPGDEVDNKVKGAAGRTDLLRLRRRFMRDQEKLSLMYARKGVAEQKREKEIKSELKMKQDAQVVLYRSYRHGDLPDIQIKHSSLITPLQAVAQRDPIIAKQLFSSLFSGILKEMDKFKTLSEKNNITQKLLQDFNRFLNTTFSFFPPFVSCIQDISCQHAALLSLDPAAVSAGCLASLQQPVGIRLLEEALLRLLPAELPAKRVRGKARLPPDVLRWVELAKLYRSIGEYDVLRGIFTSEIGTKQITQSALLAEARSDYSEAAKQYDEALNKQDWVDGEPTEAEKDFWELASLDCYNHLAEWKSLEYCSTASIDSENPPDLNKIWSEPFYQETYLPYMIRSKLKLLLQGEADQSLLTFIDKAMHGELQKAILELHYSQELSLLYLLQDDVDRAKYYIQNGIQSFMQNYSSIDVLLHQSRLTKLQSVQALTEIQEFISFISKQGNLSSQVPLKRLLNTWTNRYPDAKMDPMNIWDDIITNRCFFLSKIEEKLTPLPEDNSMNVDQDGDPSDRMEVQEQEEDISSLIRSCKFSMKMKMIDSARKQNNFSLAMKLLKELHKESKTRDDWLVSWVQSYCRLSHCRSRSQGCSEQVLTVLKTVSLLDENNVSSYLSKNILAFRDQNILLGTTYRIIANALSSEPACLAEIEEDKARRILELSGSSSEDSEKVIAGLYQRAFQHLSEAVQAAEEEAQPPSWSCGPAAGVIDAYMTLADFCDQQLRKEEENASVIDSAELQAYPALVVEKMLKALKLNSNEARLKFPRLLQIIERYPEETLSLMTKEISSVPCWQFISWISHMVALLDKDQAVAVQHSVEEITDNYPQAIVYPFIISSESYSFKDTSTGHKNKEFVARIKSKLDQGGVIQDFINALDQLSNPELLFKDWSNDVRAELAKTPVNKKNIEKMYERMYAALGDPKAPGLGAFRRKFIQTFGKEFDKHFGKGGSKLLRMKLSDFNDITNMLLLKMNKDSKPPGNLKECSPWMSDFKVEFLRNELEIPGQYDGRGKPLPEYHVRIAGFDERVTVMASLRRPKRIIIRGHDEREHPFLVKGGEDLRQDQRVEQLFQVMNGILAQDSACSQRALQLRTYSVVPMTSRLGLIEWLENTVTLKDLLLNTMSQEEKAAYLSDPRAPPCEYKDWLTKMSGKHDVGAYMLMYKGANRTETVTSFRKRESKVPADLLKRAFVRMSTSPEAFLALRSHFASSHALICISHWILGIGDRHLNNFMVAMETGGVIGIDFGHAFGSATQFLPVPELMPFRLTRQFINLMLPMKETGLMYSIMVHALRAFRSDPGLLTNTMDVFVKEPSFDWKNFEQKMLKKGGSWIQEINVAEKNWYPRQKICYAKRKLAGANPAVITCDELLLGHEKAPAFRDYVAVARGSKDHNIRAQEPESGLSEETQVKCLMDQATDPNILGRTWEGWEPWM

SEQ ID NO: 780955 - protein, 3250 aa, Homo sapiens
MMKSYVAWDREKRLSFAVPFREMKPVIFLDVFLPRVTELALTASDRQTKVAACELLHSMVMFMLGKATQMPEGGQGAPPMYQLYKRTFPVLLRLACDVDQVTRQLYEPLVMQLIHWFTNNKKFESQDTVALLEAILDGIVDPVDSTLRDFCGRCIREFLKWSIKQITPQQQEKSPVNTKSLFKRLYSLALHPNAFKRLGASLAFNNIYREFREEESLVEQFVFEALVIYMESLALAHADEKSLGTIQQCCDAIDHLCRIIEKKHVSLNKAKKRRLPRGFPPSASLCLLDLVKWLLAHCGRPQTECRHKSIELFYKFVPLLPGNRSPNLWLKDVLKEEGVSFLINTFEGGGCGQPSGILAQPTLLYLRGPFSLQATLCWLDLLLAALECYNTFIGERTVGALQVLGTEAQSSLLKAVAFFLESIAMHDIIAAEKCFGTGAAGNRTSPQEGERYNYSKCTVVVRIMEFTTTLLNTSPEGWKLLKKDLCNTHLMRVLVQTLCEPASIGFNIGDVQVMAHLPDVCVNLMKALKMSPYKDILETHLREKITAQSIEELCAVNLYGPDAQVDRSRLAAVVSACKQLHRAGLLHNILPSQSTDLHHSVGTELLSLVYKGIAPGDERQCLPSLDLSCKQLASGLLELAFAFGGLCERLVSLLLNPAVLSTASLGSSQGSVIHFSHGEYFYSLFSETINTELLKNLDLAVLELMQSSVDNTKMVSAVLNGMLDQSFRERANQKHQGLKLATTILQHWKKCDSWWAKDSPLETKMAVLALLAKILQIDSSVSFNTSHGSFPEVFTTYISLLADTKLDLHLKGQAVTLLPFFTSLTGGSLEELRRVLEQLIVAHFPMQSREFPPGTPRFNNYVDCMKKFLDALELSQSPMLLELMTEVLCREQQHVMEELFQSSFRRIARRGSCVTQVGLLESVYEMFRKDDPRLSFTRQSFVDRSLLTLLWHCSLDALREFFSTIVVDAIDVLKSRFTKLNESTFDTQITKKMGYYKILDVMYSRLPKDDVHAKESKINQVFHGSCITEGNELTKTLIKLCYDAFTENMAGENQLLERRRLYHCAAYNCAISVICCVFNELKFYQGFLFSEKPEKNLLIFENLIDLKRRYNFPVEVEVPMERKKKYIEIRKEAREAANGDSDGPSYMSSLSYLADSTLSEEMSQFDFSTGVQSYSYSSQDPRPATGRFRRREQRDPTVHDDVLELEMDELNRHECMAPLTALVKHMHRSLGPPQGEEDSVPRDLPSWMKFLHGKLGNPIVPLNIRLFLAKLVINTEEVFRPYAKHWLSPLLQLAASENNGGEGIHYMVVEIVATILSWTGLATPTGVPKDEVLANRLLNFLMKHVFHPKRAVFRHNLEIIKTLVECWKDCLSIPYRLIFEKFSGKDPNSKDNSVGIQLLGIVMANDLPPYDPQCGIQSSEYFQALVNNMSFVRYKEVYAAAAEVLGLILRYVMERKNILEESLCELVAKQLKQHQNTMEDKFIVCLNKVTKSFPPLADRFMNAVFFLLPKFHGVLKTLCLEVVLCRVEGMTELYFQLKSKDFVQVMRHRDDERQKVCLDIIYKMMPKLKPVELRELLNPVVEFVSHPSTTCREQMYNILMWIHDNYRDPESETDNDSQEIFKLAKDVLIQGLIDENPGLQLIIRNFWSHETRLPSNTLDRLLALNSLYSPKIEVHFLSLATNFLLEMTSMSPDYPNPMFEHPLSECEFQEYTIDSDWRFRSTVLTPMFVETQASQGTLQTRTQEGSLSARWPVAGQIRATQQQHDFTLTQTADGRSSFDWLTGSSTDPLVDHTSPSSDSLLFAHKRSERLQRAPLKSVGPDFGKKRLGLPGDEVDNKVKGAAGRTDLLRLRRRFMRDQEKLSLMYARKGVAEQKREKEIKSELKMKQDAQVVLYRSYRHGDLPDIQIKHSSLITPLQAVAQRDPIIAKQLFSSLFSGILKEMDKFKTLSEKNNITQKLLQDFNRFLNTTFSFFPPFVSCIQDISCQHAALLSLDPAAVSAGCLASLQQPVGIRLLEEALLRLLPAELPAKRVRGKARLPPDVLRWVELAKLYRSIGEYDVLRGIFTSEIGTKQITQSALLAEARSDYSEAAKQYDEALNKQDWVDGEPTEAEKDFWELASLDCYNHLAEWKSLEYCSTASIDSENPPDLNKIWSEPFYQETYLPYMIRSKLKLLLQGEADQSLLTFIDKAMHGELQKAILELHYSQELSLLYLLQDDVDRAKYYIQNGIQSFMQNYSSIDVLLHQSRLTKLQSVQALTEIQEFISFISKQGNLSSQVPLKRLLNTWTNRYPDAKMDPMNIWDDIITNRCFFLSKIEEKLTPLPEDNSMNVDQDGDPSDRMEVQEQEEDISSLIRSCKFSMKMKMIDSARKQNNFSLAMKLLKELHKESKTRDDWLVSWVQSYCRLSHCRSRSQGCSEQVLTVLKTVSLLDENNVSSYLSKNILAFRDQNILLGTTYRIIANALSSEPACLAEIEEDKARRILELSGSSSEDSEKVIAGLYQRAFQHLSEAVQAAEEEAQPPSWSCGPAAGVIDAYMTLADFCDQQLRKEEENASVIDSAELQAYPALVVEKMLKALKLNSNEARLKFPRLLQIIERYPEETLSLMTKEISSVPCWQFISWISHMVALLDKDQAVAVQHSVEEITDNYPQAIVYPFIISSESYSFKDTSTGHKNKEFVARIKSKLDQGGVIQDFINALDQLSNPELLFKDWSNDVRAELAKTPVNKKNIEKMYERMYAALGDPKAPGLGAFRRKFIQTFGKEFDKHFGKGGSKLLRMKLSDFNDITNMLLLKMNKDSKPPGNLKECSPWMSDFKVEFLRNELEIPGQYDGRGKPLPEYHVRIAGFDERVTVMASLRRPKRIIIRGHDEREHPFLVKGGEDLRQDQRVEQLFQVMNGILAQDSACSQRALQLRTYSVVPMTSRLGLIEWLENTVTLKDLLLNTMSQEEKAAYLSDPRAPPCEYKDWLTKMSGKHDVGAYMLMYKGANRTETVTSFRKRESKVPADLLKRAFVRMSTSPEAFLALRSHFASSHALICISHWILGIGDRHLNNFMVAMETGGVIGIDFGHAFGSATQFLPVPELMPFRLTRQFINLMLPMKETGLMYSIMVHALRAFRSDPGLLTNTMDVFVKEPSFDWKNFEQKMLKKGGSWIQEINVAEKNWYPRQKICYAKRKLAGANPAVITCDELLLGHEKAPAFRDYVAVARGSKDHNIRAQEPESGLSEETQVKCLMDQATDPNILGRTWEGWEPWM

SEQ ID NO: 780956 - protein, 4147 aa, Homo sapiens; identical to SEQ ID NO: 780930

SEQ ID NO: 780957 - protein, 4129 aa, Homo sapiens
GAFPGPGRAGARAGAGLGGMAGSGAGVRCSLLRLQETLSAADRCGAALAGHQLIRGLGQECVLSSSPAVLALQTSLVFSRDFGLLVFVRKSLNSIEFRECREEILKFLCIFLEKMGQKIAPYSVEIKNTCTSVYTKDRAAKCKIPALDLLIKLLQTFRSSRLMDEFKIGELFSKFYGELALKKKIPDTVLEKVYELLGLLGEVHPSEMINNAENLFRAFLGELKTQMTSAVREPKLPVLAGCLKGLSSLLCNFTKSMEEDPQTSREIFNFVLKAIRPQIDLKRYAVPSAGLRLFALHASQFSTCLLDNYVSLFEVLLKWCAHTNVELKKAALSALESFLKQVSNMVAKNAEMHKNKLQYFMEQFYGIIRNVDSNNKELSIAIRGYGLFAGPCKVINAKDVDFMYVELIQRCKQMFLTQTDTGDDRVYQMPSFLQSVASVLLYLDTVPEVYTPVLEHLVVMQIDSFPQYSPKMQLVCCRAIVKVFLALAAKGPVLRNCISTVVHQGLIRICSKPVVLPKGPESESEDHRASGEVRTGKWKVPTYKDYVDLFRHLLSSDQMMDSILADEAFFSVNSSSESLNHLLYDEFVKSVLKIVEKLDLTLEIQTVGEQENGDEAPGVWMIPTSDPAANLHPAKPKDFSAFINLVEFCREILPEKQAEFFEPWVYSFSYELILQSTRLPLISGFYKLLSITVRNAKKIKYFEGVSPKSLKHSPEDPEKYSCFALFVKFGKEVAVKMKQYKDELLASCLTFLLSLPHNIIELDVRAYVPALQMAFKLGLSYTPLAEVGLNALEEWSIYIDRHVMQPYYKDILPCLDGYLKTSALSDETKNNWEVSALSRAAQKGFNKVVLKHLKKTKNLSSNEAISLEEIRIRVVQMLGSLGGQINKNLLTVTSSDEMMKSYVAWDREKRLSFAVPFREMKPVIFLDVFLPRVTELALTASDRQTKVAACELLHSMVMFMLGKATQMPEGGQGAPPMYQLYKRTFPVLLRLACDVDQVTRQLYEPLVMQLIHWFTNNKKFESQDTVALLEAILDGIVDPVDSTLRDFCGRCIREFLKWSIKQITPQQQEKSPVNTKSLFKRLYSLALHPNAFKRLGASLAFNNIYREFREEESLVEQFVFEALVIYMESLALAHADEKSLGTIQQCCDAIDHLCRIIEKKHVSLNKAKKRRLPRGFPPSASLCLLDLVKWLLAHCGRPQTECRHKSIELFYKFVPLLPGNRSPNLWLKDVLKEEGVSFLINTFEGGGCGQPSGILAQPTLLYLRGPFSLQATLCWLDLLLAALECYNTFIGERTVGALQVLGTEAQSSLLKAVAFFLESIAMHDIIAAEKCFGTGAAGNRTSPQEGERYNYSKCTVVVRIMEFTTTLLNTSPEGWKLLKKDLCNTHLMRVLVQTLCEPASIGFNIGDVQVMAHLPDVCVNLMKALKMSPYKDILETHLREKITAQSIEELCAVNLYGPDAQVDRSRLAAVVSACKQLHRAGLLHNILPSQSTDLHHSVGTELLSLVYKGIAPGDERQCLPSLDLSCKQLASGLLELAFAFGGLCERLVSLLLNPAVLSTASLGSSQGSVIHFSHGEYFYSLFSETINTELLKNLDLAVLELMQSSVDNTKMVSAVLNGMLDQSFRERANQKHQGLKLATTILQHWKKCDSWWAKDSPLETKMAVLALLAKILQIDSSVSFNTSHGSFPEVFTTYISLLADTKLDLHLKGQAVTLLPFFTSLTGGSLEELRRVLEQLIVAHFPMQSREFPPGTPRFNNYVDCMKKFLDALELSQSPMLLELMTEVLCREQQHVMEELFQSSFRRIARRGSCVTQVGLLESVYEMFRKDDPRLSFTRQSFVDRSLLTLLWHCSLDALREFFSTIVVDAIDVLKSRFTKLNESTFDTQITKKMGYYKILDVMYSRLPKDDVHAKESKINQVFHGSCITEGNELTKTLIKLCYDAFTENMAGENQLLERRRLYHCAAYNCAISVICCVFNELKFYQGFLFSEKPEKNLLIFENLIDLKRRYNFPVEVEVPMERKKKYIEIRKEAREAANGDSDGPSYMSSLSYLADSTLSEEMSQFDFSTGVQSYSYSSQDPRPATGRFRRREQRDPTVHDDVLELEMDELNRHECMAPLTALVKHMHRSLGPPQGEEDSVPRDLPSWMKFLHGKLGNPIVPLNIRLFLAKLVINTEEVFRPYAKHWLSPLLQLAASENNGGEGIHYMVVEIVATILSWTGLATPTGVPKDEVLANRLLNFLMKHVFHPKRAVFRHNLEIIKTLVECWKDCLSIPYRLIFEKFSGKDPNSKDNSVGIQLLGIVMANDLPPYDPQCGIQSSEYFQALVNNMSFVRYKEVYAAAAEVLGLILRYVMERKNILEESLCELVAKQLKQHQNTMEDKFIVCLNKVTKSFPPLADRFMNAVFFLLPKFHGVLKTLCLEVVLCRVEGMTELYFQLKSKDFVQVMRHRDDERQKVCLDIIYKMMPKLKPVELRELLNPVVEFVSHPSTTCREQMYNILMWIHDNYRDPESETDNDSQEIFKLAKDVLIQGLIDENPGLQLIIRNFWSHETRLPSNTLDRLLALNSLYSPKIEVHFLSLATNFLLEMTSMSPDYPNPMFEHPLSECEFQEYTIDSDWRFRSTVLTPMFVETQASQGTLQTRTQEGSLSARWPVAGQIRATQQQHDFTLTQTADGRSSFDWLTGSSTDPLVDHTSPSSDSLLFAHKRSERLQRAPLKSVGPDFGKKRLGLPGDEVDNKVKGAAGRTDLLRLRRRFMRDQEKLSLMYARKGVAEQKREKEIKSELKMKQDAQVVLYRSYRHGDLPDIQIKHSSLITPLQAVAQRDPIIAKQLFSSLFSGILKEMDKFKTLSEKNNITQKLLQDFNRFLNTTFSFFPPFVSCIQDISCQHAALLSLDPAAVSAGCLASLQQPVGIRLLEEALLRLLPAELPAKRVRGKARLPPDVLRWVELAKLYRSIGEYDVLRGIFTSEIGTKQITQSALLAEARSDYSEAAKQYDEALNKQDWVDGEPTEAEKDFWELASLDCYNHLAEWKSLEYCSTASIDSENPPDLNKIWSEPFYQETYLPYMIRSKLKLLLQGEADQSLLTFIDKAMHGELQKAILELHYSQELSLLYLLQDDVDRAKYYIQNGIQSFMQNYSSIDVLLHQSRLTKLQSVQALTEIQEFISFISKQGNLSSQVPLKRLLNTWTNRYPDAKMDPMNIWDDIITNRCFFLSKIEEKLTPLPEDNSMNVDQDGDPSDRMEVQEQEEDISSLIRSCKFSMKMKMIDSARKQNNFSLAMKLLKELHKESKTRDDWLVSWVQSYCRLSHCRSRSQGCSEQVLTVLKTVSLLDENNVSSYLSKNILAFRDQNILLGTTYRIIANALSSEPACLAEIEEDKARRILELSGSSSEDSEKVIAGLYQRAFQHLSEAVQAAEEEAQPPSWSCGPAAGVIDAYMTLADFCDQQLRKEEENASVIDSAELQAYPALVVEKMLKALKLNSNEARLKFPRLLQIIERYPEETLSLMTKEISSVPCWQFISWISHMVALLDKDQAVAVQHSVEEITDNYPQAIVYPFIISSESYSFKDTSTGHKNKEFVARIKSKLDQGGVIQDFINALDQLSNPELLFKDWSNDVRAELAKTPVNKKNIEKMYERMYAALGDPKAPGLGAFRRKFIQTFGKEFDKHFGKGGSKLLRMKLSDFNDITNMLLLKMNKDSKPPGNLKECSPWMSDFKVEFLRNELEIPGQYDGRGKPLPEYHVRIAGFDERVTVMASLRRPKRIIIRGHDEREHPFLVKGGEDLRQDQRVEQLFQVMNGILAQDSACSQRALQLRTYSVVPMTSRLGLIEWLENTVTLKDLLLNTMSQEEKAAYLSDPRAPPCEYKDWLTKMSGKHDVGAYMLMYKGANRTETVTSFRKRESKVPADLLKRAFVRMSTSPEAFLALRSHFASSHALICISHWILGIGDRHLNNFMVAMETGGVIGIDFGHAFGSATQFLPVPELMPFRLTRQFINLMLPMKETGLMYSIMVHALRAFRSDPGLLTNTMDVFVKEPSFDWKNFEQKMLKKGGSWIQEINVAEKNWYPRQNDELLLGHEKAPAFRDYVAVARGSKDHNIRAQEPESGLSEETQVKCLMDQATDPNILGRTWEGWEPWM

SEQ ID NO: 780958 - protein, 624 aa, Homo sapiens
ILLLVIRRDKQESVEEITDNYPQAIVYPFIISSESYSFKDTSTGHKNKEFVARIKSKLDQGGVIQDFINALDQLSNPELLFKDWSNDVRAELAKTPVNKKNIEKMYERMYAALGDPKAPGLGAFRRKFIQTFGKEFDKHFGKGGSKLLRMKLSDFNDITNMLLLKMNKDSKPPGNLKECSPWMSDFKVEFLRNELEIPGQYDGRGKPLPEYHVRIAGFDERVTVMASLRRPKRIIIRGHDEREHPFLVKGGEDLRQDQRVEQLFQVMNGILAQDSACSQRALQLRTYSVVPMTSRLGLIEWLENTVTLKDLLLNTMSQEEKAAYLSDPRAPPCEYKDWLTKMSGKHDVGAYMLMYKGANRTETVTSFRKRESKVPADLLKRAFVRMSTSPEAFLALRSHFASSHALICISHWILGIGDRHLNNFMVAMETGGVIGIDFGHAFGSATQFLPVPELMPFRLTRQFINLMLPMKETGLMYSIMVHALRAFRSDPGLLTNTMDVFVKEPSFDWKNFEQKMLKKGGSWIQEINVAEKNWYPRQKICYAKRKLAGANPAVITCDELLLGHEKAPAFRDYVAVARGSKDHNIRAQEPESGLSEETQVKCLMDQATDPNILGRTWEGWEPWM

SEQ ID NO: 780959 - protein, 569 aa, Homo sapiens
RVRPRVRVIQDFINALDQLSNPELLFKDWSNDVRAELAKTPVNKKNIEKMYERMYAALGDPKAPGLGAFRRKFIQTFGKEFDKHFGKGGSKLLRMKLSDFNDITNMLLLKMNKDSKPPGNLKECSPWMSDFKVEFLRNELEIPGQYDGRGKPLPEYHVRIAGFDERVTVMASLRRPKRIIIRGHDEREHPFLVKGGEDLRQDQRVEQLFQVMNGILAQDSACSQRALQLRTYSVVPMTSRLGLIEWLENTVTLKDLLLNTMSQEEKAAYLSDPRAPPCEYKDWLTKMSGKHDVGAYMLMYKGANRTETVTSFRKRESKVPADLLKRAFVRMSTSPEAFLALRSHFASSHALICISHWILGIGDRHLNNFMVAMETGGVIGIDFGHAFGSATQFLPVPELMPFRLTRQFINLMLPMKETGLMYSIMVHALRAFRSDPGLLTNTMDVFVKEPSFDWKNFEQKMLKKGGSWIQEINVAEKNWYPRQKICYAKRKLAGANPAVITCDELLLGHEKAPAFRDYVAVARGSKDHNIRAQEPESGLSEETQVKCLMDQATDPNILGRTWEGWEPWM

SEQ ID NO: 780960 - protein, 400 aa, Homo sapiens [sequence omitted]

SEQ ID NO: 780961 - protein, 137 aa, Homo sapiens
VLEDPYISPTPWMCCQEPSFDCQNFEQKMLKKGGSWIQEINVAEKNWYPRQKICYAKRKLAGANPAVITCDELLLGHEKAPAFRDYVAVARGSKDHNIRAQEPESGLSEETQVKCLMDQATDPNILGRTWEGWEPWM

SEQ ID NO: 780962 - protein, 3520 aa, Homo sapiens
GAFPGPGRAGARAGAGLGGMAGSGAGVRCSLLRLQETLSAADRCGAALAGHQLIRGLGQECVLSSSPAVLALQTSLVFSRDFGLLVFVRKSLNSIEFRECREEILKFLCIFLEKMGQKIAPYSVEIKNTCTSVYTKDRAAKCKIPALDLLIKLLQTFRSSRLMDEFKIGELFSKFYGELALKKKIPDTVLEKVYELLGLLGEVHPSEMINNAENLFRAFLGELKTQMTSAVREPKLPVLAGCLKGLSSLLCNFTKSMEEDPQTSREIFNFVLKAIRPQIDLKRYAVPSAGLRLFALHASQFSTCLLDNYVSLFEVLLKWCAHTNVELKKAALSALESFLKQVSNMVAKNAEMHKNKLQYFMEQFYGIIRNVDSNNKELSIAIRGYGLFAGPCKVINAKDVDFMYVELIQRCKQMFLTQTDTGDDRVYQMPSFLQSVASVLLYLDTVPEVYTPVLEHLVVMQIDSFPQYSPKMQLVCCRAIVKVFLALAAKGPVLRNCISTVVHQGLIRICSKPVVLPKGPESESEDHRASGEVRTGKWKVPTYKDYVDLFRHLLSSDQMMDSILADEAFFSVNSSSESLNHLLYDEFVKSVLKIVEKLDLTLEIQTVGEQENGDEAPGVWMIPTSDPAANLHPAKPKDFSAFINLVEFCREILPEKQAEFFEPWVYSFSYELILQSTRLPLISGFYKLLSITVRNAKKIKYFEGVSPKSLKHSPEDPEKYSCFALFVKFGKEVAVKMKQYKDELLASCLTFLLSLPHNIIELDVRAYVPALQMAFKLGLSYTPLAEVGLNALEEWSIYIDRHVMQPYYKDILPCLDGYLKTSALSDETKNNWEVSALSRAAQKGFNKVVLKHLKKTKNLSSNEAISLEEIRIRVVQMLGSLGGQINKNLLTVTSSDEMMKSYVAWDREKRLSFAVPFREMKPVIFLDVFLPRVTELALTASDRQTKVAACELLHSMVMFMLGKATQMPEGGQGAPPMYQLYKRTFPVLLRLACDVDQVTRQLYEPLVMQLIHWFTNNKKFESQDTVALLEAILDGIVDPVDSTLRDFCGRCIREFLKWSIKQITPQQQEKSPVNTKSLFKRLYSLALHPNAFKRLGASLAFNNIYREFREEESLVEQFVFEALVIYMESLALAHADEKSLGTIQQCCDAIDHLCRIIEKKHVSLNKAKKRRLPRGFPPSASLCLLDLVKWLLAHCGRPQTECRHKSIELFYKFVPLLPGNRSPNLWLKDVLKEEGVSFLINTFEGGGCGQPSGILAQPTLLYLRGPFSLQATLCWLDLLLAALECYNTFIGERTVGALQVLGTEAQSSLLKAVAFFLESIAMHDIIAAEKCFGTGAAGNRTSPQEGERYNYSKCTVVVRIMEFTTTLLNTSPEGWKLLKKDLCNTHLMRVLVQTLCEPASIGFNIGDVQVMAHLPDVCVNLMKALKMSPYKDILETHLREKITAQSIEELCAVNLYGPDAQVDRSRLAAVVSACKQLHRAGLLHNILPSQSTDLHHSVGTELLSLVYKGIAPGDERQCLPSLDLSCKQLASGLLELAFAFGGLCERLVSLLLNPAVLSTASLGSSQGSVIHFSHGEYFYSLFSETINTELLKNLDLAVLELMQSSVDNTKMVSAVLNGMLDQSFRERANQKHQGLKLATTILQHWKKCDSWWAKDSPLETKMAVLALLAKILQIDSSVSFNTSHGSFPEVFTTYISLLADTKLDLHLKGQAVTLLPFFTSLTGGSLEELRRVLEQLIVAHFPMQSREFPPGTPRFNNYVDCMKKFLDALELSQSPMLLELMTEVLCREQQHVMEELFQSSFRRIARRGSCVTQVGLLESVYEMFRKDDPRLSFTRQSFVDRSLLTLLWHCSLDALREFFSTIVVDAIDVLKSRFTKLNESTFDTQITKKMGYYKILDVMYSRLPKDDVHAKESKINQVFHGSCITEGNELTKTLIKLCYDAFTENMAGENQLLERRRLYHCAAYNCAISVICCVFNELKFYQGFLFSEKPEKNLLIFENLIDLKRRYNFPVEVEVPMERKKKYIEIRKEAREAANGDSDGPSYMSSLSYLADSTLSEEMSQFDFSTGVQSYSYSSQDPRPATGRFRRREQRDPTVHDDVLELEMDELNRHECMAPLTALVKHMHRSLGPPQGEEDSVPRDLPSWMKFLHGKLGNPIVPLNIRLFLAKLVINTEEVFRPYAKHWLSPLLQLAASENNGGEGIHYMVVEIVATILSWTGLATPTGVPKDEVLANRLLNFLMKHVFHPKRAVFRHNLEIIKTLVECWKDCLSIPYRLIFEKFSGKDPNSKDNSVGIQLLGIVMANDLPPYDPQCGIQSSEYFQALVNNMSFVRYKEVYAAAAEVLGLILRYVMERKNILEESLCELVAKQLKQHQNTMEDKFIVCLNKVTKSFPPLADRFMNAVFFLLPKFHGVLKTLCLEVVLCRVEGMTELYFQLKSKDFVQVMRHRDDERQKVCLDIIYKMMPKLKPVELRELLNPVVEFVSHPSTTCREQMYNILMWIHDNYRDPESETDNDSQEIFKLAKDVLIQGLIDENPGLQLIIRNFWSHETRLPSNTLDRLLALNSLYSPKIEVHFLSLATNFLLEMTSMSPDYPNPMFEHPLSECEFQEYTIDSDWRFRSTVLTPMFVETQASQGTLQTRTQEGSLSARWPVAGQIRATQQQHDFTLTQTADGRSSFDWLTGSSTDPLVDHTSPSSDSLLFAHKRSERLQRAPLKSVGPDFGKKRLGLPGDEVDNKVKGAAGRTDLLRLRRRFMRDQEKLSLMYARKGVAEQKREKEIKSELKMKQDAQVVLYRSYRHGDLPDIQIKHSSLITPLQAVAQRDPIIAKQLFSSLFSGILKEMDKFKTLSEKNNITQKLLQDFNRFLNTTFSFFPPFVSCIQDISCQHAALLSLDPAAVSAGCLASLQQPVGIRLLEEALLRLLPAELPAKRVRGKARLPPDVLRWVELAKLYRSIGEYDVLRGIFTSEIGTKQITQSALLAEARSDYSEAAKQYDEALNKQDWVDGEPTEAEKDFWELASLDCYNHLAEWKSLEYCSTASIDSENPPDLNKIWSEPFYQETYLPYMIRSKLKLLLQGEADQSLLTFIDKAMHGELQKAILELHYSQELSLLYLLQDDVDRAKYYIQNGIQSFMQNYSSIDVLLHQSRLTKLQSVQALTEIQEFISFISKQGNLSSQVPLKRLLNTWTNRYPDAKMDPMNIWDDIITNRCFFLSKIEEKLTPLPEDNSMNVDQDGDPSDRMEVQEQEEDISSLIRSCKFSMKMKMIDSARKQNNFSLAMKLLKELHKESKTRDDWLVSWVQSYCRLSHCRSRSQGCSEQVLTVLKTVSLLDENNVSSYLSKNILAFRDQNILLGTTYRIIANALSSEPACLAEIEEDKARRILELSGSSSEDSEKVIAGLYQRAFQHLSEAVQAAEEEAQPPSWSCGPAAGVIDAYMTLADFCDQQLRKEEENASVIDSAELQAYPALVVEKMLKALKLNSNEARLKFPRLLQIIERYPEETLSLMTKEVGVFILLGGKELYRT

SEQ ID NO: 780963 - protein, 3360 aa, Homo sapiens
GAFPGPGRAGARAGAGLGGMAGSGAGVRCSLLRLQETLSAADRCGAALAGHQLIRGLGQECVLSSSPAVLALQTSLVFSRDFGLLVFVRKSLNSIEFRECREEILKFLCIFLEKMGQKIAPYSVEIKNTCTSVYTKDRAAKCKIPALDLLIKLLQTFRSSRLMDEFKIGELFSKFYGELALKKKIPDTVLEKVYELLGLLGEVHPSEMINNAENLFRAFLGELKTQMTSAVREPKLPVLAGCLKGLSSLLCNFTKSMEEDPQTSREIFNFVLKAIRPQIDLKRYAVPSAGLRLFALHASQFSTCLLDNYVSLFEVLLKWCAHTNVELKKAALSALESFLKQVSNMVAKNAEMHKNKLQYFMEQFYGIIRNVDSNNKELSIAIRGYGLFAGPCKVINAKDVDFMYVELIQRCKQMFLTQTDTGDDRVYQMPSFLQSVASVLLYLDTVPEVYTPVLEHLVVMQIDSFPQYSPKMQLVCCRAIVKVFLALAAKGPVLRNCISTVVHQGLIRICSKPVVLPKGPESESEDHRASGEVRTGKWKVPTYKDYVDLFRHLLSSDQMMDSILADEAFFSVNSSSESLNHLLYDEFVKSVLKIVEKLDLTLEIQTVGEQENGDEAPGVWMIPTSDPAANLHPAKPKDFSAFINLVEFCREILPEKQAEFFEPWVYSFSYELILQSTRLPLISGFYKLLSITVRNAKKIKYFEGVSPKSLKHSPEDPEKYSCFALFVKFGKEVAVKMKQYKDELLASCLTFLLSLPHNIIELDVRAYVPALQMAFKLGLSYTPLAEVGLNALEEWSIYIDRHVMQPYYKDILPCLDGYLKTSALSDETKNNWEVSALSRAAQKGFNKVVLKHLKKTKNLSSNEAISLEEIRIRVVQMLGSLGGQINKNLLTVTSSDEMMKSYVAWDREKRLSFAVPFREMKPVIFLDVFLPRVTELALTASDRQTKVAACELLHSMVMFMLGKATQMPEGGQGAPPMYQLYKRTFPVLLRLACDVDQVTRQLYEPLVMQLIHWFTNNKKFESQDTVALLEAILDGIVDPVDSTLRDFCGRCIREFLKWSIKQITPQQQEKSPVNTKSLFKRLYSLALHPNAFKRLGASLAFNNIYREFREEESLVEQFVFEALVIYMESLALAHADEKSLGTIQQCCDAIDHLCRIIEKKHVSLNKAKKRRLPRGFPPSASLCLLDLVKWLLAHCGRPQTECRHKSIELFYKFVPLLPGNRSPNLWLKDVLKEEGVSFLINTFEGGGCGQPSGILAQPTLLYLRGPFSLQATLCWLDLLLAALECYNTFIGERTVGALQVLGTEAQSSLLKAVAFFLESIAMHDIIAAEKCFGTGAAGNRTSPQEGERYNYSKCTVVVRIMEFTTTLLNTSPEGWKLLKKDLCNTHLMRVLVQTLCEPASIGFNIGDVQVMAHLPDVCVNLMKALKMSPYKDILETHLREKITAQSIEELCAVNLYGPDAQVDRSRLAAVVSACKQLHRAGLLHNILPSQSTDLHHSVGTELLSLVYKGIAPGDERQCLPSLDLSCKQLASGLLELAFAFGGLCERLVSLLLNPAVLSTASLGSSQGSVIHFSHGEYFYSLFSETINTELLKNLDLAVLELMQSSVDNTKMVSAVLNGMLDQSFRERANQKHQGLKLATTILQHWKKCDSWWAKDSPLETKMAVLALLAKILQIDSSVSFNTSHGSFPEVFTTYISLLADTKLDLHLKGQAVTLLPFFTSLTGGSLEELRRVLEQLIVAHFPMQSREFPPGTPRFNNYVDCMKKFLDALELSQSPMLLELMTEVLCREQQHVMEELFQSSFRRIARRGSCVTQVGLLESVYEMFRKDDPRLSFTRQSFVDRSLLTLLWHCSLDALREFFSTIVVDAIDVLKSRFTKLNESTFDTQITKKMGYYKILDVMYSRLPKDDVHAKESKINQVFHGSCITEGNELTKTLIKLCYDAFTENMAGENQLLERRRLYHCAAYNCAISVICCVFNELKFYQGFLFSEKPEKNLLIFENLIDLKRRYNFPVEVEVPMERKKKYIEIRKEAREAANGDSDGPSYMSSLSYLADSTLSEEMSQFDFSTGVQSYSYSSQDPRPATGRFRRREQRDPTVHDDVLELEMDELNRHECMAPLTALVKHMHRSLGPPQGEEDSVPRDLPSWMKFLHGKLGNPIVPLNIRLFLAKLVINTEEVFRPYAKHWLSPLLQLAASENNGGEGIHYMVVEIVATILSWTGLATPTGVPKDEVLANRLLNFLMKHVFHPKRAVFRHNLEIIKTLVECWKDCLSIPYRLIFEKFSGKDPNSKDNSVGIQLLGIVMANDLPPYDPQCGIQSSEYFQALVNNMSFVRYKEVYAAAAEVLGLILRYVMERKNILEESLCELVAKQLKQHQNTMEDKFIVCLNKVTKSFPPLADRFMNAVFFLLPKFHGVLKTLCLEVVLCRVEGMTELYFQLKSKDFVQVMRHRDDERQKVCLDIIYKMMPKLKPVELRELLNPVVEFVSHPSTTCREQMYNILMWIHDNYRDPESETDNDSQEIFKLAKDVLIQGLIDENPGLQLIIRNFWSHETRLPSNTLDRLLALNSLYSPKIEVHFLSLATNFLLEMTSMSPDYPNPMFEHPLSECEFQEYTIDSDWRFRSTVLTPMFVETQASQGTLQTRTQEGSLSARWPVAGQIRATQQQHDFTLTQTADGRSSFDWLTGSSTDPLVDHTSPSSDSLLFAHKRSERLQRAPLKSVGPDFGKKRLGLPGDEVDNKVKGAAGRTDLLRLRRRFMRDQEKLSLMYARKGVAEQKREKEIKSELKMKQDAQVVLYRSYRHGDLPDIQIKHSSLITPLQAVAQRDPIIAKQLFSSLFSGILKEMDKFKTLSEKNNITQKLLQDFNRFLNTTFSFFPPFVSCIQDISCQHAALLSLDPAAVSAGCLASLQQPVGIRLLEEALLRLLPAELPAKRVRGKARLPPDVLRWVELAKLYRSIGEYDVLRGIFTSEIGTKQITQSALLAEARSDYSEAAKQYDEALNKQDWVDGEPTEAEKDFWELASLDCYNHLAEWKSLEYCSTASIDSENPPDLNKIWSEPFYQETYLPYMIRSKLKLLLQGEADQSLLTFIDKAMHGELQKAILELHYSQELSLLYLLQDDVDRAKYYIQNGIQSFMQNYSSIDVLLHQSRLTKLQSVQALTEIQEFISFISKQGNLSSQVPLKRLLNTWTNRYPDAKMDPMNIWDDIITNRCFFLSKIEEKLTPLPEDNSMNVDQDGDPSDRMEVQEQEEDISSLIRSCKFSMKMKMIDSARKQNNFSLAMKLLKELHKESKTRDDWLVSWVQSYCRLSHCRSRSQGCSEQVLTVLKTVSLLDENNVSSYLSKNILAFRDQNILLGTTYRIIARCR

SEQ ID NO: 780964 - protein, 1488 aa, Homo sapiens
GAFPGPGRAGARAGAGLGGMAGSGAGVRCSLLRLQETLSAADRCGAALAGHQLIRGLGQECVLSSSPAVLALQTSLVFSRDFGLLVFVRKSLNSIEFRECREEILKFLCIFLEKMGQKIAPYSVEIKNTCTSVYTKDRAAKCKIPALDLLIKLLQTFRSSRLMDEFKIGELFSKFYGELALKKKIPDTVLEKVYELLGLLGEVHPSEMINNAENLFRAFLGELKTQMTSAVREPKLPVLAGCLKGLSSLLCNFTKSMEEDPQTSREIFNFVLKAIRPQIDLKRYAVPSAGLRLFALHASQFSTCLLDNYVSLFEVLLKWCAHTNVELKKAALSALESFLKQVSNMVAKNAEMHKNKLQYFMEQFYGIIRNVDSNNKELSIAIRGYGLFAGPCKVINAKDVDFMYVELIQRCKQMFLTQTDTGDDRVYQMPSFLQSVASVLLYLDTVPEVYTPVLEHLVVMQIDSFPQYSPKMQLVCCRAIVKVFLALAAKGPVLRNCISTVVHQGLIRICSKPVVLPKGPESESEDHRASGEVRTGKWKVPTYKDYVDLFRHLLSSDQMMDSILADEAFFSVNSSSESLNHLLYDEFVKSVLKIVEKLDLTLEIQTVGEQENGDEAPGVWMIPTSDPAANLHPAKPKDFSAFINLVEFCREILPEKQAEFFEPWVYSFSYELILQSTRLPLISGFYKLLSITVRNAKKIKYFEGVSPKSLKHSPEDPEKYSCFALFVKFGKEVAVKMKQYKDELLASCLTFLLSLPHNIIELDVRAYVPALQMAFKLGLSYTPLAEVGLNALEEWSIYIDRHVMQPYYKDILPCLDGYLKTSALSDETKNNWEVSALSRAAQKGFNKVVLKHLKKTKNLSSNEAISLEEIRIRVVQMLGSLGGQINKNLLTVTSSDEMMKSYVAWDREKRLSFAVPFREMKPVIFLDVFLPRVTELALTASDRQTKVAACELLHSMVMFMLGKATQMPEGGQGAPPMYQLYKRTFPVLLRLACDVDQVTRQLYEPLVMQLIHWFTNNKKFESQDTVALLEAILDGIVDPVDSTLRDFCGRCIREFLKWSIKQITPQQQEKSPVNTKSLFKRLYSLALHPNAFKRLGASLAFNNIYREFREEESLVEQFVFEALVIYMESLALAHADEKSLGTIQQCCDAIDHLCRIIEKKHVSLNKAKKRRLPRGFPPSASLCLLDLVKWLLAHCGRPQTECRHKSIELFYKFVPLLPGNRSPNLWLKDVLKEEGVSFLINTFEGGGCGQPSGILAQPTLLYLRGPFSLQATLCWLDLLLAALECYNTFIGERTVGALQVLGTEAQSSLLKAVAFFLESIAMHDIIAAEKCFGTGAAGNRTSPQEGERYNYSKCTVVVRIMEFTTTLLNTSPEGWKLLKKDLCNTHLMRVLVQTLCEPASIGFNIGDVQVMAHLPDVCVNLMKALKMSPYKDILETHLREKITAQRWVLGSQSGTCCPGISGPSMLPCSCSCSCFLREGLYQWDVCCQ

SEQ ID NO: 780965 - protein, 828 aa, Homo sapiens
GAFPGPGRAGARAGAGLGGMAGSGAGVRCSLLRLQETLSAADRCGAALAGHQLIRGLGQECVLSSSPAVLALQTSLVFSRDFGLLVFVRKSLNSIEFRECREEILKFLCIFLEKMGQKIAPYSVEIKNTCTSVYTKDRAAKCKIPALDLLIKLLQTFRSSRLMDEFKIGELFSKFYGELALKKKIPDTVLEKVYELLGLLGEVHPSEMINNAENLFRAFLGELKTQMTSAVREPKLPVLAGCLKGLSSLLCNFTKSMEEDPQTSREIFNFVLKAIRPQIDLKRYAVPSAGLRLFALHASQFSTCLLDNYVSLFEVLLKWCAHTNVELKKAALSALESFLKQVSNMVAKNAEMHKNKLQYFMEQFYGIIRNVDSNNKELSIAIRGYGLFAGPCKVINAKDVDFMYVELIQRCKQMFLTQTDTGDDRVYQMPSFLQSVASVLLYLDTVPEVYTPVLEHLVVMQIDSFPQYSPKMQLVCCRAIVKVFLALAAKGPVLRNCISTVVHQGLIRICSKPVVLPKGPESESEDHRASGEVRTGKWKVPTYKDYVDLFRHLLSSDQMMDSILADEAFFSVNSSSESLNHLLYDEFVKSVLKIVEKLDLTLEIQTVGEQENGDEAPGVWMIPTSDPAANLHPAKPKDFSAFINLVEFCREILPEKQAEFFEPWVYSFSYELILQSTRLPLISGFYKLLSITVRNAKKIKYFEGVSPKSLKHSPEDPEKYSCFALFVKFGKEVAVKMKQYKDELLASCLTFLLSLPHNIIELDVRAYVPALQMAFKLGLSYTPLAEVGLNALEEWSIYIDRHVMQPYYKDILPCLDGYLKTSALSGNV

SEQ ID NO: 780966 - protein, 96 aa, Homo sapiens
VGLTGKPLSVVPGKDVCGRCLPRKSLEISLQGWSAGKLPPPPPLPEVNRPQGDAPMGASHQNPSAPVSLQRPLLAKLDMASAGKGETLLSSQAEQC

SEQ ID NO: 780967 - protein, 76 aa, Homo sapiens
TSPVHPRTGRNVRRRLLLPCFSLLLVRSLNTLGAVPQLSFREPLAHFCTVTVTPLWAHRAALCFAALPTYSQFVKK

SEQ ID NO: 780968 - protein, 91 aa, Homo sapiens
VTLWLHFCLWGPSTRDTGTLLQSMGICSLPGTALGSSGMEEASLGGSHYFLRSRRFSLLPASTSPGVPASRLHHPAASFSLLGTFGKRHRN

SEQ ID NO: 780969 - protein, 79 aa, Homo sapiens
MLCPRLWHWAAPEAQEERDSPQHRLSTGEQRNQTLPLSLLEGRSEHPCPPNPCHAFLSPRRGHGIVLEPQHWSDSDSHS

SEQ ID NO: 780970 - protein, 75 aa, Homo sapiens
FRFHPEHFLDAQGHFVKLEAFLPFSAGRRACLGEPLARIELFLFFTSLLQHFSFSVPTGQPRPSHSRVVGFLVTP

SEQ ID NO: 780971 - protein, 80 aa, Homo sapiens
ICTQAKESGPGHLPHSPQKEPITAWESECRMKERESRCGRGLKLHHGERHTVTTKSEGQRRAGGCRCDRTWSIGVVMSCR

SEQ ID NO: 780972 - protein, 230 aa, Homo sapiens
MRPFSEETLATVDYSVTAQYDAGLLHREHVLTPKPCGALMYRHHHPITRAGTMAEIPQAPQTKGLAAARRASRALLTHTMRPIHRPCPRQSNDTHARSCNHYPRSCTTDLTRNTMPTTPKPPLATAPSTPTPPSPHADPAPPPPTCRGNRDPTTPPAPLDSSTPPHVCPQPTPPPPFAGDDPLSAITRHYDQNRVHHGLPRLNQHSIGNSYITLADPIHAALPHHTPPLS

SEQ ID NO: 780973 - protein, 65 aa, Homo sapiens
RLTCPEVCVSEIGSYATVSACISASSCYIRKLNTESPCNWRTSRRPSLWFFVSGWDGVGCGLQAA

SEQ ID NO: 780974 - protein, 98 aa, Homo sapiens
TDSGGRELQGQIPEPSEGDSGNQLLSGGQSLEPWGRSRVQQRGCCPPWLALPLALAPAPGKCKAQERHHKALGCPSCTFLRWQAGDASMSLHPRKMLC

SEQ ID NO: 780975 - protein, 44 aa, Homo sapiens
EGRCVSIIFMRAGGGTSALRCLGSKAWNPAVQRNVGDVASGAEM

SEQ ID NO: 780976 - protein, 50 aa, Homo sapiens
MSSSCDPACSAKARGAAAVTEERETPERNLVQRNPDSNSSDISPESFLNS

SEQ ID NO: 780977 - protein, 72 aa, Homo sapiens
QVAWPALTQMHAAQRLVPDLAMACSVGWLAARQEGGPPVCLASHTSSRMLANTCLSSSFGQERKFTGTESEG

SEQ ID NO: 780978 - protein, 56 aa, Homo sapiens
YTSKYVLSEESKSPTRAKFPRQPSSEGTQVWSGDLMGCLEVSDSSDAPETTQKSSA

SEQ ID NO: 780979 - protein, 135 aa, Homo sapiens
MRRCAAWTHTHTRICCLDAHTCRYGIRTHTCTDMLPGHTDNAALTHTCTDIAWTHTHTRVHRYAVWTRTHMQICCLDTHFQTHVHRRRYAAWTHADMLSSHTHTQTCCPDTHTHAQICCPDTHTHADMLPGHTHR

SEQ ID NO: 780980 - protein, 504 aa, Homo sapiens
MTPSPLLLLLLPPLLLGAFPPAAAARGPPKMADKVVPRQVARLGRTVRLQCPVEGDPPPLTMWTKDGRTIHSGWSRFRVLPQGLKVKQVEREDAGVYVCKATNGFGSLSVNYTLVVLDDISPGKESLGPDSSSGGQEDPASQQWARPRFTQPSKMRRRVIARPVGSSVRLKCVASGHPRPDITWMKDDQALTRPEAAEPRKKKWTLSLKNLRPEDSGKYTCRVSNRAGAINATYKVDVIQRTRSKPVLTGTHPVNTTVDFGGTTSFQCKVRSDVKPVIQWLKRVEYGAEGRHNSTIDVGGQKFVVLPTGDVWSRPDGSYLNKLLITRARQDDAGMYICLGANTMGYSFRSAFLTVLPDPKPPGPPVASSSSATSLPWPVVIGIPAGAVFILGTLLLWLCQAQKKPCTPAPAPPLPGHRPPGTARDRSGDKDLPSLAALSAGPGVGLCEEHGSPAAPQHLLGPGPVAGPKLYPKLYTDIHTHTHTHSHTHSHVEGKVHQHIHYQC

SEQ ID NO: 780981 - protein, 490 aa, Homo sapiens
KAVPVRDYGIAPSPPKMADKVVPRQVARLGRTVRLQCPVEGDPPPLTMWTKDGRTIHSGWSRFRVLPQGLKVKQVEREDAGVYVCKATNGFGSLSVNYTLVVLDDISPGKESLGPDSSSGGQEDPASQQWARPRFTQPSKMRRRVIARPVGSSVRLKCVASGHPRPDITWMKDDQALTRPEAAEPRKKKWTLSLKNLRPEDSGKYTCRVSNRAGAINATYKVDVIQRTRSKPVLTGTHPVNTTVDFGGTTSFQCKVRSDVKPVIQWLKRVEYGAEGRHNSTIDVGGQKFVVLPTGDVWSRPDGSYLNKLLITRARQDDAGMYICLGANTMGYSFRSAFLTVLPDPKPPGPPVASSSSATSLPWPVVIGIPAGAVFILGTLLLWLCQAQKKPCTPAPAPPLPGHRPPGTARDRSGDKDLPSLAALSAGPGVGLCEEHGSPAAPQHLLGPGPVAGPKLYPKLYTDIHTHTHTHSHTHSHVEGKVHQHIHYQC

SEQ ID NO: 780982 - protein, 350 aa, Homo sapiens
MRRRVIARPVGSSVRLKCVASGHPRPDITWMKDDQALTRPEAAEPRKKKWTLSLKNLRPEDSGKYTCRVSNRAGAINATYKVDVIQRTRSKPVLTGTHPVNTTVDFGGTTSFQCKVRSDVKPVIQWLKRVEYGAEGRHNSTIDVGGQKFVVLPTGDVWSRPDGSYLNKLLITRARQDDAGMYICLGANTMGYSFRSAFLTVLPDPKPPGPPVASSSSATSLPWPVVIGIPAGAVFILGTLLLWLCQAQKKPCTPAPAPPLPGHRPPGTARDRSGDKDLPSLAALSAGPGVGLCEEHGSPAAPQHLLGPGPVAGPKLYPKLYTDIHTHTHTHSHTHSHVEGKVHQHIHYQC

SEQ ID NO: 780983 - protein, 584 aa, Homo sapiens
MTPSPLLLLLLPPLLLGAFPPAAAARGPPKMADKVVPRQVARLGRTVRLQCPVEGDPPPLTMWTKDGRTIHSGWSRFRVLPQGLKVKQVEREDAGVYVCKATNGFGSLSVNYTLVVLDDISPGKESLGPDSSSGGQEDPASQQWARPRFTQPSKMRRRVIARPVGSSVRLKCVASGHPRPDITWMKDDQALTRPEAAEPRKKKWTLSLKNLRPEDSGKYTCRVSNRAGAINATYKVDVIQRTRSKPVLTGTHPVNTTVDFGGTTSFQCKVRSDVKPVIQWLKRVEYGAEGRHNSTIDVGGQKFVVLPTGDVWSRPDGSYLNKLLITRARQDDAGMYICLGANTMGYSFRSAFLTVLPGARLPRHATPCWCPDPPPGPGVPPTGWGPTLPSRAVLARSSAEGGQPRGTVSTAPGMGLGCSPGLCVGVPLPTSFPLALADPKPPGPPVASSSSATSLPWPVVIGIPAGAVFILGTLLLWLCQAQKKPCTPAPAPPLPGHRPPGTARDRSGDKDLPSLAALSAGPGVGLCEEHGSPAAPQHLLGPGPVAGPKLYPKLYTDIHTHTHTHSHTHSHVEGKVHQHIHYQC

SEQ ID NO: 780984 - protein, 497 aa, Homo sapiens
MTPSPLLLLLLPPLLLGAFPPAAAARGPPKMADKVVPRQVARLGRTVRLQCPVEGDPPPLTMWTKDGRTIHSGWSRFRVLPQGLKVKQVEREDAGVYVCKATNGFGSLSVNYTLVVLDDISPGKESLGPDSSSGGQEDPASQQWARPRFTQPSKMRRRVIARPVGSSVRLKCVASGHPRPDITWMKDDQALTRPEAAEPRKKKWTLSLKNLRPEDSGKYTCRVSNRAGAINATYKVDVIQRTRSKPVLTGTHPVNTTVDFGGTTSFQCKVRSDVKPVIQWLKRVEYGAEGRHNSTIDVGGQKFVVLPTGDVWSRPDGSYLNKLLITRARQDDAGMYICLGANTMGYSFRSAFLTVLPDPKPPGPPVASSSSATIGIPAGAVFILGTLLLWLCQAQKKPCTPAPAPPLPGHRPPGTARDRSGDKDLPSLAALSAGPGVGLCEEHGSPAAPQHLLGPGPVAGPKLYPKLYTDIHTHTHTHSHTHSHVEGKVHQHIHYQC

SEQ ID NO: 780985 - protein, 123 aa, Homo sapiens
MRDFPCSTVTPPTLPASVPASVPASIPASVPWPWRLFLPPALGAQESPTAVGWGWGHSSPKPERLEPMASGSSPLHSPPDTEKGPWYLYLRNEDNINNDGRKTGLQGLWSLLGPGTRLVFQPC

SEQ ID NO: 780986 - protein, 504 aa, Homo sapiens; identical to SEQ ID NO: 780980

SEQ ID NO: 780987 - protein, 290 aa, Homo sapiens
MTPSPLLLLLLPPLLLGAFPPAAAARGPPKMADKVVPRQVARLGRTVRLQCPVEGDPPPLTMWTKDGRTIHSGWSRFRVLPQGLKVKQVEREDAGVYVCKATNGFGSLSVNYTLVVLDDISPGKESLGPDSSSGGQEDPASQQWARPRFTQPSKMRRRVIARPVGSSVRLKCVASGHPRPDITWMKDDQALTRPEAAEPRKKKWTLSLKNLRPEDSGKYTCRVSNRAGAINATYKVDVIQRTRSKPVLTGTHPVNTTVGAGKRLLPQTTAVSWGTGGVLSDPQWGILLER

SEQ ID NO: 780988 - protein, 504 aa, Homo sapiens; identical to SEQ ID NO: 780980

SEQ ID NO: 780989 - protein, 504 aa, Homo sapiens; identical to SEQ ID NO: 780980

SEQ ID NO: 780990 - protein, 504 aa, Homo sapiens; identical to SEQ ID NO: 780980

SEQ ID NO: 780991 - protein, 78 aa, Homo sapiens
STWVFLLLHFSLFISFYKCKLIYEEASSPSRETISSGLSVFHSGYLSIHHLTQTVGTVFYGITSTDDSVVPQHTYCCF

SEQ ID NO: 780992 - protein, 623 aa, Homo sapiens
MAAGETQLYAKVSNKLKSRSSPSLLEPLLAMGFPVHTALKALAATGRKTAEEALAWLHDHCNDPSLDDPIPQEYALFLCPTGPLLEKLQEFWRESKRQCAKNRAHEVFPHVTLCDFFTCEDQKVECLYEALKRAGDRLLGSFPTAVPLALHSSISYLGFFVSGSPADVIREFAMTFATEASLLADCSVKPCTKQLHLTLAHKFYPHHQRTLEQLARAIPLGHSCQWTAALYSRDMRFVHYQTLRALFQYKPQNVDELTLSPGDYIFVDPTQQDEASEGWVIGISQRTGCRGFLPENYTDRASESDTWVKHRMYTFSLATDLNSRKDGEASSRCSGEFLPQTARSLSSLQALQATVARKSVLVVRHGERVDQIFGKAWLQQCSTPDGKYYRPDLNFPCSLPRRSRGIKDFENDPPLSSCGIFQSRIAGDALLDSGIRISSVFASPALRCVQTAKLILEELKLEKKIKIRVEPGIFEWTKWEAGKTTPTLMSLEELKEANFNIDTDYRPAFPLSALMPAESYQEYMDRCTASMVQIVNTCPQDTGVILIVSHGSTLDSCTRPLLGLPPRECGDFAQLVRKIPSLGMCFCEENKEEGKWELVNPPVKTLTHGANAAFNWRNWISGN

SEQ ID NO: 780993 - protein, 46 aa, Homo sapiens [sequence omitted]

SEQ ID NO: 780994 - protein, 661 aa, Homo sapiens
MAAGETQLYAKVSNKLKSRSSPSLLEPLLAMGFPVHTALKALAATGRKTAEEALAWLHDHCNDPSLDDPIPQEYALFLCPTGPLLEKLQEFWRESKRQCAKNRAHEVFPHVTLCDFFTCEDQKVECLYEALKRAGDRLLGSFPTAVPLALHSSISYLGFFVSGSPADVIREFAMTFATEASLLAGTSVSRFWIFSQVPGHGPNLRLSNLTRASFVSHYILQKYCSVKPCTKQLHLTLAHKFYPHHQRTLEQLARAIPLGHSCQWTAALYSRDMRFVHYQTLRALFQYKPQNVDELTLSPGDYIFVDPTQQDEASEGWVIGISQRTGCRGFLPENYTDRASESDTWVKHRMYTFSLATDLNSRKDGEASSRCSGEFLPQTARSLSSLQALQATVARKSVLVVRHGERVDQIFGKAWLQQCSTPDGKYYRPDLNFPCSLPRRSRGIKDFENDPPLSSCGIFQSRIAGDALLDSGIRISSVFASPALRCVQTAKLILEELKLEKKIKIRVEPGIFEWTKWEAGKTTPTLMSLEELKEANFNIDTDYRPAFPLSALMPAESYQEYMDRCTASMVQIVNTCPQDTGVILIVSHGSTLDSCTRPLLGLPPRECGDFAQLVRKIPSLGMCFCEENKEEGKWELVNPPVKTLTHGANAAFNWRNWISGN

SEQ ID NO: 780995 - protein, 311 aa, Homo sapiens
MAAGETQLYAKVSNKLKSRSSPSLLEPLLAMGFPVHTALKALAATGRKTAEEALAWLHDHCNDPSLDDPIPQEYALFLCPTGPLLEKLQEFWRESKRQCAKNRAHEVFPHVTLCDFFTCEDQKVECLYEALKRAGDRLLGSFPTAVPLALHSSISYLGFFVSGSPADVIREFAMTFATEASLLADCSVKPCTKQLHLTLAHKFYPHHQRTLEQLARAIPLGHSCQWTAALYSRDMRFVHYQTLRALFQYKPQNVDELTLSPGDYIFVDPTQQDEASEGWVIGISQRTGCRGFLPENYTDRASESDTWVKHR

SEQ ID NO: 780996 - protein, 142 aa, Homo sapiens [sequence omitted]

SEQ ID NO: 780997 - protein, 151 aa, Homo sapiens
FCLLQPVQAQNVLNSASPGRAHPPSASTGPSPASQQPPLVQLLLSCLAASVGHRVLKVKLSRPTFGLPAASAIKLFPHCGHRKPSFSLPHSILRKLSICLTVASPGHESACLPGSCCLTMVSLGPALAKRQTLQAQLLPPGRLCRPKFSKS

SEQ ID NO: 780998 - protein, 66 aa, Homo sapiens
PTNNFSLLFGLCLRASVLKILASGFQTSRLCSEPNPCWMVAHFITQKPQLLLVLGLMLCSFFGQLN

SEQ ID NO: 780999 - protein, 235 aa, Homo sapiens
MANPLTAGSLELSESDNFQTSHVLPSTRYILEKKRRRKKMKKMKMKKKMMMMNKLVLAQFFFLVYKAFNPPVHNSLLLKKKIEMKGCVRFVFKLYSVFFGIVNTLPNVSLDSPVLVVFSIATNLAWYSMGVVNWHGNLKQVLVGAQHKLVIYGDGSFFIFIVSDAAYTKYWSSWLTEYHSANLQTQPRHHSRREHTFVGPIWPPAEKAFKKTMACEPGGPRGNMNLGAEGVPTGI

SEQ ID NO: 781000 - protein, 108 aa, Homo sapiens
MQFLISVKGPPGVQQQADLRTKVKWWQSAGPDVRSLQFALDNNNPQVTLRKVISVSPLVNNEHLPRLIFTGPKGRWWRTTESKVIQKLIPGEDFSIQNLQLMTGVKVW

SEQ ID NO: 781001 - protein, 106 aa, Homo sapiens
WADRGIHHPPGIPPIPPFTFPPLPLPLLAYKLAGVVGVNQRGIMSQHPQQEVHLMKSCVIYFLGEVGARRIWDPHLLASSEWLPCAKKENSRQTGTQAPAPMPQPL

SEQ ID NO: 781002 - protein, 37 aa, Homo sapiens
MNEKSDSNEQDESVPEEMPYACKNNFMLKALPEIIHN

SEQ ID NO: 781003 - protein, 89 aa, Homo sapiens
REHPPTRSQPQGSTDPQGSTLDHFRKILNLSVGQGAPGGTHTGLLPDGKWPQRAWGREDFCKAVSPQHSLGKPCVPSAINLHLLKVYAP

SEQ ID NO: 781004 - protein, 119 aa, Homo sapiens
GSGIIAEGPLRPQFLSGTINKLAIRTVKLNQHAPIQIRDYFLRIATEHRRQKSNSFMRSTSYITHSYTSKMVLSVIVVHIHTCTYTHTYVRTHVHTDTKLKVLLILNDQIQLFVVGSGR

SEQ ID NO: 781005 - protein, 83 aa, Homo sapiens
THACADAWVDPRVGDSSSPTGLQLETWHSLKCFVAADNLQFTIFGLVFIVHQNLAHIGIYWTARLMQSISASSFPVSMHLLYA

SEQ ID NO: 781006 - protein, 60 aa, Homo sapiens
MAVGKASLGSTLPGAGHACLRGSWLQGSEGPHAQPQEGLPISALATSWCSLVRRGFLGCT

SEQ ID NO: 781007 - protein, 167 aa, Homo sapiens
AAGRWAEGVRTPRTAMPGDHRRIRGPEESQPPQLYAADEEEAPGTRDPTRLRPVYARAGLLSQAKGSAYLEAGGTKVLCAVSGPRQAEGGERGGGPAGAGGEAPAALRGRLLCDFRRAPFAGRRRRAPPGGCEERELALALQEALEPAVRLGRYPRAQLEVGAAAQP

SEQ ID NO: 781008 - protein, 239 aa, Homo sapiens
AAGRWAEGVRTPRTAMPGDHRRIRGPEESQPPQLYAADEEEAPGTRDPTRLRPVYARAGLLSQAKGSAYLEAGGTKVLCAVSGPRQAEGGERGGGPAGAGGEAPAALRGRLLCDFRRAPFAGRRRRAPPGGCEERELALALQEALEPAVRLGRYPRAQLEVSALLLEDGGSALAAALTAAALALADAGVEMYDLVVGCGLSLAPGPAPTWLLDPTRLEEERAAAGLTVALMPVLNQVAG

SEQ ID NO: 781009 - protein, 121 aa, Homo sapiens
DKKRSPGSGSTMRLVFSRFSIVPHSIPGASLMPAACWRASEGQSATGTVWRGLAANPGWLCLSGARGAQLFSVSPGAEAGRWADGQGQASERLEEAVRVWAGPLHHRAPRSRIQFSKHSAE

SEQ ID NO: 781010 - protein, 102 aa, Homo sapiens
GILYENELFQTQTIYLFIYLFMTDRVLLCSPGWGALIMAHCSHNLPGSSSLPTSVSQVARTTTPSQGQFLKQVWAIQIVLPEFFQNARITGLSHRTRPKLLF

SEQ ID NO: 781011 - protein, 108 aa, Homo sapiens
MTIPFLSWRLGLGGLSELIFCCEYLWDNFTSSPPLALRSLDVSGGSWKPPAGVPGLALPFCLLPALLTHLHMPPRLPYRIHPISLKQVFGKLCGAEGKSRSLVFHMFP

SEQ ID NO: 781012 - protein, 289 aa, Homo sapiens
WSQLELPRPCEQVAGVPSCIGERAVLKAKVIFGGRTGRLIKSGKFCTKLSCAAQSRTRVQWRPVPTLSRLTSAGARLGNLAGKASQVPSASHPLPLTSRGGREEPPSSSQKGLDRGSSSQGHLLCLLPRAHLSSGSSRPTMDSAAKDEMQPALSPGPEWPEQERAEQLARGAALKWASGIFYRPEQLARLGQYRSREVQRTCSLESRLKAGNDGELELGPEADVSQLEPLLTLENIEQLEATFVANIQASVSQWLQNALDGEVAEWGREHGPNTDPSGSYYSPMPAIVL

SEQ ID NO: 781013 - protein, 226 aa, Homo sapiens
MDSAAKDEMQPALSPGPEWPEQERAEQLARGAALKWASGIFYRPEQLARLGQYRSREVQRTCSLESRLKSVMQSYLEGVQTGVWQLAQAIEVVQGTREALSQARGLLQGMSQALQTLEPLRERVAQHKQLQALSHLLPRLRAVPAAVSHTQTLIDGQQFLEAYVSLRELEQLREDTWAPLGGLELPVFQGLDLLFEALGQAVEAAAGAAGKLAREDPALLVAAVRV

SEQ ID NO: 781014 - protein, 228 aa, Homo sapiens
RKCTSLLMHKNSWAPLETERHGKPGLLRRKLVVGWKGKGEHLSLLVDVEAPKIRGPGDSCLPASHCHLPLPGTSLFQHQSSTSFQEALEDRAKWLGAVAHASTPSTLGGRGRRITRSCPSTFQKKKKRGSQTRRTLKPQPQQLQQNLPKGHETTGHTYERVLQQQGSQERSPGLMSEDSNLHYADIQVCSRPHAREVKHVHLENATEYATLRFPQATPRYDSKNGTLV

SEQ ID NO: 781015 - protein, 123 aa, Homo sapiens
MGNRVCCGGSWSCPSTFQKKKKRGSQTRRTLKPQPQQLQQNLPKGHETTGHTYERVLQQQGSQERSPGLMSEDSNLHYADIQVCSRPHAREVKHVHLENATEYATLRFPQATPRYDSKNGTLV

SEQ ID NO: 781016 - protein, 38 aa, Homo sapiens
MPCCTCDKCHFFFFVKKRSGSFSCAITEQQMRFFLPPN

SEQ ID NO: 781017 - protein, 122 aa, Homo sapiens
RQAKPASGGLFHRHSFIGWCQVAGPHRHFTLEMEDGCCFCYNLLFPLFCMILNSPLPDLPASFSCCHLLPAIVTSPLDTPVAVISRTARNPLASNSRYPSTSPAGRPSAFLLLHWVCVARLP

SEQ ID NO: 781018 - protein, 72 aa, Homo sapiens
ADRRLWRLQAHEQQRNNLWGGLGDLGLHSFLGKLRRCVPEDCQLIPLHTQYCGILGYSLSLLMAQSYALDKD

SEQ ID NO: 781019 - protein, 114 aa, Homo sapiens
VTKNAVPSLCNMGKNSVLGQNRAEKEECEQTAWTSHYLLKSSCGWGGFGRALMVSHLATAEATFLKQSLMEAKVSVEEAVLRQALAQHTGRLGDSWMSEGRRLPPGTPSHFGAH

SEQ ID NO: 781020 - protein, 306 aa, Homo sapiens
MGTPAEGGIYHGKGRAGRLGSQFHPRTGCLARPAAGGDVLSRERWPLETCGQKGKRSGLWWGPAWGGVGQGQLPFLHAGEEMLCACEKAFDSMPKVSSIMCVSSVDQVRTLVLCECAHADRSGGAPSLCPHAAEPRGSPAPQACGSAAKCVRCASWVLLCALSYGDTGGVGLDRYRSDYGDTGGVRLDRYRSDYGGTGGVGLDRYRSDYGGTGGVGLDRYRSDYGGTGGVGLDRYRSDYGGTGGVGLDRYRSDYGGTGSVGLDRYRSDYGGTGGVGLDRYRSDYGGTGGVGLDRYRSDYGDTGGVG

SEQ ID NO: 781021 - protein, 218 aa, Homo sapiens
MGTPAEGGIYHGKGRAGRLGSQFHPRTGCLARPAAGGDVLSRERWPLETCGQKGKRSGLWWGPAWGGVGQGQLPFLHAGEEMLCACEKAFDSMPKVSSIMCVSSVDQVRTLVLCECAHADRSGGAPSLCPHAAEPRGSPAPQACGSAAKCVRCASWVLLCALSYGDTGGVGLDRYRSDYGDTGGVRLDRYRSDYGGTGGVGLDRYRSDYGVKLPVGIL

SEQ ID NO: 781022 - protein, 119 aa, Homo sapiens
CGLCWQDKVLRGRLTLHHGQLLCLRRTADLLFCRHHAEAEKKVVTCKMVSSLRQDPQMHGAAPRVEWRHERLGLMWEAVHARGGGGFSEQKSPGQTLNSLHFLDRNTIGMGKAGFKAEV

SEQ ID NO: 781023 - protein, 52 aa, Homo sapiens
RCYLDPLPLTQRDALRKTHNKGPTILLPGVHILSPCCPLPACLEIFAAKMWS

SEQ ID NO: 781024 - protein, 60 aa, Homo sapiens
YLEDPAPRRTAEGDNAESASKLRPRPLGRQRHSTTRQRGHLHGYTATSDTLDQALQKWNW

SEQ ID NO: 781025 - protein, 55 aa, Homo sapiens
MLETQKETLHRTAEVDGAALQTAGAGTLGEMREEGQEGLGAANIGGDLRGEHKGS

SEQ ID NO: 781026 - protein, 120 aa, Homo sapiens [sequence omitted]

SEQ ID NO: 781027 - protein, 121 aa, Homo sapiens
WKVPFHSVQRDLDWSFLDLREEWGEVVSARKLLGGLAVTEHVVTAPGWARLGAAVTATAQSPSALSLEMASPSVQVAVGFDLTGVGADEEVQATQGLGFLSCSELFALLWKLRSSDPLPLV

SEQ ID NO: 781028 - protein, 48 aa, Homo sapiens
MRFAKKHNKKGLKKMQANNAKAMSARAEAIKALVKPKEVKPKIPKGVS

SEQ ID NO: 781029 - protein, 101 aa, Homo sapiens
  misc_feature (39)..(39): Xaa can be any naturally occurring amino acid
  misc_feature (43)..(43): Xaa can be any naturally occurring amino acid
  misc_feature (49)..(49): Xaa can be any naturally occurring amino acid
  misc_feature (58)..(59): Xaa can be any naturally occurring amino acid
  misc_feature (62)..(62): Xaa can be any naturally occurring amino acid
  misc_feature (65)..(65): Xaa can be any naturally occurring amino acid
GWEFLDKGRPLFTSSFTSTHSEIFWLWEVLTVAGKTASXLLEXTMVEGXSQDPSLALXXLSXGCXLYFRSPPLLVPLHSHSFFLFSSLSQQVFYVITGTAW

SEQ ID NO: 781030 - protein, 37 aa, Homo sapiens
MVSQSLFGAGVVVSVQPGLGSLPMTRKNKTYRHQRVS

SEQ ID NO: 781031 - protein, 122 aa, Homo sapiens
IAELKKSQAQDKAKLLEMQESIKDLSAIRADLANKLAEEERAKKAVLKDLSDLTAQAKSRDEETATIITQLKLERDVHQRELKDLTSSLQSVKTKHEQNIQELMKHFKKEKSEAENHIRTLK

SEQ ID NO: 781032 - protein, 144 aa, Homo sapiens
STSCLLVRLPLPQEPLPSSLSLHSEQFIHSADIYCILSMKVWEAFIMHHYILGITLLQLPFLLFFLNAGVLEILTCQLALLYLFLHATPQSFNEHLSYTTENPALNASSPLFVVPIPPSTISILPFTQHNPESSQCALFSIYSS

SEQ ID NO: 781033 - protein, 68 aa, Homo sapiens
YNLKFSSSVALTTFQVSSDHMCPAATISDSTKNISIITEQQNLTLKIFRLRYNSSEKNGKKTFHSLSS

SEQ ID NO: 781034 - protein, 102 aa, Homo sapiens
LTLLNSSNPPASNSQSVGITGVSYRTRPCSYYLFVCLFVLRQSLTLSPGLECNGSISAHCKLCLLGSHHAPASATQVAGTTGTCHHAQLIFCIFSRDGVLPY

SEQ ID NO: 781035 - protein, 75 aa, Homo sapiens
LSTFSEHSCEPWISILQNFRVLRNAVSIPTGCYGIIMKTSRPVLVCFKRGALSNPPRTLVARRGCCGNRSWPGWP

SEQ ID NO: 781036 - protein, 89 aa, Homo sapiens
GETAACSLSSKVSNQSASRGAPVPSSPGVATTKHRQPGGWNNGHSLSYRSGGQKFQIQVLARLVPLEAARETVPSPSPGFWWLLTIWRS

SEQ ID NO: 781037 - protein, 104 aa, Homo sapiens
SSPLKRTGSFWPQGLCRPPMQEQKFPSSLLMEFDLVEVSTLSPQPRALGSGSCLAKTPALDWLRYQHIMQHWPERHEWMFAGGLWEKISLLYMRVHAHTHTLLL

SEQ ID NO: 781038 - protein, 120 aa, Homo sapiens
VPLGNEDIAIFLLRHGAYFCSYILLDSPDPSKHLLRKYFIEASPLPSSYPGKTALRVKWSHLRLPWVDLDWLIDISCQITELDLSANCLATLPSVIPWGLINLRKLNLSDNHLGELPGVQ

SEQ ID NO: 781039 - protein, 114 aa, Homo sapiens
TLTSSLNHGSVPKTNKIEEIFSTDLVPGDVMVIPLNGTIMPCDAVLINGTCIVNESMLTGESVPVTKTNLPNPSVDVKGIGDELYNPETHKRHTLFCGTTVIQTRFYTGELVKA

SEQ ID NO: 781040 - protein, 145 aa, Homo sapiens
FRVTDVIEGTEVQFQVRAENEAGVGHPSEPTEILSIEDPTSPPSPPLDLHVTDAGRKHIAIAWKPPEKNGGSPIIGYHVEMCPVGTEKWMRVNSRPIKDLKFKVEEGVVPDKEYVLRVRAVNAIGVSEPSEISENVVAKDPDCKS

SEQ ID NO: 781041 - protein, 134 aa, Homo sapiens
RAGIPAGRARARLPGPPAGGKPDELDWGRPPCAPGGFRLSYSLSPLSFAPSECSRGRSPWPPVPWPPFLPVQTKPSRPPPPPPPYMIAEDPEGCPGGARGLSSDTGRKPGRKWKSVQTHLPSFGNFKKKRDCIN

SEQ ID NO: 781042 - protein, 75 aa, Homo sapiens
SSSHPAILVHREGKRIKTEELFIECDQEVVGGLNESNLSGLMGTKTKMIEKRIMKMDIASIGNSRSLVMKGREIE

SEQ ID NO: 781043 - protein, 160 aa, Homo sapiens
TRQCTLAPAVDSKIPRGGSCSSPSRIFGGLHVSLGFCLFSQRFLLAQSLTLSPRLECSGVILAHCKLHLPDSSESPASASQVAGATDTHHYAWLIFVFLVEMGFHHVGQAGLELLISGDPPASASQSAEITAVSHPMPGCFLYYRVAALAYFEDKLLVIN

SEQ ID NO: 781044 - protein, 162 aa, Homo sapiens
ENWLAICRKLKLDPFPTPYTKINSRWIKDLHVRPKTIKTLEENLGSTIQDIGMGKDFMSKTPKAMAAKAKIDKWDLIKLKSFCTAKETTIRVNRQPTEWEKIFAIYSSDKGLIFSLPSNLQNPANSESIITIIFFYSNIPCAQCTLAGFLPDCGPCIVLSGD

SEQ ID NO: 781045 - protein, 227 aa, Homo sapiens
ALSSSLLVTCCLMVALCSPSIPLEKLAQAPEQPGQEKREHASRDGPGRVNELGRPARDEGGSGRDWKSKSGRGLAGREPWSKLKQAWVSQGGGAKAGDLQVRPRGDTPQAEALAAAAQDAIGPELAPTPEPPEEYVYPDYRGKGCVDESGFVYAIGEKFAPGPSACPCLCTEEGPLCAQPECPRLHPRCIHVDTSQCCPQCKERKNYCEFRGKTYQTLEEFVVRCER

SEQ ID NO: 781046 - protein, 137 aa, Homo sapiens
SDLTTASISVKGDRALPGHCSCALRPPHQEEELACQTKAEKSLCVRSPGGKGGEGSCVNNIHLVSCCYARHTGGIFHTRSFSPGIPVLYNLCLGLCVHFSWGKGHTTSLLYENYRILLFGRLRQENRLNPGGGGCSD

SEQ ID NO: 781047 - protein, 141 aa, Homo sapiens
GASPCSRAFSGFRGGMKEMPSEAGDLLSPTHGPGGSLTTGREEEEWPGLTAPCTADRGKLCINRASVCRGRSSGTSPGVPWSRGPAKCSVTALSLSCTCSHGPGTSELSRRGAAWCRLSPQLFAQFVRLRLARQKEVICFW

SEQ ID NO: 781048 - protein, 235 aa, Homo sapiens
EFPLSPSQCSSFNLAMASAGMQILGVVLTLLGWVNGLVSCALPMWKVTAFIGNSIVVAQVVWEGLWMSCVVQSTGQMQCKVYDSLLALPQDLQAARALCVIALLVALFGLLVYLAGAKCTTCVEEKDSKARLVLTSGIVFVISGVLTLIPVCWTAHAVIRDFYNPLVAEAQKRELGASLYLGWAASGLLLLGGGLLCCTCPSGGSQGPSHYMARYSTSAPAISRGPSEYPTKNYV

SEQ ID NO: 781049 - protein, 1237 aa, Homo sapiens
HCPWNLQGSYCITSSETRHFYITMERFRLEKKLPGPDEEAVVDLGKTSSTVNTKFEKEELESHRAVYIGVHVPFSKESRRRHRHRGHKHHHRRRKDKESDKEDGRESPSYDTPSQRVQFILGTEDDDEEHIPHDLFTEMDELCYRDGEEYEWKETARWLKFEEDVEDGGDRWSKPYVATLSLHSLFELRSCILNGTVMLDMRASTLDEIADMVLDNMIASGQLDESIRENVREALLKRHHHQNEKRFTSRIPLVRSFADIGKKHSDPHLLERNGEGLSASRHSLRTGLSASNLSLRGESPLSLLLGHLLPSSRAGTPAGSRCTTPVPTPQNSPPSSPSISRLTSRSSQESQRQAPELLVSPASDDIPTVVIHPPEEDLEAALKGEEQKNEENVDLTPGILASPQSAPGNLDNSKSGEIKGNGSGGSRENSTVDFSKVDMNFMRKIPTGAEASNVLVGEVDFLERPIIAFVRLAPAVLLTGLTEVPVPTRFLFLLLGPAGKAPQYHEIGRSIATLMTDEIFHDVAYKAKDRNDLLSGIDEFLDQVTVLPPGEWDPSIRIEPPKSVPSQEKRKIPVFHNGSTPTLGETPKEAAHHAGPELQRTGRLFGGLILDIKRKAPFFLSDFKDALSLQCLASILFLYCACMSPVITFGGLLGEATEGRISAIESLFGASLTGIAYSLFAGQPLTILGSTGPVLVFEKILYKFCRDYQLSYLSLRTSIGLWTSFLCIVLVATDASSLVCYITRFTEEAFAALICIIFIYEALEKLFDLGETYAFNMHNNLDKLTSYSCVCTEPPNPSNETLAQWKKDNITAHNISWRNLTVSECKKLRGVFLGSACGHHGPYIPDVLFWCVILFFTTFFLSSFLKQFKTKRYFPTKVRSTISDFAVFLTIVIMVTIDYLVGVPSPKLHVPEKFEPTHPERGWIISPLGDNPWWTLLIAAIPALLCTILIFMDQQITAVIINRKEHKLKKGAGYHLDLLMVGVMLGVCSVMGLPWFVAATVLSISHVNSLKVESECSAPGEQPKFLGIREQRVTGLMIFILMGLSVFMTSVLKFIPMPVLYGVFLYMGVSSLKGIQLFDRIKLFGMPAKHQPDLIYLRYVPLWKVHIFTVIQLTCLVLLWVIKVSAAAVVFPMMVLALVFVRKLMDLCFTKRELSWLDDLMPESKKKKEDDKKKKEKEEAERMLQDDDDTVHLPFEGGSLLQIPVKALKYSPDKPVSVKISFEDEPRKKYVDAETSL

SEQ ID NO: 781050 - protein, 1113 aa, Homo sapiens
HCPWNLQGSYCITSSETRHFYITMERFRLEKKLPGPDEEAVVDLGKTSSTVNTKFEKEELESHRAVYIGVHVPFSKESRRRHRHRGHKHHHRRRKDKESDKEDGRESPSYDTPSQRVQFILGTEDDDEEHIPHDLFTEMDELCYRDGEEYEWKETARWLKFEEDVEDGGDRWSKPYVATLSLHSLFELRSCILNGTVMLDMRASTLDEIADMVLDNMIASGQLDESIRENVREALLKRHHHQNEKRFTSRIPLVRSFADIGKKHSDPHLLERNGILASPQSAPGNLDNSKSGEIKGNGSGGSRENSTVDFSKVDMNFMRKIPTGAEASNVLVGEVDFLERPIIAFVRLAPAVLLTGLTEVPVPTRFLFLLLGPAGKAPQYHEIGRSIATLMTDEIFHDVAYKAKDRNDLLSGIDEFLDQVTVLPPGEWDPSIRIEPPKSVPSQEKRKIPVFHNGSTPTLGETPKEAAHHAGPELQRTGRLFGGLILDIKRKAPFFLSDFKDALSLQCLASILFLYCACMSPVITFGGLLGEATEGRISAIESLFGASLTGIAYSLFAGQPLTILGSTGPVLVFEKILYKFCRDYQLSYLSLRTSIGLWTSFLCIVLVATDASSLVCYITRFTEEAFAALICIIFIYEALEKLFDLGETYAFNMHNNLDKLTSYSCVCTEPPNPSNETLAQWKKDNITAHNISWRNLTVSECKKLRGVFLGSACGHHGPYIPDVLFWCVILFFTTFFLSSFLKQFKTKRYFPTKVRSTISDFAVFLTIVIMVTIDYLVGVPSPKLHVPEKFEPTHPERGWIISPLGDNPWWTLLIAAIPALLCTILIFMDQQITAVIINRKEHKLKKGAGYHLDLLMVGVMLGVCSVMGLPWFVAATVLSISHVNSLKVESECSAPGEQPKFLGIREQRVTGLMIFILMGLSVFMTSVLKFIPMPVLYGVFLYMGVSSLKGIQLFDRIKLFGMPAKHQPDLIYLRYVPLWKVHIFTVIQLTCLVLLWVIKVSAAAVVFPMMVLALVFVRKLMDLCFTKRELSWLDDLMPESKKKKEDDKKKKEKEEAERMLQDDDDTVHLPFEGGSLLQIPVKALKYSPDKPVSVKISFEDEPRKKYVDAETSL

SEQ ID NO: 781051 - protein, 1000 aa, Homo sapiens
MAVTQFIHFREDDDEEHIPHDLFTEMDELCYRDGEEYEWKETARWLKFEEDVEDGGDRWSKPYVATLSLHSLFELRSCILNGTVMLDMRASTLDEIADMVLDNMIASGQLDESIRENVREALLKRHHHQNEKRFTSRIPLVRSFADIGKKHSDPHLLERNGILASPQSAPGNLDNSKSGEIKGNGSGGSRENSTVDFSKVDMNFMRKIPTGAEASNVLVGEVDFLERPIIAFVRLAPAVLLTGLTEVPVPTRFLFLLLGPAGKAPQYHEIGRSIATLMTDEIFHDVAYKAKDRNDLLSGIDEFLDQVTVLPPGEWDPSIRIEPPKSVPSQEKRKIPVFHNGSTPTLGETPKEAAHHAGPELQRTGRLFGGLILDIKRKAPFFLSDFKDALSLQCLASILFLYCACMSPVITFGGLLGEATEGRISAIESLFGASLTGIAYSLFAGQPLTILGSTGPVLVFEKILYKFCRDYQLSYLSLRTSIGLWTSFLCIVLVATDASSLVCYITRFTEEAFAALICIIFIYEALEKLFDLGETYAFNMHNNLDKLTSYSCVCTEPPNPSNETLAQWKKDNITAHNISWRNLTVSECKKLRGVFLGSACGHHGPYIPDVLFWCVILFFTTFFLSSFLKQFKTKRYFPTKVRSTISDFAVFLTIVIMVTIDYLVGVPSPKLHVPEKFEPTHPERGWIISPLGDNPWWTLLIAAIPALLCTILIFMDQQITAVIINRKEHKLKKGAGYHLDLLMVGVMLGVCSVMGLPWFVAATVLSISHVNSLKVESECSAPGEQPKFLGIREQRVTGLMIFILMGLSVFMTSVLKFIPMPVLYGVFLYMGVSSLKGIQLFDRIKLFGMPAKHQPDLIYLRYVPLWKVHIFTVIQLTCLVLLWVIKVSAAAVVFPMMVLALVFVRKLMDLCFTKRELSWLDDLMPESKKKKEDDKKKKEKEEAERMLQDDDDTVHLPFEGGSLLQIPVKALKYSPDKPVSVKISFEDEPRKKYVDAETSL

SEQ ID NO: 781052 - protein, 1057 aa, Homo sapiens
MIASGQLDESIRENVREALLKRHHHQNEKRFTSRIPLVRSFADIGKKHSDPHLLERNGEGLSASRHSLRTGLSASNLSLRGESPLSLLLGHLLPSSRAGTPAGSRCTTPVPTPQNSPPSSPSISRLTSRSSQESQRQAPELLVSPASDDIPTVVIHPPEEDLEAALKGEEQKNEENVDLTPGILASPQSAPGNLDNSKSGEIKGNGSGGSRENSTVDFSKVDMNFMRKIPTGAEASNVLVGEVDFLERPIIAFVRLAPAVLLTGLTEVPVPTRFLFLLLGPAGKAPQYHEIGRSIATLMTDEIFHDVAYKAKDRNDLLSGIDEFLDQVTVLPPGEWDPSIRIEPPKSVPSQEKRKIPVFHNGSTPTLGETPKEAAHHAGPELQRTGRLFGGLILDIKRKAPFFLSDFKDALSLQCLASILFLYCACMSPVITFGGLLGEATEGRISAIESLFGASLTGIAYSLFAGQPLTILGSTGPVLVFEKILYKFCRDYQLSYLSLRTSIGLWTSFLCIVLVATDASSLVCYITRFTEEAFAALICIIFIYEALEKLFDLGETYAFNMHNNLDKLTSYSCVCTEPPNPSNETLAQWKKDNITAHNISWRNLTVSECKKLRGVFLGSACGHHGPYIPDVLFWCVILFFTTFFLSSFLKQFKTKRYFPTKVRSTISDFAVFLTIVIMVTIDYLVGVPSPKLHVPEKFEPTHPERGWIISPLGDNPWWTLLIAAIPALLCTILIFMDQQITAVIINRKEHKLKKGAGYHLDLLMVGVMLGVCSVMGLPWFVAATVLSISHVNSLKVESECSAPGEQPKFLGIREQRVTGLMIFILMGLSVFMTSVLKFIPMPVLYGVFLYMGVSSLKGIQLFDRIKLFGMPAKHQPDLIYLRYVPLWKVHIFTVIQLTCLVLLWVIKVSAAAVVFPMMVLALVFVRKLMDLCFTKRELSWLDDLMPESKKKKEDDKKKKEKEEAERMLQDDDDTVHLPFEGGSLLQIPVKALKYSVDPSIVNISDEMAKTAQWKALSMNTENAKVTRSNMSPDKPVSVKISFEDEPRKKYVDAETSL

SEQ ID NO: 781053 - protein, 232 aa, Homo sapiens
MGLSVFMTSVLKFIPMPVLYGVFLYMGVSSLKGIQLFDRIKLFGMPAKHQPDLIYLRYVPLWKVHIFTVIQLTCLVLLWVIKVSAAAVVFPMMVLALVFVRKLMDLCFTKRELSWLDDLMPESKKKKEDDKKKKEKEEAERMLQDDDDTVHLPFEGGSLLQIPVKALKYSVDPSIVNISDEMAKTAQWKALSMNTENAKVTRSNMSPDKPVSVKISFEDEPRKKYVDAETSL

SEQ ID NO: 781054 - protein, 217 aa, Homo sapiens [sequence omitted]

SEQ ID NO: 781055 - protein, 175 aa, Homo sapiens
MAVTQFIHFREDDDEEHIPHDLFTEMDELCYRDGEEYEWKETARWLKFEEDVEDGGDRWSKPYVATLSLHSLFELRSCILNGTVMLDMRASTLDEIADMVLDNMIASGQLDESIRENVREALLKRHHHQNEKRFTSRIPLVRSFADIGKKHSDPHLLERNGEISCGIQFLLTLLL

SEQ ID NO: 781056 - protein, 1036 aa, Homo sapiens
MAVTQFIHFREEIMGNMFFIIIFSTKDKLCYRDGEEYEWKETARWLKFEEDVEDGGDRWSKPYVATLSLHSLFELRSCILNGTVMLDMRASTLDEIADMVLDNMIASGQLDESIRENVREALLKRHHHQNEKRFTSRIPLVRSFADIGKKHSDPHLLERNGILASPQSAPGNLDNSKSGEIKGNGSGGSRENSTVDFSKVDMNFMRKIPTGAEASNVLVGEVDFLERPIIAFVRLAPAVLLTGLTEVPVPTRFLFLLLGPAGKAPQYHEIGRSIATLMTDEIFHDVAYKAKDRNDLLSGIDEFLDQVTVLPPGEWDPSIRIEPPKSVPSQEKRKIPVFHNGSTPTLGETPKEAAHHAGPELQRTGRLFGGLILDIKRKAPFFLSDFKDALSLQCLASILFLYCACMSPVITFGGLLGEATEGRISAIESLFGASLTGIAYSLFAGQPLTILGSTGPVLVFEKILYKFCRDYQLSYLSLRTSIGLWTSFLCIVLVATDASSLVCYITRFTEEAFAALICIIFIYEALEKLFDLGETYAFNMHNNLDKLTSYSCVCTEPPNPSNETLAQWKKDNITAHNISWRNLTVSECKKLRGVFLGSACGHHGPYIPDVLFWCVILFFTTFFLSSFLKQFKTKRYFPTKVRSTISDFAVFLTIVIMVTIDYLVGVPSPKLHVPEKFEPTHPERGWIISPLGDNPWWTLLIAAIPALLCTILIFMDQQITAVIINRKEHKLKKGAGYHLDLLMVGVMLGVCSVMGLPWFVAATVLSISHVNSLKVESECSAPGEQPKFLGIREQRVTGLMIFILMGLSVFMTSVLKFIPMPVLYGVFLYMGVSSLKGIQLFDRIKLFGMPAKHQPDLIYLRYVPLWKVHIFTVIQLTCLVLLWVIKVSAAAVVFPMMVLALVFVRKLMDLCFTKRELSWLDDLMPESKKKKEDDKKKKEKEEAERMLQDDDDTVHLPFEGGSLLQIPVKALKYSVDPSIVNISDEMAKTAQWKALSMNTENAKVTRSNMSPDKPVSVKISFEDEPRKKYVDAETSL

SEQ ID NO: 781057 - protein, 1347 aa, Homo sapiens
GPPVRSVLASGSTPRPRSPTRASPAVAARTRTPRVSRARRPALPTRAHLAHGRTHVCPRAPGARRRRQGQRQKQADRAGQYRSGRHGLAGLAMEADGAGEQMRPLLTRGPDEEAVVDLGKTSSTVNTKFEKEELESHRAVYIGVHVPFSKESRRRHRHRGHKHHHRRRKDKESDKEDGRESPSYDTPSQRVQFILGTEDDDEEHIPHDLFTEMDELCYRDGEEYEWKETARWLKFEEDVEDGGDRWSKPYVATLSLHSLFELRSCILNGTVMLDMRASTLDEIADMVLDNMIASGQLDESIRENVREALLKRHHHQNEKRFTSRIPLVRSFADIGKKHSDPHLLERNGEGLSASRHSLRTGLSASNLSLRGESPLSLLLGHLLPSSRAGTPAGSRCTTPVPTPQNSPPSSPSISRLTSRSSQESQRQAPELLVSPASDDIPTVVIHPPEEDLEAALKGEEQKNEENVDLTPGILASPQSAPGNLDNSKSGEIKGNGSGGSRENSTVDFSKVDMNFMRKIPTGAEASNVLVGEVDFLERPIIAFVRLAPAVLLTGLTEVPVPTRFLFLLLGPAGKAPQYHEIGRSIATLMTDEIFHDVAYKAKDRNDLLSGIDEFLDQVTVLPPGEWDPSIRIEPPKSVPSQEKRKIPVFHNGSTPTLGETPKEAAHHAGPELQRTGRLFGGLILDIKRKAPFFLSDFKDALSLQCLASILFLYCACMSPVITFGGLLGEATEGRISAIESLFGASLTGIAYSLFAGQPLTILGSTGPVLVFEKILYKFCRDYQLSYLSLRTSIGLWTSFLCIVLVATDASSLVCYITRFTEEAFAALICIIFIYEALEKLFDLGETYAFNMHNNLDKLTSYSCVCTEPPNPSNETLAQWKKDNITAHNISWRNLTVSECKKLRGVFLGSACGHHGPYIPDVLFWCVILFFTTFFLSSFLKQFKTKRYFPTKVRSTISDFAVFLTIVIMVTIDYLVGVPSPKLHVPEKFEPTHPERGWIISPLGDNPWWTLLIAAIPALLCTILIFMDQQITAVIINRKEHKLKKGAGYHLDLLMVGVMLGVCSVMGLPWFVAATVLSISHVNSLKVESECSAPGEQPKFLGIREQRVTGLMIFILMGLSVFMTSVLKFIPMPVLYGVFLYMGVSSLKGIQLFDRIKLFGMPAKHQPDLIYLRYVPLWKVHIFTVIQLTCLVLLWVIKVSAAAVVFPMMVLALVFVRKLMDLCFTKRELSWLDDLMPESKKKKEDDKKKKEKEEAERMLQDDDDTVHLPFEGGSLLQIPVKALKYSVDPSIVNISDEMAKTAQWKALSMNTENAKVTRSNMSPDKPVSVKISFEDEPRKKYVDAETSL

SEQ ID NO: 781058 - protein, 362 aa, Homo sapiens
GPPVRSVLASGSTPRPRSPTRASPAVAARTRTPRVSRARRPALPTRAHLAHGRTHVCPRAPGARRRRQGQRQKQADRAGQYRSGRHGLAGLAMEADGAGEQMRPLLTRGPDEEAVVDLGKTSSTVNTKFEKEELESHRAVYIGVHVPFSKESRRRHRHRGHKHHHRRRKDKESDKEDGRESPSYDTPSQRVQFILGTEDDDEEHIPHDLFTEMDELCYRDGEEYEWKETARWLKFEEDVEDGGDRWSKPYVATLSLHSLFELRSCILNGTVMLDMRASTLDEIADMVLDNMIASGQLDESIRENVREALLKRHHHQNEKRFTSRIPLVRSFADIGKKHSDPHLLERNGEISCGIQFLLTLLL

SEQ ID NO: 781059 - protein, 69 aa, Homo sapiens
KFNKGKKMRKVREEVTGDGKGNTQEGSQAQPEKQQQRTTPNENKQETKQLHRHGRRKYLWREEGTGQVH

SEQ ID NO: 781060 - protein, 61 aa, Homo sapiens
ILGRQSSRGKGTISFIRQISKHHLSVCSVRTQGTGGRTDVVDRNAVISTIFCSCKTLIPYR

SEQ ID NO: 781061 - protein, 82 aa, Homo sapiens
SAETLSSPRCSLRGSRAPARAVRLLGSRGIASEYRGISKGPRGEEGWGEERVAERRRTLPFVGSFPSPPTPQKHPGQNAKSG

SEQ ID NO: 781062 - protein, 197 aa, Homo sapiens
MTNTKGKRRGTRYMFSRPFRKHGVVPLATYMRIYKKGDIVDIKGMGTVQKGMPHKCYHGKTGRVYNVTQHAVGIVVNKQVKGKILAKRINVRIEHIKHSKSRDSFLKRVKENDQKKKEAKEKGTWVQLKRQPAPPREAHFVKTNGKEPELLEPIPYEFMGINRWLTTQKLTDLSGLQKTRRKSQKRTKTFVRPPVGP

SEQ ID NO: 781063 - protein, 180 aa, Homo sapiens
SFSARYLDFSEKLKPEAFHEAKHRTEGLLVMGNLLKVLTREIENYPHFFLDFENAQPTEGEREIWNQISAVLQDSESILADLQAYKGAGPEIRDAIQNPNDIQLQEKAWNAVCPLVVRLKRFYEFSIRLEKALQSLLESLTCPAVHNQKAPNSHGKGNRPWQKEDKGVRYGHPGKEVYIQ

SEQ ID NO: 781064 - protein, 46 aa, Homo sapiens
MHTSDADFSISSSLTLLISTEYPRDVHLHECDGHYWNVQEDDMEKS

SEQ ID NO: 781065 - protein, 110 aa, Homo sapiens
MGSSGLPTYFPWEARAAATLLYIVQSEGHPGSRGRVRAPSSLAAAEGSQPPSFSVSPRHHGPPRSMGTQCHLPSIPTPGRRLTRVQLERAGEVSLCKSESKSGSHSCKVL

SEQ ID NO: 781066 - protein, 87 aa, Homo sapiens
MPFLLGLRQDKEACVGTNNQSYICDTGHCCGQSQCCNYYYELWWFWLVWTIIIILSCCCVCHHRRAKHRLQAQQRQHEINLIAYREA

SEQ ID NO: 781067 - protein, 167 aa, Homo sapiens
TVRLSSKEIMHVLGTVLAHNKGCINIGDNYCYCHLLFFFLETESRSVAQAGVQWHDLSSLKALPPGFTPFSCLSLPSGWDCRRPPPRLANFENIWLGVVAHAHLGLPECKDYGREPPHPADTDFSFQRGQSPGRGQSRDNCDMTYVSQDHSGCCLDKKSKGVRVKAG

SEQ ID NO: 781068 - protein, 947 aa, Homo sapiens
MARKKPRNTSRLPLALNPLKSKDVLAVLAERNEAIVPVGAWVEPASPGSSEIPAYTSAYLIEEELKEQLRKKQEALKHFQKQVKYRVNQQIRLRKKQQLQKSYERAQKEGSIAMQSSATHLTSKRTSVFPNNLNVAIGSSRLPPSLMPGDGIEDEENQNELFQQQAQALSETMKQARHRLASFKTVIKKKGSVFPDDGRKSFLTREEVLSRKPASTGINTGIRGELPIKVHQGLLAAVPYQNYMENQELDYEEPDYEESSSLVTDEKGKEDLFGRGQQDQQAIHSEDKNKPFSRVQKVKFKNPLFVLMEEEEQKQLHFEGLQDILPEAQDYFLEAQGDLLETQGDLTGIQSVKPDTQAVEMKVQVTEPEGQAIEPEGQPIRTETQGIMLKAQSIELEEGSIVLKTQDFLPTNQALLTKNQDVLLKDHCVLPKDQSILLKYQDQDFHPETSMFSTKTKIFCHNIRTRIFYLRTRIFYLETSMFSPKTKIFCQNIRTRIFYLRTRIFCLETSMFSPKTRIFYLNIKTRIFYLKTRTFYLETSMFSPKTGIFYPNVRTRIFYPETKVFFPKTKIFYPYVRTRIFYPETKVIFLKTKIFYPYVRTGIFYPETCMFSPTTRIFYPNVRTKIFYQNIRKYTLRSQYSDMTDEKGREDFSLADYQCLPPKSQDQDDIKNQQPASFMREERVREELPLDYHQYVVPKIQDQDSPREQNKHIKLPSSFEKWEIARGNTPGVPLAYDRYQSGLSTEFQAPLAFQSDVDKEEDKKERQKQYLRHRRLFMDIEREQVKEQQRQKEQKKKIEKIKKKREQECYAAEQRILRMNFHEDPYSGEKLSEILAQLQLQEIKGTREKQQREKEYLRYVEALRAQIQEKMQLYNITLPPLCCCGPDFWDAHPDTCANNCIFYKNHRAYTRALHSFINSCDVPGGNSTLRVAIHNFASAHRRTLKNL

SEQ ID NO: 781069 - protein, 43 aa, Homo sapiens
SAGEQGGEAGAAETGGSAGAGDPGKQQAPEKPGEATLSCGLLQ

SEQ ID NO: 781070 - protein, 459 aa, Homo sapiens
MAAVKKEGGALSEAMSLEGDEWELSKENVQPLRQGRIMSTLQGALAQESACNNTLQQQKRAFEYEIRFYTGNDPLDVWDRYISWTEQNYPQGGKESNMSTLLERAVEALQGEKRYYSDPRFLNLWLKLGRLCNEPLDMYSYLHNQGIGVSLAQFYISWAEEYEARENFRKADAIFQEGIQQKAEPLERLQSQHRQFQARVSRQTLLALEKEEEEEVFESSVPQRSTLAELKSKGKKTARAPIIRVGGALKAPSQNRGLQNPFPQQMQNNSRITVFDENADEASTAELSKPTVQPWIAPPMPRAKENELQAGPWNTGRSLEHRPRGNTASLIAVPAVLPSFTPYVEETAQQPVMTPCKIEPSINHILSTRKPGKEEGDPLQRVQSHQQASEEKKEKMMYCKEKIYAGVGEFSFEEIRAEVFRKKLKEQREAELLTSAEKRAEMQKQIEEMEKKLKEIQIT

SEQ ID NO: 781071 - protein, 1050 aa, Homo sapiens
MAAVKKEGGALSEAMSLEGDEWELSKENVQPLRQGRIMSTLQGALAQESACNNTLQQQKRAFEYEIRFYTGNDPLDVWDRYISWTEQNYPQGGKESNMSTLLERAVEALQGEKRYYSDPRFLNLWLKLGRLCNEPLDMYSYLHNQGIGVSLAQFYISWAEEYEARENFRKADAIFQEGIQQKAEPLERLQSQHRQFQARVSRQTLLALEKEEEEEVFESSVPQRSTLAELKSKGKKTARAPIIRVGGALKAPSQNRGLQNPFPQQMQNNSRITVFDENADEASTAELSKPTVQPWIAPPMPRAKENELQAGPWNTGRSLEHRPRGNTASLIAVPAVLPSFTPYVEETAQQPVMTPCKIEPSINHILSTRKPGKEEGDPLQRVQSHQQASEEKKEKMMYCKEKIYAGVGEFSFEEIRAEVFRKKLKEQREAELLTSAEKRAEMQKQIEEMEKKLKEIQTTQQERTGDQQEETMPTKETTKLQIASESQKIPGMTLSSSVCQVNCCARETSLAENIWQEQPHSKGPSVPFSIFDEFLLSEKKNKSPPADPPRVLAQRRPLAVLKTSESITSNEDVSPDVCDEFTGIEPLSEDAIITGFRNVTICPNPEDTCDFARAARFVSTPFHEIMSLKDLPSDPERLLPEEDLDVKTSEDQQTACGTIYSQTLSIKKLSPIIEDSREATHSSGFSGSSASVASTSSIKCLQIPEKLELTNETSENPTQSPWCSQYRRQLLKSLPELSASAELCIEDRPMPKLEIEKEIELGNEDYCIKREYLICEDYKLFWVAPRNSAELTVIKVSSQPVPWDFYINLKLKERLNEDFDHFCSCYQYQDGCIVWHQYINCFTLQDLLQHSEYITHEITVLIIYNLLTIVEMLHKAEIVHGDLSPRCLILRNRIHDPYDCNKNNQALKIVDFSYSVDLRVQLDVFTLSGFRTVQILEGQKILANCSSPYQVDLFGIADLAHLLLFKEHLQVFWDGSFWKLSQNISELKDGELWNKFFVRILNANDEATVSVLGELAAEMNGVFDTTFQSHLNKALWKVGKLTSPGALLFQ

SEQ ID NO: 781072 - protein, 751 aa, Homo sapiens
MPRAKENELQAGPWNTGRSLEHRPRGNTASLIAVPAVLPSFTPYVEETAQQPVMTPCKIEPSINHILSTRKPGKEEGDPLQRVQSHQQASEEKKEKMMYCKEKIYAGVGEFSFEEIRAEVFRKKLKEQREAELLTSAEKRAEMQKQIEEMEKKLKEIQTTQQERTGDQQEETMPTKETTKLQIASESQKIPGMTLSSSVCQVNCCARETSLAENIWQEQPHSKGPSVPFSIFDEFLLSEKKNKSPPADPPRVLAQRRPLAVLKTSESITSNEDVSPDVCDEFTGIEPLSEDAIITGFRNVTICPNPEDTCDFARAARFVSTPFHEIMSLKDLPSDPERLLPEEDLDVKTSEDQQTACGTIYSQTLSIKKLSPIIEDSREATHSSGFSGSSASVASTSSIKCLQIPEKLELTNETSENPTQSPWCSQYRRQLLKSLPELSASAELCIEDRPMPKLEIEKEIELGNEDYCIKREYLICEDYKLFWVAPRNSAELTVIKVSSQPVPWDFYINLKLKERLNEDFDHFCSCYQYQDGCIVWHQYINCFTLQDLLQHSEYITHEITVLIIYNLLTIVEMLHKAEIVHGDLSPRCLILRNRIHDPYDCNKNNQALKIVDFSYSVDLRVQLDVFTLSGFRTVQILEGQKILANCSSPYQVDLFGIADLAHLLLFKEHLQVFWDGSFWKLSQNISELKDGELWNKFFVRILNANDEATVSVLGELAAEMNGVFDTTFQSHLNKALWKVGKLTSPGALLFQ

SEQ ID NO: 781073 - protein, 68 aa, Homo sapiens
FDVSKLTRSASSRLQETCLPGIPFKQLINMSCGLWSEESVRAVEMTHQLSSRVFGKRYPVSKRPPAEK

SEQ ID NO: 781074 - protein, 107 aa, Homo sapiens
SSVKLSFQLHSLKRPMAFRWFLTLLQLLSAGLKASFRPDGHEAVMSIPTHARLEGAPGTFYVLVFVLQVCKVLQLRSKPASLLNKRLTLGCVELVLNCHLRASGVTF

SEQ ID NO: 781075 - protein, 35 aa, Homo sapiens
GSPFSGEQGGPVSGQAEVPDLLPSWPLQGPGKFLA

SEQ ID NO: 781076 - protein, 56 aa, Homo sapiens
METHHPHKANAEEMTKYHSDDYIKFLCSIYPDYVSEHSKRMQRFNVSEDCPAFDGL

SEQ ID NO: 781077 - protein, 60 aa, Homo sapiens
MCPLKEGDCRAVSSGSHGTSRVGLAQHRPCEAQSSEGPRALLGVRVAGTTWTVTCLLNTV

SEQ ID NO: 781078 - protein, 68 aa, Homo sapiens
APSTTRRTPRYINVVNNLQWEPTQPKFFNQTSEFKSCFNYCVTPGKCLNLSGTLIPICKVGSIAMPVF

SEQ ID NO: 781079 - protein, 48 aa, Homo sapiens
MLREASGGPVMEEGDGFGSQAKECGLCPRGSREPWRVPDLNCTLERIV

SEQ ID NO: 781080 - protein, 56 aa, Homo sapiens
MLSEGIDEFQAWEQNNWIYSKKLIMAVSQREERTESKSRGEKANERLLHVDDGGKE

SEQ ID NO: 781081 - protein, 33 aa, Homo sapiens
MIERLLCDQCCTLYFGPLFFLEVEMQVCIYKKN

SEQ ID NO: 781082 - protein, 128 aa, Homo sapiens
SGYLGLLAHPDCAKCWCGPCTEALAIFWSFSTSSFSKPLPLSRLQTLYGNHWSTAADIQTELPMYRMRFPAHYKHCQCPVMGTGVSTHVPLQREIVAQLPRVPWQTGGYGSQPFWGSILLERDLSGAM

SEQ ID NO: 781083 - protein, 107 aa, Homo sapiens
LLALNTTCRPQLPHLACLLSKTKPHEATGQGEGPCVLRVPRQKCGSGRNGGVCPSLNKHIPSVWRSPSKIYKCCDDTMLIQTTGCRQIAEIRKGSVLGGRIWLLLVP

SEQ ID NO: 781084 - protein, 35 aa, Homo sapiens
KPLSPASSEARKERRDQNERAHTWNTIHRNKSLME

SEQ ID NO: 781085 - protein, 146 aa, Homo sapiens
MAVGLQEGQFFFFSLFFLRRSFTVAQASVLWQDLSSPQPLPPQFKRFSCLSLPSSWDYRHVPPCPATFVFLVETGFLHVGQAGLELPTSGDPPTSASQSAGITGVSNRARPKGGSYYYYYYYLKWSLALSPRLEGSGAVSAHCNLS

SEQ ID NO: 781086 - protein, 108 aa, Homo sapiens
GVFITASSPWLQSIQKGINSLTLMICKGKETPQTKTITATTKNCFRLGGGPKGRNKGQALTLQVLTDLFVMTMEFSLLYSHIFSLHWDLHFFFLFLSFVTFDFLLFLS

SEQ ID NO: 781087 - protein, 137 aa, Homo sapiens
EPEGLHCTELAQGEAGAGPGTQPPRRKPERKPAWSCSLPRPNPRLLPNADPLAECLLVCIHASHTAQPKFLQLVQVQSPQNYKARKDHLWAQELTVVLPLPEGTMTRTVPSFAAILNSPSTQHIQLNQSKSSFPAGK

SEQ ID NO: 781088 - protein, 137 aa, Homo sapiens; identical to SEQ ID NO: 781087

SEQ ID NO: 781089 - protein, 137 aa, Homo sapiens; identical to SEQ ID NO: 781087

SEQ ID NO: 781090 - protein, 137 aa, Homo sapiens; identical to SEQ ID NO: 781087

SEQ ID NO: 781091 - protein, 137 aa, Homo sapiens; identical to SEQ ID NO: 781087

SEQ ID NO: 781092 - protein, 174 aa, Homo sapiens
SRKVNSRTEKEIQKLNFLKRNSGTEREANGKYPNDKKKTTKKTQKHMCAARATARHPSKQNSQETNAERERRRRTTRRTTAQARHTAAQREEEHRRHSTNKEEGDNNNTKTNYKDHRRKQKRKLNETTNKKKYDNTDESNTQTTPTNNTGTAQKEKATTKKKKNSPPRKSGNRN

SEQ ID NO: 781093 - protein, 106 aa, Homo sapiens
RNSDYSYLMLILFSSLDNPTFLGSRPITSHMRNLCPAQTGLLFLEHSMCHLQYLCLCLQHLCCFDLTTTTTLPPSRTQNLSPNNSPTSISNHILGSFSRVLETPTY

SEQ ID NO: 781094 - protein, 120 aa, Homo sapiens
QAGQACDPPAQPQSIWAPGQAWSIEQLSWYWGPEPGVGMNKTLMIPQNEEGTPWLMPVIPELWRPSGEESLEPWTLRPTWAIQQDPISRKKIFKTELGSQVWWLTPVIAAFWEAKVGRIT

SEQ ID NO: 781095 - protein, 70 aa, Homo sapiens
QVCSEREADCGQEPRRFVGFRPGSLGWASESRAGSGCGVLTHWYQQVLKQQVVTPHPGPHPALLAWPVLR

SEQ ID NO: 781096 - protein, 69 aa, Homo sapiens
LENKWDGGVREREEAQGMAVLNCGIGNKTVIEFSRLEHIEFEMPDNAWVKMISNWKHGSKLEQKFKLDM

SEQ ID NO: 781097 - protein, 109 aa, Homo sapiens
NDRHLLLVGWASCIQFSQHPCEVVMLIPILQGRRLRPREVKSCATKYPSHMVVEPSFQPDSPAHSRAALDSTAIQCIAGPLHHSRQFNVKIPDLPQPGASRRYHHPQQA

SEQ ID NO: 781098 - protein, 389 aa, Homo sapiens
AGPVVNTHMPKDRVTGQHQGYGFVEFLSEEDADYAIKIMNMIKLYGKPIRVNKASAHNKNLDVGANIFIGNLDPEIDEKLLYDTFSAFGVILQTPKIMRDPDTGNSKGYAFINFASFDASDAAIEAMNGQYLCNRPITVSYAFKKDSKGERHGSAAERLLAAQNPLSQADRPHQLFADAPPPPSAPNPVVSSLGSGLPPPGMPPPGSFPPPVPPPGALPPGIPPAMPPPPMPPGAAGHGPPSAGTPGAGHPGHGHSHPHPFPPGGMPHPGMSQMQLAHHGPHGLGHPHAGPPGSGGQPPPRPPPGMPHPGPPPMGMPPRGPPFGSPMGHPGPMPPHGMRGPPPLMPPHGYTGPPRPPPYGYQRGPLPPPRPTPRPPVPPRGPLRGPLPQ

SEQ ID NO: 781099 - protein, 135 aa, Homo sapiens
AGPVVNTHMPKDRVTGQHQGYGFVEFLSEEDADYAIKIMNMIKLLWLPAGASPSTQTHSPATSSPSRPTSRPSPSVNSHFPSSCYIFPISFLFLGPIRDAVAPWGKGTNPFQHPHSIPLFNVTFSTGGISFLCWS

SEQ ID NO: 781100 - protein, 96 aa, Homo sapiens
PASLPPCSLISDCCASNQRDSVGVGPSEPREGFNLLVCRFLSPSAKRSIWVGVTRFSRCRPSPLSLTRKRNSLTPCAFRVRQCLALLQLAHGARTH

SEQ ID NO: 781101 - protein, 66 aa, Homo sapiens
GLTGACGLTVACGLTGACGLTVACGLTVACGLTVARGLTVALSSLPQSSSMSPPAQNLSHFALTFE

SEQ ID NO: 781102 - protein, 143 aa, Homo sapiens
CSSCTVNTLCLLHTLSKYLLNDRIDVAAGTLPQLLVHLGRSFPKNTLGSFPPSLCSPGAQRLKALNLLISPRLPPYLSPFSSAPYTPPRWLHSSFPECARLLCDHLLSVQLAIPGLPSSHISGLSSDTRNPTMYLPSTAILLC

SEQ ID NO: 781103 - protein, 102 aa, Homo sapiens [sequence omitted]

SEQ ID NO: 781104 - protein, 115 aa, Homo sapiens
FLLLLYYSRYIAGTPCVWIDELHEFCQGLPGKTLSNMNKLSFSCFKSSPAQFTCAPEHSPSSLLNLAERPFAFGLGMLGAHPTRSSSPSHLASAEEVAELLILADMMFTAASITN

SEQ ID NO: 781105 - protein, 119 aa, Homo sapiens
WTPPGGAPGALPTTCSKDTASWKRPWFPFGGELVQGTSRSRSLRWPGQAFSLWVLPTSALGLAMRSSPAPRDQDPPAAPAAATRGQQASAARIPGSQPGLDRRALAGCLAPRASVSLSI

SEQ ID NO: 781106 - protein, 71 aa, Homo sapiens
CTICGQWGIPRLTSPSDPAQTTAPMGFPFLTSSVSTLVSVGQSFLIAAASPSLSAWIIPEGSGYLFPMPFP

SEQ ID NO: 781107 - protein, 114 aa, Homo sapiens
MGGLRKLTVMVEGEGEAGTFFTMHQEGVCARTMKCPSLKPSALMRTHSLSREQHGRNSPHYPITSHLVPPLTCGDYNSRCDLGWNTEPNHIRRKRGKRVDEVKLVNGYKNAVRK

SEQ ID NO: 781108 - protein, 61 aa, Homo sapiens
FFLSTASGEPAPSRYYRCPDSAHSSRGWGQWEVCLLLRTRSRRTSVPRSHVGNGDLAAWQP

SEQ ID NO: 781109 - protein, 222 aa, Homo sapiens
HGCQEADRGGSWGATTSRPFRQNLSDLGRHSVLPLKRNLCPGGSSLGAPPLRTPQRRVTLAAQRWLSRPQRRAVGLGELDQGAQLAALGLRWGVDSLGGCPRASQPAGHSGLHHTLTCLRRHLALQAGASGHAGQLPQRASAAWEQQGQSYTALHLAAMYLGDGEAASGNIGRHVDIRDYTGKRASQHVSQSITEEIETLMGVLDKDDGESTASSGGEYWKI

SEQ ID NO: 781110 - protein, 71 aa, Homo sapiens
YTSNMLSLQMPESRITLLCYRSPELLYLAKLKNSIISQTQNSTILHSLFLHPMATTILLCLYEFEYYRYLI

SEQ ID NO: 781111 - protein, 136 aa, Homo sapiens
NENGNRGRSEVDVQNTQYHSDFFPHVALLTLATLFKIAYCGGGWEEVVRKCMFNLFTCLYFLFLKFFNAFYDIAIPISTMLVSSGLPPCFFHAFSQRSDSQFAYTRPKFLDYSQSKSTYRHRGNTEIGDDLILFNF

SEQ ID NO: 781112 - protein, 198 aa, Homo sapiens
MRALPGFDPPLITGDSRCPAGPTGNRSQSGLGHPLQVVHSPHRLMVESRLAWDMWASRGDRRNFQTSKAPEASTPAQAQFKPSSSWGYFCDGWVGAGASSSLPVSGVKQQVHLACLCLQTDGPGPSLHPPVLGPQGSQFYQQSAGNRVPGQALPLTPCGFVPATRSAPPWVPPTPRSPARWTSGSWEKTVLCWGRFDS

SEQ ID NO: 781113 - protein, 175 aa, Homo sapiens
MGKITFYEDRAFQGRSYECTTDCPNLQPYFSRCNSIRVESGCWMIYERPNYQGHQYFLRRGEYPDYQQWMGLSDSIRSCCLIPPHSGAYRMKIYDRDELRGQMSELTDDCISVQDRFHLTEIHSLNVLEGSWILYEMPNYRGRQYLLRPGEYRRFLDWGAPNAKVGSLRRVMDLY

SEQ ID NO: 781114 - protein, 109 aa, Homo sapiens
SSVACKWNLAEAQQKLGSLALHNSESLDQEHAKAQTAVSELRQREEEWRQKEEALVQREKMCLWSTDAISKDVFNKSFINQDKRKDTEDEDKSESFMQKYEQKIRHLVC

SEQ ID NO: 781115 - protein, 84 aa, Homo sapiens
LDIFRQGRLWLWMGGSEGVHACAGTHIRERKRGRQASRMNVCFETLGSMSKEYNSTTQATRNRPHSLLELYGRVIRGWLVPDMC

SEQ ID NO: 781116 - protein, 72 aa, Homo sapiens
FSHGTWTSCLPERPPFWIPEDPARVVTAGSAGLEKALLGPGTAGGGRRIMPGPGQGVQGREWMHRYRPCSYV

SEQ ID NO: 781117 - protein, 70 aa, Homo sapiens
RVQIMTGKVRDTTEPTLTVVYTEELAGREAFHIQLGSGKGPHNIVATRGRAAPAGPLTRLKALFLGVKCL

SEQ ID NO: 781118 - protein, 372 aa, Homo sapiens [sequence omitted]

SEQ ID NO: 781119 - protein, 372 aa, Homo sapiens [sequence omitted]

SEQ ID NO: 781120 - protein, 372 aa, Homo sapiens [sequence omitted]

SEQ ID NO: 781121 - protein, 372 aa, Homo sapiens [sequence omitted]

SEQ ID NO: 781122 - protein, 37 aa, Homo sapiens
MCLLVTEEKCNLPDSVFQFLPCNCKASDSVNISISLC

SEQ ID NO: 781123 - protein, 123 aa, Homo sapiens
PHRGPGLEQNAAHSRRSNVSVIWSHLWEMDFPGAGAILGDGLPQSRQVPPQAVPGPAHQAAPLGFSEFTRQSIKHSGRRLWKPALSANGEKAGKKGALTRCPLHTVLMQSSHTTKRSSVYQPG

SEQ ID NO: 781124 - protein, 38 aa, Homo sapiens
MHSQVCSELPMRDLAVAKRQVPSRMQVSMGECQASSSP

SEQ ID NO: 781125 - protein, 91 aa, Homo sapiens
MLSATLTIPIWQWFLTRFGKKTAVYVGISSAVPFLILVALMESNLIITYAVAVAAGISVAAAFLLPWSMLADVIDDFHLKQPHFHGTEPIF

SEQ ID NO: 781126 - protein, 105 aa, Homo sapiens
DFLEVTDRIHILVGFIFIHSQYSQPVSFSVFPFSVNVVTSCQKTGSHPPFLSDASYQIKIACSASRISLISAHFSLCSATILVQVTTISLCNITIDYLLEVQFLI

SEQ ID NO: 781127 - protein, 105 aa, Homo sapiens; identical to SEQ ID NO: 781126

SEQ ID NO: 781128 - protein, 115 aa, Homo sapiens
MSTPACEEGRSQTSDVLKYHKRVKVNILWVEFLQDTSTNPIEVASDNCVCWKKKIQPGKGGARDKHLAQEPRAQKESRTLMLTHTCTHAHEHTNMHVYTLSHTRMHTHTYTCTHT

SEQ ID NO: 781129 - protein, 90 aa, Homo sapiens
CSTSFQLNPPLHQGKKDIFPASTDLWALLFQNGRWQNFIQKQSLVPTRKPRDTGEPLVATQVKHERLRNGNAVLHMAGSPGPAVGCSSVI

SEQ ID NO: 781130 - protein, 148 aa, Homo sapiens
AAPAVWWLLPGALRAEGLAMTLAPAAGSARPRAHPSVLRADPVQSPCWPGLRGFWQLPPCTPYPSPYQILLSGTFFPRGVGDQEHKGLLFAEYHMAPCVGARLGAVQTQFHPGLTHCPAVTEPLSASSSSSVKGCMLTSDVHCEGDTR

SEQ ID NO: 781131 - protein, 121 aa, Homo sapiens
VGEPPETGWGNWFVAVYPGINATFFSAVSAGPSVGGSNSFWPGLLTFLSGQALLDSFSQRCLSLCSVSLEGRSQSFTIGWIWFDIFWWTVKGERKFLDYFKIPHRPRPTDVCELRLWKLEC

SEQ ID NO: 781132 - protein, 78 aa, Homo sapiens
MRPTWRCGVSLPPNYKRNTAPGGSNTQSAVFVRTKFSEILESLSREGLNTAGRFILHPRRSPERRPPIIQIYARSVVW

SEQ ID NO: 781133 - protein, 290 aa, Homo sapiens
MWVTKLLPALLLQHVLLHLLLLPIAIPYAEGQRKRRNTIHEFKKSAKTTLIKIDPALKIKTKKVNTADQCANRCTRNKGLPFTCKAFVFDKARKQCLWFPFNSMSSGVKKEFGHEFDLYENKDYIRNCIIGKGRSYKGTVSITKSGIKCQPWSSMIPHEHSFLPSSYRGKDLQENYCRNPRGEEGGPWCFTSNPEVRYEVCDIPQCSEVECMTCNGESYRGLMDHTESGKICQRWDHQTPHRHKFLPERYPDKGFDDNYCRNPDGQPRPWCYTLDPHTRWEYCAIKTCET

SEQ ID NO: 781134 - protein, 210 aa, Homo sapiens
MWVTKLLPALLLQHVLLHLLLLPIAIPYAEGQRKRRNTIHEFKKSAKTTLIKIDPALKIKTKKVNTADQCANRCTRNKGLPFTCKAFVFDKARKQCLWFPFNSMSSGVKKEFGHEFDLYENKDYIRNCIIGKGRSYKGTVSITKSGIKCQPWSSMIPHEHSFLPSSYRGKDLQENYCRNPRGEEGGPWCFTSNPEVRYEVCDIPQCSEGK

SEQ ID NO: 781135 - protein, 728 aa, Homo sapiens
MWVTKLLPALLLQHVLLHLLLLPIAIPYAEGQRKRRNTIHEFKKSAKTTLIKIDPALKIKTKKVNTADQCANRCTRNKGLPFTCKAFVFDKARKQCLWFPFNSMSSGVKKEFGHEFDLYENKDYIRNCIIGKGRSYKGTVSITKSGIKCQPWSSMIPHEHSFLPSSYRGKDLQENYCRNPRGEEGGPWCFTSNPEVRYEVCDIPQCSEVECMTCNGESYRGLMDHTESGKICQRWDHQTPHRHKFLPERYPDKGFDDNYCRNPDGQPRPWCYTLDPHTRWEYCAIKTCADNTMNDTDVPLETTECIQGQGEGYRGTVNTIWNGIPCQRWDSQYPHEHDMTPENFKCKDLRENYCRNPDGSESPWCFTTDPNIRVGYCSQIPNCDMSHGQDCYRGNGKNYMGNLSQTRSGLTCSMWDKNMEDLHRHIFWEPDASKLNENYCRNPDDDAHGPWCYTGNPLIPWDYCPISRCEGDTTPTIVNLDHPVISCAKTKQLRVVNGIPTRTNIGWMVSLRYRNKHICGGSLIKESWVLTARQCFPSRDLKDYEAWLGIHDVHGRGDEKCKQVLNVSQLVYGPEGSDLVLMKLARPAVLDDFVSTIDLPNYGCTIPEKTSCSVYGWGYTGLINYDGLLRVAHLYIMGNEKCSQHHRGKVTLNESEICAGAEKIGSGPCEGDYGGPLVCEQHKMRMVLGVIVPGRGCAIPNRPGIFVRVAYYAKWIHKIILTYKVPQS

SEQ ID NO: 781136 - protein, 177 aa, Homo sapiens
  misc_feature (2)..(2): Xaa can be any naturally occurring amino acid
MXFDLYEDKDYIRNCIIGKGRSYKGTVSITKSGIKCQPWSSMIPHEHSFLPSSYRGKDLQENYCRNPRGEEGGPWCFTSNPEVRYEVCDIPQCSEVECMTCNGESYRGLMDHTESGKICQRWDHQTPHRHKFLPERYPDKGFDDNYCRNPDGQPRPWCYTLDPHTRWEYCAIKTCET

SEQ ID NO: 781137 - protein, 361 aa, Homo sapiens
QAATGLSDQDPYPLDMASVPCKPQPRSPARLQTAKRHHHRACAVPLTRAQKATGPEAMETVPPAVDLVLGASACCLACVFTNPLEVVKTRLQLQGELQARGTYPRPYHGFIASVAAVARADGLWGLQKGLAAGLLYQGLMNGVRFYCYSLACQAGLTQQPGGTVVAGAVAGALGAFVGSPAYLIKTQLQAQTVAAVAVGHQHNHQTVLGALETIWRQQGLLGLWQGVGGAVPRVMVGSAAQLATFASAKAWVQKQQWLPEDSWLVALAGGMISSIAVVVVMTPFDVVSTRLYNQPVDTAGRGQLYGGLTDCMVKIWRQEGPLALYKGLGPAYLRLGPHTILSMLFWDELRKLAGRAQHKGT

SEQ ID NO: 781138 - protein, 183 aa, Homo sapiens [sequence omitted]

SEQ ID NO: 781139 - protein, 84 aa, Homo sapiens
MLPGSGERGSLQSRGKAWEAEAREEGARRGMKVQQGLMVNGGTVPLILSSPGCGVLLCFLPCPDFSVAKYTWPSFHMTKERPRM

SEQ ID NO: 781140 - protein, 122 aa, Homo sapiens [sequence omitted]

SEQ ID NO: 781141 - protein, 84 aa, Homo sapiens
MVVRATVAPVKESDKTLLELDLEDSLRCQEGQGGWEGILGGGNCQSIMGYKSGSFQPRPQEMPDLTFQRMGQTAGNIHQRGVRK

SEQ ID NO: 781142 - protein, 108 aa, Homo sapiens
FPLFSLVFIQLQKTSSFPFVKNSKALITAFKFSVQNTHTPNLPLKFLSQPHKEFSCNVNCELLVNRMQDRQRQGFGILSVLFRYWHEMGAFAHRRHSVNIRIGWRVTD

SEQ ID NO: 781143 - protein, 71 aa, Homo sapiens
FPIKAQVSLGLSNVSDEKKLPKVAEIEKPLLGVLTYSLGLSLLGGVFIEASRVLPHAMTRGRLKFVNSYGI

SEQ ID NO: 781144 - protein, 143 aa, Homo sapiens
HLSISKPFHCNSGLFPHSLSLKLMENWQVSIRLTKAFITVNKESSATRQNLWFSIQICFSCNLKQLGFPSFRKKGAVPAGSSKILRATEFHPQPNGSSLLLLSLGSKGKPIIAWSRERSKAHQHKVLEDIWTDRKRRKGMKTP

SEQ ID NO: 781145 - protein, 92 aa, Homo sapiens
TNALPIRAFQAALGDPAGRKPTGPPLISRDRWGHGSSSTSIPPLSGSQSCLGEVHHPICTLAAMDMATQPVVHGPPLTAGMDTQPTQVEREG

SEQ ID NO: 781146 - protein, 46 aa, Homo sapiens
MASTKLEKGYSEEERRVGEKRDCPEAPLITFNQQNKYFLEKVSAAL

SEQ ID NO: 781147 - protein, 110 aa, Homo sapiens
MAGLMNVRLRGKRMEPASTFCHSQSGVTSPCSPSCLQACRALPISAASAWLPLRTTTALSPSPTPILLRVQVSPAHPKPRCLPSPFSALGPQGKACDRRLPLPALVSSSS

SEQ ID NO: 781148 - protein, 86 aa, Homo sapiens
DACFQQQAHKTQRLFCLKQLKRIFTWILCVYMHVYVCVCACMCVCVWMDMCMCVYMYACGGLCVCTCVCVHLYRFTGSYGCVCVYT

SEQ ID NO: 781149 - protein, 54 aa, Homo sapiens
  misc_feature (46)..(46): Xaa can be any naturally occurring amino acid
MASRYDRAITVFSPDGHLFQVEYAQEAVKKGSTAVGIRGLTSDARXVINRARLE

SEQ ID NO: 781150 - protein, 87 aa, Homo sapiens
TTGRSDQTYARGWMKTLREDERRDPKPAQQGELERDPVRKVGSQEGLFHLQTWTQNAHARDAGMWPGRRMLGNRNMKASLCGGVGFK

SEQ ID NO: 781151 - protein, 64 aa, Homo sapiens
PVCSAGRGVDRAAEEAPDSKERRQPVRTPLHPGPRQGTSGLHCELLWLSPASIPALSWQLHHGP

SEQ ID NO: 781152 - protein, 103 aa, Homo sapiens
NKSRTTMRTKKKATYLAPCLATETLVCDPGSPSLGAANTVVILCGGAVLCVRQCLAVSLASRPCSTPSFCDQKYFQTLPTVPGGQGHQVKCGPSIAFESQVNK

SEQ ID NO: 781153 - protein, 48 aa, Homo sapiens
FIGGYIATSRNTGIPFTKKGGNEEKRRQPGVHATESYSVTPLLCDLEE

SEQ ID NO: 781154 - protein, 196 aa, Homo sapiens
NCKNVSLVHLPLCLLKDTRVRRANGPIKWPGLCPLFLTPQWAHCPLFLNLQWAHCLLFLTPQWAHSLCLGMLLLLWLPLLWLLLILSFFSSFCCSGQVCCSAAVVWSAVLLQWSGLLSCCSGQVCCSVFCCSGLVCCPAAVVGSAVLLQWLGLLFCCSGRICCSVSCCSGQVCCSVFCCSGRVCCSAAVVRSAVLL

SEQ ID NO: 781155 - protein, 131 aa, Homo sapiens
PTVNLIQSCLNSCVFPIVLAGIPSPKGRAQAPLGLVPVCVSILLVLPLLPDLSCLLHTLHILIVQILCFWLSDSSRCSVCFSFFLLTFSGYFLPSPLALGWYSSPSVTFFPILAKAGLQVHTSVAPSLSIA

SEQ ID NO: 781156 - protein, 44 aa, Homo sapiens
KLGTGMKMDWEEISPRRVYKLRGKGPSHPADPPSQLASGTFSKP

SEQ ID NO: 781157 - protein, 246 aa, Homo sapiens
ETFLREKFEHIQHIVIDEAQNFRTEDGDWYRKAKTITQREKDCPGVLWIFLDYFQTSHLGHSGLPPLSAQYPREELTRVVRNADEIAEYIQQEMQLIIENPPINIPHGYLAILSEAKWVPGVPGNTKIIKNFTLEQIVTYVADTCRCFFERGYSPKDVAVLVSTVTEVEQYQSKLLKAMRKKMVVQLSDACDMLGVHIVLDSVRRFSGLERSIVFGIHPRTADPAILPNILICLASRAKQHLYIFL

SEQ ID NO: 781158 - protein, 102 aa, Homo sapiens
MHFCLGVCNQTSERTGNVPYIKVISTHFGKGGKTEGQCHHYSLSQRKHELMYTVVSRTGALKSVCRLGESHCRPSQQPPRKVTPKVVPALNIKVCLCRGLIW

SEQ ID NO: 781159 - protein, 61 aa, Homo sapiens
ICLVTLHCVLSSVCKVHPLKKASQESSCFNPERSPHFCLPHMKLSYVTEYHRNLEVGASNE

SEQ ID NO: 781160 - protein, 54 aa, Homo sapiens
FEDHHQTFLLSLDTTASSPHTSLAATETCSQEILNHALSQSYQNGRGISQEKLS

SEQ ID NO: 781161 - protein, 43 aa, Homo sapiens
MVQAFNFKIPKTWGNEFGGRAPVKIPVSLFLYILSPSPISYSQ

SEQ ID NO: 781162 - protein, 66 aa, Homo sapiens
KWLRCRVNVVIGHCEKETEELTAIPQMASRCRVDSGCCNQKECWLPAAISWLPAEVSLFWSGGILF

SEQ ID NO: 781163 - protein, 162 aa, Homo sapiens
MQGWFNIHKSINVIQHINRTKDKNHMIISIDAQKAFDKIQQHFMLKTLNKFGIDGTYLKIIKAIYDKPTANIILNGQKLEAFPLKTGTRQGCPLSPLLFNIVLEVLAREIRQEKEMKGIQLGKEEVKLSLFADNMIVYLENPIVSAQNLLKLISNFSKVSGY

SEQ ID NO: 781164 - protein, 103 aa, Homo sapiens
TGPPSEEECHFCMGCTTPDRTTEHTHWAVAQGHPPRGRIEPGAAVCSQPQTPGNAASHTVLKVDGWLSDFSGSILPLPDISKTSSPPCFLSSNSSQHPLSCAN

SEQ ID NO: 781165 - protein, 125 aa, Homo sapiens
TLPPPPQQPPKRGDWEGYTKPSSLNPKFRRKWAGADGLQTGKPRLRTLHKVTVFVAKPRGTGSVLSATPQGSTSPPDSPYQSSPSLLRSAWDKHISPETEESLQARYPGMAQSLLRPARHDGVQG

SEQ ID NO: 781166 - protein, 97 aa, Homo sapiens
ARAALAHLAASPQGARTQTCPCHLSARVRAGGGGATKGGAESGAQDSAGAPAHRGAHRPRICEEVTQISRQCWMQTDLPAIASLSKPALPVSSEDTK

SEQ ID NO: 781167 - protein, 97 aa, Homo sapiens; identical to SEQ ID NO: 781166

SEQ ID NO: 781168 - protein, 112 aa, Homo sapiens
MPQHGGTFPKADWLRPREACLSCAGCRPFFLHCTSLPWHESFPFLPGAVVFLHWRLWALAPVVEDFRRLWCFPSLCLGKGSFLTALPHGIPSPSPSSSLPFPPPSSPLTLIP

SEQ ID NO: 781169 - protein, 67 aa, Homo sapiens
MGPQEGPSLIAKNSSLFLPRIILAAKVLELLQLICKTFDPICLKTSAFSVGLSGPDQGSPSTHPQTH

SEQ ID NO: 781170 - protein, 255 aa, Homo sapiens
LDEFPINLPRSLRELHLQDNNVRTIARDSLARIPLLEKLHLDDNSVSTVSIEEDAFADSKQLKLLFLSRNHLSSIPSGLPHTLEELRLDDNRISTIPLHAFKGLNSLRRLVLDGNLLANQRIADDTFSRLQNLTELSLVRNSLAAPPLNLPSAHLQKLYLQDNAISHIPYNTLAKMRELERLDLSNNNLTTLPRGLFDDLGNLAQLLLRNNPWFCGCNLMWLRDWVKARAAVVNVRGLMCQGPEKVRGMAIKDIT

SEQ ID NO: 781171 - protein, 156 aa, Homo sapiens
MVVAHPTATATTTPTATVTATVVMTTATMDLRDWLFLCYGLIAFLTEVIDSTTCPSVCRCDNGFIYCNDRGLTSIPADIPDDATSLYLQNNQINNAGIPQDLKTKVNVQVIYLYENDLDEFPINLPRSLRELHLQDNNVRTIARDSFVPHFPHVGE

SEQ ID NO: 781172 - protein, 137 aa, Homo sapiens
KAPQSLYVPSSLSFLPLTLLKYPGEVLSFGENIAIGNIANICYRKISQTWQFRHNMCFSPLLILGSPRSRHDTEAQLAALLRDLTLLLPGGPAPAALPSCLHAPQPVAHVERFGVWGWKISVQILHSLPCASVSLAS

SEQ ID NO: 781173 - protein, 85 aa, Homo sapiens
AIASRCLARVPGCAYSSIMVALSLVPLCAHMPTPSGLEVALPGNRTICWLSLWPSWQLDEDAQSPALESSSIRQFPTAPRSGISP

SEQ ID NO: 781174 - protein, 153 aa, Homo sapiens
MKWETKRATSLVTCRWRRGALRPFLTYPLSRYGGCPKHSVMGTGLGTATLGTSARGWGVSCRRGCRAGGGLAIPSTGCIIKKSLRQAGRAECELTLRAGGDTAMALPLPLLPRGKIPPANIIMEKHKHRNLVSANNVPQCPGPAWPSAQRAGW

SEQ ID NO: 781175 - protein, 41 aa, Homo sapiens
TLEDLLEAGHCTPPHSQDFGQSWPAPETHSWELPSPEGKRL

SEQ ID NO: 781176 - protein, 116 aa, Homo sapiens
MWEGFNSAGVDCSNPARSQEGPLAGSWELSSCSVLTDERDWSHVALLCLVVDQQVMDGKHLLSLWVAGTSLTDPQVQESLPGPHHGTSCPSFLLEESGAPCVTPLGGTLEAPGFPG

SEQ ID NO: 781177 - protein, 152 aa, Homo sapiens
  misc_feature (14)..(14): Xaa can be any naturally occurring amino acid
  misc_feature (18)..(19): Xaa can be any naturally occurring amino acid
  misc_feature (37)..(37): Xaa can be any naturally occurring amino acid
LIQQPLCYIMNFFXLKAXXNICFPIPKNRMIFSSKWXKRFLHSSLLILSNGFLKYPPVGNMMWHTHRLPMCMGHTRGGPSARLIDTAVSPLWLHSCGKAGVGSVTSQVGLTPVGREPETFPCVGTLLTGSHKPRCPHAASTPRAPRRKFVIF

SEQ ID NO: 781178 - protein, 80 aa, Homo sapiens
NNVIFMDTGDKDFHIFWGDTIQLITPIILEPYLPSVHLCLRPAASQEKSLCLVCHSCLPCRFQRRSHLLERPSLATLNIE

SEQ ID NO: 781179 - protein, 89 aa, Homo sapiens
DSSLKCQAGCPFPKYAALGSCPGLGRHAVSTCEGLRKGNFTSARGLTGHVSLGTNLLGYEVRSCRCAVVSPCPLRVIPIKCEKGQAGCS

SEQ ID NO: 781180 - protein, 108 aa, Homo sapiens
GLALLPRLECSGMITAHCSLDLLGSEDPPTSASQIARTRGAHQHAQQIFKSFCRDEVLLCCPGWSRTPGLERSSHLGLPKHWDYRREPLRPADFSLTPRFQPEPGRHS

SEQ ID NO: 781181 - protein, 89 aa, Homo sapiens
GGMSGYVIELSRAWGLEVVCRMYIQVSTQVSTDLCDKIIKEMKIRVTAICQNISRCQSLKYEQQQLMWNDKDEVRAVAIRHLLNLMSTV

SEQ ID NO: 781182 - protein, 103 aa, Homo sapiens
PFRPCLGPWIPARCPWTSPVLLHGDRNKHRAVVRLSILCPSSSSTKWSSSQASEGLSLSCRVSERTVGSNAQVPRQCLTCAGGWPCLLPIRSPLNYPSAVNGL

SEQ ID NO: 781183 - protein, 105 aa, Homo sapiens
GWRESERRVATQSCLGPGLRLGGECHSLYLTADVAQAFLPGTPGDSGVNIDSVSASACWPYLPSLQGGCSRALAMWWEPVFQQQPKAGRPDCGVRGQLCMGATLQ

SEQ ID NO: 781184 - protein, 67 aa, Homo sapiens
SAAALPLTWTTATASYRGSPFPFLSPIVHSTQQVDVSLNVNQIKSPLLTIFQWFPLTFKLTSKSHII

SEQ ID NO: 781185 - protein, 110 aa, Homo sapiens [sequence omitted]

SEQ ID NO: 781186 - protein, 110 aa, Homo sapiens
SPYELTRKAVKQDYELSGRPVEWIIYELSRSPVEWIIYELSGRPVERIIYELSGRPVEWIIYELSRSPVEWIIYELSGRPVERIIYELSGRPVEWIIYKLSRRPVEQIHL

SEQ ID NO: 781187 - protein, 57 aa, Homo sapiens
HSVCWGTQKMKQTGSLPQRAHPHKCPQGLGRSSLEGSQPGSEPGELEKTAALVVDIL

SEQ ID NO: 781188 - protein, 115 aa, Homo sapiens
CILKFIQNLKGPQIAKIILKRKKTVRGLTFPYFKTYYKAIVFKIVWYWHKDRHTEQLNRIKCPEINPCIYSQLIFIQGHKDYSVKKGQPLQQMELEKLDIHMQKNRVIPFILHHK

SEQ ID NO: 781189 - protein, 121 aa, Homo sapiens
SCLGKTGASLRSGWSVSLVWLLLYTSTNNRGQVYRGGTTTLGVPIPGLRANQMTTRLAVHILQERCLFHFTTNHIESLSKGQTQITPAVAVLWDAEVGGLLEARSSGPAWATEQDPVPTKR

SEQ ID NO: 781190 - protein, 103 aa, Homo sapiens
VSVSGRSPALSPRLECSGTISAHCSLRLPDSKDSPASSCQVAGITGTCHHAWLIFVFLVETGFPHVGQAGLKLLTSSDLPTSASQSAGITGMSHHTQLEIIFE

SEQ ID NO: 781191 - protein, 137 aa, Homo sapiens
TVPDHSPVSLSNPRNSRTESSGHPSSFYHKTLGSTNYLTLNLQLLLQQQASSLSNITSKLRNLPLTIHPIGSEMDLAFLVWPPVAPWLYPFWVPTPGDQAYTHKTQPVISKMHKATTEIICGSCWRELKKLGMLQSS

SEQ ID NO: 781192 - protein, 50 aa, Homo sapiens
FRWARITPPNKLSLRSPVTSVYNVLVPVSISVLVPVFIDLSAAFDTVDHT

SEQ ID NO: 781193 - protein, 35 aa, Homo sapiens
AGNITLKTSLGANTGGQECDEVHTVPESKVSLRNH

SEQ ID NO: 781194 - protein, 70 aa, Homo sapiens
SEGGTETPGKKAETQRREETEETQGDRDSEREKDRDPGNTHPEGGIKTKYGDRDPEKREDRKPAGEEGEM

SEQ ID NO: 781195 - protein, 275 aa, Homo sapiens
PRDYGLLVSSLDEHVATVTQDRAFPLVVAEAEGSGELLRAELTIAESCQKTKRKSVLATTPVGLRVHFGRDEEDPTYDYPGPSQPGPGGGEDEARGAGPPGSALPAPEAPGPGTASPVVPPTEDFLPLPTGFLQVPRGLTDLEIGMYALLGVFCLAILVFLINCIVFVLRYRHKRIPPEGQTSMDHSHHWVFLGNGQPLRVQGELSPPAGNPLETVPAFCHGDHHSSGSSQTSVQSQVHGRGDGSSGGSARDQAEDPASSPTSKRKRVKFTTFTT

SEQ ID NO: 781196 - protein, 47 aa, Homo sapiens
STEEVDSTDEEVEAHQDGAPRVTWWPLLVTSLIHPPAFQGGSSWEPP

SEQ ID NO: 781197 - protein, 34 aa, Homo sapiens
ESSVEENEKQQNASESKLELRNNSNTCNIENELE

SEQ ID NO: 781198 - protein, 66 aa, Homo sapiens
DYYYEICRPRRHHTCLLYLEVVFPIPTWLTSSLHSSLCSDINLFREPFLHTLSCIAASPTSCLLSP

SEQ ID NO: 781199 - protein, 130 aa, Homo sapiens
MTAPPLRAAALTQREAARRSPQVPIQGEPQTCCVRPADSAAGSAEGSGAGAELRSPGSGQDREPSPPEAQRAAAVRAVSQWTPSPVLNSLGVLGTYSVRTQLWEEFGRCGHRPQCPSPRESRGVNDDSPV

SEQ ID NO: 781200 - protein, 107 aa, Homo sapiens
TAIPEEMVNSHAVFGEGSSQECTLHGGQGWLRQAWGELSLDGELSAVRSTSSSPARGHFRAVRQNSLGTVHESLGEKAGPSLCDVKHLCRTQGHIPFEPQEQTGKQI

SEQ ID NO: 781201 - protein, 98 aa, Homo sapiens
NNHARDAGCSEDFPPVTAKRRIQMTDNVRLFLGRAPSLYRQRAQQHLQPEPEDPSPDLEMRGRKRRPRGARVEAPWSLGGVESWGRCRKGSSGEAGTF

SEQ ID NO: 781202 - protein, 92 aa, Homo sapiens
VLLLGGTTGARFPGSQVTGTACQPPASLSSPAISHTPGSEEQDSEPESPAPFLHRASPVPGLDLFKNHSFVFKEEQKRHQQKQQGAFGFTKR

SEQ ID NO: 781203 - protein, 120 aa, Homo sapiens
SPYTGQKKVPLSSIFYVTQHFCLSFQLLVLSSRLSASFTWSPHTFLRTWIWHGFLTLLQTSCPPSTDLLHSLPDLTPSLREIITSFLHPSLTQSAKQTRARVHPALYHPLFSNNASPSST

SEQ ID NO: 781204 - protein, 58 aa, Homo sapiens
MDEDIGVGTGFDPRPQAAASVLYQPCGVLTVPYQETQSTRGFRSSLLPPLPPGEKDPR

SEQ ID NO: 781205 - protein, 66 aa, Homo sapiens
TGISGGWSMLNALQGKEDETGRRWEEKLLSGVAKRATLQPFFPGTIFRAKTENALKLLVPNGVNPG

SEQ ID NO: 781206 - protein, 126 aa, Homo sapiens
HEKRERGDSHVSYKEMPEKDKKGMTERSGGNKSQDTETKKDKPQTGEKGPERMAERNSEGDRVPRLGQRQNKASPTQVREAHGAQGEPSRAPALRRAGVQAQLRASLPFSLAFWETLSPLPNLPWC

SEQ ID NO: 781207 - protein, 257 aa, Homo sapiens
LRIPPPGTLRGSRTAAVLALLSLSLSMYLVTVLRNLLSILAVRSDSPLHTPIYFFLSNLCWADIGFTSATVPKMIVDMQSHSRVISHAGCLTQMSFLVLFACIEGMLLTVMAYDCFVAICHPLHYPVIVNPHLCVFFVLVSFFLSLLDSQLHSWIVLQFTIIKNVEISNFVCDPSQLLKFACSDSIINSIFIYFHSTMFGFLPISGILLSYYKIIPSILRISSSDGKYKAFSTCGSHLAVVCWFYGTDIGMYLTSAV

SEQ ID NO: 781208 - protein, 78 aa, Homo sapiens
KWVAMKSYQWRLKENQEGPEREWSQEAGRREAGFVSGLPRAPRRGASLLSMAEHRGWNTDVRSSSGPERKNSLVPGLL

SEQ ID NO: 781209 - protein, 126 aa, Homo sapiens
VFLQRLPKPSWNSLFESLRGDRETGGGGVLEAFLTGAWRGHVGQGEAQGPLVTLGKPPSSLTLTSVLICQGSGWVTSKNSEAEAGVARVLRPASVSPSASPRFLKALPALKTNQPPAGGLGLGQAA

SEQ ID NO: 781210 - protein, 46 aa, Homo sapiens
RGLPSTGGSRRPWLAEKQGGGKEGGGPEGRSDRSAETSSPPSPAPT

SEQ ID NO: 781211 - protein, 346 aa, Homo sapiens
AAANSARAESNMAGSPTCLTLIYILWQLTGSAASGPVKELVGSVGGAVTFPLKSKVKQVDSIVWTFNTTPLVTIQPEGGTIIVTQNRNRERVDFPDGGYSLKLSKLKKNDSGIYYVGIYSSSLQQPSTQEYVLHVYEHLSKPKVTMGLQSNKNGTCVTNLTCCMEHGEEDVIYTWKALGQAANESHNGSILPISWRWGESDMTFICVARNPVSRNFSSPILARKLCEGAADDPDSSMVLLCLLLVPLLLSLFVLGLFLWFLKRERQEEYIEEKKRVDICRETPNICPHSGENTEYDTIPHTNRTILKEDPANTVYSTVEIPKKMENPHSLLTMPDTPRLFAYENVI

SEQ ID NO: 781212 - protein, 296 aa, Homo sapiens
MAGSPTCLTLIYILWQLTGSAASGPVKELVGSVGGAVTFPLKSKVKQVDSIVWTFNTTPLVTIQPEGGTIIVTQNRNRERVDFPDGGYSLKLSKLKKNDSGIYYVGIYSSSLQQPSTQEYVLHVYEHLSKPKVTMGLQSNKNGTCVTNLTCCMEHGEEDVIYTWKALGQAANESHNGSILPISWRWGESDMTFICVARNPVSRNFSSPILARKLCEGAADDPDSSMVLLCLLLVPLLLSLFVLGLFLWFLKRERQEENNPKGRSSKYGLLHCGNTEKDGKSPLTAHDARHTKAICL

SEQ ID NO: 781213 - protein, 228 aa, Homo sapiens
MAGSPTCLTLIYILWQLTEHLSKPKVTMGLQSNKNGTCVTNLTCCMEHGEEDVIYTWKALGQAANESHNGSILPISWRWGESDMTFICVARNPVSRNFSSPILARKLCEGAADDPDSSMVLLCLLLVPLLLSLFVLGLFLWFLKRERQEEYIEEKKRVDICRETPNICPHSGENTEYDTIPHTNRTILKEDPANTVYSTVEIPKKMENPHSLLTMPDTPRLFAYENVI

SEQ ID NO: 781214 - protein, 107 aa, Homo sapiens
PRSAPEVYAFETTEWPGSRSQRILACVIQNFMPEVISVQCLHNEVQLPDDRHSTTQPRKTKGSGLFVFIRLEVTRPNGIRKMSSCPVQSMRQRSPHSLSSDRCRKSR

SEQ ID NO: 781215 - protein, 274 aa, Homo sapiens [sequence omitted]

SEQ ID NO: 781216 - protein, 109 aa, Homo sapiens [sequence omitted]

SEQ ID NO: 781217 - protein, 346 aa, Homo sapiens; identical to SEQ ID NO: 781211

SEQ ID NO: 781218 - protein, 340 aa, Homo sapiens
AGWYGPKGRSSCLTLIYILWQLTGSAASGPVKELVGSVGGAVTFPLKSKVKQVDSIVWTFNTTPLVTIQPEGGTIIVTQNRNRERVDFPDGGYSLKLSKLKKNDSGIYYVGIYSSSLQQPSTQEYVLHVYEHLSKPKVTMGLQSNKNGTCVTNLTCCMEHGEEDVIYTWKALGQAANESHNGSILPISWRWGESDMTFICVARNPVSRNFSSPILARKLCEGAADDPDSSMVLLCLLLVPLLLSLFVLGLFLWFLKRERQEEYIEEKKRVDICRETPNICPHSGENTEYDTIPHTNRTILKEDPANTVYSTVEIPKKMENPHSLLTMPDTPRLFAYENVI

SEQ ID NO: 781219 - protein, 256 aa, Homo sapiens
MAGSPTCLTLIYILWQLTGSAASGPVKELVGSVGGAVTFPLKSKVKQVDSIVWTFNTTPLVTIQPEGGTIIVTQNRNRERVDFPDGGYSLKLSKLKKNDSGIYYVGIYSSSLQQPSTQEYVLHVYEHLSKPKVTMGLQSNKNGTCVTNLTCCMEHGEEDVIYTWKALGQAANESHNGSILPISWRWGESDMTFICVARNPVSRNFSSPILARKLCEENNPKGRSSKYGLLHCGNTEKDGKSPLTAHDARHTKAICL

SEQ ID NO: 781220 - protein, 212 aa, Homo sapiens
MAGSPTCLTLIYILWQLTGSAASGPVKELVGSVGGAVTFPLKSKVKQVDSIVWTFNTTPLVTIQPEGGTIIVTQNRNRERVDFPDGGYSLKLSKLKKNDSGIYYVGIYSSSLQQPSTQEYVLHVYEHLSKPKVTMGLQSNKNGTCVTNLTCCMEHGEEDVIYTWKALGQAANESHNGSILPISWRWGESDMTFICVARNPVSRNFSITISYT

SEQ ID NO: 781221 - protein, 112 aa, Homo sapiens
ACPPCKDSSGSMRVPHTAPISWMSPAGAGGHPGLLAAAPSQPGLAQPTAWEVTGHSPRSWDPRDAGPQCGAAPMMRSWPPTLRAAPGTNSVFVSVCFSKKWFKLLLRFLNLL

SEQ ID NO: 781222 - protein, 103 aa, Homo sapiens [sequence omitted]

SEQ ID NO: 781223 - protein, 83 aa, Homo sapiens
YHPPGLLTGLLLPLLPIEFVLHIREILLKPVTSLLKNPPCLSTALKARSHVALQDLAPGDVSDLIPTTGLLYSGHTGQTCASQ

SEQ ID NO: 781224 - protein, 94 aa, Homo sapiens
AAEPFNEQGSLQFTMAQPGLFHSLRYLSGLQGAEILTVGHPLVPLGQKPAASKEEEKRVLLLELVENTVPKTSMGPSHSSSPLLLVLPGPLSHS

SEQ ID NO: 781225 - protein, 64 aa, Homo sapiens
VQVPAGAPHRLPDATMPPADGTEMRPWKLSPRPRAPSDQPHPLDFKLGALCHQEAPSPPPLKEL

SEQ ID NO: 781226 - protein, 55 aa, Homo sapiens
PEDLGCLPGAVGPGDPPRHLLLPAQLQVLSSSRANLSWEIKCQVGTQLVTAGSGT

SEQ ID NO: 781227 - protein, 91 aa, Homo sapiens
MASSQNSMQIILRPVPPAQTSLNSHLHDSKVFQAHHGKDQIRDLSQTNLIVFLCCYLMEWPNYPSMQQKQKVQALSFVPLLHSILPCSPLL

SEQ ID NO: 781228 - protein, 80 aa, Homo sapiens
NPGLSDPNASNSHLGDGKGPPQAPAMSTPPAWHSGCILPWLPCVHRKAQLHAQQPSFLQPPGHLWFPAALGSFQPPGLCP

SEQ ID NO: 781229 - protein, 123 aa, Homo sapiens [sequence omitted]

SEQ ID NO: 781230 - protein, 141 aa, Homo sapiens
MIKGLAQHKDTIILNLYATNTGAPRFIKQLLLDLRNETGNNTIIVWDFNTPLTALERSRQKVNKETTNLNYILEQMNLTGVYTTFFPTTAEYTFSSSAHGTVSKIGDMMGHKISLNKFKKIKILSSIFSDHSGIKLEINYK

SEQ ID NO: 781231 - protein, 186 aa, Homo sapiens
QRCLGQQRVLTRLEMRQSGSESSLVNVSESIAVSGTSSSTNPWGRWCDIIQPAYSQQKAREEEECKKVLTSSCGAEVNDANRCVERLNSYLTDIHRDKSSTILILNLKESLIQKVQCRVINLRDEKESCEEMMQQGERIGTTGSGSTRVMWKIRELLFLECSYSEGRPKQKRHRCRTPSKLDGVLG

SEQ ID NO: 781232 - protein, 68 aa, Homo sapiens
NRADTNSPRWVVPAASSSSALHQSFILATEFPPSLLYRHPIPMAITNTIITKPNSSSGFICPKFLLHI

SEQ ID NO: 781233 - protein, 82 aa, Homo sapiens
MGCAHTQLNKLHHFIITSKISEEGKEEDSTSYCNIKGNGGTWKCLSTWNSCQKGSTFLASHPIYVMQLQLRAEGDLLGAAGG

SEQ ID NO: 781234 - protein, 32 aa, Homo sapiens
MVMLPAAKLTPMVVMGPWSSFGLSPFSQLFTS

SEQ ID NO: 781235 - protein, 49 aa, Homo sapiens
MPRDVAKMAGGALWEAECMVPSPKGLDAETSGEQVSFYGEGNSVVRSGK

SEQ ID NO: 781236 - protein, 49 aa, Homo sapiens
MHLLRGWSCAVPCCLAHTGGCWRCFLVNAAGPHHVLGSEGVQLSPPRLG

SEQ ID NO: 781237 - protein, 80 aa, Homo sapiens
  misc_feature (53)..(54): Xaa can be any naturally occurring amino acid
MGVLLTKGHPHQTLGPAAVAPPGSFSYGGQKEEEEPLSGNGCLCSLCGGRAPXXVLDCVRVHPKAPGPSEFQAGISNDND

SEQ ID NO: 781238 - protein, 104 aa, Homo sapiens
VSEDTWEGLTPPAQKAPGFPSPLWPLLGLPSPGLPHYPAPANAPSKIPQGAGTAGTPSQATQEIGQAEKELRRGWKGRTGKQQRRGSGPWGKTGREGLSGSNAR

SEQ ID NO: 781239 - protein, 121 aa, Homo sapiens
PRHHCEGCGSPMTLEEGGAGTVYSALVGQEMLLPLLKERRGRIRMPGARVSVHGSPGTRRESGRMRARRRRLRPEAPQPKCADFYSSVALMLLLGLFFPLLLFCDPLLLPLPLSLSSSLFN

SEQ ID NO: 781240 - protein, 39 aa, Homo sapiens
GQGQKVQKVMVQPISLIFRYLQNRSRIQVWLYEQVNMRI

SEQ ID NO: 781241 - protein, 111 aa, Homo sapiens
HHHHHPVTITTTITTATIITTTTSITSITTITTTIVTTIIITTTAATATTTIIYHITTITPITITTITTIITTTPIATTITTIITTTTAFTITTTTTITITVVEEVCLKLC

SEQ ID NO: 781242 - protein, 240 aa, Homo sapiens
RFACLTPGSGLRSLATPPCLGPHSHCSLAGKDMEPNGPSLPRDEGPPTPSSATKVPPAEYRLCNGSDKECVSPTARVTKKETLKVSPGPGRVQQCHCQTDGHLSQGGHPPHLSKGGDKPHLVASTPPTSSYFLSCPCPWTHPWAGRWEELGQLGAFSHDPPRVPRAQAQKENYRQEKKRATRQLLSALTDPSVVIMADSLKVGDARPPATQDTGQRAAAITKDHKPGGLKRWKFTSLHLA

SEQ ID NO: 781243 - protein, 879 aa, Homo sapiens
MKEEAFLRRRFSLCPPSSTPQKVDPRKLTRNLLLSGDNELYPLSPGKDMEPNGPSLPRDEGPPTPSSATKVPPAEYRLCNGSDKECVSPTARVTKKETLKAQKENYRQEKKRATRQLLSALTDPSVVIMADSLKIRGTLKSWTKLWCVLKPGVLLIYKTPKVGQWVGTVLLHCCELIERPSKKDGFCFKLFHPLDQSVWAVKGPKGESVGSITQPLPSSYLIFRAASESDGRCWLDALELALRCSSLLRLGTCKPGRDGEPGTSPDASPSSLCGLPASATVHPDQDLFPLNGSSLENDAFSDKSERENPEESDTETQDHSRKTESGSDQSETPGAPVRRGTTYVEQVQEELGELGEASQVETVSEENKSLMWTLLKQLRPGMDLSRVVLPTFVLEPRSFLNKLSDYYYHADLLSRAAVEEDAYSRMKLVLRWYLSGFYKKPKGIKKPYNPILGETFRCCWFHPQTDSRTFYIAEQVSHHPPVSAFHVSNRKDGFCISGSITAKSRFYGNSLSALLDGKATLTFLNRAEDYTLTMPYAHCKGILYGTMTLELGGKVTIECAKNNFQAQLEFKLKPFFGGSTSINQISGKITSGEEVLASLSGHWDRDVFIKEEGSGSSALFWTPSGEVRRQRLRQHTVPLEEQTELESERLWQHVTRAISKGDQHRATQEKFALEEAQRQRARERQESLMPWKPQLFHLDPITQEWHYRYEDHSPWDPLKDIAQFEQDGILRTLQQEAVARQTTFLGSPGPRHERSGPDQRLRKASDQPSGHSQATESSGSTPESCPELSDEEQDGDFVPGGESPCPRCRKEARRLQALHEAILSIREAQQELHRHLSAMLSSTARAAQAPTPGLLQSPRSWFLLCVFLACQLFINHILK

SEQ ID NO: 781244 - protein, 863 aa, Homo sapiens
RFACLTPGSGLRSLATPPCLGPHSHCSLAGKDMEPNGPSLPRDEGPPTPSSATKVPPAEYRLCNGSDKECVSPTARVTKKETLKAQKENYRQEKKRATRQLLSALTDPSVVIMADSLKIRGTLKSWTKLWCVLKPGVLLIYKTPKVGQWVGTVLLHCCELIERPSKKDGFCFKLFHPLDQSVWAVKGPKGESVGSITQPLPSSYLIFRAASESDGRCWLDALELALRCSSLLRLGTCKPGRDGEPGTSPDASPSSLCGLPASATVHPDQDLFPLNGSSLENDAFSDKSERENPEESDTETQDHSRKTESGSDQSETPGAPVRRGTTYVEQVQEELGELGEASQVETVSEENKSLMWTLLKQLRPGMDLSRVVLPTFVLEPRSFLNKLSDYYYHADLLSRAAVEEDAYSRMKLVLRWYLSGFYKKPKGIKKPYNPILGETFRCCWFHPQTDSRTFYIAEQVSHHPPVSAFHVSNRKDGFCISGSITAKSRFYGNSLSALLDGKATLTFLNRAEDYTLTMPYAHCKGILYGTMTLELGGKVTIECAKNNFQAQLEFKLKPFFGGSTSINQISGKITSGEEVLASLSGHWDRDVFIKEEGSGSSALFWTPSGEVRRQRLRQHTVPLEEQTELESERLWQHVTRAISKGDQHRATQEKFALEEAQRQRARERQESLMPWKPQLFHLDPITQEWHYRYEDHSPWDPLKDIAQFEQDGILRTLQQEAVARQTTFLGSPGPRHERSGPDQRLRKASDQPSGHSQATESSGSTPESCPELSDEEQDGDFVPGGESPCPRCRKEARRLQALHEAILSIREAQQELHRHLSAMLSSTARAAQAPTPGLLQSPRSWFLLCVFLACQLFINHILK

SEQ ID NO: 781245 - protein, 418 aa, Homo sapiens
MPYAHCKGILYGTMILELAGKVTIEYAKNDFQAQLEFQRKPLLYGGSTSINQISGKITRERNSWRAEDYTLTMPYAHCKGILYGTMTLELGGKVTIECAKNNFQAQLEFKLKPFFGGSTSINQISGKITSGEEVLASLSGHWDRDVFIKEEGSGSSALFWTPSGEVRRQRLRQHTVPLEEQTELESERLWQHVTRAISKGDQHRATQEKFALEEAQRQRARERQESLMPWKPQLFHLDPITQEWHYRYEDHSPWDPLKDIAQFEQDGILRTLQQEAVARQTTFLGSPGPRHERSGPDQRLRKASDQPSGHSQATESSGSTPESCPELSDEEQDGDFVPGGESPCPRCRKEARRLQALHEAILSIREAQQELHRHLSAMLSSTARAAQAPTPGLLQSPRSWFLLCVFLACQLFINHILK

SEQ ID NO: 781246 - protein, 879 aa, Homo sapiens; identical to SEQ ID NO: 781243

SEQ ID NO: 781247 - protein, 101 aa, Homo sapiens
ARERQESLMPWKPQLFHLDPITQEWPFFGGSTSINQISGKITSGEEVLASLSGHWDRDVFIKEEGSGSSALFWTPSGEVRRQRLRQHTVPLEEQTELESER

SEQ ID NO: 781248 - protein, 51 aa, Homo sapiens
MRPGDQIWPLVLHVKHTVGCKEVASRSPQPLTQLLSRRDNSGCSPGVAEEQ

SEQ ID NO: 781249 - protein, 879 aa, Homo sapiens; identical to SEQ ID NO: 781243

SEQ ID NO: 781250 - protein, 865 aa, Homo sapiens
EEGGHREKRRRRKASRNLLLSGDNELYPLSPGKDMEPNGPSLPRDEGPPTPSSATKVPPAEYRLCNGSDKECVSPTARVTKKETLKAQKENYRQEKKRATRQLLSALTDPSVVIMADSLKIRGTLKSWTKLWCVLKPGVLLIYKTPKVGQWVGTVLLHCCELIERPSKKDGFCFKLFHPLDQSVWAVKGPKGESVGSITQPLPSSYLIFRAASESDGRCWLDALELALRCSSLLRLGTCKPGRDGEPGTSPDASPSSLCGLPASATVHPDQDLFPLNGSSLENDAFSDKSERENPEESDTETQDHSRKTESGSDQSETPGAPVRRGTTYVEQVQEELGELGEASQVETVSEENKSLMWTLLKQLRPGMDLSRVVLPTFVLEPRSFLNKLSDYYYHADLLSRAAVEEDAYSRMKLVLRWYLSGFYKKPKGIKKPYNPILGETFRCCWFHPQTDSRTFYIAEQVSHHPPVSAFHVSNRKDGFCISGSITAKSRFYGNSLSALLDGKATLTFLNRAEDYTLTMPYAHCKGILYGTMTLELGGKVTIECAKNNFQAQLEFKLKPFFGGSTSINQISGKITSGEEVLASLSGHWDRDVFIKEEGSGSSALFWTPSGEVRRQRLRQHTVPLEEQTELESERLWQHVTRAISKGDQHRATQEKFALEEAQRQRARERQESLMPWKPQLFHLDPITQEWHYRYEDHSPWDPLKDIAQFEQDGILRTLQQEAVARQTTFLGSPGPRHERSGPDQRLRKASDQPSGHSQATESSGSTPESCPELSDEEQDGDFVPGGESPCPRCRKEARRLQALHEAILSIREAQQELHRHLSAMLSSTARAAQAPTPGLLQSPRSWFLLCVFLACQLFINHILK

SEQ ID NO: 781251 - protein, 879 aa, Homo sapiens; identical to SEQ ID NO: 781243

SEQ ID NO: 781252 - protein, 879 aa, Homo sapiens; identical to SEQ ID NO: 781243

SEQ ID NO: 781253 - protein, 879 aa, Homo sapiens; identical to SEQ ID NO: 781243

SEQ ID NO: 781254 - protein, 51 aa, Homo sapiens
MPGIPCSVSALQLKIWAMGLYGPAAGEGYRGMAAYQDQVHVIFLGIVTTDG

SEQ ID NO: 781255 - protein, 194 aa, Homo sapiens
AAAPTSGAPAMARSLVHDTVFYCLSVYQVKISPTPQLGAASSAEGHVGQGAPGLMGNMNPEGGVNHENGMNRDGGMIPEGGGGNQEPRQQPQPPPEEPAQAAMEGPQPENMQPRTRRTKFTLLQVEELESVFRHTQYPDVPTRRELAENLGVTEDKVRVWFKNKRARCRRHQRELMLANELRADPDDCVYIVVD

SEQ ID NO: 781256 - protein, 115 aa, Homo sapiens
KEDANCAVCDSPGDLLDQFFCTTCGQHYHGMCLDIAVTPLKRAGWQCPECKVCQNCKQSGEDSKMLVCDTCDKGYHTFCLQPVMKSVPTNGWKCKNCRICIECGTRSSSQWHHNC

SEQ ID NO: 781257 - protein, 70 aa, Homo sapiens
GPVCGSDTLPGSLVRVSSTSGAGAVFCMRVCRTWSRWCYDKRLWPRMDLSRRKSLTPPMLSGVVRRQPRA

SEQ ID NO: 781258 - protein, 51 aa, Homo sapiens
GPLCFCASEFLLVSVTDCWASVSSSVTQQKKTQVRAPWGSRSSGAGERPVA

SEQ ID NO: 781259 - protein, 68 aa, Homo sapiens
LLGQVEMKIAAIRAFSLLLLLLLLLLLLLLLRWSRGVGAHSPDAAEKLGRSTYQEWELAIQRKKMKLA

SEQ ID NO: 781260 - protein, 124 aa, Homo sapiens
MKFPNSWPSLKISCTFGGVSCRLPRSGPVTPVPSSLPHWHSGLWVFTHLGQNEEWPKVESGGDPSLLACPGPNQSVQYPFGGCDNLPFWEGSCPPLQSVALLSFCPNLDPGNLPVRKPDNSFPV

SEQ ID NO: 781261 - protein, 66 aa, Homo sapiens
KTQRQSIEKEQWAQGTGTLSVGGPALVPVSGFPQYLLMIIFTILARGVQQENRENGDGGEKVRRKT

SEQ ID NO: 781262 - protein, 159 aa, Homo sapiens [sequence omitted]

SEQ ID NO: 781263 - protein, 120 aa, Homo sapiens
PEEFSLTQWSSAEGNLAFPQRDTWQYLHTFLVVTTGKSLYHHKAKRPFLLPREKIKSRSSWVLWSDRIFVSPQNSYVEIQLPEVVVLRGEAFWRRGGHEGRALINRTNTLLKEAQERPLE

SEQ ID NO: 781264 - protein, 137 aa, Homo sapiens
MEEKQQIILANQDGGTVAGAAPTFFVILKQPGNGKTDQGILVTNQDACALASSVSSPVKSKGKICLPADCTVGGITVTLDNNSMWNEFYHRSTEMILTKQGRRMFPYCRYWITGLDSNLKYILVMDISPVDNHRYKW

SEQ ID NO: 781265 - protein, 80 aa, Homo sapiens
MEEKQQIILANQDGGTVAGAAPTFFVILKQPGNGKTDQGILVTNQDAWTRGALRSPSSFLTTQAVLLQDIVQGTSPPRVP

SEQ ID NO: 781266 - protein, 111 aa, Homo sapiens
MEHTSTYKSYMTNAQLTSYQMGKNRKTFPPRTGTSQECPLSPLLFNTVLEVLVRAIRKEKERKTIQTGKLEVKLSFFDNDMILYLEKPIGSTKNLLDLINKFSRVEYKINI

SEQ ID NO: 781267 - protein, 251 aa, Homo sapiens
TGEPEKQREEGEVKQPQEEDWTPPDPGLLSYTDKLCSQKDFVTKVEAVIHPQFLEELLSPDPQMDFLALSQELEQEEGLTLAQLVEKRLLPLKEKQHARAAPSRGTARLDSSSSKFAAGQGAERDVPVPQQGVGMETCPPQTTARDSQGRGRAHTASGLLSPEKWGPQGTHQFPSAERRGLNLAPSPANKAKKRPLFGSLSPAEKTPHPGPGLRVSGEQSLTWGLGGPSQSQKRKGDPLVSRKEKKQRCSQ

SEQ ID NO: 781268 - protein, 104 aa, Homo sapiens
CETFHLLGHFPTDIQLKTTVGKANLAIRHCRSWLGNKICLSPNSPEKPFSIYIQQKPKARSPKRGPTSSFQSNPSSINVSDRTPKHRQQKKKIAKQDTSKIKIF

SEQ ID NO: 781269 - protein, 81 aa, Homo sapiens
SFYRCLVSWDRRSEAEPAGLGAPVNTGTDGGGQDDEDVWFGPPRWDLEEGREKGTEVGKRTALPADMVSLKCHPGPSAQKS

SEQ ID NO: 781270 - protein, 140 aa, Homo sapiens
TVAYYMTLGNLLDFVFLIEKNSLFFLPTKTQKRYLTFLSPNFLIFKMRITLMPHRVMKELRLGSSMYAWYISKQSINIAVFLFYFFLRQSLALLPRLECSGAILAHCNICLPGSSDSHASASQVAGIIGMHHHARIIFVF

SEQ ID NO: 781271 - protein, 41 aa, Homo sapiens
PKESTLTIPHLKYKLHLEVPRQDNKSLVRNIGGAQYMGNTE

SEQ ID NO: 781272 - protein, 125 aa, Homo sapiens
LRATGSWTLLSFPYLFQRLEGPLPGLPEADHEEPRFLGEMFSPEPIMRGDLVSVSYLSPTSHSSPVLFPSPPEGGQPCHDNSCQCHTARKPKWPLASFSLACLGLCCPGKDSRHLWAVSCSWSLL

SEQ ID NO: 781273 - protein, 64 aa, Homo sapiens
QGIRIPPQSGPSPPPCLTPNPRSSCNLHGSLKALSGHHAFAYAVPGPGSTLCQPALSTRLIALP

SEQ ID NO: 781274 - protein, 77 aa, Homo sapiens
RPPPQDQRLKAIGLFASLSSALVGWKSATQDSCCPLQESVHHKPGMSAELNGESKTGTNHFNYLRPKPNSQYFFTRP

SEQ ID NO: 781275 - protein, 35 aa, Homo sapiens
MRQAVSGINLLDLHSCSANQRMPPPASNSPTPGYN

SEQ ID NO: 781276 - protein, 102 aa, Homo sapiens
QSVKTSNPKQLYSSGWTAFSFHVPNYFLPHSKTVGDWCGALVLHKTLWVTSQMGVLQRGGLHSQTPWKNLLHWVSPPHSSADKGQRPTPTGLCPLVTESHSI

SEQ ID NO: 781277 - protein, 71 aa, Homo sapiens
APHPDTHMQSYMAPILFLWLQPNCSPHPPVHLLCAQHPQTQAPRARLTEASARQSEEDNHSNKPDTLKVRA

SEQ ID NO: 781278 - protein, 70 aa, Homo sapiens
HVPGYPYAQSLPEDTLWFHKNTLPPHNPSPVHAGDCQHCFQTRASRNKPKHSDFSLRNSGTPVVLSLTSR

SEQ ID NO: 781279 - protein, 152 aa, Homo sapiens
MYLTEKEQNERDDDIKNNRATERHITQNTMTIPRRTHTNGETRMEETESQEKTSTHERTQLKQYENDNIIHIEQRHGHHTRPSQHNQERLKNTQETWELQRKTQANADRQQKQTMREHKRPHTENHTGEDHREIPNTASTSAKRKRKEEREK

SEQ ID NO: 781280 - protein, 85 aa, Homo sapiens
MARGRQERQPPSPLPLCATKANIQGVITQKDTRTSSVARPQPSSAQSPRQPSTASPRWAFSFSSNATSSRKPSLTTELLLLVPAL

SEQ ID NO: 781281 - protein, 116 aa, Homo sapiens
FSYWMSIQVQQGILLIVTTPTMADRRFLSAHASTVAHCQGNVADCSLALRAPARNGKLSLAYISLAKETEWPSLSMALLPCAHNGRCVCEQPSDRHRILNFFSHCHSFEAQVPKNH

SEQ ID NO: 781282 - protein, 69 aa, Homo sapiens
IARLTEGMSCRKIAQLAVSWQATAYASKDGVLTEAMMDACVQDFVQQHQQMMRWLKGERPGPEDEQPSS

SEQ ID NO: 781283 - protein, 283 aa, Homo sapiens
RTFFIDASNQSLTAIPLEIFTFTELEEVHLENNQIEEIPQEIQRLKNIRVLYLDKNNLRSLCPALGLLSSLESLDLSYNPIFSSSLVVVSFLHALRELRLYQTDLKEIPVVIFKNLHHLELLGLTGNHLKCLPKEIVNQTKLREIYLKRNQFEVFPQELCVLYTLEIIDLDENKIGAIPEEIGHLTGLQKFYMASNNLPVLPASLCQCSQLSVLDLSHNLLHSIPKSFAELRKMTEIGLSGNRLEKVPRLICRWTSLHLLYLGNTGLHRLRGSFRCLVNLRFL

SEQ ID NO: 781284 - protein, 38 aa, Homo sapiens
QCGPPELKRASPVSGIISVCYHIWLLVVFFMEKDFAML

SEQ ID NO: 781285 - protein, 71 aa, Homo sapiens
PGRLYGWLDPEERQQSLQFSSQEATPIGKGGEYYIKGTPRGAKESEQQPLALDLPSDRAYPNEKEPENQPW

SEQ ID NO: 781286 - protein, 70 aa, Homo sapiens
IGEGSASHPHLPLFPGSSLLQTQSSWETSTRAVQKENTDLEPPHRATTLQTPDLETHQQLAPSVWKSYRH

SEQ ID NO: 781287 - protein, 51 aa, Homo sapiens
EASSRAQAGGQCQQLQGSRSDSAQLGPCVSAESTSPTQQLKGERRGGREQT

SEQ ID NO: 781288 - protein, 117 aa, Homo sapiens
CPPHLPVLAPSPCTGLWSPSCVYPHCPHGLLYSVCQVAAAPATLTGALFLPIPTLAAPAPLPLVSTLLVSCGCHNKLPQTGKHETTEIYSLTVLKAKSWQLRYGQGWFLLGTLSGNL

SEQ ID NO: 781289 - protein, 131 aa, Homo sapiens
RSGKLSSGLPQQKPQLDGRHSSSSSSLASSEGKGPGGTTLNHSISSQTVSGSVGTTQTTGSNTVSVQLPQPQQQYNHPNTATVAPFLYRSQTDTEGNVTAESSSTGVSVEPSHFTKTGQPALEELTGEYGA

SEQ ID NO: 781290 - protein, 114 aa, Homo sapiens
MRVSVELFDGDSQCSSLDQFKSKLQNLSYTEILKIRQSERMNQEDFQSRPILELKEKIQPEILELIKQQRLNRLVEGTCFRKLNARRRQHKFGIVGFRQSQVLHYELEESLRRT

SEQ ID NO: 781291 - protein, 73 aa, Homo sapiens
CQKRQHAPEADWHPEPKISNGQEEAGEGLRCFKEEATQIVDKSRDFLYFCHQKTHSGLAYLSRFLKNRQKRIN

SEQ ID NO: 781292 - protein, 103 aa, Homo sapiens
MYVGMMCTAKKCGIRFQPPAIILIYESEIKGKIRQRIMPVRNFSKFSDCTRAAEQLKNNPRHKSYLEQVSLRQLEKLFSFLRGYLSGQSLAETMGTNSTGNNH

SEQ ID NO: 781293 - protein, 103 aa, Homo sapiens; identical to SEQ ID NO: 781292

SEQ ID NO: 781294 - protein, 71 aa, Homo sapiens
HAVMSCECPKFDRAATPLMDLTPRITAGHSAASYFVRLRCLTRTCICPPNWTLAFLWAMSFSHTSSHPSGW

SEQ ID NO: 781295 - protein, 34 aa, Homo sapiens
EELCVCGDCCGVESSVSVKSSVVWRPLCMWRALW

SEQ ID NO: 781296 - protein, 105 aa, Homo sapiens
PADFERRGMLAWWQPRAARLWVCVGRGGWGCVCVCVCVYAHALTLGRGEGDRPKWKWGKESKVQTLRAATYLSSVILCSPYGRLNNDPQRCPQPNPQHLRICYLP

SEQ ID NO: 781297 - protein, 115 aa, Homo sapiens
PQGLTGLTAIPVLHSKQWDKARGMNQKLHTPSLLTLTGQSHGHTWLHKMLKNVTCIQPAMCPAKIFYSGRRGRQVLEDNQQSLPPPRLSFSNRSSPIWQKYRSLDLETKLNNGLL

SEQ ID NO: 781298 - protein, 47 aa, Homo sapiens
MSGTRTNALVYEKFCGFKDVCHLNIDHHGQCHPFIEWTAYGILGHEL

SEQ ID NO: 781299 - protein, 82 aa, Homo sapiens
MLTVLEEEAVFTKNLANIEVSETDTIKLVCEVSKPGAEVIWYKGDEEIIETGRYEILTEGRKRILVIQNAHLEDAGNYNCRL

SEQ ID NO: 781300 - protein, 116 aa, Homo sapiens
  misc_feature (57)..(57): Xaa can be any naturally occurring amino acid
MPGRILYLVIEQTAELCLAGLFSHPQNGDKTYLMKLTLVLSESDIMKRKSPESWRHXPSSLPGVSSRGVAASLTCMYRGTGFRALATECLTARNCLGHPDSSSDSLPCFIGQSSWP

SEQ ID NO: 781301 - protein, 77 aa, Homo sapiens
IILNSSHHTQHQAFKYQLMQHHHQQHHQPELQQLQTRLPLFHGDTFLNKDKKATQGPDLPLSPAESGLPLTHPVSLC

SEQ ID NO: 781302 - protein, 39 aa, Homo sapiens
GRYSSLQEVEFNLPLPTECELDLMNTLQIKEYQKEKSSN

SEQ ID NO: 781303 - protein, 58 aa, Homo sapiens
MALEAWEHRGPVCFEDLRQEAGRGAQGVSVASRTEGRTALLTVVCSGQAPERWGALHP

SEQ ID NO: 781304 - protein, 47 aa, Homo sapiens
LVQVRGPTPGASCHQGHLATRGILPAEKLRHSSEGPPMGHRRFPLSI

SEQ ID NO: 781305 - protein, 106 aa, Homo sapiens
FLGTPFAQALTVPDLELLTQWLLNPPASPGALASLQPTCHTVARVAFKDINVAMLIPCLLGPLLRTAQHMLNPGPSSSLYVNGNGLRSPPTPARRDLREAPISPTT

SEQ ID NO: 781306 - protein, 111 aa, Homo sapiens
FYSTEQRSSRELQTFHGTQQGQAWSWTQSQEDQTTQIMPSKKNPGVQPKMLINLYSFLSPPPVLGGEGVRLGGPSVSRAWENSSLFPHRGWDEGRQANIAVGDLGASCVRA

SEQ ID NO: 781307 - protein, 68 aa, Homo sapiens
ARQPCYCLAPHLHFCLLQQHFRFLFAGAAHYSPDERGGEREKMSFRPVPLTWQREAAILRLHFFFWIT

SEQ ID NO: 781308 - protein, 70 aa, Homo sapiens
EKEQVWGLRESYELNFGQVESEVGIQEEVACKELDRGSRSSRRFKQEIWFETMVIVAMGFGELALAERVS

SEQ ID NO: 781309 - protein, 109 aa, Homo sapiens
MERGSCALGGLVGASSFTDGGTPSLCCSLLSFQVGWVVSGASMASTRLVSGAMLGASRLPVPWEPCLPFWTSCLSSLGSELSLMVFWRHAQLVSRPRGIQTHQTHPLKT

SEQ ID NO: 781310 - protein, 104 aa, Homo sapiens
HVHESARSFDVHATGIHWPPATVVLPGGICSEGDPRSSLSALPRPHCHSKLRMSQSKLLWVGLQTGSPPDLLSRRSTTPRVYKPDPREISVTYCIHPGPARSPL

SEQ ID NO: 781311 - protein, 55 aa, Homo sapiens
VPCDPRDCQLEVTHVPARLHPAKLHLLPWAPRGNPFVRAHKHLPNPHSTPCVDCQ

SEQ ID NO: 781312 - protein, 66 aa, Homo sapiens
LSLPRTKKIIYQLMHVLRGTSEQETDPSSVGGMSVHVCLCVSRESLLKKVPPELPAAGKVLHQQRM

SEQ ID NO: 781313 - protein, 66 aa, Homo sapiens
LKKGGALGIKKLSISQEVLAIWVWQPQFCYQEMMYFIYISRNEYIFPNRKCKTLKKIYDVTLYLLS

SEQ ID NO: 781314 - protein, 46 aa, Homo sapiens
MTSTASTQLNYTAHPWGRALREVERGRQGPTFPSAGEQHLLEVRLV

SEQ ID NO: 781315 - protein, 113 aa, Homo sapiens [sequence omitted]

SEQ ID NO: 781316 - protein, 102 aa, Homo sapiens
SCRWSNGVSLLKRRLLRLRIFTHIHKYKDTHTQVPLTHQHTDNHSQTQRHTNLHTQVHTQTHYTKTHTHTHAHKDTCTHTHKQHTHQQSQQQVKLSLSPQYP

SEQ ID NO: 781317 - protein, 146 aa, Homo sapiens
ALFSPWGDAGHRVPLFLFSVRPGPGPPRMFPWAPACCDVGHGVVPQWATSQVVAPAVFLQSEPQQLHLGAGFSPVHGSVKDAHAVTDCSSLRQKFMVSPSAQAPSVTLGRDLLEESRMVPAHSGLSWWEGGMWPRVFSGVLAVQLR

SEQ ID NO: 781318 - protein, 49 aa, Homo sapiens
VVFGTLSANSSKEMRPRGSPSTVMSKNTGLTMADSTGLLVVAAKPLCPT

SEQ ID NO: 781319 - protein, 51 aa, Homo sapiens
MVILKQVEGMGDLRSSKAVGSFVGSPAGSSVPGLQVPGEGWGREAGGCVPA

SEQ ID NO: 781320 - protein, 140 aa, Homo sapiens
PFQALLCLWDYILCAGLREHEEGAICHTLEAEACTSAARLTVVGGGDGNCRSARVVEKLLQGFSGFACPAAPCLARGEGGATCGTLEAGACRWHGSAAHLAAVGGGDRDCSLTVVVVTRSSATACPLVTGSLHHPSWVAA

SEQ ID NO: 781321 - protein, 162 aa, Homo sapiens
PFQALLCLWDYILCAGLREHEEGAICHTLEAEACTSAARLTVVGGGDGNCRSARVVEKLLQGFSGFACPAAPCLARGEGGATCGTLEAGACRWHGSAAHLAAVGGGDRDCSLTVVNLEIICLEALSLSWDLKRRGSPNSQQSNSKWCYKLNHTWTRQSSEDP

SEQ ID NO: 781322 - protein, 130 aa, Homo sapiens
TVQTLIRDCQVIRETKEDQIAELKKICEQSTESLNNDWEKKLHNAVAEMEQEKFDLQKQHTENIQELLEDTNVRLNKMESEYMAQTQSTNHMIKELEARVQQLTGEAENSNLQRQKLIQEKAELERCYQI

SEQ ID NO: 781323 - protein, 33 aa, Homo sapiens
AGRKPQMGKRSALSQGGTVTEAHGCDQRNKVFT

SEQ ID NO: 781324 - protein, 85 aa, Homo sapiens
HLFRVSQPSHAASCPGFGSSPRAAGGQRCNLKADRAWAVSESRGGSRLLVILVCLCRASPQWSWLWSGKAWTGWWICPLGPSSST

SEQ ID NO: 781325 - protein, 53 aa, Homo sapiens
GGRDLGASREAGKRVVWDKGRSRQTPAGRDSIGFPIQPEDLESCPASQDSSWH

SEQ ID NO: 781326 - protein, 94 aa, Homo sapiens
FATLSSCRLMSSGILLGGQPCISCHADDTAAAALCSAKGGTEIARRINHKALPQAAISQAQRGWAQRQPRQIILPLSLQTTLSSGMPLPTLPGD

SEQ ID NO: 781327 - protein, 36 aa, Homo sapiens
VTDLYLQLSVGLLQGTHLVQVGGQAVIEVLHGGLLT

SEQ ID NO: 781328 - protein, 110 aa, Homo sapiens
ASWAGRGRPSPGPQGGMTPLLWRKVEGKAERWCLQPPWTREELRCFFKTESCSVARLECNGVISAHCNLHLLDSSDSPASASQVAGITGTRKPPQPANFSIFSRDGVSPC

SEQ ID NO: 781329 - protein, 101 aa, Homo sapiens
AAAPWRPLKEPLRIRASRKGEKPARGAVLTVAGLPGALWNRLLLEQRAGDGPRRGGKRLRLPSLACGGAAGSAGHSCVGHSGLRLARLCVQETSRKYPKRE

SEQ ID NO: 781330 - protein, 101 aa, Homo sapiens; identical to SEQ ID NO: 781329

SEQ ID NO: 781331 - protein, 84 aa, Homo sapiens
WAQAICPSQPPKVLGLQEGFDALDPFIPILVSNYNPKEFESCIQYYLENNWLQHEKAPTEEGKKELLFLSNANPSLLERHCAYL

SEQ ID NO: 781332 - protein, 397 aa, Homo sapiens [sequence omitted]

SEQ ID NO: 781333 - protein, 85 aa, Homo sapiens
MRKSGSTQEEEPGPCTYGMAIMDLVMMEAILEVVAATMILGSTTISLRILDPCREGSVEAEALLPIPLESQILAMNHESEYDSPV

SEQ ID NO: 781334 - protein, 112 aa, Homo sapiens
MLKGITRLISRIHKLDPGRFLHMGTQARQSIAAHLDNQVPVESPRAISRTNENDPAKHGDQHEGQHYNISPQDLETVFPHGLPPRFVMQVLKTGNGIGGSPEYKLLLAKGWG

SEQ ID NO: 781335 - protein, 365 aa, Homo sapiens
  misc_feature (17)..(17): Xaa can be any naturally occurring amino acid
FTFLFLVHDIDDQHTPXEFFVFKAKHGDQHEGQHYNISPQDLETVFPHGLPPRFVMQVKTFSEACLMVRKPALELLHYLKNTSFAYPAIRYLLYGEKGTGKTLSLCHVIHFCAKQDWLILHIPDAHLWVKNCRDLLQSSYNKQRFDQPLEASTWLKNFKTTNERFLNQIKVQEKYVWNKRESTEKGSPLGEVVEQGITRVRNATDAVGIVLKELKRQSSLGMFHLLVAVDGINALWGRTTLKREDKSPIAPEELALVHNLRKMMKNDWHGGAIVSALSQTGSLFKPRKAYLPQELLGKEGFDALDPFIPILVSNYNPKEFESCIQYYLENNWLQHEKAPTEEGKKELLFLSNANPSLLERHCAYL

SEQ ID NO: 781336 - protein, 418 aa, Homo sapiens
MLKGITRLISRIHKLDPGRFLHMGTQARQSIAAHLDNQVPVESPRAISRTNENDPAKHGDQHEGQHYNISPQDLETVFPHGLPPRFVMQVLKTGNGIGGSPEYKLLLAKEVKTFSEACLMVRKPALELLHYLKNTSFAYPAIRYLLYGEKGTGKTLSLCHVIHFCAKQDWLILHIPDAHLWVKNCRDLLQSSYNKQRFDQPLEASTWLKNFKTTNERFLNQIKVQEKYVWNKRESTEKGSPLGEVVEQGITRVRNATDAVGIVLKELKRQSSLGMFHLLVAVDGINALWGRTTLKREDKSPIAPEELALVHNLRKMMKNDWHGGAIVSALSQTGSLFKPRKAYLPQELLGKEGFDALDPFIPILVSNYNPKEFESCIQYYLENNWLQHEKAPTEEGKKELLFLSNANPSLLERHCAYL

SEQ ID NO: 781337 - protein, 219 aa, Homo sapiens
MNALKNLQVQCARIERHILLRKIKVQEKYVWNKRESTEKGSPLGEVVEQGITRVRNATDAVGIVLKELKRQSSLGMFHLLVAVDGINALWGRTTLKREDKSPIAPEELALVHNLRKMMKNDWHGGAIVSALSQTGSLFKPRKAYLPQELLGKEGFDALDPFIPILVSNYNPKEFESCIQYYLENNWLQHEKAPTEEGKKELLFLSNANPSLLERHCAYL

SEQ ID NO: 781338 - protein, 397 aa, Homo sapiens [sequence omitted]

SEQ ID NO: 781339 - protein, 397 aa, Homo sapiens [sequence omitted]

SEQ ID NO: 781340 - protein, 397 aa, Homo sapiens [sequence omitted]

SEQ ID NO: 781341 - protein, 397 aa, Homo sapiens [sequence omitted]

SEQ ID NO: 781342 - protein, 397 aa, Homo sapiens [sequence omitted]

SEQ ID NO: 781343 - protein, 397 aa, Homo sapiens [sequence omitted]

SEQ ID NO: 781344 - protein, 383 aa, Homo sapiens
MLKGITRLISRIHKLDPGRFLHMGTQARQSIAAHLDNQVPVESPRAISRTNENDPAKHGDQHEGQHYNISPQDLETVFPHGLPPRFVMQVKTFSEACLMVRKPALELLHYLKNTSFAYPAIRYLLYGEKGTGKTLSLCHVIHFCAKQDWLILHIPDAHLWVKNCRDLLQSSYNKQRFDQPLEASTWLKNFKTTNERFLNQIKVQEKYVWNKRESTEKGSPLGEVVEQGITRVRNATDAVGIVLKELKRQSSLGMFHLLVAVDGINALWGRTTLKREDKSPIAPEELALVHNLRKMMKNDWHGGAIVSALSQTGSLFKPRKAYLPQELLGKEGFDALDPFIPILVSNYNPKEFESCIQYYLENNWLQHEKDSSFWISSVTQGTA

SEQ ID NO: 781345 - protein, 342 aa, Homo sapiens
MLKGITRLISRIHKLDPGRFLHMGTQARQSIAAHLDNQVPVESPRAISRTNENDPAKHGDQHEGQHYNISPQDLETVFPHGLPPRFVMQVKTFSEACLMVRKPALELLHYLKNTSFAYPAIRYLLYGEKGTGKTLSLCHVIHFCAKQDWLILHIPDAHLWVKNCRDLLQSSYNKQRFDQPLEASTWLKNFKTTNERFLNQIKVQEKYVWNKRESTEKGSPLGEVVEQGITRVRNATDAVGIVLKELKRQSSLGMFHLLVAVDGINALWGRTTLKREDKSPIAPEELALVHNLRKMMKNDWHGGAIVSALSQTGSLFKPRKAYLPQELLGKLLQKKGKKSCCS

SEQ ID NO: 781346 - protein, 358 aa, Homo sapiens
MLKGITRLISRIHKLDPGRFLHMGTQARQSIAAHLDNQVPVESPRAISRTNENDPAKHGDQHEGQHYNISPQDLETVFPHGLPPRFVMQVKTFSEACLMVRKPALELLHYLKNTSFAYPAIRYLLYGEKGTGKTLSLCHVIHFCAKQDWLILHIPDAHLWVKNCRDLLQSSYNKQRFDQPLEASTWLKNFKTTNERFLNQIKVQEKYVWNKRESTEKGSPLGEVVEQGITRVRNATDAVGIVLKELKRQSSLGMFHLLVAVDGINALWGRTTLKREDKSPIAPEELALVHNLRKMMKNDWHGGAIVSALSQTGSLFKPRKAYLPQELLGKVKSKENLFLLRLLSCLKKNIFINLCILT

SEQ ID NO: 781347 - protein, 317 aa, Homo sapiens
MLKGITRLISRIHKLDPGRFLHMGTQARQSIAAHLDNQVPVESPRAISRTNENDPAKHGDQHEGQHYNISPQDLETVFPHGLPPRFVMQVKTFSEACLMVRKPALELLHYLKNTSFAYPAIRYLLYGEKGTGKTLSLCHVIHFCAKQDWLILHIPDAHLWVKNCRDLLQSSYNKQRFDQPLEASTWLKNFKTTNERFLNQIKVQEKYVWNKRESTEKGSPLGEVVEQGITRVRNATDAVGIVLKELKRQSSLGMFHLLVAVDGINALWGRTTLKREDKSPIAPEELALVHNLRKMMKNDWVSAYDTSHISERNVLSF

SEQ ID NO: 781348 - protein, 209 aa, Homo sapiens [sequence omitted]

SEQ ID NO: 781349 - protein, 157 aa, Homo sapiens
MLKGITRLISRIHKLDPGRFLHMGTQARQSIAAHLDNQVPVESPRAISRTNENDPAKHGDQHEGQHYNISPQDLETVFPHGLPPRFVMQVKTFSEACLMVRKPALELLHYLKNTSFAYPAIRYLLYGEKGTGKTLSLCHVIHFCAKQDWLILHIPDG

SEQ ID NO: 781350 - protein, 397 aa, Homo sapiens [sequence omitted]

SEQ ID NO: 781351 - protein, 211 aa, Homo sapiens
MLKGITRLISRIHKLDPGRFLHMGTQARQSIAAHLDNQVPVESPRAISRTNENDPAKHGDQHEGQHYNISPQDLETVFPHGLPPRFVMQVKTFSEACLMVRKPALELLHYLKNTSFAYPAIRYLLYGEKGTGKTLSLCHVIHFCAKQDWLILHIPDAHLWVKNCRDLLQSSYNKQRFDQPLEASTWLKNFKTTNERFLNQGVLWEKWLNRA

SEQ ID NO: 781352 - protein, 370 aa, Homo sapiens [sequence omitted]

SEQ ID NO: 781353 - protein, 397 aa, Homo sapiens [sequence omitted]

SEQ ID NO: 781354 - protein, 317 aa, Homo sapiens; identical to SEQ ID NO: 781347

SEQ ID NO: 781355 - protein, 397 aa, Homo sapiens [sequence omitted]

SEQ ID NO: 781356 - protein, 397 aa, Homo sapiens [sequence omitted]

SEQ ID NO: 781357 - protein, 379 aa, Homo sapiens
MLKGITRLISRIHKLDPGRFLHMGTQARQSIAAHLDNQVPVESPRAISRTNENDPAKHGDQHEGQHYNISPQDLETVFPHGLPPRFVMQVKTFSEACLMVRKPALELLHYLKNTSFAYPAIRYLLYGEKGTGKTLSLCHVIHFCAKQDWLILHIPDAHLWVKNCRDLLQSSYNKQRFDQPLEASTWLKNFKTTNERFLNQIKVQEKYVWNKRESTEKGSPLGEVVEQGITRVRNATDAVGIVLKELKRQSSLGMFHLLVAVDGINALWGRTTLKREDKSPIAPEELALVHNLRKMMKNDWHGGAIVSALSQTGSLFKPRKAYLPQELLGKEGFDALDPFIPILVSNYNPKEFESCIQYYLENNWLQHEKGSYQLSGSSQ

SEQ ID NO: 781358 - protein, 377 aa, Homo sapiens
MLKGITRLISRIHKLDPGRFLHMGTQARQSIAAHLDNQVPVESPRAISRTNENDPAKHGDQHEGQHYNISPQDLETVFPHGLPPRFVMQVKTFSEACLMVRKPALELLHYLKNTSFAYPAIRYLLYGEKGTGKTLSLCHVIHFCAKQDWLILHIPDAHLWVKNCRDLLQSSYNKQRFDQPLEASTWLKNFKTTNERFLNQIKVQEKYVWNKRESTEKGSPLGEVVEQGITRVRNATDAVGIVLKELKRQSSLGMFHLLVAVDGINALWGRTTLKREDKSPIAPEELALVHNLRKMMKNDWHGGAIVSALSQTGSLFKPRKAYLPQELLGKEFESCIQYYLENNWLQHEKAPTEEGKKELLFLSNANPSLLERHCAYL

SEQ ID NO: 781359 - protein, 317 aa, Homo sapiens; identical to SEQ ID NO: 781347

SEQ ID NO: 781360 - protein, 316 aa, Homo sapiens
MLKGITRLISRIHKLDPGRFLHMGTQARQSIAAHLDNQVPVESPRAISRTNENDPAKHGDQHEGQHYNISPQDLETVFPHGLPPRFVMQVKTFSEACLMVRKPALELLHYLKNTSFAYPAIRYLLYGEKGTGKTLSLCHVIHFCAKQDWLILHIPDAHLWVKNCRDLLQSSYNKQRFDQPLEASTWLKNFKTTNERFLNQIKVQEKYVWNKRESTEKDEVERVITIMQNPRQYKIPDWFLNRQKDVKDGKYSQVLANGLDNKLPENLYATLEKIRPHKGLVTSGAFVSEANTPRPLAAVAAPGVCPKRNKSGGPVC

SEQ ID NO: 781361 - protein, 112 aa, Homo sapiens; identical to SEQ ID NO: 781334

SEQ ID NO: 781362 - protein, 75 aa, Homo sapiens
EMALHLRIFVVVISRGVWGPMEGGIKVLWCSDVSGSYFSTADLRAGWLHDAWLPDAARELEFPSCLSFSQGKEQT

SEQ ID NO: 781363 - protein, 75 aa, Homo sapiens
SCPPTDGLPPSVLPHPGQLVTPQPLGLALLGNGGQSRGAHLQPQGALRATWLLQVEVQPALQPRLGSQDSNLSTH

SEQ ID NO: 781364 - protein, 115 aa, Homo sapiens
ADWSIGGHRQAWKKHRLIGQKASVKFSLQVADSTWNGQLSPQASGHPWLKGRVSLETHPFLPRNLSASHCHQHAIHGTQAICTEGHPHAHAQLPSMPPASLPHSSLPEVQKGLRQ

SEQ ID NO: 781365 - protein, 53 aa, Homo sapiens
LVKLVCDILESLTASVEDTTSHSMSAGLFPVFSTRFLSTLHSGDFLSPVFLVT

SEQ ID NO: 781366 - protein, 838 aa, Homo sapiens
SAPTELPAMGLGLLLPLLLLWTRGTQGSELDPKGQHVCVASSPSAELQCCAGWRQKDQECTIPICEGPDACQKDEVCVKPGLCRCKPGFFGAHCSSRCPGQYWGPDCRESCPCHPHGQCEPATGACQCQADRWGARCEFPCACGPHGRCDPATGVCHCEPGWWSSTCRRPCQCNTAAARCEQATGACVCKPGWWGRRCSFRCNCHGSPCEQDSGRCACRPGWWGPECQQQCECVRGRCSAASGECTCPPGFRGARCELPCPAGSHGVQCAHSCGRCKHNEPCSPDTGSCESCEPGWNGTQCQQPCLPGTFGESCEQQCPHCRHGEACEPDTGHCQRCDPGWLGPRCEDPCPTGTFGEDCGSTCPTCVQGSCDTVTGDCVCSAGYWGPSCNASCPAGFHGNNCSVPCECPEGLCHPVSGSCQPGSGSRDTALIVGSLVPLLLLFLGLACCACCCWAPRSDLKDRPARDGATVSRMKLQVWGTLTSLGSTLPCRSLSSHKLPWVTVSHHDPEVPFNHSFIEPPSAGWATDDSFSSDPESGEADEVPAYCVPPQEGMVPVAQAGSSEASLAAGAFPPPEDASTPFAIPRTSSLARAKRPSVSFAEGTKFAPQSRRSSGELSSPLRKPKRLSRGAQSGPEGREAEESTGPDEAEAPESFPAAASPGDSATGHRRPPLGSRTVAEHVEAIEGSVQESSGPVTTIYMLAGKPRGSEGPVRSVFRHFGSFQKGQAEAKVKRAIPKPPRQALNRKKGSPGLASGSVGQSPNSAPKAGLPGATGPMAVRPEEAVRGLGAGTESSRRAQEPVSGCGSPEQDPQKQAEEERQEEPEYENVVPISRPPEP

SEQ ID NO: 781367 - protein, 71 aa, Homo sapiens
GGAERRQVAAAGRREEGQGFAVLLSKNIQSAGMTGMSHHAWSMNFLKRMYVYKNRFKGKALNGFFLWKMRL

SEQ ID NO: 781368 - protein, 264 aa, Homo sapiens
MGLGLLLPLLLLWTRGTQGSELDPKGQHVCVASSPSAELQCCAGWRQKDQECTIPICEGPDACQKDEVCVKPGLCRCKPGFFGAHCSSRCPGQYWGPDCRESCPCHPHGQCEPATGACQCQADRWGARCEFPCACGPHGRCDPATGVCHCEPGWWSSTCRRPCQCNTAAARCEQATGACVCKPGWWGRRCSFRCNCHGSPCEQDSGRCACRPGWWGPECQQQCECVRGRCSAASGECTCPPGFRGARCELPCPAGSHGVQCAHR

SEQ ID NO: 781369 - protein, 70 aa, Homo sapiens
PLTISLKTVFREIVCASVCFLHSRVIIVGGNMPQSVTRKAHKGTCLRQHVASPMNYASSAYGQWRPPKNN

SEQ ID NO: 781370 - protein, 78 aa, Homo sapiens
KYEDKFGDFWGRNVLLFFKERTTRRALILLQSGKQIWELKLQEPFGYQEGGSLTTKTAPEEDVIKEIREKQSQVAGSF

SEQ ID NO: 781371 - protein, 120 aa, Homo sapiens
MSAPHCMALVRSLCLPGPHCVHSLLHATKHLPDVPAPPAPASSQGRRRRLPLLKGLFPMAPLRPLQETISPSQPRPFSPLPSPQALNGPATTLNSDLGQPSTGGAGGSVNSERNSLTECQ

SEQ ID NO: 781372 - protein, 179 aa, Homo sapiens
VTLAGSYGGLNPTRTHTCHVDPDASAWAPKSGSPHSSGTRVKTCCSIPSRLPQRAALVAPEFLEEAKSQQPLKWAGDALDPEDIRYQARQLTPTSEPQLQSRRGAPAVSDWTPQTRPAPPVAWILRPDPQAAKSGDGPRQQPLSFIHVDTECPAPGPRIQRDAQEERNLRPGGLCTLRP

SEQ ID NO: 781373 - protein, 127 aa, Homo sapiens
VLSLVIIPDAAPEDREVRSCQTCEPGILLAHWRLLCPSHLSLGLLGNRRDEKVKQTWAENEVWKKLCLASYVADSYCYGNKQQVKGWGRSHQYLPYSVQKGSGPEIARRTTKGVKEAEGCGFELYWS

SEQ ID NO: 781374 - protein, 75 aa, Homo sapiens
CWVTLRIPVRRRFSASLRRLSIRGFRLTPQRKCPGLAGISGDEFTPRCPGTAQVRWVLALTVCVRAHSLTTGRLD

SEQ ID NO: 781375 - protein, 69 aa, Homo sapiens
IYLMTEESAPQVQKLIYKSFYEHMCPGLLIMAENWKGMQLSIHRTTNKQTVLHSYNGPADTCSNVDQCQ

SEQ ID NO: 781376 - protein, 106 aa, Homo sapiens
SRLGTKVLSQEAFLNSSVRQTTSRAAPALLRPSLSRNSSHSFSDGRGPTPTTSLRVCLMTQTARVLGKPHQPAPYSAGNDGDLLGDGRRGRRWDKVPAPGSLRSIH

SEQ ID NO: 781377 - protein, 81 aa, Homo sapiens
PAIILKEVGMKAALQVSMNDGLSFISSSVIITTTHCSDGSILAIALLILFLLLALALLYWFWPLCCTVIIKEVPPPPASAS

SEQ ID NO: 781378 - protein, 109 aa, Homo sapiens
WVAPQLECGHPNSSGAILGLVRWQTAVTLRGIQHHSADMWWVRPCQWGPAACASCDPCSPTVCWDSRSQGPFSPSDICLALTVSVITTYGHRCFFLIIVSSRCHMCITL

SEQ ID NO: 781379 - protein, 275 aa, Homo sapiens
MGRVQLFEISLSHGRVVYSPGEPLAGTVRVRLGAPLPFRAIRVTCIGSCGVSNKANDTAWVVEEGYFNSSLSLADKGSLPAGEHSFPFQFLLPATAPTSFEGPFGKIVHQVRAAIHTPRFSKDHKCSLVFYILSPLNLNSIPDIEQPNVASATKKFSYKLVKTGSVVLTASTDLRGYVVGQALQLHADVENQSGKDTSPVVASLLQKVSYKAKRWIHDVRTIGGGGGVRASRPGGGAGGLGRLLVPALPQSACGLELIQLTTEFKGSLKAPEATV

SEQ ID NO: 781380 - protein, 276 aa, Homo sapiens
VSFLECGRVLPCLTDLSTGQEEDAPLGVSRVSPVGSSAFAAIRVTCIGSCGVSNKANDTAWVVEEGYFNSSLSLADKGSLPAGEHSFPFQFLLPATAPTSFEGPFGKIVHQVRAAIHTPRFSKDHKCSLVFYILSPLNLNSIPDIEQPNVASATKKFSYKLVKTGSVVLTASTDLRGYVVGQALQLHADVENQSGKDTSPVVASLLQKVSYKAKRWIHDVRTIGGGGGVRASRPGGGAGGLGRLLVPALPQSACGLELIQLTTEFKGSLKAPEATV

SEQ ID NO: 781381 - protein, 425 aa, Homo sapiens
MGRVQLFEISLSHGRVVYSPGEPLAGTVRVRLGAPLPFRAIRVTCIGSCGVSNKANDTAWVVEEGYFNSSLSLADKGKFGSQFPSGDPWGQPLEWGLSVLSSPFPRSASWIWHWPILSQGVGPDGFLIGAGWLKGPPPPCAGFGWALTPGTAVSPLPHSQTTLLFKPSSYPQSFTQATDLAAVALVTETGRPSVSWSAAVPTLILALWPPQATSGGDCPPLPPVSAGSLPAGEHSFPFQFLLPATAPTSFEGPFGKIVHQVRAAIHTPRFSKDHKCSLVFYILSPLNLNSIPDIEQPNVASATKKFSYKLVKTGSVVLTASTDLRGYVVGQALQLHADVENQSGKDTSPVVASLLQKVSYKAKRWIHDVRTIGGGGGVRASRPGGGAGGLGRLLVPALPQSACGLELIQLTTEFKGSLKAPEATV

SEQ ID NO: 781382 - protein, 53 aa, Homo sapiens
VICSISLPAAREAEVVRPAVRCCWCLCGHDLVRYHSASGGPSYQPCVLDSPVT

SEQ ID NO: 781383 - protein, 45 aa, Homo sapiens
MPVQCSEKGVAPSILTLTIITIIIATTIIVTITTIAITITIITTT

SEQ ID NO: 781384 - protein, 102 aa, Homo sapiens
MKPECHTVSHELVENVFPVSQPHYSKMQCPFTKPNLTDFFEHSTHWQWKVANSKMSRKAWYPMPQHWSIWCLSWPTMLELCKLASLQKYNPKNQLSSLPKQQ

SEQ ID NO: 781385 - protein, 37 aa, Homo sapiens
MEPSGRTDRYLLWACSYALSKFERSHSGHEGTFLLDL

SEQ ID NO: 781386 - protein, 74 aa, Homo sapiens
NVARSLGQRHLLLQLPPSSLSLGQNSRESLGLFPGMEAKTTVGGGLQSPATPQSPVKHEWAFTIRRRLQWSRSF

SEQ ID NO: 781387 - protein, 122 aa, Homo sapiens
YTVSIEPPTQASAMADTPPPAKLQHPPVDLKNSCASSEQGSMGVGPTEPGTGGNLLVCWLQRPWERCSIWAEAYHSCRYSHSRLPLARKGKSPNPLCFPGEAMPCPALAHPPWLHPLSNHSQ

SEQ ID NO: 781388 - protein, 62 aa, Homo sapiens
FPHMKSLSRNSWNLRLFQSLSVPTQSQPPFHTHPIDQSSFHASKGILTRTLALTVEAVFLKI

SEQ ID NO: 781389 - protein, 67 aa, Homo sapiens
YLSGGIGHYCLTFQEVKQNGTEKEIVSFLDQKVTGGPSKGSPKRVVVRKGIPEIQFREDNEELRESL

SEQ ID NO: 781390 - protein, 67 aa, Homo sapiens
AGTMQALIPLESGSGMTQTSGVSTETGDVVKDMGVNNQSKEGRCPWKDHEAAPWISEKPKKRGNEGK

SEQ ID NO: 781391 - protein, 39 aa, Homo sapiens
NTAWADRNRDNKQNSVMPLGLDLHLTAGTVLYRFLPHSP

SEQ ID NO: 781392 - protein, 175 aa, Homo sapiens
PILRGPLPPSILPGKPTSALAPGPVGLDKGSSSTTQPRGQRHMPHPSCPGVLSSHQLLQPWPATALSLDGPVRPAPHCSPWASCQSHQASISPHTLFSWGHLCTQRWVLFLGEAGPQLTLPRRGLGAWLGAPGPLHCGTERNPSSGHPRKGGSPKSSPGSVHLDSGSFQPRRTRR

SEQ ID NO: 781393 - protein, 67 aa, Homo sapiens
FRKRRNHVPVASPRLLASVRTHVALAPRRGYLRKHAPRQHAAWPCYPQPPLLLSLSSQVSAGLPGLA

SEQ ID NO: 781394 - protein, 96 aa, Homo sapiens
PHSHYTEREAPKAERVAPITLEVNGRVRILVAGGTPQCPPHQKNPSTLGQLSQLTEKPPPAQPHPIQANRKRGPRSRWDGEIRALVLPCAASQAGK

SEQ ID NO: 781395 - protein, 41 aa, Homo sapiens
MFCCRNANELDDRLLPQALLGGYVTYSRCVPHSLFPSPSCS

SEQ ID NO: 781396 - protein, 42 aa, Homo sapiens
SEGQRQPLDASIGPHRVLLLLVVQKHSSWHLHLLTCVLPLLQ

SEQ ID NO: 781397 - protein, 89 aa, Homo sapiens
  misc_feature (86)..(86): Xaa can be any naturally occurring amino acid
PSSWQVKDNRVRQLPTREWTAWMMEADPDLSRCPEMVLQLSLSSATPRSKPVCIHKNSECLKEQQKRYFKVFSDRVVYTPESLCKXPLA

SEQ ID NO: 781398 - protein, 131 aa, Homo sapiens
GPWHICHPHQPPEPRPPTHAPAGLGSEPCPESRAVFQDGKPMPMLPTYVLGWTQQGKTCAFQSQAAYGREVSCFPGQRQAQRLRISVHGPRGHVDPSRNAPRRPDLARGGVWLLVTHGPGPQNSGSLLTGS

SEQ ID NO: 781399 - protein, 47 aa, Homo sapiens
ILLSYDLYSLLILQLVIQIQFVYLYPKCLEPEEFQNLDGERLILEYL

SEQ ID NO: 781400 - protein, 109 aa, Homo sapiens
TSQRTSAPGQGYSRMQRRRLRGGPPLSSGCLGGQSLGNWEPLRAFEGHEMIRCAFREIIGWIVEDWRPRESVASENDSGTGDMKNREVEVIVWMFGAREQPSVLPLMPG

SEQ ID NO: 781401 - protein, 54 aa, Homo sapiens
SCRGWRRSGVHVCERTPLEHVSRESGRDHCPQPFKAHKPTTHLSWKQHVIPYAP

SEQ ID NO: 781402 - protein, 141 aa, Homo sapiens
CKQAYHSKVSCFVLQQIEEPCSLGVHAAVVIPPTWILRARRPQNTLKASKKKKRASFKRKSSKKGPEEGRWRPFIIRPTPSPLMKPLLVFVNPKSGGNQGAKIIQSFLWYLNPRQVFDLSQGGPKEALEMYRKVHNLRILA

SEQ ID NO: 781403 - protein, 150 aa, Homo sapiens
CHHLPEVAHKSSASAGAPSARLPLQPHSLGTRTKLPPSLCLPGPGRTRLTTEPFPGAPFCSDSCSPALCCVLLTPGRGERERGPSGKLPGRQGWVLPYRYSTCCAGNGRLLDGGPSPGMAGTPTPVLPTVCFQRTLAPASPHPHHALHLA

SEQ ID NO: 781404 - protein, 116 aa, Homo sapiens
PQAVVFDACLVIPCRDLQSQRQLASSEKYLCPWYSPHPQSDPCKIPYNWLPCHSWYDILWTTQSQGWTSSAGCTSLKPYIHFTKQNNSSNCQHLRCNLVHISITTSTSTNHIPTLS

SEQ ID NO: 781405 - protein, 117 aa, Homo sapiens
IIQPATQPLQGDALHGGVGPCSAHPRDDARRTARCSSSSCHDSGLGGAGPISPSLSRVMSGPHRRELAPAPAQLPGGGRETLMAVTVMMATGDGSTPQPQGTLRTRSHHGTIATRGP

SEQ ID NO: 781406 - protein, 32 aa, Homo sapiens
QFRDNNKGKHAFMKPDFLISYNITGTRLNIYC

SEQ ID NO: 781407 - protein, 132 aa, Homo sapiens
MSQASVGLPKGHHQAPGPKRKETARVLTSPEKTDDPGCQGACQVAPLPILPPAPSRFPVAVAYGGRGTGDEGRGLTRGELGHWPETGCSLAPLVALIHCVISTSHFASLVLFPTLCNVLLHSSLDDRARFSL

SEQ ID NO: 781408 - protein, 91 aa, Homo sapiens
GIQRLKGHLTLQRLLEMQGCFILGKQKILQNQTVSGIGGFLVSLTSRMKPRTLAVSVTALKVAFLESVSSDVQMCSEFLPSGGFVVSLAQE

SEQ ID NO: 781409 - protein, 98 aa, Homo sapiens
RDEKTFGTDCVEAVILLVTLLWEKKEAFHVGFSEELQYFPERSTEKLKVFEWEEEKQTTATSEDNTKHLVHSVYTRGAVNFLVEKELSLEKYLKKPLK

SEQ ID NO: 781410 - protein, 82 aa, Homo sapiens
MNGNGVSRVHGNGLHEASEFYYEAVEGAHNPGGLLLSPAAFINPAQYASVLEGRFKQLQGEARGPPVGTTVPGREGPGCGES

SEQ ID NO: 781411 - protein, 143 aa, Homo sapiens [sequence omitted]

SEQ ID NO: 781412 - protein, 34 aa, Homo sapiens
MNVRGKSSVSTPKTPSEWTKMSGQQVRFPALCTR

SEQ ID NO: 781413 - protein, 41 aa, Homo sapiens
RTCTHVYTHTRTGTHAQMHAYTGHVPSHTCKHTHRHSCRCT

SEQ ID NO: 781414 - protein, 76 aa, Homo sapiens
SFCDARALVGGAGGEPADCVWHWARGNTVHPGWARGSWERRASQVGSGLVGTPCIVGEHGEGLGGQGARGSAMHPG

SEQ ID NO: 781415 - protein, 103 aa, Homo sapiens [sequence omitted]

SEQ ID NO: 781416 - protein, 117 aa, Homo sapiens
PLGYKGTHCELWWQGPQACAPPACVVLPTGMLVDLAHVPALLAIMMWDPPQLSANHSLFSVYKSPSHQKRRAGEAALDREITGSSFQCPPSLSELWCLKQIRLPLNVSFCSSIQSGQ

SEQ ID NO: 781417 - protein, 107 aa, Homo sapiens
TIPVCIPFLHLLPRQETPSWSKRKPSEKFRDQPFYFGPGGLCGRANLLPFSHPPENYNFPSGALKPRDNVAFLYLSGCNAHLGNHWDLPRQTEVVFGCCLFIWTVIS

SEQ ID NO: 781418 - protein, 82 aa, Homo sapiens
MIPESSEGYMNIIPNTCHPTLNQWWRSGKKLEDGPKFLKDSVVACQGPLMLTWQAALPCSMGHLMVVTLPFKNKGSAGHGNS

SEQ ID NO: 781419 - protein, 102 aa, Homo sapiens
MKALTCLKFALTLYIFSFLVLALGALRATTSCQLVRYRRENEGLLGADVFPFHYHNAPKNPYCSCSIPRGSLGQKDISSEFLQQLKEERKLFPKLFRCSAFW

SEQ ID NO: 781420 - protein, 84 aa, Homo sapiens
LIPLLLSFLVSRCESPNKSQEDGLPGPPQTVLLGNTDEGPSALFKLLSTKGLASEGCLKAQLLPCIGPARTRIMLLVWFAGSDH

SEQ ID NO: 781421 - protein, 93 aa, Homo sapiens
GFQSPSVARRPSTTENCLERRVRAKQENMGIWAGVGVVAEIGDCFHRRLIKLVIILRKMKDKVFTVGEGSYKYSRGKNKDDPRGVELEFGILL

SEQ ID NO: 781422 - protein, 93 aa, Homo sapiens; identical to SEQ ID NO: 781421

SEQ ID NO: 781423 - protein, 120 aa, Homo sapiens
AHRNAHMACAGHRLTHTDSHLFVPCTPELQRQASRYTRSGLTWPRGPRCTQFIPGYSEHTCTHVKPLCVQRTNVHTYAYEAVLQPQLTAGHRAHIYTMAQRQGCTYTITVQGHLCAHTRV

SEQ ID NO: 781424 - protein, 146 aa, Homo sapiens
SDAVKKVGRKGVITVKDGKTLNDGLEIIESLKFDRGYVSPYFINTSKGQKCEFQEAYVLLSEKKISSVQSIVPALETASAHRKPLVIITEDVGGEALSTLVLNSLKIDFQVVAVKAPGFCDKEPAQRYGCYYCWCSVWRRGVDPTF

SEQ ID NO: 781425 - protein, 68 aa, Homo sapiens
LGPVPGAALMKHTFQGVCDPLALDYVRGQWGSCFLLFPPSISLLFEIAFFPKVCSALSFPKGVISSPS

SEQ ID NO: 781426 - protein, 74 aa, Homo sapiens
MPLFSSSGRPGPWEFCPRGLRAFKEKSHEVGGAAWAAGQGDPSPQGTKKERAYRVSPDPGDSGPGRLGAPQRPL

SEQ ID NO: 781427 - protein, 57 aa, Homo sapiens
MAPLLRALISLKPQVLTVPPRLYTIWRWPHLDQHGGHSALSSPLPHWSKPRALPAQS

SEQ ID NO: 781428 - protein, 135 aa, Homo sapiens
GREPPQPRARCSLRSRFVPRRGGTGTRGGGCGAGGRSLSMDVTVSELLELFLQSPLVTWVKTFGPFGSGSQDNLTMYMDLVDGIFLNQIMLQIDPRPTNQRINKHVNNDVNLRIQNLTILVRNIKTYYQDRPFFR

SEQ ID NO: 781429 - protein, 172 aa, Homo sapiens
GREPPQPRARCSLRSRFVPRRGGTGTRGGGCGAGGRSLSMDVTVSELLELFLQSPLVTWVKTFGPFGSGSQDNLTMYMDLVDGIFLNQIMLQIDPRPTNQRINKHVNNDVNLRIQNLTILVRNIKTYYQRWGDDYDEEGEEADEEGEEGGDEENDPDYDPKKDQNPTECKQQ

SEQ ID NO: 781430 - protein, 172 aa, Homo sapiens; identical to SEQ ID NO: 781429

SEQ ID NO: 781431 - protein, 161 aa, Homo sapiens
MGGAEWESEQTGVKTFGPFGSGSQDNLTMYMDLVDGIFLNQIMLQIDPRPTNQRINKHVNNDVNLRIQNLTILVRNIKTYYQDRPFFRELNFLRADTAFEFSHWLQTNPVEVDSEQDTPAGGPGTGCGCQAWPWKAITVGSSGSGTDSQQGEWVLGRSGRR

SEQ ID NO: 781432 - protein, 225 aa, Homo sapiens
GREPPQPRARCSLRSRFVPRRGGTGTRGGGCGAGGRSLSMDVTVSELLELFLQSPLVTWVKTFGPFGSGSQDNLTMYMDLVDGIFLNQIMLQIDPRPTNQRINKHVNNDVNLRIQNLTILVRNIKTYYQEVLQQLIVMNLPNVLMIGRDPLSGKSMEEIKKVLLLVLGCAVQCERKEEFIERIKQLDIETQAGIVAHIQEVGAWPRGGLSCGLLLLWWPGGKTSL

SEQ ID NO: 781433 - protein, 46 aa, Homo sapiens
MPTSCSICIFSSGSQSAQAGLKLLTSNDPPTLAYQSAGITGVSHHA

SEQ ID NO: 781434 - protein, 72 aa, Homo sapiens
PAGERKKVWRTVHAYMILAGERKKVSRMVHAKMIPAGEGKKVSRTVHANMKPAGEGKENRFVHSNVSIHFGT

SEQ ID NO: 781435 - protein, 70 aa, Homo sapiens
DHMIISMDAEKAFDKNHTFIIKAFNKLGIEGNYLNIIKAIYEKPTTIMLTSPHLKTDSFSPKIRYKGKMP

SEQ ID NO: 781436 - protein, 148 aa, Homo sapiens
NSVMNMLSQRHLRMSLGKIWMQTQTSTQGEYHVKSGVMLPQAKELPEAKRSLEQILPQNLQRKHGLTDVFISDLWPPELKKKRTYKYQRYHLRLHSNGAAKVLLIGERLIGECRRMQQQVCQMWWSLLLLQLCILESPCSDHHHFSIG

SEQ ID NO: 781437 - protein, 102 aa, Homo sapiens
MPSLFLIFLEMGSCHVAQAGLKQSSHLALYWSSENMIPELVLFISLDTFSFLAPKCGYLHAQAGKHLISEVRFYYIPNLGLNCCSHGQFFTLLSLKKKETKF

SEQ ID NO: 781438 - protein, 115 aa, Homo sapiens
PLVSQAGVQGRDLSSLHLRLPGSSNSPASASAVSGITGTRHHIRLIFIFSVKTGFPHVDQAGLFGQAGLQLLVLEDPSYLSLPRCCGCRHEPPCLALVLSIHVGLSYCLVSFHLS

SEQ ID NO: 781439 - protein, 108 aa, Homo sapiens
MSKGRKRSVPAPGEGDRGNSFLSFFVLCGPPADWMVPSHNEGRSSLLSPLTHMPISSRNTLTDAPEGMFYRFSSLLFFFQTIVRLLFFFELEFHSVTQAGVQWRDLSS

SEQ ID NO: 781440 - protein, 108 aa, Homo sapiens
MICGSAREVRIKQPYSLPCPPLEQLLLGHWHWSPPKSTPSLYAVLGWKDPELNAGPHHELGGNLRIILHNYIDLPRFPLVLRMLVCVEAITLCGSSQGLQCYRDRMLS

SEQ ID NO: 781441 - protein, 139 aa, Homo sapiens
DGYEFLEILKQVARDNTDNPDLSILWIDPDDFPLLVAYWEKTFKIDLFRPQIGVVNVTDADSVWMEIPDDDDLPSSLFPLPLRQEQHHSANAFSNAAIPLSRDRRKIIPMLTVLTVTEQILFFAGPSRVMAVPEHGSLG

SEQ ID NO: 781442 - protein, 65 aa, Homo sapiens
MSLAYVRRSNNRNYFMLVEITTTVILEVGGVWSLNSKNADFEGGLLPDVCTHQNISFIKAWMPTV

SEQ ID NO: 781443 - protein, 35 aa, Homo sapiens
QTPALVPAGPGRLILGLQVACLDTSNVGSGLYSCW

SEQ ID NO: 781444 - protein, 74 aa, Homo sapiens
RGEENGVNGEKEQNTAEKTLELISVAPTTLTGPGHTGWRLVWFLQRLKAAHSHLSLETEADKKAEVGILSNRTK

SEQ ID NO: 781445 - protein, 52 aa, Homo sapiens
MRLKLLGHHNVGKTSACHPPGGNEELIAGLIALTKPQAVRFCTIHVSIHPII

SEQ ID NO: 781446 - protein, 133 aa, Homo sapiens [sequence omitted]

SEQ ID NO: 781447 - protein, 115 aa, Homo sapiens
PGTEHRRHLCLHSPSRALLRLCDATLISQTRTLRVKAVSHIPRQGCEPIPCLPASLLPPSRPPLSGAWNEHSGVVRTFLDLPIKGVQSKYKVTSGATKATTVAITYEPLRPQINT

SEQ ID NO: 781448 - protein, 84 aa, Homo sapiens
VLVGLAIPAPKVLHGFHDIHALFPLAKDHMVAIQPLNLGSADEKLGTICVGSSIFHEQDARTCMLQDEVLIIKFLPIVGIAINY

SEQ ID NO: 781449 - protein, 136 aa, Homo sapiens
RESATHNSISHLLLPLPSQHSVANSHLHIPSTQGRKETGNVAYDCTPTGSETHTGVPPHPGVKAPSGQSTRWQRGAAVTTPNSEVRGTDGHWEPSQPGMCSGTLAHCPWRSCRLTSPFQNSFTCWAQWLMPVIPGL

SEQ ID NO: 781450 - protein, 73 aa, Homo sapiens
NGHVRKKSMSEHMCNCESIMKSCEGNSLMKERKEPKMAAVLNPADSETIGTINRIREVCVRACVHVCARACAR

SEQ ID NO: 781451 - protein, 280 aa, Homo sapiens
MCSAFHRAESGTELLARLEGRSSLKEIEPNLFADEDSPVHGDILEFHGPEGTGKTEMLYHLTARCILPKSEGGLEVEVLFIDTDYHFDMLRLVTILEHRLSQSSEEIIKYCLGRFFLVYCSSSTHLLLTLYSLESMFCSHPSLCLLILDSLSAFYWIDRVNGGESVNLQESTLRKCSQCLEKLVNDYRLVLFATTQTIMQKASSSSEEPSHASRRLCDVDIDYRPYLCKAWQQLVKHRMFFSKQDDSQSSNQFSLVSRCLKSNSLKKHFFIIGESGVEFC

SEQ ID NO: 781452 - protein, 280 aa, Homo sapiens; identical to SEQ ID NO: 781451

SEQ ID NO: 781453 - protein, 280 aa, Homo sapiens; identical to SEQ ID NO: 781451

SEQ ID NO: 781454 - protein, 110 aa, Homo sapiens
MFYKDMFSALQFSSGGNQTSQVVNTGVCPTCHHQVATGLMGDWEWEGKEEALLLWNLITGNPLPPGAQNLITGNPFPPGAQNLITGNALPPEAQNLITGNPLPPGAQDGF

SEQ ID NO: 781455 - protein, 56 aa, Homo sapiens
MRLAEKQVNREWICREVGATSGYKEKCDPKPSKEDTQASSQPGTGRSSVLLKWSGG

SEQ ID NO: 781456 - protein, 172 aa, Homo sapiens
SKSPTLTAPPAAVHAGNRSSFAKADGGALWGCDQSPASQCTCRCPLQPLASFRWLSLEGCASWAGVWCPEHADCPWSGGQDCFSLKGFHICTGALADGSLWQSSPGGFPVRRHLTVSSGSGECSPAGSTLEPGSAGRGGVGFPWWMRGAEGLGGSMCPQGQHFAFLGRLEDD

SEQ ID NO: 781457 - protein, 86 aa, Homo sapiens
TLGAYMVLGACWCHHENTAHIYSSCGVQDVTMWYCQYGTLHSCVYTHMHRHTCTGTCTHTDAHTDMDTDIHTDMDRYTDTHTEGAY

SEQ ID NO: 781458 - protein, 141 aa, Homo sapiens
PKPGDLFLPTSHGLPTPQCHSVQPRKLSSLGLSLSPSPRGACEATLTPAGPRPEVWPREALLLGLGVLHGGTILGQKTPISARRWGGLAFPLPFQHTASPGGQPQGPISFSCSSQRNTEKPVGCALGFGGDWRGGGAELMG

SEQ ID NO: 781459 - protein, 40 aa, Homo sapiens
ARITAVSHFAQPASCVLSTYCLYPKPNDLSAQGSSELKGK

SEQ ID NO: 781460 - protein, 141 aa, Homo sapiens
ASQFRVRERSPLGRARGLPEWLLCSQPDSCAAGCPPSPTGPEWGLGLGWRQLSQLQGHQGWGRQLCPMQALASAAHGTRCSQGGFLEEGSLVHTLFHEPYHLSVPGSELGDPRVPKRAPSQTLPSESCSWPGERIEEQSQT

SEQ ID NO: 781461 - protein, 61 aa, Homo sapiens
LGTGLYLLKTCGKKKKKMMNIGRGRELQENHGVDDGVNQYEDLRQQVFPKGKDKVRAGALP

SEQ ID NO: 781462 - protein, 123 aa, Homo sapiens
MPSPGLWVLLDSVTWEACSSPPVSGIFRDLVSTLQTSSLCVWSPNYPNKGKNPVIQGPWVGTSLIPYLGIAPPGSASRGGVGRDWLPAPMTVRRNGEGHPPPTALVLSLPPASPRRSLVSCTL

SEQ ID NO: 781463 - protein, 83 aa, Homo sapiens
AHFAQNLSLLTPTPPFSNLLGFFRRNVVGLGNPQNRNPPSSPPPLVYNHSRLQPQTPGARKALPHPPGNSASLHMRTHPAPGS

SEQ ID NO: 781464 - protein, 164 aa, Homo sapiens
ETRYIWAGMRGADRLPPEIPKCTQIPNSLELFSRALWQERGARNTSSWFRAGGRRAARSPATFALRRLGEPGGCRGESSAPTGNIGVPVAKATRLASEGLLCEHRRRVHFFESENSSELGLYQSLSRPLGRLFVYWLLREKSLKIFNQPQTWRGRKSRNLPKQK

SEQ ID NO: 781465 - protein, 113 aa, Homo sapiens
CLPRACVEQHSARDAWEVDENSIQPEMLGKWMMSTILRITCDAYFPGNRNEVGPGHLLSLLSVLQKEGSGAGAGGPGASQAAGQGERCRWQDPPGTRERHMRELLRYGVRQQG

SEQ ID NO: 781466 - protein, 45 aa, Homo sapiens
MSSIGKFQGQRYKGGVEYRDKATVSHTSGHKSTQATEQDAAIEEY

SEQ ID NO: 781467 - protein, 104 aa, Homo sapiens
MGKLHFRLEDTLSQLPLLDHFPKLCSKHPRVDAPKAAAPPLIPLSLLLISLSDKNKHNPSFKHLFHWSPLRAHLEDVAPLEGTWWAVVSPSTMPWISWCTSWLS

SEQ ID NO: 781468 - protein, 105 aa, Homo sapiens
TGSVSYGRVSGVSARTFISKGQNLGHASLNNKENVLPLLTEKSRKIQVWLDPGTPITSPGLSPSPSVSSVSSMLASFPGEPSSHCGPPQLQTTSCPLSPVERDPL

SEQ ID NO: 781469 - protein, 258 aa, Homo sapiens
MGRFMLKYTQTLETSLTAFLTFLNMVGPDRCKMNPCLNGGTCYPTETSYVCTCVPGYSGDQCELDFDECHSNPCRNGATCVDGFNTFRCLCLPSYVGALCEQDTETCDYGWHKFQGQCYKYFAHRRTWDAAERECRLQGAHLTSILSHEEQMFVNRVGHDYQWIGLNDKMFEHDFRWTDGSTLQYENGDPTSRQLLFCWRRLCCNHLGMRMGSGMMFPWHYQFSHYTWQKRDTVLVDKPLWLNAQNLEDETGFEINPD

SEQ ID NO: 781470 - protein, 56 aa, Homo sapiens
MQCPGMPGPLSMVSPSPPKSKLIHKAPGCIQACHLRPPSSASELMIWLREHRQVLP

SEQ ID NO: 781471 - protein, 91 aa, Homo sapiens
TLGCCSRSQSEFAGAWLEPQRRLSSREQTEGSGCVLVNDPQAQHARLPTILCALFTWTCRGLSGLYSVCYETSQPHAEASGRAWILIMLLT

SEQ ID NO: 781472 - protein, 66 aa, Homo sapiens
PEDTLGQRLENNTRKNGQKFFRYKRHPRPQAQLATASANIPFPPTLQIGKATRTPKSFTNSGGKVS

SEQ ID NO: 781473 - protein, 107 aa, Homo sapiens
FPNRARLLPPPPGRHQGVPQGLLWAVVASASGGAGQLQHARSPLSLICSREKHGSENRLRELLRTLQGQEQYRALQGQGHKPSGLPKTDCLGSNPSSAISSRPWASP

SEQ ID NO: 781474 - protein, 54 aa, Homo sapiens
TLGMEHGFTSTILKTKHNQSNGYHEVEVVHATATVDQSGVRSKGHGNSLWGMLK

SEQ ID NO: 781475 - protein, 106 aa, Homo sapiens
CISSQVAGTTGVCHLAWLIFVFLVEMEFHRIGQAGLVLADSCVWALCFGREAVICGFPSPFFLPKGDRFPSESSKDVGSRVSNPPPYPLILTPPRAGSKSLGFQSL

SEQ ID NO: 781476 - protein, 108 aa, Homo sapiens
PRWQEFAGRNARGEEQHRQTLETCRRSPSSIRLKYQPAHWYNDLKLRKNHQKGLEVPRNGTYSPLARTENLMTHKPCGRSTKWVLPYLWGLTGPKMRTAWVLPNTFKK

SEQ ID NO: 781477 - protein, 46 aa, Homo sapiens
MLMPHTQLPLPWGKLLPNSQAQRERKKGQWMRRGCDEGSFLKTHKV

SEQ ID NO: 781478 - protein, 352 aa, Homo sapiens
RRAKTLTASRSQAPVFTAESMLWLFQSLLFVFCFGPGNVVSQSSLTPLMVNGILGESVTLPLEFPAGEKVNFITWLFNETSLAFIVPHETKSPEIHVTNPKQGKRLNFTQSYSLQLSNLKMEDTGSYRAQISTKTSAKLSSYTLRILRQLRNIQVTNHSQLFQNMTCELHLTCSVEDADDNVSFRWEALGNTLSSQPNLTVSWDPRISSEQDYTCIAENAVSNLSFSVSAQKLCEDVKIQYTDTKMILFMVSGICIVFGFIILLLLVLRKRRDSLSLSTQRTQGPAESARNLEYVSVSPTNNTVYASVTHSNRETEIWTPRENDTITIYSTINHSKESKPTFSRATALDNVV

SEQ ID NO: 781479 - protein, 287 aa, Homo sapiens
RRAKTLTASRSQAPVFTAESMLWLFQSLLFVFCFGPGNVVSQSSLTPLMVNGILGESVTLPLEFPAGEKVNFITWLFNETSLAFIVPHETKSPEIHVTNPKQGKRLNFTQSYSLQLSNLKMEDTGSYRAQISTKTSAKLSSYTLRILRQLRNIQVTNHSQLFQNMTCELHLTCSVEDADDNVSFRWEALGNTLSSQPNLTVSWDPRISSEQDYTCIAENAVSNLSFSVSAQKLCEDVKIQYTDTKMILFMVSGICIVFGFIILLLLVLRKRRGRFPFFLLVSSPRFQ

SEQ ID NO: 781480 - protein, 241 aa, Homo sapiens
RRAKTLTASRSQAPVFTAESMLWLFQSLLFVFCFGPGQLRNIQVTNHSQLFQNMTCELHLTCSVEDADDNVSFRWEALGNTLSSQPNLTVSWDPRISSEQDYTCIAENAVSNLSFSVSAQKLCEDVKIQYTDTKMILFMVSGICIVFGFIILLLLVLRKRRDSLSLSTQRTQGPAESARNLEYVSVSPTNNTVYASVTHSNRETEIWTPRENDTITIYSTINHSKESKPTFSRATALDNVV

SEQ ID NO: 781481 - protein, 79 aa, Homo sapiens
DLEDLSVILQLCYLHSNCSSLPSTMIVRPPLPCGTVTPLNLFCPLPSLGYVFISSMKTDEYIGDLKARFPVFYDKAIAK

SEQ ID NO: 781482 - protein, 120 aa, Homo sapiens
LQAHRGSALVFYDFFHPHLSPIFNEHIPRCHHGHHHHHRPLHGTTTVTSTITFTSAISIISTTITSTITSPPPPSPPPPPSPPLLHSTSITTITSTFTSTSTTTITTSSTSTSARPKQAR

SEQ ID NO: 781483 - protein, 138 aa, Homo sapiens
MEETHYLISNNKVIVTKAARYWYKNRHIDQWNRIENPEINPNTFSHLIFDKTNKNIKWGMDTLFNKWCWDNWLATCRRTVDPHLSLYTKINSRWINYLNLRPETIKILEENFGKTLLDTVVARISRPKTQKQMQQKQR

SEQ ID NO: 781484 - protein, 93 aa, Homo sapiens
IPLDLVYPFLMQGCVLICLRGPTVQHNSWPGGKAGRLSGPEAPGFISMTEVRQRRSILWMGKLTFHMLPAWGPSCFQKPYLLRPPLPQKMSWG

SEQ ID NO: 781485 - protein, 133 aa, Homo sapiens
LHPQAQGETFSGISLPDQEGFFPKETRKSHYLSHKRRLRTAITPGQTCAQDNAFLIQAPKRIICKLISVHSFSQIIICCPVKRTVYIPYLPLPCEIGYITFCVALGYWVIFLLLFIPRCYARQNFNVFSPVDS

SEQ ID NO: 781486 - protein, 148 aa, Homo sapiens
ESVRILENVLDSGQGTVRFPEREPGLSRSWAPPLLGSAGIPVWTSFEQEAQQGLGLLLLPEKYKHLLESYRYLMKARRTQGAALKGGHQSYPLTSGAAFEQRPQGVSEGERPSHRNHGFPEIVGATNHRPPQCAHSSLPCAIRHRNHY

SEQ ID NO: 781487 - protein, 90 aa, Homo sapiens
SDRRTRAGDGGDPCSELEEEEELGSGSEDAPRKIMEQSRKEAQKAASQTLSFYPLKEGKGSFHFLLLLGMWADKHLTPGTPALTIVYIPH

SEQ ID NO: 781488 - protein, 107 aa, Homo sapiens
MQPRPTNAKSLPQNKLSSWKKLEESPNHLSSDSRTPELYQDKTVQLSLFCTGVPPCEVIRETSVLPNPPHIHSLPLKHLLLYKLETEAPRKQLERNVEKLMIVRFSK

SEQ ID NO: 781489 - protein, 44 aa, Homo sapiens
MGPHEGGCLAWWPLVGTCGTHRSFPTRILWAAWVHLHRIMGGSR

SEQ ID NO: 781490 - protein, 39 aa, Homo sapiens
MLIHAGHAHHRVMSMQGILWKDEECVLHKNAPTSTQLID

SEQ ID NO: 781491 - protein, 326 aa, Homo sapiens
LLANGMEVALQTEPHLLAGTVNPTVGKRNVTLPIDNGLNLVEWRQRKEQARGQVTVFGRRLRVHNRNLLSLDFDRVTRTEKIYDDHRKFTLRILYDQAGRPSLWSPSSRLNGVNVTYSPGGYIAGIQRGIMSERMEYDQAGRITSRIFADGKTWSYTYLEKSMVLLLHSQRQYIFEFDKNDRLSSVTMPNVARQTLETIRSVGYYRNIYQPPEGNASVIQDFTEDGHLLHTFYLGTGRRVIYKYGKLSKLAETLYDTTKVSFTYDETAGMLKTINLQNEGFTCTIRYRQIGPLIDRQIFRFTEEGMVNARFDYNYDNSFRVTSMQA

SEQ ID NO: 781492 - protein, 133 aa, Homo sapiens
RSGGQARHPSQLEDPALLQPAGAVTPGLVLLEVPALPLAGGAQPLPQGPHRQHAWQIQEEMAQDETWHTQAPESVGLALFHCLVSAEILCLWPVPAMWKPEGVCHAPRFGHCCVKGPVFRPLLCHLSTGARSP

SEQ ID NO: 781493 - protein, 174 aa, Homo sapiens
MSEKDEYQFQHQGAVELLVFNFLLILTILTIWLFKNHRFRFLHETGGAMVYGLIMGLILRYATAPTDIESGTVYDCVKLTFSPSTLLVNITDQVYEYKYKREISQHNINPHQGNAILEKMTFDPEIFFNVLLPPIIFHAGYSLKKRHFFQNLGSILTYAFLGTAISCIVIGLIM

SEQ ID NO: 781494 - protein, 103 aa, Homo sapiens
MERQSRVMSEKDEYQFQHQGAVELLVFNFLLILTILTIWLFKNHRFRFLHETGGAMVYDKPPKFAMSREQMSQSCSHTAHNASLLTDAGPLSCGESRASCLFL

SEQ ID NO: 781495 - protein, 72 aa, Homo sapiens
TRGSRQQTTAVVHLNLLFVCSFVCFETVWPCRPGWSAMARSRFTAASTSRAQAILPPQPPEHLGPQVSTRSH

SEQ ID NO: 781496 - protein, 149 aa, Homo sapiens
IDDEPTVMGEPFTVNPALTPAKDKKKKDKKKKESSKELESPLTPGKVCRAEEGKSPFRESSGDGMKMEGLLNGSSDPHQSRLASIKAEADKIYSFTGNAPSPSIGGSSRLENTTPTQPLTPLHVVTQNGAEASSVERTAVRSTEPRVCG

SEQ ID NO: 781497 - protein, 136 aa, Homo sapiens
LPSATALSRRECPLTPGAIPALFTLTGLALLERPASRAHPAVDTSPPLAGSAPASGGQPLWTVPILRPFWRNGIHLTDSKGFFPSPFALVNRRTSSVLLASGLQGLRSLTLDVWPELDFIKILCLGLLTTPYSPLP

SEQ ID NO: 781498 - protein, 136 aa, Homo sapiens [sequence omitted]

SEQ ID NO: 781499 - protein, 34 aa, Homo sapiens
  misc_feature (32)..(32): Xaa can be any naturally occurring amino acid
MFVLENLYWHMESSSTAKKEISVSPEKQRSHXNP

SEQ ID NO: 781500 - protein, 132 aa, Homo sapiens [sequence omitted]

SEQ ID NO: 781501 - protein, 75 aa, Homo sapiens
MHSRRHLKGRSIRNQNAEAEVSASPLFHVMLIRGACQRVQICTQVTRLQRHPAYSAAPPHLASLASLLSRPQTTL

SEQ ID NO: 781502 - protein, 98 aa, Homo sapiens
PQDIYNQLKIEPRNRHSPVACSTKDTFMTELLNRVDKKAAPQTESGSSNASCRNVLKGSSQGSCLIGSSISTQGNHKKNMKIKADMEVPKDSLNPTAR

SEQ ID NO: 781503 - protein, 93 aa, Homo sapiens
EDEDDAVADSVFQSHIIESNCQMRTLDSGIGTFPLPDSGNRSTGRYLCQPDSPEDAEPLLPLQSALSAVSSMRAQTLEREVPSSTDGQRPADS

SEQ ID NO: 781504 - protein, 121 aa, Homo sapiens
TSAFSAPGSWVEKARGGWIPGVSAARQARVPARPVCEERPPLRVALTLGLLCRPGQACEPRQHSSPMGRKAGPGMSQAVVSVTRAVSVAPTLHPTSTSGCGTGCEGAEARKDCRALSQRCA

SEQ ID NO: 781505 - protein, 146 aa, Homo sapiens
SGPHAVVRVTPTQLPSACARRARRTAYAGRSGFPFPHVLSVRGLRTTHPGARAPGLPWSAPRFRLTHVCGGGGDCVAPHPGGGENGLSGGRGGRRARDRMPKPGGFGTRIAGNRGLFCFVFFSSNEGFGNSKMVQCKERIWFHQQE

SEQ ID NO: 781506 - protein, 107 aa, Homo sapiens
SGGPGGLTSAAPAGGDKKVIATKVLGTVKWFSVRNGYGFINRNDTKEDVFVHQTAIKKNNPRKYLRSVGDGETVEFDVVEGEKGAEAANVTGPGGVPVQGSNICSRP

SEQ ID NO: 781507 - protein, 42 aa, Homo sapiens
SWKPVQKVEIGQKRASEDTTSGSPPKKSSAGPKRDARQIYNP

SEQ ID NO: 781508 - protein, 116 aa, Homo sapiens
RDTVPFDLHRDLMGKRGQKETDPIKFGALTKVAQPGIQQGPLIPRWSFQPEYMAPLPAECAVKASDVPKVSLQQSKVIITSGFSKSQSRDHGEGWCIFRYTSSSQFKGPCRTGHMS

SEQ ID NO: 781509 - protein, 236 aa, Homo sapiens
GHWRRCSPDPGPPGPGCPPAFRNWPRGRPRGWSCREQTGRSAAHLSAPGPSRPPGRGWYFSAWGQGEPSDLRKRLRGPCWGRDGEKIPQAPGAPASPPPPGLPPARPLRGRGGPAFRPGRGGAAGGEAGAPSLGPRPRTHTCAARTRVRDPRAPAAGAGRSLGCLLPRPGRGPCAPAVWLDQGAACLPDRSDGSHLSGQNPLSHHPLPPGPWGADPHPPESVGIPILTWEVRGEPG

SEQ ID NO: 781510 - protein, 467 aa, Homo sapiens
MADAATIATMNKAAGGDKLAELFSLVPDLLEAANTSGNASLQLPDLWWELGLELPDGAPPGHPPGSGGAESADTEARVRILISVVYWVVCALGLAGNLLVLYLMKSMQGWRKSSINLFVTNLALTDFQFVLTLPFWAVENALDFKWPFGKAMCKIVSMVTSMNMYASVFFLTAMSVTRYHSVASALKSHRTRGHGRGDCCGRSLGDSCCFSAKALCVWIWALAALASLPSAIFSTTVKVMGEELCLVRFPDKLLGRDRQFWLGLYHSQKVLLGFVLPLGIIILCYLLLVRFIADRRAAGTKGGAAVAGGRPTGASARRLSKVTKSVTIVVLSFFLCWLPNQALTTWSILIKFNAVPFSQEYFLCQVYAFPVSVCLAHSNSCLNPVLYCLVRREFRKALKSLLWRIASPSITSMRPFTATTKPEHEDQGLQAPAPPHAAAEPDLLYYPPGVVVYSGGRYDLLPSSSAY

SEQ ID NO: 781511 - protein, 115 aa, Homo sapiens
QVSGSADVHLSLKTEKKKSPSLKVVRQKEFSFIKPLGSSSDLSKAGIIPTSKSHVVAFLLQLFPLLWLYYLVYPYACVLVQVCQRNNQWDVCTWKEVYYKELAHMFMGVDKSQDL

SEQ ID NO: 781512 - protein, 73 aa, Homo sapiens
TVSQSFWIALGHASTLSQSSRQKRGFTIGYIHVEQRLPPSSISLPFEERGMRREERERSSSAVSLAYQKQRRT

SEQ ID NO: 781513 - protein, 117 aa, Homo sapiens
VQGCDLGSLQVPPPGFMPFSCLSLPSSWDYRRPAPRLIFCVCVCVFLVEMGFHRVSQDGLNLLTSGSACFGLPKSWNYRREPPRPAISYYYYFSICLSPSSTKGKLLAALLITTPLT

SEQ ID NO: 781514 - protein, 66 aa, Homo sapiens
LYRKPALLPPRAPSPLLAPSGNVYFSSSPVSNDVKTEVFFWSGQHYSIMTKSPGAACTGSQVNYWS

SEQ ID NO: 781515 - protein, 76 aa, Homo sapiens
RESPPLSVKGQTAACSVLGARWSLLQRLGSGSAVAAHRQLVPMSHTHKPRRGPSGPGPHCADLSYSTQEVLCKHQR

SEQ ID NO: 781516 - protein, 37 aa, Homo sapiens
MLRSNFSSSFTGACLTTAHTWLLIIRSGALYEGPTAT

SEQ ID NO: 781517 - protein, 69 aa, Homo sapiens
MKPLKFPQSSPFPHDPALVEPSPGVLGSCHGCALGLLPPGFNLPSFVSQRYIPKKQIGPYSSLLETLHA

SEQ ID NO: 781518 - protein, 100 aa, Homo sapiens
CPDSSSHHCDKLARTQVNPDLFPGRTHVPCCFSEPPRGCLLVVPLTGQIPPDSSSCLHSSPHHLGFPWVALCPLSSALGGCKVNGFLLFGFSAFPSPVCN

SEQ ID NO: 781519 - protein, 108 aa, Homo sapiens
SGAGDREAGTEGAAPGEEEDRDMKMAENDREGSMHKAARALGLGTSVQPLSPNPSPSPGQAPSALQEPPGGQPKSNTPSASTPLPSFQATREPTCAPREKQPRKMSPS

SEQ ID NO: 781520 - protein, 205 aa, Homo sapiens
MVTLPALTLGYFRTDEPDLSPTFISQFLIISTIFLCSTPALCIVSHLQDEKKCFLCDSRRPFSARDNPHSHRIQNVVTSFAPQRRAAWWQSENGIPAVTIQLDLEAEFHFTHLIMTFKTFRPAAMLVERSADFGRTWHVYRYFSYDCGADFPGVPLAPPRHWDDVVCESRYSEIEPSTEGEVIYRVLDPAIPIPDPLSSRIPNLL

SEQ ID NO: 781521 - protein, 49 aa, Homo sapiens
MASLGVVWEEGSWGFEGTCTFSPVLGAGDSSLPTAPSAHPQCYVAMAPR

SEQ ID NO: 781522 - protein, 142 aa, Homo sapiens
LRNLPGPIWAWPFQAVPAPQEDARLLPRIHEVRRMGPSINSGPRGGQQWPRRKGGGRFQRWPRPGMQRREALKASESKGYLRGLEGCRDRTSWRSWARWLLREGTENQGTQQSLLFPSHLASEEREGIKAGRVKRNEGPEGK

SEQ ID NO: 781523 - protein, 171 aa, Homo sapiens
MRCHNLKDYTIEIVAVDSGNPPLSSTNSLKVQVVDVNDNAPVFTQSVTEVAFPENNKPGEVIAEITAMMLTLALMLSWFTLWSLSRLLKGLFTISPETGEIQVKTSLDREQRESYESKVVAADRGSPSLQGTATVLVKVLDCNDNDPKFMLSGYNFSVMENMPALSPVGMG

SEQ ID NO: 781524 - protein, 115 aa, Homo sapiens
TRDPHTTAFQKPPSTYHVTGDPQTAAFQKPPSTHHVTRDPQTTAFQKPPSTYHVTGDSQAAASQKPPEESRASSEDRSLALSLLVFLRQGLCLSPRLENSGVITAHCSLDLLRLR

SEQ ID NO: 781525 - protein, 144 aa, Homo sapiens
LGDEEWTSLARAVGFTFKSKDMNYRAVEGRALGTLYREDGFSHGAYTRWALGTLYREDGFSRAYTRWALGTLQGGRLQSCIHTMGSGNTLQGGRLQSCIHTMGSGHTLQGGRLQSCIHTMGSGNTTGRTASSWCIHTMGSGNTT

SEQ ID NO: 781526 - protein, 73 aa, Homo sapiens
EHEWLLGWQHTALWQKGSDMLWSLPLFFKNLIWPPLYEEDKSDKLEGMSEHHLLLQQLLLSNSYVVLQCQHYI

SEQ ID NO: 781527 - protein, 106 aa, Homo sapiens [sequence omitted]

SEQ ID NO: 781528 - protein, 65 aa, Homo sapiens
EAGEGRSSCRFTDGKEPLDPPFNSPRDKFKLSRSLPFPATSTQRQGGDSKAQGHIQKLKEALSAL

SEQ ID NO: 781529 - protein, 371 aa, Homo sapiens
MEDEDYNTSISYGDEYPDYLDSIVVLEDLSPLEARVTRIFLVVVYSIVCFLGILGNGLVIIIATFKMKKTVNMVWFLNLAVADFLFNVFLPIHITYAAMDYHWVFGTAMCKISNFLLIHNMFTSVFLLTIISSDRCISVLLPVWSQNHRSVRLAYMACMVIWVLAFFLSSPSLVFRDTANLHGKISCFNNFSLSTPGSSSWPTHSQMDPVGYSRHMVVTVTRFLCGFLVPVLIITACYLTIVCKLQRNRLAKTKKPFKIIVTIIITFFLCWCPYHTLNLLELHHTAMPGSVFSLGLPLATALAIANSCMNPILYVFMGQDFKKFKVALFSRLVNALSEDTGHSSYPSHRSFTKMSSMNERTSMNERETGML

SEQ ID NO: 781530 - protein, 371 aa, Homo sapiens; identical to SEQ ID NO: 781529

SEQ ID NO: 781531 - protein, 371 aa, Homo sapiens; identical to SEQ ID NO: 781529

SEQ ID NO: 781532 - protein, 77 aa, Homo sapiens
GVHLANRAQDSHQKQTSGLLREWGRVWVQGCRVSGSESLVLWGLWIPENCLSPASGCARTTIPHPSALCRHFSFPSC

SEQ ID NO: 781533 - protein, 719 aa, Homo sapiens
MGEKNGDAKTFWMELEDDGKVDFIFEQVQNVLQSLKQKIKDGSATNKEYIQAMILVNEATIINSSTSIKGASQKEVNAQSSDPMPVTQKEQENKSNAFPSTSCENSFPEDCTFLTTGNKEILSLEDKVVDFREKDSSSNLSYQSHDCSGACLMKMPLNLKGENPLQLPIKCHFQRRHAKTNSHSSALHVSYKTPCGRSLRNVEEVFRYLLETECNFLFTDNFSFNTYVQLARNYPKQKEVVSDVDISNGVESVPISFCNEIDSRKLPQFKYRKTVWPRAYNLTNFSSMFTDSCDCSEGCIDITKCACLQLTARNAKTSPLSSDKITTGYKYKRLQRQIPTGIYECSLLCKCNRQLCQNRVVQHGPQVRLQVFKTEQKGWGVRCLDDIDRGTFVCIYSGRLLSRANTEKSYGIDENGRDENTMKNIFSKKRKLEVACSDCEVEVLPLGLETHPRTAKTEKCPPKFSNNPKELTVETKYDNISRIQYHSVIRDPESKTAIFQHNGKKMEFVSSESVTPEDNDGFKPPREHLNSKTKGAQKDSSSNHVDEFEDNLLIESDVIDITKYREETPPRSRCNQATTLDNQNIKKAIEVQIQKPQEGRSTACQRQQVFCDEELLSETKNTSSDSLTKFNKGNVFLLDATKEGNVGRFLNHSCCPNLLVQNVFVETHNRNFPLVAFFTNRYVKARTELTWDYGYEAGTVPEKEIFCQCGVNKCRKKIL

SEQ ID NO: 781534 - protein, 676 aa, Homo sapiens
MGEKNGDAKTFWMELEDDGKVDFIFEQVQNVLQSLKQKIKDGSATNKEYIQAMILVNEATIINSSTSIKDPMPVTQKEQENKSNAFPSTSCENSFPEDCTFLTTGNKEILSLEDKVVDFREKDSSSNLSYQSHDCSGACLMKMPLNLKGENPLQLANQMSLPKTTCKDKLSFFSTPHNFSFNTYVQLARNYPKQKEVVSDVDISNGVESVPISFCNEIDSRKLPQFKYRKTVWPRAYNLTNFSSMFTDSCDCSEGCIDITKCACLQLTARNAKTSPLSSDKITTGYKYKRLQRQIPTGIYECSLLCKCNRQLCQNRVVQHGPQVRLQVFKTEQKGWGVRCLDDIDRGTFVCIYSGRLLSRANTEKSYGIDENGRDENTMKNIFSKKRKLEVACSDCEVEVLPLGLETHPRTAKTEKCPPKFSNNPKELTVETKYDNISRIQYHSVIRDPESKTAIFQHNGKKMEFVSSESVTPEDNDGFKPPREHLNSKTKGAQKDSSSNHVDEFEDNLLIESDVIDITKYREETPPRSRCNQATTLDNQNIKKAIEVQIQKPQEGRSTACQRQQVFCDEELLSETKNTSSDSLTKFNKGNVFLLDATKEGNVGRFLNHSCCPNLLVQNVFVETHNRNFPLVAFFTNRYVKARTELTWDYGYEAGTVPEKEIFCQCGVNKCRKKIL

SEQ ID NO: 781535 - protein, 266 aa, Homo sapiens
MLLTDWDIAKMNRLSIITGIIRNLSSIQVYIARAQANVLEGNQPFFNTIGKKMEFVSSESVTPEDNDGFKPPREHLNSKTKGAQKDSSSNHVDEFEDNLLIESDVIDITKYREETPPRSRCNQATTLDNQNIKKAIEVQIQKPQEGRSTACQRQQVFCDEELLSETKNTSSDSLTKFNKGNVFLLDATKEGNVGRFLNHSCCPNLLVQNVFVETHNRNFPLVAFFTNRYVKARTELTWDYGYEAGTVPEKEIFCQCGVNKCRKKIL

SEQ ID NO: 781536 - protein, 526 aa, Homo sapiens
MGEKNGDAKTFWMELEDDGKVDFIFEQVQNVLQSLKQKIKDGSATNKDPMPVTQKEQENKSNAFPSTSCENSFPEDCTFLTTGNKEILSLEDKVVDFREKDSSSNLSYQSHDCSGACLMKMPLNLKGENPLQLPIKCHFQRRHAKTNSHSSALHVSYKTPCGRSLRNVEEVFRYLLETECNFLFTDNFSFNTYVQLARNYPKQKEVVSDVDISNGVESVPISFCNEIDSRKLPQFKYRKTVWPRAYNLTNFSSMFTDSCDCSEGCIDITKCACLQLTARNAKTSPLSSDKITTGYKYKRLQRQIPTGIYECSLLCKCNRQLCQNRVVQHGPQVRLQVFKTEQKGWGVRCLDDIDRGTFVCIYSGRLLSRANTEKSYGIDENGRDENTMKNIFSKKRKLEVACSDCEVEVLPLGLETHPRTAKTEKCPPKFSNNPKELTVETKYDNISRIQYHSVIRDPESKTAIFQHNGKKMEFVSSESVTPEDNDGFKPPREHLNSKTKGAQSRLCFFCECLPLLPVSLSLAQYL

SEQ ID NO: 781537 - protein, 371 aa, Homo sapiens
MGEKNGDAKTFWMELEDDGKVDFIFEQVQNVLQSLKQKIKDGSATNKDPMPVTQKEQENKSNAFPSTSCENSFPEDCTFLTTGNKEILSLEDKVVDFREKDSSSNLSYQSHDCSGACLMKMPLNLKGENPLQLPIKCHFQRRHAKTNSHSSALHVSYKTPCGRSLRNVEEVFRYLLETECNFLFTDNFSFNTYVQLARNYPKQKEVVSDVDISNGVESVPISFCNEIDSRKLPQFKYRKTVWPRAYNLTNFSSMFTDSCDCSEGCIDITKCACLQLTARNAKTSPLSSDKITTGYKYKRLQRQIPTGIYECSLLCKCNRQLCQNRVVQHGPQVRLQVFKTEQKGWGVRCLDDIDRGTFVCIYSDPHSTHPA

SEQ ID NO: 781538 - protein, 685 aa, Homo sapiens
MGEKNGDAKTFWMELEDDGKVDFIFEQVQNVLQSLKQKIKDGSATNKDPMPVTQKEQENKSNAFPSTSCENSFPEDCTFLTTGNKEILSLEDKVVDFREKDSSSNLSYQSHDCSGACLMKMPLNLKGENPLQLPIKCHFQRRHAKTNSHSSALHVSYKTPCGRSLRNVEEVFRYLLETECNFLFTDNFSFNTYVQLARNYPKQKEVVSDVDISNGVESVPISFCNEIDSRKLPQFKYRKTVWPRAYNLTNFSSMFTDSCDCSEGCIDITKCACLQLTARNAKTSPLSSDKITTGYKYKRLQRQIPTGIYECSLLCKCNRQLCQNRVVQHGPQVRLQVFKTEQKGWGVRCLDDIDRGTFVCIYSGRLLSRANTEKSYGIDENGRDENTMKNIFSKKRKLEVACSDCEVEVLPLGLETHPRTAKTEKCPPKFSNNPKELTVETKYDNISRIQYHSVIRDPESKTAIFQHNGKKMEFVSSESVTPEDNDGFKPPREHLNSKTKGAQKDSSSNHVDEFEDNLLIESDVIDITKYREETPPRSRCNQATTLDNQNIKKAIEVQIQKPQEGRSTACQRQQVFCDEELLSETKNTSSDSLTKFNKGNVFLLDATKEGNVGRFLNHSCCPNLLVQNVFVETHNRNFPLVAFFTNRYVKARTELTWDYGYEAGTVPEKEIFCQCGVNKCRKKIL

SEQ ID NO: 781539 - protein, 707 aa, Homo sapiens [sequence omitted]

SEQ ID NO: 781540 - protein, 647 aa, Homo sapiens
MGEKNGDAKTFWMELEDDGKVDFIFEQVQNVLQSLKQKIKDGSATNKDPMPVTQKEQENKSNAFPSTSCENSFPEDCTFLTTGNKEILSLEDKVVDFREKDSSSNLSYQSHDCSGACLMKMPLNLKGENPLQLPIKCHFQRRHAKTNSHSSALHVSYKTPCGRSLRNVEEVFRYLLETECNFLFTDNFSFNTYVQLARNYPKQKEVVSDVDISNGVESVPISFCNEIDSRKLPQFKYRKTVWPRAYNLTNFSSMFTDSCDCSEGCIDITKCACLQLTARNAKTSPLSSDKITTGYKYKRLQRQIPTGIYECSLLCKCNRQLCQNRVVQHGPQVRLQVFKTEQKGWGVRCLDDIDRGTFVCIYSGRLLSRANTEKSYGIDENGRDENTMKNIFSKKRKLEVACSDCEVEVLPLGLETHPRTAKTEKCPPKFSNNPKELTVETKYDNISRIQYHSVIRDPESKTAIFQHNGKKMEFVSSESVTPEDNDGFKPPREHLNSKTKGAQKDSSSNHVDEFEDNLLIESDVIDITKYREETPPRSRCNQATTLDNQNIKKAIEVQIQKPQEGRSTACQRQQVFCDEELLSETKNTSSDSLTKFNKGNVFLLDATKEGNVGRFLNSLTLSPVAQSQLTATSASGVQAILMPRPPE

SEQ ID NO: 781541 - protein, 73 aa, Homo sapiens
DESPSILKMLVETLKPGKQRNKGGQGIEEMRPRVERSYLNLPIVKQESVLPWEWRGWGGVSSQPFGCGQGWVM

SEQ ID NO: 781542 - protein, 62 aa, Homo sapiens
SGPLGVFHVLPRPPMPFCVLLVCTVPVAQSSDPDDLIQSHGSFCADSSQTSLFSPRTADSAL

SEQ ID NO: 781543 - protein, 122 aa, Homo sapiens
RPCPPLGLAVAPGLASNFSEQEPPVCQKELVVPSSPSLWVSQDPGRRWCAGPGGVKGDRRGGDYCHFTGHLTWAQSLGFMGEPMNLPEWFKPKGFCTCTCQWESMFFTFSKGARDPKAVWHS

SEQ ID NO: 781544 - protein, 136 aa, Homo sapiens
GTQVHLCSGMPSFLVRGRSLSGMEVRGGSIPEGTPVQVLAEVCYLTLSPGRGFTTVKLFFFSPLRYWKDFRLWKKSMVHSPQGRSGELQCSSSFKPQQQVLFGILFHGIFVSFLPLTNLLNHLFILEWTHASLSFK

SEQ ID NO: 781545 - protein, 80 aa, Homo sapiens
LRVERGAGGTGCRSTGANTALRSWEAGVGLRAGPVAATAADSHFAHKTPRCQQTGVACSPQSPWESCLESKLCYMQRAGD

SEQ ID NO: 781546 - protein, 75 aa, Homo sapiens
APAAAPSCSAGTGTWTRPLVARDARRSAPNDTAASEVGAAVRALEVFFSPGPRELLATTPSKIELSALRLVVRKF

SEQ ID NO: 781547 - protein, 97 aa, Homo sapiens
LTLEKSVSPTKMWAQLLLGMLALSPAIAEELPNYLVTLPARLNFPSVQKVCLDLSPGYSDVKFTVTLETKDKTQKLLEYSGLKKRHLHCISFLVSTD

SEQ ID NO: 781548 - protein, 139 aa, Homo sapiens
MGSQQCGRPPQNSSRAPGWTHESRRVMGISLAILASRYNDLSDSLRSKGSFKGCHPRLPGGPRRDVRRTQGHRCFLNVTVTAASAPLWKELAPLMREFLLMAFPSLLFKKLPFILTFFKFYFFEPGSCSVAHAGVQLQS

SEQ ID NO: 781549 - protein, 131 aa, Homo sapiens
MESPSVAQPGVQWRDLSSLQPLPPRFKQLSCLSLPSSWDYRREPLRLACVALETTPHHGIPGDIPADSRDGGTTNNSLFCSNTHTHTHTHTALQISREPSHWPLCVPLLPISAIYFPMCTSPGGTRTTVMI

SEQ ID NO: 781550 - protein, 122 aa, Homo sapiens
RKKIHRRVLKKNPLKNLRIMLKLNPYAKTMRRNTILRQARNHKLRVDKAAAAAAALQAKSDEKAAVAGKKPVVGKKGKKAAVGVKKQKKPLVGKKAAATKKPAPEKKPAEKKPTTEEKKPAA

SEQ ID NO: 781551 - protein, 86 aa, Homo sapiens
  misc_feature (17)..(17): Xaa can be any naturally occurring amino acid
  misc_feature (51)..(51): Xaa can be any naturally occurring amino acid
  misc_feature (68)..(69): Xaa can be any naturally occurring amino acid
  misc_feature (86)..(86): Xaa can be any naturally occurring amino acid
LKAWNDIKKVYASQRMXAGKGKMRNRRRIQRRGPCIIYNEDNGIIKAFRNXPGITLLNVSKLNILKLXXGGHVGRFCIWIVFFFSX

SEQ ID NO: 781552 - protein, 122 aa, Homo sapiens; identical to SEQ ID NO: 781550

SEQ ID NO: 781553 - protein, 104 aa, Homo sapiens
DWVFHDSRQCHSILTFQIRKSGFIFNTSQPLIIHMKSAAILRCYPLLLLQTLLTPPPTSYFAVSPFPPSLLLFPMYCSLPLSNICSHNFLPEGHQVPFSMTNQV

SEQ ID NO: 781554 - protein, 155 aa, Homo sapiens
FDLERSLSDDAERPKFTKLIWLWLKSGNHCTHFGVKKTFGWENKFKLTEILQEVYKELLNPAPSAFPGVNMLHLCSSTFFPTSPFFPELFERYLQTLCPFTFKYFRMHFLRARMLSYTITVHLFNSRDFTLIHYSYLLNSPQSIVPSYIEFFRCF

SEQ ID NO: 781555 - protein, 144 aa, Homo sapiens
GRKKPVVAQSESKASEAEKPKVQPSVCGRRPRSPCKTTGVSTRVQRLKNLESDVQGQEERREHPAREKNESRTQQASLAHLLLAALFYSLWQPLDGAHPHRGWVFFAQSTESNVSLLWQHRHRHSQKQHFTSYLGILQSNPADT

SEQ ID NO: 781556 - protein, 99 aa, Homo sapiens
VYILRVFSCKRQHRVGAHSAGFLSLMPAPPLTCGAGNPGDRQGQSVAFALRHRGPSQPMTGDSRLDRSCWEAEIRSSRYALHGAMRAYNGGIVLELGCF

SEQ ID NO: 781557 - protein, 81 aa, Homo sapiens
MKKIVENSLDAGATNVDLKLKDYGMDLIEVSGNGCGVEEENFEGLMMSPFLPATYRRRLGLDWCLITMGKSSRKPPTPTPE

SEQ ID NO: 781558 - protein, 726 aa, Homo sapiens
FSQSSAHIVHQKTQAGDKFGEHNECTDALYQKLDFTAHQRIHTEDKFYLSDEHGKCRKSFYRKAHLIQHQRPHSGEKTYQYEECAKSFCSSSHPIQHPGTYVGFKLYECNECGKAFCQNSNLSKHLRIHTKEKPCDNNGCGRSYKSPLIGHQKTDAEMELCGGSEYGKTSHLKGHQRILMGEKPYECIECGKTFSKTSHLRAHQRIHTGEKPYECVECEKTFSHKTHLSVHQRVHTGEKPYECNDCGKSFTYNSALRAHQRIHTGEKPYECSDCEKTFAHNSALRAHHRIHTGEKPYECNECGRSFAHISVLKAHQRIHTGEKPYECNECGRSFTYNSALRAHQRIHTGRKPYECSDCEKTFAHNSALKIHQRIHTGEKPYECNECEKTFAHNSALRAHQNIHTGEKLYECSECGKTFFQKTRLSTHRRIHTGEKPYECSKCGKTFSQKSYLSGHERIHTGEKPYECNVCGKTFVYKAALIVHQRIHTGEKPYECNQCGKTFSQRTHLCAHQRIHTGEKPYECNECGKTFADNSALRAHHRIHTGEKPYECNDCGKTFSKTSHLRAHLRTRSGEKPYECSECGKTFSEKSYVSAHQRVHTGEKPYECNVCGKPFAHNSTLRVHQRIHTGEKSYECNDCGKTFSQKSHLSAHQRIHTGEKPYECNECGKAFAQNSTLRVHQRIHTGEKPYECDECGKTFVRKAALRVHHTRMHTREKTLACNGFGKS

SEQ ID NO: 781559 - protein, 726 aa, Homo sapiens; identical to SEQ ID NO: 781558

SEQ ID NO: 781560 - protein, 726 aa, Homo sapiens; identical to SEQ ID NO: 781558

SEQ ID NO: 781561 - protein, 30 aa, Homo sapiens
MSVPAPEQVDSVFLHLFALSRPSVDWMVPT

SEQ ID NO: 781562 - protein, 154 aa, Homo sapiens
DTLFCKYQLPAPPESSSILYKVFAVTRDGRILAAGGKSNHLHLWCLEARQLFRIIQMPTKVRAIRHLEFLPDSFDAGSNQVLGVLSQDGIMRFINMQTCKLLFEIGSLDEGISSSAISPHGRYIASIMENGSLNIYSVQALTQEINKEEVRAQN

SEQ ID NO: 781563 - protein, 791 aa, Homo sapiens
DTLFCKYQLPAPPESSSILYKVFAVTRDGRILAAGGKSNHLHLWCLEARQLFRIIQMPTKVRAIRHLEFLPDSFDAGSNQVLGVLSQDGIMRFINMQTCKLLFEIGSLDEGISSSAISPHGRYIASIMENGSLNIYSVQALTQEINKPPPPLVKVIEDLPKNKLSSSDLKMKVTSGRVQQPAKSRESKMQTRILKQDLTGDFESKKNELPDGLNKKRLQILLKGYGEYPTKYRMFIWRSLLQLPENHTAFSTLIDKGTHVAFLNLQKKYPIKSRKLLRVLQRTLSALAHWSVIFSDTPYLPLLAFPFVKLFQNNQLICFEVIATLIINWCQHWFEYFPNPPINILSMIENVLAFHDKELLQHFIDHDITSQLYAWPLLETVFSEVLTREEWLKLFDNIFSNHPSFLLMTVVAYNICSRTPLLSCNLKDDFEETVEDMQAKVDQQRVEDEAWYQKQELLRKAEETRREMLLQEEEKMIQQRQRLAAVKRELKVKEMHLQDAARRRFLKLQQDQQEMELRRLDDEIGRKVYMRDREIAATARDLEMRQLELESQKRLYEKNLTENQEALAKEMRADADAYRRKVDLEEHMFHKLIEAGETQSQKTQKVIKENLAKAEQACLNTDWQIQSLHKQKCDDLQRNKCYQEVAKLLRENRRKEIEIINAMVEEEAKKWKEAEGKEFRLRSAKKASALSDASRKWFLKQEINAAVEHAENPCHKEEPRFQNEQDSSCLPRTSQLNDSSEMDPSTQISLNRRAVEWDTTGQNLIKKVRNLRQRLTARARHRCQTPHLLAA

SEQ ID NO: 781564 - protein, 869 aa, Homo sapiens
DTLFCKYQLPAPPESSSILYKVFAVTRDGRILAAGGKSNHLHLWCLEARQLFRIIQMPTKVRAIRHLEFLPDSFDAGSNQVLGVLSQDGIMRFINMQTCKLLFEIGSLDEGISSSAISPHGRYIASIMENGSLNIYSVQALTQEINKPPPPLVKVIEDLPKNKLSSSDLKMKVTSGRVQQPAKSRESKMQTRILKQDLTGDFESKKNELPDGLNKKRLQILLKGYGEYPTKYRMFIWRSLLQLPENHTAFSTLIDKGTHVAFLNLQKKYPIKSRKLLRVLQRTLSALAHWSVIFSDTPYLPLLAFPFVKLFQNNQLICFEVIATLIINWCQHWFEYFPNPPINILSMIENVLAFHDKELLQHFIDHDITSQLYAWPLLETVFSEVLTREEWLKLFDNIFSNHPSFLLMTVVAYNICSRTPLLSCNLKDDFEFFFHHRNNLDINVVIRQVYHLMETTPTDIHPDSMLNVFVALTKGQYPVFNQYPKFIVDYQTQERERIRNDELDYLRERQTVEDMQAKVDQQRVEDEAWYQKQELLRKAEETRREMLLQEEEKMIQQRQRLAAVKRELKVKEMHLQDAARRRFLKLQQDQQEMELRRLDDEIGRKVYMRDREIAATARDLEMRQLELESQKRLYEKNLTENQEALAKEMRADADAYRRKVDLEEHMFHKLIEAGETQSQKTQKVIKENLAKAEQACLNTDWQIQSLHKQKCDDLQRNKCYQEVAKLLRENRRKEIEIINAMVEEEAKKWKEAEGKEFRLRSAKKASALSDASRKWFLKQEINAAVEHAENPCHKEEPRFQNEQDSSCLPRTSQLNDSSEMDPSTQISLNRRAVEWDTTGQNLIKKVRNLRQRLTARARHRCQTPHLLAA

SEQ ID NO: 781565 - protein, 804 aa, Homo sapiens
DTLFCKYQLPAPPESSSILYKVFAVTRDGRILAAGGKSNHLHLWCLEARQLFRIIQMPTKVRAIRHLEFLPDSFDAGSNQVLGVLSQDGIMRFINMQTCKLLFEIGSLDEGISSSAISPHGRYIASIMENGSLNIYSVQALTQEINKPPPPLVKVIEDLPKNKLSSSDLKMKVTSGRVQQPAKSRESKMQTRILKQDLTGDFESKKNELPDGLNKKRLQILLKGYGEYPTKYRMFIWRSLLQLPENHTAFSTLIDKGTHVAFLNLQKKYPIKSRKLLRVLQRTLSALAHWSVIFSDTPYLPLLAFPFVKLFQNNQLICFEVIATLIINWCQHWFEYFPNPPINILSMIENVLAFHDKELLQHFIDHDITSQLYAWPLLETVFSEVLTREEWLKLFDNIFSNHPSFLLMTVVAYNICSRTPLLSCNLKDDFEFFFHHRNNLDINVVIRQVYHLMETTPTDIHPDSMLNVFVALTKGQYPVFNQYPKFIVDYQTQERERIRNDELDYLRERQTVEDMQAKVDQQRVEDEAWYQKQELLRKAEETRREMLLQEEEKMIQQRQRLAAVKRELKVKEMHLQDAARRRFLKLQQDQQEMELRRLDDEIGRKVYMRDREIAATARDLEMRQLELESQKRLYEKNLTENQEALAKEMRADADAYRRKVDLEEHMFHKLIEAGETQSQKTQKWKEAEGKEFRLRSAKKASALSDASRKWFLKQEINAAVEHAENPCHKEEPRFQNEQDSSCLPRTSQLNDSSEMDPSTQISLNRRAVEWDTTGQNLIKKVRNLRQRLTARARHRCQTPHLLAA

SEQ ID NO: 781566 - protein, 121 aa, Homo sapiens
HPTLTRALCTGQISHPLLPGEEGKGREGTHTGSSIPASPFSLTLAAPLLLVGGEGSPMSPRACGEAPPENQSLSLLLVFWSFHISLHPHSKHSLDHTVDWVQGLPWLPFVTGLAMGRKSNM

SEQ ID NO: 781567 - protein, 127 aa, Homo sapiens
MSIPSPTPQRPFLLMDPVSIYSLSVMCSILIILPQRPFLPMAPLSIYGVSSVCSVYSHLLPRIVFLTVDPVSTYAGPVVLGSTFFFLTPRRACSNHKASPKVLSCDKSRAEFIMITPFPLPSVPLGF

SEQ ID NO: 781568 - protein, 51 aa, Homo sapiens
VSSPSIQPQDALRSSVRLPRLGSSSVSRAALCPGEVGKVRRVTTVSRELCQ

SEQ ID NO: 781569 - protein, 142 aa, Homo sapiens
IFVPCRTLTVEQVTSSRTDGESPEAEALVNEIRNNQLQILKRRAKNQWPKLTASYPHFILLSFSPGHHVCRQRHPLGCHLEYHCSMAGCGHRMSDTDVPETNGHVFCSFPACGHWIGPPGSSTQPAWIPFRCKETSGGSLGT

SEQ ID NO: 781570 - protein, 118 aa, Homo sapiens
MRQLRWWLRSQCHQMAREQVESHRQGSPAAGRRRPPVTSTVSFVGGSHSMAGLSKPEHFPPSRACRGSIPSIGPAMDPSIPHCSYRTRISAATAVLVKNHLRPGAVAQIRNPSILGGR

SEQ ID NO: 781571 - protein, 87 aa, Homo sapiens
VLDVGRLTRFMLWSLTWLNVCPVLRDICLRMHWNLQIEEESLWETTILQHDMLTFRDIDMLHQAVYTVPLSFSSHPCLVEGIGNIIP

SEQ ID NO: 781572 - protein, 100 aa, Homo sapiens
LSCPHYPRKIQSSFQSILINPLDPKFREVPLPSSLLPGPTEEHPTTLHQLLKTHKGKIPTGPCQEVVELPSGSIKSYQKAECRNDIKRGSICRERVQDAK

SEQ ID NO: 781573 - protein, 177 aa, Homo sapiens
AVLEVPSGMQVSSREGVGELSVTDPGGGPEGLPGGVGESQALHGGVAVSSRGTPLELVNGDGVDSEIRCLDDPPAQIREEEDEMGAAVASGTAKGARRRRQNNSAKQSWLLRLFESKLFDISMAISYLYNSKEPGVQAYIGNRLFCFRNEDVDFYLPQLLNMYIHMDEDVGDAIKPY

SEQ ID NO: 781574 - protein, 49 aa, Homo sapiens
GGEVREVLFLALQGLYPFLSTGLLWPSPGAARGVEQGGCQWSHRQGKCG

SEQ ID NO: 781575 - protein, 147 aa, Homo sapiens
FSRSRTQVPHHHAPLTQASEGPGTPHHSPTAGELREAESLDSRERGPDLWISPASRSQCGSLWRQKLRLNPQATLNTEIQLRKKGADQGGMERPRHIMKTKKRKKDDAGAGAKGRGRGKEGKPGAETWQGSVSPTTTGWGWGAHQDF

SEQ ID NO: 781576 - protein, 147 aa, Homo sapiens; identical to SEQ ID NO: 781575

SEQ ID NO: 781577 - protein, 92 aa, Homo sapiens
LLVNFCLLFVYCVHRGRILPLLLEAASVLCCGGQEAGASRRQIHVCKRRRSVSLGVQRCLQVRLPTPPLCELGGGSAGTGGVHGEGFCVMKR

SEQ ID NO: 781578 - protein, 249 aa, Homo sapiens
MCCVSMNRFIPKEVADIFNAPSDDEEFVGFRDDVPMETLSSEESCDSFDSLESGKQQDVRFHSKYFTEELRRIFIEDTDSETEDLQDLLQSDLNGKTNPEVMVVESDLSDDGKASLVSEEEEDEEEDKATPEEAGLEEVVLVFEEPFSSPTKKLANKPDKNSSSEQCVLAHAYRMGKKHSGRTERLGPVIPRGESNSESRDEPRDENRRVRRLAKGPDLTEQGRLPDGGENEQFRRPTVEKRGAGKKRE

SEQ ID NO: 781579 - protein, 44 aa, Homo sapiens
MFGTFLASLLCPSESLGIELENSGHTRGLILAILRNLSLGQRLD

SEQ ID NO: 781580 - protein, 33 aa, Homo sapiens
MDGRAKGGGKAVKKEEEMNDDNAMKRISQRREK

SEQ ID NO: 781581 - protein, 63 aa, Homo sapiens
PWLGDGQPPCLLASPRLPRALQQGEGPRLGVSWAGPPDAQGLEVLASMQLARSSFLPGKAAQR

SEQ ID NO: 781582 - protein, 104 aa, Homo sapiens
PPTQGTPDLQQPLLTHTPIPWRVSRLFPATPTKHHSLCIRMGPVLRLTPASLTSLLQWPTNFSFSFSFLRWSLAVSPRLHLRRKKIHTRTHTHTHLESQRVRAY

SEQ ID NO: 781583 - protein, 32 aa, Homo sapiens
MVVSAGPWSSEKAEMNILEINEKLRPQLAENK

SEQ ID NO: 781584 - protein, 102 aa, Homo sapiens
WREGGGGRVGQRPRSACDTLRGCKAPERPSELGTSHRVPGRAGEGGPPKRQDPLSERRKEREEEGGKEGRMMRLEKETAPGPSREGLPHKVRGVPSGHRHHT

SEQ ID NO: 781585 - protein, 46 aa, Homo sapiens
MCSEMRDLHPRPCWRSAPCGEVELSVPEGCGQGCISLVAEVSGLHA

SEQ ID NO: 781586 - protein, 196 aa, Homo sapiens
MGNGKSIAGDQKAVPTQETHVWYRTFMMEYPSGLQTLHEFKTLLGLQGLNQKANKHIDQVYNTFDTNKDGFVDFLEFIAAVNLIMQEKMEQKLKWYFKLYDADGNGSIDKNELLDMFMAVQALNGQQTLSPEEFINLVFHKIDINNDGNGATLYWITFPTKGIDFRRIYQWHGKRSGSPGDCLQELRLLQCAESNL

SEQ ID NO: 781587 - protein, 161 aa, Homo sapiens
MGNGKSIAGDQKAVPTQETHVWYRTFMMEYPSGLQTLHEFKTLLGLQGLNQKANKHIDQVYNTFDTNKDGFVDFLEFIAAVNLIMQEKMEQKLKWYFKLYDADGNGSIDKNELLDMFMAVQALNGQQTLSPEEFINLVFHKIDINNDGNGATLYWITFPTK

SEQ ID NO: 781588 - protein, 209 aa, Homo sapiens
MGNGKSIAGDQKAVPTQETHVWYRTFMMEYPSGLQTLHEFKTLLGLQGLNQKANKHIDQVYNTFDTNKDGFVDFLEFIAAVNLIMQEKMEQKLKWYFKLYDADGNGSIDKNELLDMFMAVQALNGQQTLSPEEFINLVFHKIDINNDGELTLEEFINGMAKDQDLLEIVYKSFDFSNVLRVICNGKQPDMETDSSKSPDKAGLGKVKMK

SEQ ID NO: 781589 - protein, 158 aa, Homo sapiens [sequence omitted]

SEQ ID NO: 781590 - protein, 263 aa, Homo sapiens
ERRKGGRRKKLFQKSIGCLEECGRPLGKVHIWEKQAAPRSHSRSSARPRARPAAPAAAPGPLAAATMDAIKKKMQMLKLDKENALDRAEQAEADKKAAEDRSKQLEDELVSLQKKLKGTEDELDKYSEALKDAQEKLELAEKKATDAEADVASLNRRIQLVEEELDRAQERLATALQKLEEAEKAADESERGMKVIESRAQKDEEKMEIQEIQLKEAKHIAEDADRKYEEVARKLVIIESDLERAEERAELSEGQCADSWKNN

SEQ ID NO: 781591 - protein, 154 aa, Homo sapiens
MAILVDRLHRRDELDKYSEALKDAQEKLELAEKKATDAEADVASLNRRIQLVEEELDRAQERLATALQKLEEAEKAADESERGMKVIESRAQKDEEKMEIQEIQLKEAKHIAEDADRKYEEVARKLVIIESDLERAEERAELSEGQCADSWKNN

SEQ ID NO: 781592 - protein, 82 aa, Homo sapiens
STTTKFAAASTYSQKEDRYEEEIKVLSDKLKEAETRAEFAERSVTKLEKSIDDLEDELYAQKLKYKAISEELDHALNDMTSI

SEQ ID NO: 781593 - protein, 227 aa, Homo sapiens
  misc_feature (1)..(1): Xaa can be any naturally occurring amino acid
XAVRPGIMGSRPRARPAAPAAAPGPLAAATMDAIKKKMQMLKLDKENALDRAEQAEADKKAAEDRSKQLEDELVSLQKKLKGTEDELDKYSEALKDAQEKLELAEKKATDAEADVASLNRRIQLVEEELDRAQERLATALQKLEEAEKAADESERGMKVIESRAQKDEEKMEIQEIQLKEAKHIAEDADRKYEEVARKLVIIESDLERAEERAELSEGQCADSWKNN

SEQ ID NO: 781594 - protein, 290 aa, Homo sapiens
ESPAVFVPQEVSGTPFPVIVIFIQTSGGSIRFLTDIREASFKRENRIDKQGFMSGSLSLCVTEGISNSLLTTARPRARPAAPAAAPGPLAAATMDAIKKKMQMLKLDKENALDRAEQAEADKKAAEDRSKQLEDELVSLQKKLKGTEDELDKYSEALKDAQEKLELAEKKATDAEADVASLNRRIQLVEEELDRAQERLATALQKLEEAEKAADESERGMKVIESRAQKDEEKMEIQEIQLKEAKHIAEDADRKYEEVARKLVIIESDLERAEERAELSEGQCADSWKNN

SEQ ID NO: 781595 - protein, 227 aa, Homo sapiens
  misc_feature (1)..(1): Xaa can be any naturally occurring amino acid
XAVRPGIMGSRPRARPAAPAAAPGPLAAATMDAIKKKMQMLKLDKENALDRAEQAEADKKAAEDRSKQLEDELVSLQKKLKGTEDELDKYSEALKDAQEKLELAEKKATDAEADVASLNRRIQLVEEELDRAQERLATALQKLEEAEKAADESERGMKVIESRAQKDEEKMEIQEIQLKEAKHIAEDADRKYEEVARKLVIIESDLERAEERAELSEGKCADSLKKN

SEQ ID NO: 781596 - protein, 290 aa, Homo sapiens; identical to SEQ ID NO: 781594

SEQ ID NO: 781597 - protein, 290 aa, Homo sapiens; identical to SEQ ID NO: 781594

SEQ ID NO: 781598 - protein, 290 aa, Homo sapiens; identical to SEQ ID NO: 781594

SEQ ID NO: 781599 - protein, 258 aa, Homo sapiens
  misc_feature (1)..(1): Xaa can be any naturally occurring amino acid
XAVRPGIMGSRPRARPAAPAAAPGPLAAATMDAIKKKMQMLKLDKENALDRAEQAEADKKAAEDRSKQLEDELVSLQKKLKGTEDELDKYSEALKDAQEKLELAEKKATDAEADVASLNRRIQLVEEELDRAQERLATALQKLEEAEKAADESERGMKVIESRAQKDEEKMEIQEIQLKEAKHIAEDADRKYEEVARKLVIIESDLERAEERAELSEGVSGPGARRPRMGCCRAVTKQHDLLAAAHYLFQLRAPFVLI

SEQ ID NO: 781600 - protein, 397 aa, Homo sapiens
ESPAVFVPQEVSGTPFPVIVIFIQTSGGSIRFLTDIREASFKRENRIDKQGFMSGSLSLCVTEGISNSLLTTARPRARPAAPAAAPGPLAAATMDAIKKKMQMLKLDKENALDRAEQAEADKKAAEDRSKQLEEDIAAKEKLLRVSEDERDRVLEELHKAEDSLLAAEEAAAKVPGARGTAWRTNGYLFLFLSLPPCLSLCLSRCPCPSGSVHPHPSPSGSRCLLHPPPSLYPLANSQLEDELVSLQKKLKGTEDELDKYSEALKDAQEKLELAEKKATDAEADVASLNRRIQLVEEELDRAQERLATALQKLEEAEKAADESERGMKVIESRAQKDEEKMEIQEIQLKEAKHIAEDADRKYEEVARKLVIIESDLERAEERAELSEGKCADSLKKN

SEQ ID NO: 781601 - protein, 227 aa, Homo sapiens; identical to SEQ ID NO: 781595
  misc_feature (1)..(1): Xaa can be any naturally occurring amino acid

SEQ ID NO: 781602 - protein, 290 aa, Homo sapiens; identical to SEQ ID NO: 781594

SEQ ID NO: 781603 - protein, 290 aa, Homo sapiens; identical to SEQ ID NO: 781594

SEQ ID NO: 781604 - protein, 290 aa, Homo sapiens; identical to SEQ ID NO: 781594

SEQ ID NO: 781605 - protein, 227 aa, Homo sapiens; identical to SEQ ID NO: 781595
  misc_feature (1)..(1): Xaa can be any naturally occurring amino acid

SEQ ID NO: 781606 - protein, 186 aa, Homo sapiens
ESPAVFVPQEVSGTPFPVIVIFIQTSGGSIRFLTDIREASFKRENRIDKQGFMSGSLSLCVTEGISNSLLTTARPRARPAAPAAAPGPLAAATMDAIKKKMQMLKLDKENALDRAEQAEADKKAAEDRSKQLEEDIAAKEKLLRVSEDERDRVLEELHKAEDSLLAAEEAAAKVPGARGTAWRTNG

SEQ ID NO: 781607 - protein, 227 aa, Homo sapiens; identical to SEQ ID NO: 781595
  misc_feature (1)..(1): Xaa can be any naturally occurring amino acid

SEQ ID NO: 781608 - protein, 227 aa, Homo sapiens; identical to SEQ ID NO: 781595
  misc_feature (1)..(1): Xaa can be any naturally occurring amino acid

SEQ ID NO: 781609 - protein, 290 aa, Homo sapiens; identical to SEQ ID NO: 781594

SEQ ID NO: 781610 - protein, 227 aa, Homo sapiens; identical to SEQ ID NO: 781595
  misc_feature (1)..(1): Xaa can be any naturally occurring amino acid

SEQ ID NO: 781611 - protein, 227 aa, Homo sapiens; identical to SEQ ID NO: 781595
  misc_feature (1)..(1): Xaa can be any naturally occurring amino acid

SEQ ID NO: 781612 - protein, 290 aa, Homo sapiens; identical to SEQ ID NO: 781594

SEQ ID NO: 781613 - protein, 226 aa, Homo sapiens
  misc_feature (1)..(1): Xaa can be any naturally occurring amino acid
XAVRPGIMGSRPRARPAAPAAAPGPLAAATMDAIKKKMQMLKLDKENALDRAEQAEADKKAAEDRSKQLEDELVSLQKKLKGTEDELDKYSEALKDAQEKLELAEKKATDAEADVASLNRRIQLVEEELDRAQERLATALQKLEEAEKAADESERGMKVIESRAQKDEEKMEIQEIQLKEAKHIAEDADRKYEEVARKLVIIESDLERAEERAELSEGKSSQLEED

SEQ ID NO: 781614 - protein, 277 aa, Homo sapiens
ESPAVFVPQEVSGTPFPVIVIFIQTSGGSIRFLTDIREASFKRENRIDKQGFMSGSLSLCVTEGISNSLLTTARPRARPAAPAAAPGPLAAATMDAIKKKMQMLKLDKENALDRAEQAEADKKAAEDRSKQLEDELVSLQKKLKGTEDELDKYSEALKDAQEKLELAEKKATDAEADVASLNRRIQLVEEELDRAQERLATALQKLEEAEKAADESERGMKVIESRAQKDEEKMEIQEIQLKEAKHIAEDQMCRQLEEELKNNCDQNNLKVTGWLQS

SEQ ID NO: 781615 - protein, 238 aa, Homo sapiens
ESPAVFVPQEVSGTPFPVIVIFIQTSGGSIRFLTDIREASFKRENRIDKQGFMSGSLSLCVTEGISNSLLTTARPRARPAAPAAAPGPLAAATMDAIKKKMQMLKLDKENALDRAEQAEADKKAAEDRSKQLEDELVSLQKKLKGTEDELDKYSEALKDAQEKLELAEKKATDAEADVASLNRRIQLVEEELDRAQERLATALQKLEEAEKAADESERGMKVIESRAQKDLCICLFSS

SEQ ID NO: 781616 - protein, 218 aa, Homo sapiens
ESPAVFVPQEVSGTPFPVIVIFIQTSGGSIRFLTDIREASFKRENRIDKQGFMSGSLSLCVTEGISNSLLTTARPRARPAAPAAAPGPLAAATMDAIKKKMQMLKLDKENALDRAEQAEADKKAAEDRSKQLEDELVSLQKKLKGTEDELDKYSEALKDAQEKLELAEKKATDAEADVASLNRRIQLVEEELDRAQERLATALQKLEEAEKAADESER

SEQ ID NO: 781617 - protein, 189 aa, Homo sapiens
ESPAVFVPQEVSGTPFPVIVIFIQTSGGSIRFLTDIREASFKRENRIDKQGFMSGSLSLCVTEGISNSLLTTARPRARPAAPAAAPGPLAAATMDAIKKKMQMLKLDKENALDRAEQAEADKKAAEDRSKQVCASPALRPRPERRDSSLAPPAGSPPRGLGEPPPYPHHHPGRPGRASGKKEGKRKSQA

SEQ ID NO: 781618 - protein, 66 aa, Homo sapiens
FLQGVEEQLGSSNSENPGVRAGQVQHPLLEKPNDALYKSRMHTSPKTPSSSWMSHLSELCICLFSS

SEQ ID NO: 781619 - protein, 263 aa, Homo sapiens
ERRKGGRRKKLFQKSIGCLEECGRPLGKVHIWEKQAAPRSHSRSSARPRARPAAPAAAPGPLAAATMDAIKKKMQMLKLDKENALDRAEQAEADKKAAEDRSKQLEEDIAAKEKLLRVSEDERDRVLEELHKAEDSLLAAEEAAAKAEADVASLNRRIQLVEEELDRAQERLATALQKLEEAEKAADESERGMKVIESRAQKDEEKMEIQEIQLKEAKHIAEDADRKYEEVARKLVIIESDLERAEERAELSEGKCADSLKKN

SEQ ID NO: 781620 - protein, 116 aa, Homo sapiens
MLFTLYLAEADVASLNRRIQLVEEELDRAQERLATALQKLEEAEKAADESERGMKVIESRAQKDEEKMEIQEIQLKEAKHIAEDADRKYEEVRSWGPKPCGHPAVAFRKPGSNVQS

SEQ ID NO: 781621 - protein, 138 aa, Homo sapiens
MTNTKGKRRGTRYMFSRPFRKHGVVPLATYMRIYKKGDIVDIKGMGTVQKGMPHKCYHGKTGRVYNVTQHAVGIVVNKQVKGKILAKRINVRIEHIKHSKSRDSFLKRVKENDRKRKKPKRKVPELSEGKCADSLKKN

SEQ ID NO: 781622 - protein, 290 aa, Homo sapiens; identical to SEQ ID NO: 781594

SEQ ID NO: 781623 - protein, 397 aa, Homo sapiens
ESPAVFVPQEVSGTPFPVIVIFIQTSGGSIRFLTDIREASFKRENRIDKQGFMSGSLSLCVTEGISNSLLTTARPRARPAAPAAAPGPLAAATMDAIKKKMQMLKLDKENALDRAEQAEADKKAAEDRSKQLEEDIAAKEKLLRVSEDERDRVLEELHKAEDSLLAAEEAAAKVPGARGTAWRTNGYLFLFLSLPPCLSLCLSRCPCPSGSVHPHPSPSGSRCLLHPPPSLYPLANSQLEDELVSLQKKLKGTEDELDKYSEALKDAQEKLELAEKKATDAEADVASLNRRIQLVEEELDRAQERLATALQKLEEAEKAADESERGMKVIESRAQKDEEKMEIQEIQLKEAKHIAEDADRKYEEVARKLVIIESDLERAEERAELSEGQCADSWKNN

SEQ ID NO: 781624 - protein, 290 aa, Homo sapiens
ESPAVFVPQEVSGTPFPVIVIFIQTSGGSIRFLTDIREASFKRENRIDKQGFMSGSLSLCVTEGISNSLLTTARPRARPAAPAAAPGPLAAATMDAIKKKMQMLKLDKENALDRAEQAEADKKAAEDRSKQLEEDIAAKEKLLRVSEDERDRVLEELHKAEDSLLAAEEAAAKAEADVASLNRRIQLVEEELDRAQERLATALQKLEEAEKAADESERGMKVIESRAQKDEEKMEIQEIQLKEAKHIAEDADRKYEEVARKLVIIESDLERAEERAELSEGQCADSWKNN

SEQ ID NO: 781625 - protein, 227 aa, Homo sapiens; identical to SEQ ID NO: 781595
  misc_feature (1)..(1): Xaa can be any naturally occurring amino acid

SEQ ID NO: 781626 - protein, 290 aa, Homo sapiens; identical to SEQ ID NO: 781594

SEQ ID NO: 781627 - protein, 290 aa, Homo sapiens; identical to SEQ ID NO: 781594

SEQ ID NO: 781628 - protein, 290 aa, Homo sapiens; identical to SEQ ID NO: 781594

SEQ ID NO: 781629 - protein, 290 aa, Homo sapiens; identical to SEQ ID NO: 781594

SEQ ID NO: 781630 - protein, 290 aa, Homo sapiens
ESPAVFVPQEVSGTPFPVIVIFIQTSGGSIRFLTDIREASFKRENRIDKQGFMSGSLSLCVTEGISNSLLTTARPRARPAAPAAAPGPLAAATMDAIKKKMQMLKLDKENALDRAEQAEADKKAAEDRSKQLEEDIAAKEKLLRVSEDERDRVLEELHKAEDSLLAAEEAAAKAEADVASLNRRIQLVEEELDRAQERLATALQKLEEAEKAADESERGMKVIESRAQKDEEKMEIQEIQLKEAKHIAEDADRKYEEVARKLVIIESDLERAEERAELSEGKCADSLKKN

SEQ ID NO: 781631 - protein, 277 aa, Homo sapiens; identical to SEQ ID NO: 781614

SEQ ID NO: 781632 - protein, 290 aa, Homo sapiens; identical to SEQ ID NO: 781594

SEQ ID NO: 781633 - protein, 227 aa, Homo sapiens; identical to SEQ ID NO: 781595
  misc_feature (1)..(1): Xaa can be any naturally occurring amino acid

SEQ ID NO: 781634 - protein, 290 aa, Homo sapiens; identical to SEQ ID NO: 781594

SEQ ID NO: 781635 - protein, 290 aa, Homo sapiens; identical to SEQ ID NO: 781594

SEQ ID NO: 781636 - protein, 227 aa, Homo sapiens; identical to SEQ ID NO: 781595
  misc_feature (1)..(1): Xaa can be any naturally occurring amino acid

SEQ ID NO: 781637 - protein, 227 aa, Homo sapiens; identical to SEQ ID NO: 781595
  misc_feature (1)..(1): Xaa can be any naturally occurring amino acid

SEQ ID NO: 781638 - protein, 290 aa, Homo sapiens; identical to SEQ ID NO: 781594

SEQ ID NO: 781639 - protein, 227 aa, Homo sapiens; identical to SEQ ID NO: 781595
  misc_feature (1)..(1): Xaa can be any naturally occurring amino acid

SEQ ID NO: 781640 - protein, 290 aa, Homo sapiens; identical to SEQ ID NO: 781594

SEQ ID NO: 781641 - protein, 290 aa, Homo sapiens; identical to SEQ ID NO: 781594

SEQ ID NO: 781642 - protein, 265 aa, Homo sapiens
  misc_feature (1)..(1): Xaa can be any naturally occurring amino acid
XAVRPGIMGSRPRARPAAPAAAPGPLAAATMDAIKKKMQMLKLDKENALDRAEQAEADKKAAEDRSKQLEDELVSLQKKLKGTEDELDKYSEALKDAQEKLELAEKKATDAEADVASLNRRIQLVEEELDRAQERLATALQKLEEAEKAADESERGMKVIESRAQKDEEKMEIQEIQLKEAKHIAEDADRKYEEVARKLVIIESDLERAEERAELSEGGKCAETSGTALLEELHKAEDSLLAAEEAAAKLKRRASLQSIQLVEES

SEQ ID NO: 781643 - protein, 242 aa, Homo sapiens
ESPAVFVPQEVSGTPFPVIVIFIQTSGGSIRFLTDIREASFKRENRIDKQGFMSGSLSLCVTEGISNSLLTTARPRARPAAPAAAPGPLAAATMDAIKKKMQMLKLDKENALDRAEQAEADKKAAEDRSKQLEDELVSLQKKLKGTEDELDKYSEALKDAQEKLELAEKKATDAEADVASLNRRIQLVEEELDRAQERLATALQKLEEAEKAADESERGMKVIESRAQKDCAELERLNCTTP

SEQ ID NO: 781644 - protein, 186 aa, Homo sapiens; identical to SEQ ID NO: 781606

SEQ ID NO: 781645 - protein, 118 aa, Homo sapiens [sequence omitted]

SEQ ID NO: 781646 - protein, 54 aa, Homo sapiens
IVPLCDEVENIGHNSILMLEGDRCEFSSHPCDASGTSVGEEHLPSSREPESLSL

SEQ ID NO: 781647 - protein, 43 aa, Homo sapiens
CRLQPHKAEDEEEGWSGASWGRPCMPGYWLLERYPESLGMEWN

SEQ ID NO: 781648 - protein, 70 aa, Homo sapiens
GPAVEARWGRFGRQKQEGRRKLGAHEPLCAGARPTSSKQKGWAPSVVPWALGKARGNTSSSPAFITNAKH

SEQ ID NO: 781649 - protein, 94 aa, Homo sapiens
LNLLPQVAQATSELCQVSIKTQQQIKKAIINAAASQAPRKVSRVRVVSSLQSSVVETFNKVLSSVNPVHLHPKPQSSCQCRDHITDALVQVLGV

SEQ ID NO: 781650 - protein, 56 aa, Homo sapiens
AAAYYYYYCSEFKLLTMYGDHATALHLGDRETPSKKKERGKKERTNERKKRKNPYL

SEQ ID NO: 781651 - protein, 91 aa, Homo sapiens
QDGAGGHWGEHEQKLPKDHRRLQLLVFISRPRVPITGSCPLKHSKHIARHTPACSPGVLPPVPGGPLLTSQPSLVSGTPCPDPGPVPLCVT

SEQ ID NO: 781652 - protein, 74 aa, Homo sapiens
LGPIADEVTGGTKKMPTPTATRDPHQHLGCRGSMALCRRCPSLARSLHPSLDSLTPRGFPARCEEGEEATPQPG

SEQ ID NO: 781653 - protein, 113 aa, Homo sapiens
SRHTCPLFNGLGMLRDLFLQFSIPHPRLFILSSGAWHLCSGPTPLLFYSLFSAFSTPILTLTLLYPHSAHFCLWQSPRPIVSWASYPAPAPASGPLSSSSLEAVSSEKSSLTP

SEQ ID NO: 781654 - protein, 92 aa, Homo sapiens
QPNPSGIFYLIQKYVFLNVRNTAQHELTGKVGLVLPAGIFWALLDGCTILLGLIPHTAHPPEHLHTLDFLCCLSMSVVCRENVPFSQGPDSS

SEQ ID NO: 781655 - protein, 41 aa, Homo sapiens
MALEEFCQMGQGKLPPLHNLAGLLKQLEAVLSLSLQEVEVL

SEQ ID NO: 781656 - protein, 213 aa, Homo sapiens
SSLKPFSFLEKEEQLKEAARQRDLAATAEAKISKQKATRRIPKSILEPALGDKLQEAELFRKIRIQMRALDMLQMASSPIASSSNRANPQPRTATRTQQEKLGFLHTNFRFQPRVNPVVPDYEGLYKAFQRRAAKRRETQEATRNKPFLLRTANLRHPQRPCDAATTGRRQDSPQPPATPLPRSRSLSGLASLSANTLPVHITDATRKRESAV

SEQ ID NO: 781657 - protein, 39 aa, Homo sapiens
MEPKALPREKEELGSAHFSRVLKMSCKKVTQPGWRYRPN

SEQ ID NO: 781658 - protein, 85 aa, Homo sapiens
REGYAASSSLMTMSGTLEHHLLPGRVKGMWNHSLTPACFSSEVARISSTRISLAKADYTAGPNPKWKKCSPSLFPEEETGTDGQG

SEQ ID NO: 781659 - protein, 114 aa, Homo sapiens
MGVWSELEVWPKSVGAWPGRLVLDKPLDGSATNMFPALEPSFSSVSGLVCPLPSSISFFPSMCSALICILGTLPHVNSNCTPPFLTAPPSGHLAHLHPHCPLNSEQLQPQRTSA

SEQ ID NO: 781660 - protein, 107 aa, Homo sapiens
KRHLPAVEECSIRLKNRFWEIPGCKEAQKLPWGAQMSSKRVGHRLSLKGVSRTGEVHGAGIPNRTQDLSRGLPETGEHTRLAGASFGYGESLVRRADQGWIMGGTEW

SEQ ID NO: 781661 - protein, 38 aa, Homo sapiens
RLSLPAAASGDPVKGKTYSKYELELWGTGGSTLPFPVL

SEQ ID NO: 781662 - protein, 102 aa, Homo sapiens
VNVLTVATPKLDVTPHRENIVIDVSANDSDTLLHLEMMVKTTSYHYIPVTLTHASKYLDKTGDGEVSFEEFQVLVKKISQCRRKQNRTLSTGGRAPVLCSYH

SEQ ID NO: 781663 - protein, 145 aa, Homo sapiens [sequence omitted]

SEQ ID NO: 781664 - protein, 69 aa, Homo sapiens
MIQAEEREVQASIHGICPISSEKTKRGQIQRVGGLAMQDTGKARLKDPGHREIKGPKQAAASPQTKDSP

SEQ ID NO: 781665 - protein, 102 aa, Homo sapiens
PDGTEKGGHCRRREARGPRCGAKPVVGLALGLGARAAGGGQESLLTTVQAETFQQQGPAGKHEEVRGVAPGLKTEKRLGAVAHACDLSTLGGRGRRVMRSGD

SEQ ID NO: 781666 - protein, 475 aa, Homo sapiens
MEFVTALADLRAEASCPICLDYLKDPVTISCGHNFCLSCIIMSWKDLHDSFPCPFCHFCCPERKFISNPQLGSLTEIAKQLQIRSKKRKRQEEKHVCKKHNQVLTFFCQKDLELLCPRCSLSTDHQHHCVWPIKKAASYHRKKLEEYNAPWKERVELIEKVITMQTRKSLELKKKVKHRAEEVKSEFEQLRLFLQNEQETVLRQLQDEEMDILAQLNESLTKFSDYTSSLKYLLKEIESIYVKSELELLANVKDIYHRYKNLKFPELFLFKLKKYGYHLPPQYSGLDKIIKRFQVDVILDPETAHRKLIVSEDRKTVRYGNTTQNVPHNPRRFYLLPAVLGSKGYSCGRQYWEVEVKDKPEWILGVCNDCLPRRRKSQPILVQDGLWGIWRSSQNNYIVLGHKEIILLPQVIPSKIGIFLDYEMNEVSFYNLNDRSLLYTFNDNFTGALWPYFYTGTDSKPLKISTVTDSEFSFT

SEQ ID NO: 781667 - protein, 430 aa, Homo sapiens [sequence omitted]

SEQ ID NO: 781668 - protein, 430 aa, Homo sapiens [sequence omitted]

SEQ ID NO: 781669 - protein, 39 aa, Homo sapiens
LAAGSLQHGASLQPRLRLGSRQCLGGHGALGVWPRKVGP

SEQ ID NO: 781670 - protein, 115 aa, Homo sapiens
SFLCHMWTKKGESPFPLLRPDSCNSEHSSGSNTPLVKRLSQSSCPRKPNGNRLCSRPGLFHSHSRACQRDRHKKAGPDQLKRSGPGLNMDDSITRNRSLLRVYQLGYLPHGFSKP

SEQ ID NO: 781671 - protein, 35 aa, Homo sapiens
QLKNFLTQPGMVAHTCNPNTSERSRRADLLSSGIQ

SEQ ID NO: 781672 - protein, 73 aa, Homo sapiens
LARIDLNEALTQPVYDQIDPVFGSIFRTGKPTGSALMPHIDAFKQSQENRLNPGGIGCSEPRSRHCTPAWTTE

SEQ ID NO: 781673 - protein, 199 aa, Homo sapiens
AGGETCAAEGEAEPAPAAQRSRSRRRHLGWEPTRLPHPALGTMGLGARGAWAALLLGTLQVLALLGAAHESAAMAASANIENSGLPHNSSANSTETLQHVPSDHTNETSNSTVKPPTSVASDSSNTTVTTMKPTAASNTTTPGMVSTNMTSTTLKSTTQNNKCFTEHISDINIHNDRNPQIVQVTSAASSVTITTNYAF

SEQ ID NO: 781674 - protein, 190 aa, Homo sapiens
AWRRPRCNFLRSSRIRVHPTPAASTMPPKFDPNEIKVVYLRCTGGEVGATSALAPKIGPLGLSPKKVGDDIAKATGDWKGLRITVKLTIQNRQAQIEVVPSASALIIKALKEPPRDRKKQKNIKHSGNITFDEIVNIARQMRHRSLARELSGTIKEILGTAQSVGCNVDGRHPHDIIDDINSGAVECPAS

SEQ ID NO: 781675 - protein, 125 aa, Homo sapiens
SGMSVKGVNELGMNEGCCFWPALSQRLTLAAALSPPAWQDHPGCSASHRGLTSQIRRLRPIMGSCPPSRDLLEAGVQASRASHQPASPATWKEASNDTIEQQQQNSSSTLTFIVHFHINCRMQAQ

SEQ ID NO: 781676 - protein, 79 aa, Homo sapiens
TSPRVVLLAKWTSDKVLFRDFFDCVSKANISPARQPSAHTEHLTASTTSIPSVVCWARTAWVTAAPFYFYRVSNQPTVD

SEQ ID NO: 781677 - protein, 102 aa, Homo sapiens
PPDGVLTLPPVDGLPGRPPCPPGAESGPQTKFCSEISLIVSPRRISVQLDSHQPTQSISQPPPPPSLLWSAGQGQPGSQPPHSISTEFQTSQPWTSSQPWTS

SEQ ID NO: 781678 - protein, 61 aa, Homo sapiens
GFPRPGRSVGQTTQQLVKSKGASRARWLTPVIPALWEAEAGRSRGQEIETILANRVKPRLY

SEQ ID NO: 781679 - protein, 59 aa, Homo sapiens
EVRTASVILWPVRAAGAPCRADRAEDRTCRFLITGQKRGPEQRVTSPEPTRTHRQKLLG

SEQ ID NO: 781680 - protein, 93 aa, Homo sapiens
VQSQVTVASNSWAQPVLLPQPLEWLGLMHHYAWLIVWGARGVEMGSHCIDYTGLELASSHHAIWLRPLNVLALQVGAIVPSPLSVFIKEQKLD

SEQ ID NO: 781681 - protein, 45 aa, Homo sapiens
AAAYYYYCSNSSFYDVRGHAVILKKCYYRSSTNTLGKFRKYSLEK

SEQ ID NO: 781682 - protein, 103 aa, Homo sapiens
CGFWCVVNSSTEAGCNKPILISKFGRSLKFFPHAPLIRPPGQVHGTEGLYGLVQACFFVVVVEKREFCHVGQAGLELLAYLKWTARLGLPKCWDYRYEPLCLA

SEQ ID NO: 781683 - protein, 43 aa, Homo sapiens
GELVLACCHFHCIKDHFGDSEPCQLIDMDTVNSSGMEPENVGH

SEQ ID NO: 781684 - protein, 50 aa, Homo sapiens
PAEKAAKGGRDGGGPECRPRFNPGASPPRKVLGRKGELIVPLKHSVDPRG

SEQ ID NO: 781685 - protein, 106 aa, Homo sapiens
SCTPGLKTSLGRESFGPPTKQHWHYASHPRPWLHVVKQPLLVIHSQLSSFPQMALWGAGACLFLRLKTISFPRVSPLMLFSFDQACLNSREVRRNTPILGLKGLMF

SEQ ID NO: 781686 - protein, 122 aa, Homo sapiens
AVLEDTFPFNPARRARNNGFTRTCSQAEQHSTHEEVVYLQISEERCREKHTAPEDQCAWRPLGHTARCQELQLTSTMACLLAGQPYKILLLFTHNNNNCSENKTQNRQNHWNTKTRLLQVLF

SEQ ID NO: 781687 - protein, 118 aa, Homo sapiens [sequence omitted]

SEQ ID NO: 781688 - protein, 105 aa, Homo sapiens
SPTPDLVVRLGFPKCWDYRRESPSPAFSISLIAYLLMMNSLSFDLNTSSFLKTIFTRLELSGFSSTSALKNAHMLSSSFHSPTQKSAVSLFLALLKDIKSFFLSV

SEQ ID NO: 781689 - protein, 82 aa, Homo sapiens
MAAGRLLLYTGLSLALCALGMLAVAICSDHWYETDARKHRDRCKAFNTRRVDPGFIYNNNNNLPLRASRSRLDRWEGKLLRA

SEQ ID NO: 781690 - protein, 155 aa, Homo sapiens
KRCSQRPLPLSSPIPKRRRKCLYGQAASPIHQESQELSDSPETLCALRKDSTLRLGKRCQVFSCGSWQLAGHCDSPGCPLEMAPGFLHALQRKAVWREIWKLVPTPVSAKALGRPCTDKLALPGSRRYCLQVVQTGTDLSRSDLRNALFVYRTPS

SEQ ID NO: 781691 - protein, 118 aa, Homo sapiens
RHKLLISEMKEGPITTDPINIKRIINIRNTSMLTNLIRDEMDQFLEGHNLLKPIRKETHHLSVACIYLKIESIISNFSKRKAPGLDGGSLVNSTKHLRKKRYWLGAVAHTCNLSTLGS

SEQ ID NO: 781692 - protein, 201 aa, Homo sapiens
RFETSRGSRGGRRERGLGPCACENGSFEVETGERTLSQVPWEKAGPGRELQGARLGRGWAEILRAGSGGGSGRGLQRGEGSMGGRRLLGGLLARTPPGVRCGGQPSALSPQPQLLRGLHSPSLPRLRGFSLALFPLRPLLKAPEMLKSGLLVPGLLSMNFLQTPGFQLPPFCPFTGKGDCNSGLFPIPVLPDQPRFESRAE

SEQ ID NO: 781693 - protein, 166 aa, Homo sapiens
MFVKSETLELKEEEDVLVLLGSASPALAALTPLSSSADEEEEEEPGASGGARRQARGLRPGKGARGGVGCGVRRAAGPQRLLGLVHDLHNCPSRARAVSRGAKTAETVQRIKKTRRLKANNRERNRMHNLNAALDALREVLPTFPEDAKLTKIETLLSPTTTSGHS

SEQ ID NO: 781694 - protein, 166 aa, Homo sapiens; identical to SEQ ID NO: 781693

SEQ ID NO: 781695 - protein, 161 aa, Homo sapiens
CCCCFQIVPVLRMFLAPCSIHLLNTVKVSSMSFHRTLELASCLPEGSGLNPKVNGTREEKGGDAKWTPSSKPLLPEGLQAAARSRSSNSAERLALWRASRSIAGIAVWSHLTKKSATIFRNQELYYIWTHNKGSPGSFSFVCCKPNLFPRSALLFLHSLSQ

SEQ ID NO: 781696 - protein, 76 aa, Homo sapiens
DGNTGGTYEAIFRIRPGRVEQTGQEREPWPNGAGGSSTAAGDPSGSQQCNRGKSFHTFSLTLNKSYWVLGVHLLLF

SEQ ID NO: 781697 - protein, 137 aa, Homo sapiens
NEEVVGAAVPRGTGLGAGEEKRDGNREMDGQHPHHGEDSGQHLHLASLINKAKGWDWPGGRGGKRDGNREVLGFLAKETRRHPWLFMARLPAAFRHLGPSVTVIGHSGSSVPKRPCLLLLSWVSPGNAQGPRGWPAL

SEQ ID NO: 781698 - protein, 344 aa, Homo sapiens
RGRGALGGRSGSAAGAAAGTAALHHRIMSGQLERCEREWHELEGEFQELQETHRIYKQKLEELAALQTLCSSSISKQKKHLKDLKLTLQRCKRHASREEAELVQQMAANIKERQDVFFDMEAYLPKKNGLYLNLVLGNVNVTLLSNQAKFAYKDEYEKFKLYLTIILLLGAVACRFVLHYRVTDEVFNFLLVWYYCTLTIRESILISNGSRIKGWWVSHHYVSTFLSGVMLTWPNGPIYQKFRNQFLAFSIFQSCVQFLQYYYQRGCLYRLRALGERNTWISQWFWQLYNAVTLFELSSHEECREWQVFVLAFTFLILFLGNFLTTLKVVHAKLQKNRGKTKQP

SEQ ID NO: 781699 - protein, 366 aa, Homo sapiens
RGRGALGGRSGSAAGAAAGTAALHHRIMSGQLERCEREWHELEGEFQELQETHRIYKQKLEELAALQTLCSSSISKQKKHLKDLKLTLQRCKRHASREEAELVQQMAANIKERQDVFFDMEAYLPKKNGLYLNLVLGNVNVTLLSNQAKFAYKDEYEKFKLYLTIILLLGAVACRFVLHYRVTDEVFNFLLVWYYCTLTIRESILISNGSRIKGWWVSHHYVSTFLSGVMLTWPNGPIYQKFRNQFLAFSIFQSCVQFLQYYYQRGCLYRLRALGERNHLDLTVEGFQSWMWRGLTFLLPFLFCGHFWQLYNAVTLFELSSHEECREWQVFVLAFTFLILFLGNFLTTLKVVHAKLQKNRGKTKQP

SEQ ID NO: 781700 - protein, 33 aa, Homo sapiens
IHRFVLWASGADAPGQKNEFLQDGPVNGSLVEN

SEQ ID NO: 781701 - protein, 34 aa, Homo sapiens
MPDLLDLLCGITPRILIRTRACAYTPTHTHTCSH

SEQ ID NO: 781702 - protein, 132 aa, Homo sapiens
SAHCNLRIPGSSDSPASASRVAGITGTYNRRQSINDHVMGAPSMMKGMNEYLLWHGGRWRWREHLKVEEIGTCLPLVTESGTGARFCLLREANCQSRTKASHPAGPSSLFLRESKDCGTRPAGLLVFSHLCL

SEQ ID NO: 781703 - protein, 321 aa, Homo sapiens
MKHIPVLEDGPWKTVCVKELNGLKKLKRKGKEPARRANGYKTFRLDLEAPEPRAVATNGLRDRTHRLQPVPVPVPVPVPVAPAVPPRGGTDTAGERGGSRAPEVSDARKRCFALGAVGPGLPTPPPPPPPAPQSQAPGGPEAQPFREPGLRPRILLCAPPARPAPSAPPAPPAPPESTVRPAPPTRPGESSYSSISHVIYNNHQDSSASPRKRPGEATAASSEIKALQQTRRLLANARERTRVHTISAAFEALRKQVPCYSYGQKLSKLAILRIACNYILSLARLADLDYSADHSNLSFSECVQRCTRTLQAEGRAKKRKE

SEQ ID NO: 781704 - protein, 133 aa, Homo sapiens
MSDWLQARPRPPLWALLPVRPEDKVSSLSPASWSSPRCRQMPSLQPLRVGSEHACLPLPSALTQPIRGCFALCPLPGGEGRAQPPTHSDPKAHCPAAEIRCQRLDRDTEGNGVVKPHSEKPHRCSVTFAPPVA

SEQ ID NO: 781705 - protein, 321 aa, Homo sapiens; identical to SEQ ID NO: 781703

SEQ ID NO: 781706 - protein, 321 aa, Homo sapiens; identical to SEQ ID NO: 781703

SEQ ID NO: 781707 - protein, 87 aa, Homo sapiens
SHVIYNNHQDSSASPRKRPGEATAASSEIKALQQTRRLLANARERTRVHTISAAFEALRKQVPARRRTPSLRRGTTAGMGGRVAGAG

SEQ ID NO: 781708 - protein, 104 aa, Homo sapiens
DTQVLHQRCCCVGRNLHMHRRPRACFPFNTQSHPSTHTHSHTEPCHSLSYTHLLTVHIKMTMHWSGCAHTHSHHRQEDKAHSPPYTHSHTCRSWWVIHLPPKVT

SEQ ID NO: 781709 - protein, 45 aa, Homo sapiens
MAEAAENSHPCLKCSLKIDCNKWSQNNSPSPAAGALWARSLTASP

SEQ ID NO: 781710 - protein, 93 aa, Homo sapiens
IKRDDWLGTHSGWDDPGNHAQGEKPGEPVPTEYPEWEDPDTESHSTVARGWGGGKQGATEEQARTGFPLGTHGVSKAAEYAKSHPLKHTELVL

SEQ ID NO: 781711 - protein, 112 aa, Homo sapiens
KLVGKASNTHILTTHTGGSEKKNKYKWLRDMRSVALTFAERDPININPHLWVREGWHSRACLEALPTGTKRTAWKAILGQVWWLKPVIPALWEAEAGGSPEVRSSRQAWPTW

SEQ ID NO: 781712 - protein, 75 aa, Homo sapiens
MVAFGASPGFWLCVAPMIQSCLEPPPSLAEILPVLLAKYLGHSTSPASCPLPPALDLVPSLLPKAYLSHKVGIAY

SEQ ID NO: 781713 - protein, 36 aa, Homo sapiens
MAPTFTDGWMDKQMWHLYPQTDKQTWHLHPRTDGQI

SEQ ID NO: 781714 - protein, 181 aa, Homo sapiens
MNDPFARMETRGPQGAANPMDSSRSLGDLGPFPREVGRGAPLAPGARNPATAGASRSQGGGHEDRTADRALGPRAGEELDRESWVREKVLFLLHPERWLGTRGDPAREEVAGAEDLPHAGGEDHGEEPNYPSVFQRQKRISGRRVAPPRDAADPPKYVLVRVEDYQVTQEVLQTSWAKGRM

SEQ ID NO: 781715 - protein, 142 aa, Homo sapiens
  misc_feature (5)..(5): Xaa can be any naturally occurring amino acid
QCLLXSSHSNYYQCLLQNEVIGLQSWLSRRFCGLSQLSRCCRCCVSMAARMKRNRRSNLKSQQVGGRVKSRSSRFSELSGEHAFSTTTHHNGTAYELLGNYLNNKENDLCLESFIICHRRHEISSLGKVFAPFCNLSKTLML

SEQ ID NO: 781716 - protein, 70 aa, Homo sapiens
MQYREGTDLSPPVLPRQHHHQCNHIHSRQQQEFSREQQEFSREQQEFSREQQEFSREQQEFSREQQEFSR

SEQ ID NO: 781717 - protein, 39 aa, Homo sapiens
MWVNCHNGGIHSMWALCQGQGGTAVNKPDVGPALGHHQS

SEQ ID NO: 781718 - protein, 114 aa, Homo sapiens
PNLVPLRILNLLCNHPKLLPATVWQRSCYSRYLEEGAHLHPCRQACRSGPLLGSLRQFNDSVSVTRATVYGQFSLYRNPHSYLRKCSLVLTESHTHQHPDTRSTICRPNCKNLP

SEQ ID NO: 781719 - protein, 252 aa, Homo sapiens
GGWVGYLARPGASAGHQSRRSSSSSSRLASRASSAPPGRILSHRRRRHRCCRGEAQPGRPRLAAPAAAATAAVAAAPRTHSVHRRQRGAPAAHPAESPRRAEKKPRSGSPRAPGPGPRSAAIGWQMTIRRARRLSSRRRSELLRAPVAAATAAAAAAARGHLKVGARKLNSVLIGLQVFCALASSRVPANPPDAHADHPATPQLCLRREERRKRGRFKNFQNCAVAWLDPPTHEESWGLGNCWVDHDTEQKQ

SEQ ID NO: 781720 - protein, 121 aa, Homo sapiens
PPLFVAKPSHAVPFLRRPPHPGSAGLRGCHRLGNRPPVGGESRDARKCSEACRPAARSASVSGSVTEVAPVRPFHPSSLHRPPILSRAASGPDSACGLSSIVPTLAPLGPSGQPWDSADAS

SEQ ID NO: 781721 - protein, 115 aa, Homo sapiens
PPCFHYLPSEQIHPVYSTCLSSRSTLSTLPACPANPLCLHYLAVQQIHPVYTTCLSSRSTLSILPACLADPPCLYYLPIQQVHPVYTTSLPSRSTLSTLPAWPEDPPCLHYLPCQ

SEQ ID NO: 781722 - protein, 41 aa, Homo sapiens
SCHVEHIHFQSVDPFYPFVTPTRHEMNQKDFPPIKITALCL

SEQ ID NO: 781723 - protein, 76 aa, Homo sapiens
EPPEEERSDGGAPQSRRRVVWPCYDSCPWSHLSGGTTGRRQESGDLSNGGESIAVELKDKWGKRGKREKGRDSSQR

SEQ ID NO: 781724 - protein, 264 aa, Homo sapiens
ERDAGDKTPGAVNDGRSHRAPQSGPPLPSSGNEQHSSASIFEHVDRISRPPEASRRVPSKIQLIAMQPIPAPPVQRPSPADRVAESNKINKEIQTALRHKSEIEHHRNKIRLRAKRRGHYEFPVVDDLSSGDTKERHRVYRRAQMQIDKILDPTASVPSVFIEPRKSSRIKRSPKPRRKHQVNGCPADAEKDRLITTDSDGTYRRPPGVHNSAYIGCPSDPDLPADVQTPSSVELGRYPALPFPASQYIPPQPSIEEARQTMHS

SEQ ID NO: 781725 - protein, 199 aa, Homo sapiens
ERDAGDKTPGAVNDGRSHRAPQSGPPLPSSGNEQHSSASIFEHVDRISRPPEASRRVPSKIQLIAMQPIPAPPVQRPSPADRVAESNKINKEIQTALRHKSEIEHHRNKIRLRAKRRGHYEFPVVDDLSSGDTKERHRVYRRAQMQIDKILDPTASVPSVFIEPRKSSRITRSRGITRSRGITRSRGITRSRGITRSRG

SEQ ID NO: 781726 - protein, 97 aa, Homo sapiens
ERDAGDKTPGAVNDGRSHRAPQSGPPLPSSGNEQHSSASIFEHVDRISRPPEASRRVPSKIQLIAMQPIPAPPVQRPSPADRVAESNKINKEVFAFI

SEQ ID NO: 781727 - protein, 76 aa, Homo sapiens
PSHLSFLGSWDPRPSIPCEEGSGHGFLDAVSSAVTLLRGAATIPPSSLRAPNPCPCPVSEHSAGLCQALSSTLQPW

SEQ ID NO: 781728 - protein, 40 aa, Homo sapiens
VSIDSHQHMTHLPTSGPTDPLSLMLPEMDPELLAKANPST

SEQ ID NO: 781729 - protein, 195 aa, Homo sapiens
FISTLLKKRIRMQGFIIFDDYGSQYPEFYQQMSEWLKDGKIKYKEHMVQGLDNTINAFNGMLKGENFGKVVVKIKKIGIIMITLHHLDQSRSFRILWLLEEIKQPYELKRYYRDSSTHLAPDSLKTIHPLGKSPVLEWDGKVIAESGAIVELLIQKLAPHLAPDMDESTYVDYLQWIHFSESSAMLPFLLKTFNT

SEQ ID NO: 781730 - protein, 30 aa, Homo sapiens
MSGEAGLSEDAGAAGPGLLRRALPRGSDRP

SEQ ID NO: 781731 - protein, 42 aa, Homo sapiens
SYISASFMHFALSVCFTFWLSEPDLQVSLQFPSASAHWAAPT

SEQ ID NO: 781732 - protein, 53 aa, Homo sapiens
MNAAPSPRDHSVPVKVLFVRSKTEIQQSSQKTQINGRHLPQTPTQEREYGLMS

SEQ ID NO: 781733 - protein, 53 aa, Homo sapiens; identical to SEQ ID NO: 781732

SEQ ID NO: 781734 - protein, 50 aa, Homo sapiens
KVENVWHVWEEEEKRTSGRYLENPSPGGRPLGLDPTCANFLLVLGPTSCL

SEQ ID NO: 781735 - protein, 34 aa, Homo sapiens
QQHADPPLFPAAQATYSECACLALGGAPAPALQA

SEQ ID NO: 781736 - protein, 70 aa, Homo sapiens
ESTSAVLSGFVLAALAFQHLNTDSDTEGFLLGEVKGEAKNSITDSQMDDVEVVYTIDGVSFCRPDWSEVA

SEQ ID NO: 781737 - protein, 70 aa, Homo sapiens
LTSSRLAARSPGRPGKPFHTRPSRSRDFLWLQSSLTIFWEVMDHHIPMHALPEEIQKNLRCRHAVKKSTK

SEQ ID NO: 781738 - protein, 103 aa, Homo sapiens
SLYLLNLILFNSKPVSLPATEPSMFSLVLGRTVLRPYIILRKARSGLRMSHLLITPMAAPALTSHRVSPYLGMLLCLSRSRSINTCFMNECMNKGKLVTCKGG

SEQ ID NO: 781739 - protein, 164 aa, Homo sapiens
LTSSRLAARSPGRPGKPFHTRPSRSRDFLWLQSSLTIFWEVMDHHIPMHALPEEIQKMLPEEKVCKYCGVSYLILHEFKAMEEKVKAMEKEMKFYQGSVDREKRLQEKLHSLSQELEQYKIDNKSKTESKIYFRLMLRLEVEHCQLKERMPDLQHSVTEPYIGL

SEQ ID NO: 781740 - protein, 199 aa, Homo sapiens
LTSSRLAARSPGRPGKPFHTRPSRSRGEGRWLSSAWDDPVLQMQFRSGGVLAPGERARKLSRGAPARARGPGSGLRHHAPLRPLPGVCQPAGPRRGPPSSQPRGTRGSASSPPHPPPPPLPATAGPGGTGLERDRFESHSSSFVWPCGWFLCGRACRFRKVLGCELPPSPAPDLLVVGDSRHGNGSLRKGLKAERELMA

SEQ ID NO: 781741 - protein, 341 aa, Homo sapiens
LTSSRLAARSPGRPGKPFHTRPSRSRGEGRWLSSAWDDPVLQMQFRSGGVLAPGERARKLSRGAPARARGPGSGLRHHAPLRPLPGVCQPAGPRRGPPSSQPRGTRGSASSPPHPPPPPLPATAGPGGTGLERDRFESHSSSFVWPCGWFLCGRACRFRKVLGCELPPSPAPDLLVVGDSRHGNGSLRKGLKAEHFLWLQSSLTIFWEVMDHHIPMHALPEEIQKMLPEEKVCKYCGVSYLILHEFKAMEEKVKAMEKEMKFYQGSVDREKRLQEKLHSLSQELEQYKIDNKSKTERIYDVGMQLKSQQNEFQKVKKQLSHLQDELKIKYRQSYIFRLCFC

SEQ ID NO: 781742 - protein, 173 aa, Homo sapiens
LTSSRLAARSPGRPGKPFHTRPSRSRDFLWLQSSLTIFWEVMDHHIPMHALPEEIQKMLPEEKVCKYCGVSYLILHEFKAMEEKVKAMEKEMKFYQGSVDREKRLQEKLHSLSQELEQYKIDNKSKTERIYDVGMQLKSQQNEFQKVKKQLSHLQDELKIKYRQSYIFRLCFC

SEQ ID NO: 781743 - protein, 151 aa, Homo sapiens
LTSSRLAARSPGRPGKPFHTRPSRSRDFLWLQSSLTIFWEVMDHHIPMHALPEEIQKMLPEEKVCKYCGVSYLILHEFKAMEEKVKAMEKEMKFYQGSVDREKRLQEKLHSLSQELEQYKIDNKSKTERLSMFFFSIIYLVERQLQEINTL

SEQ ID NO: 781744 - protein, 199 aa, Homo sapiens; identical to SEQ ID NO: 781740

SEQ ID NO: 781745 - protein, 218 aa, Homo sapiens
SLYLLNLILFNSKPVSLPATEPSMFSLVLGRTVLRPYIILRKARSGLRMSHLLITPMAAPALTSHRVSPYLDFLWLQSSLTIFWEVMDHHIPMHALPEEIQKMLPEEKVCKYCGVSYLILHEFKAMEEKVKAMEKEMKFYQGSVDREKRLQEKLHSLSQELEQYKIDNKSKTERIYDVGMQLKSQQNEFQKVKKQLSHLQDELKIKYRQSYIFRLCFC

SEQ ID NO: 781746 - protein, 33 aa, Homo sapiens
PIPHFFISVPSTGPVLGTKQPKEKRQGCFPEGL

SEQ ID NO: 781747 - protein, 116 aa, Homo sapiens
QAEVRRCSVQENKLNTPTNSTLCSYPPAASPGPELSPVSLYRPSSSLTMAYLGPYPMSRQPPQMRLLPHNSLHRHSSIVTMGSLEPSSCLPAFSPSPELSQVDLTRPVEIFFTVWL

SEQ ID NO: 781748 - protein, 100 aa, Homo sapiens
SGLRWLRVVRGLSGAVGHPREASRGSKAWGPAVEVSPQLWAQLERGRPGVHEALKSAHPWPRPACRPLPVVSLSGESGSQPSPPLHWFPAGKGRGALSRS

SEQ ID NO: 781749 - protein, 52 aa, Homo sapiens
MPISVALKSGGPCQKFGWRWQVGSLEAEGKSGWRCKFRSHQPRMDFKTTGLD

SEQ ID NO: 781750 - protein, 42 aa, Homo sapiens
WDDLKVGFSDFPVTSLLNLWALSSSHHHCLLYAESPYAGLWG

SEQ ID NO: 781751 - protein, 78 aa, Homo sapiens
LKSMKSRLEKQYKKINEPKSWFFERINKIDRLLVRLVKEKIQINTRNDKGDITTNPIEIGKTFRDYYKSLYAQKTYKI

SEQ ID NO: 781752 - protein, 102 aa, Homo sapiens
RGFRQKMRSGCESQDVLSRWALGNIPSVPEARKWSESGISFRSPLVSFLIPASPCPMSCDFREASGYSELLSLGYNNNRARETGILVLLLPLASCAFLGKLL

SEQ ID NO: 781753 - protein, 88 aa, Homo sapiens
RGGQGTPTSGHHQSCRLSRTPSIAITGVLVKVQVLRPPGNLHFKQAFQLLLTHIKVRGQHGPSSVAHTYNPSTVGGQGRQITRGQEFE

SEQ ID NO: 781754 - protein, 118 aa, Homo sapiens
PSGQTGVGQHWAEAVWQARVSQKVVAGRVSPAQMLGRHGGMAHRPHSAWDQAPSEDTGSSFPWARPLERRRELGRENGTLVLRQAPSTHGLWAPGRAWPGCPRRRGGGSSCFMTPPAR

SEQ ID NO: 781755 - protein, 82 aa, Homo sapiens
CGMEDGAVLGTLTSPWPELPQTKESSHCGLLSGFHPSKGQAAGGLIGLAQAELMPLLEYHHLQACALAPPALCGLVTLAASF

SEQ ID NO: 781756 - protein, 76 aa, Homo sapiens
MGRMGTTAPAQPAAWSLPTTAPLVSSLRGVGPLGATNHRDPSSFSVGEILREGPKWNHRHKAWGACVGGSTGRDRI

SEQ ID NO: 781757 - protein, 148 aa, Homo sapiens
RRAPSWCRHSFASCVCWRYSACLIALFAYLLLLGYASSIPWLRRQFSNLDPMSPRGLRFNLGAHLHGIRALRPGSVRSHLVHFSSHHENVSVPLYAPREYVMKELRVGGYLERHKSKLYPCKRRGDYRSSCPVLDFSVIQSPSYLRYL

SEQ ID NO: 781758 - protein, 69 aa, Homo sapiens
MGFPVIHFANQPRVGFYLPIFINETCRGSLTPSAIQLITSTIKIQDSDSAPGCISGIAEEEHLVTPSLP

SEQ ID NO: 781759 - protein, 93 aa, Homo sapiens
MKGARWRRVPWVSLSCLCLCLLPHVVPGTTEDTLITGSKTAAPVTSTGSTTATLEGQSTAASSRTSNQDISASSQNHQTKSTETTSKAQTDTL

SEQ ID NO: 781760 - protein, 117 aa, Homo sapiens
SQLLGRLRQENRLNPGGRGCSDLRSCHCTPAWATEEDSVKKKEKRHQVCQGVREKASGMPGRVGKGIGYARVCGKRHRVCQGMWEKVVRFLSLPGLGSLWPSEAYPGWVLRHQLSSP

SEQ ID NO: 781761 - protein, 118 aa, Homo sapiens
QPSSRCRVPRAACGHQVDIEPRGGLALVNLPRIDGAPTLCQAQRIPQCKRRGNTLRHVIWRDMKQISRGKIMESLKAFKQGIISSPICWVLERHRLHCGRQRKSQRQGDPPPKWERVA

SEQ ID NO: 781762 - protein, 101 aa, Homo sapiens
PARTQGAAGEPPLGIQINVGSLPFGGPLRIPEFLLLKEEPVLRAFSAAISIWCTRPCHWQSWSHENHFLKKGSERVAFLCELICQDGGTRTVERGNDFGED

SEQ ID NO: 781763 - protein, 151 aa, Homo sapiens
IAVLEDTRSTVSEPTSTAEKLGLKKGPRKAYELSQRSLDYVAQLRDHGKTVGVVDTRKKTKLISPQNLSVRNNKKLLTSQELQMQRQIRPKSQKNRRRLSDCESTDVKRAGSHTAQNSDVFVPESDRSDYNCTGGTEVLANSNRNPSTVFW

SEQ ID NO: 781764 - protein, 106 aa, Homo sapiens
CPGHPVSEMSKTPALPSRNSRDPAAATVLQSNYHPGLQEPNVGWGQGRYKMLSELETKVSNTRSGAVKVTLKLCLEGGQERTRTRPWEPPVQSRETWNSRLVGTSD

SEQ ID NO: 781765 - protein, 67 aa, Homo sapiens
IPLLLASSVAESQAVAQLRGYVASLHLRGGVPPRLKLAGETNVEVRCGLLKSCLESEKAAGRSDSYL

SEQ ID NO: 781766 - protein, 41 aa, Homo sapiens
MRKKSKVEADLEHPQPPEATVNPQAKVNPQATVNPQATVNP

SEQ ID NO: 781767 - protein, 115 aa, Homo sapiens
GWGALGPSRAPWHLFTVRVLEPRALLGHYLRSGSGFSPLIFSQTVVRYQTSPGPSLRPNVQCPVPMPSWCNGTSAPSWCNGTSARLWRSIFPPNLPLTLPAVAGGVSALGNQIHC

SEQ ID NO: 781768 - protein, 42 aa, Homo sapiens
MAQTNSCFMLISCLMFLSLSQGQEAHAELPKAQISCPEGTSA

SEQ ID NO: 781769 - protein, 99 aa, Homo sapiens
SVLFGVGKNNQQEGGEKKKSWPSNGSLFVAPSVYTTTAQSAYFQAEKENYYGELWRASWAKADRMKLHNLPMRGTHWAGFCLPPTLVDGSSACPGGEMC

SEQ ID NO: 781770 - protein, 132 aa, Homo sapiens
RGRNLEGEREEQRASKRKSRDRGGKETEEGEIHQRWGEGEEGGGNTPEMGRRGRRRGKYTRDGEKGKKEGEIHQRWGEGEEEGGGERGCQRARRRQTQMKGQRPREEAGQSGLRGGSRGQGHKTQGVRYRAP

SEQ ID NO: 781771 - protein, 69 aa, Homo sapiens
AQVLSSLTQMLSEHTHYRLSWIVGQSLLYKHHSVDTGSEQMRPNRPAGPKTRAAQSPRGHGSHPDLSKP

SEQ ID NO: 781772 - protein, 106 aa, Homo sapiens
MKLGSRTERDRSSYFRWRGQRQPLSQGAVLQGAEGQKEPDRQRSGGRSCQAARTAYSKAVGVDPAQWVEETERSGDWSTVSQRRGGEAGKGWGQIPGSLWRAWKSI

SEQ ID NO: 781773 - protein, 41 aa, Homo sapiens
PTRKGKQPARSKYKRFTVNTLKLGKGPLHASIRLLVEKRGG

SEQ ID NO: 781774 - protein, 103 aa, Homo sapiens
FSCLSFRSSWDYRHVGPRLANFLYFLSREMVSLCLQSARLSLPECWNYVCEPGQGRTFEHLPVFYDTDPLGDNKDPLGDPGWTAGWSLRKESTQSKGEMVKPE

SEQ ID NO: 781775 - protein, 89 aa, Homo sapiens
SPPPSYLFSSREEQHRKHSRSPQEAPRFTSPGWRNATQTSRHSSLGHAYAGLGGATDTGGLGDLAVAKATEGHPNPQRLQSRAKLLLVD

SEQ ID NO: 781776 - protein, 35 aa, Homo sapiens
KPSSEGTGRGWGQVQRLRPEQVQSSRKERMLDSLN

SEQ ID NO: 781777 - protein, 38 aa, Homo sapiens
PFAGPYFSLLRLPKAQHCQAGTTCVPLCLPSHGCQQFG

SEQ ID NO: 781778 - protein, 225 aa, Homo sapiens
FTSTGAPLRRATSTSCSAISPSPLLAAQCRAVKPDMKSRLAAKPRSRSSSPCSWWVQRPPAVRTSHSCSDGSRGTADGGGAAGNSSASGLSRRGPARDRRLRCGERPGPRPRPRPDSSTESRLSSRGELRGLGSSDSCRRRPGSSARRRSVAGAGTQRTGSIQGFCCGGPFAAPGPGSASGGSEQGDAASEGALGGGAASAEGLSVAWASSRAGSGGSADRSPGG

SEQ ID NO: 781779 - protein, 42 aa, Homo sapiens
MLDPCCDTSDHPSLPMKTVTTKNETQTPAGLEEGNYRIYAWR

SEQ ID NO: 781780 - protein, 67 aa, Homo sapiens
EEPFLPFCLRSGARRAFGRNWAMRRALMNGISSLIRRDTKEVIFLCPLLCEDKVICSFLLLLMIFLS

SEQ ID NO: 781781 - protein, 57 aa, Homo sapiens
AEVQVLVLDGRGHLLGRLATIVAKQVLLGRKVVVVRCKGINISGNFYRNKLKYLAFL

SEQ ID NO: 781782 - protein, 280 aa, Homo sapiens
MWWCTPLRVSGKCRAGPLSAPRRGPSTLSLPRLPGVGVVPGTLGPPGSRACGWPLCTAPLVVSPHGPTSSGLAACSGFIAPAAPPRMPGEWVAEASWSLCPCCSVSWPFPDTSRHGIHRDSPDTLQGPGRWDRRAYRSHRQQIPRSLGGASLAAQPQLLRERASRFRGAGHKPVVATKPFLWWSACGARVGRVWNVCGARVGRVWGACGAGVERVRGACGAGVGRVWGACGADVGRVLGTASGMHRAQRGGEAAGAASTSSSIPIPPSGFLVKNLAGRSG

SEQ ID NO: 781783 - protein, 76 aa, Homo sapiens
NLIPTTQCALTHPLPRLTYCPSVLGTEEFPGTWNFKTGSVLGKPPYFYFTSVSLLNHTLRVLRHSVLQLSSLYLFY

SEQ ID NO: 781784 - protein, 172 aa, Homo sapiens
MDPSEKKISVWICQEEKLVSGLSRRTTCSDVVRVLLEDGCRRRRRQRRSRRLGSAGDPHGPGELPEPPNEDDEDDDEALPQGMLCGPPQCYCIVEKWRGFERILPNKTRILRLWAAWGEEQENVRFVLVRSEASLPNAGPRSAEARVVLSRERPCPARGAPARPSLAMTQEK

SEQ ID NO: 781785 - protein, 141 aa, Homo sapiens
GLADQAGGRPVGWGICPADLGREAGCSRVHLGDRGHFFVTVEVRTSRWRFSRVFLLGSGQCWESGPPAPGWTGHHGVLPSASASLPELGVSSQTVSIARGKRRSHRFPGAGDSIGGPQEAWPGEHGSTSRSRLGKGGIPSS

SEQ ID NO: 781786 - protein, 104 aa, Homo sapiens
MVISHKLETERGPMLFFWDSERDGNLSYPISLSSQPQVLGWRQHSRGAQNRWSPGKWENIGRRLSRESEMTLGGFSDRPASFWKLLHFSLQETSIPWSHLSRAI

SEQ ID NO: 781787 - protein, 379 aa, Homo sapiens
AVRPRLRRKRRPCSERGSGAAPAGGSLLRFQSTLVIAEHANDSLAPITLNTITAATRLGGEVSCLVAGTKCDKVAQDLCKVAGIAKVLVAQHDVYKGLLPEELTPLILATQKQFNYTHICAGASAFGKNLLPRVAAKLEVAPISDIIAIKSPDTFVRTIYAGNALCTVKCDEKVKVFSVRGTSFDAAATSGGSASSEKASSTSPVEISEWLDQKLTKSDRPELTGAKVVVSGGRGLKSGENFKLLYDLADQLHAAVGLPVLLLMLALSPDMPVGRTGKHSKHRTLYCCGYPEPSTLAGMKDRQTLWHYKTELPFQWHRDLAIIRAPQLRLGKPGLVENLTSDRLGSTGTGASLGAHQGAAPAPGIPHPSARLVVVKLTL

SEQ ID NO: 781788 - protein, 113 aa, Homo sapiens
TPPAGLGLRTQGAPRTEPLRLKPTERIPPLDDGEGVGATGRQIGGSRPAQPALPSQRALEPLGPSRCPPGSAARLGQGSAGGRGLRAVGPSTHASSLLSGGSRAAAGDREQEG

SEQ ID NO: 781789 - protein, 108 aa, Homo sapiens
MLGVVYANGQAPGTLQVSPGTKRCLLCPEEQYSSRTRDGCLPRTETFLAFDDPLGLMLALVALMLASLAVLVLQTVLKHRDTPVVGANNRALSCTPLTSLTLCALCPL

SEQ ID NO: 781790 - protein, 72 aa, Homo sapiens
GLVWALGYSWVVGPSPGSSPFTPVSLWVLTSLQLPPTGDNTARPHPAWARACELVCVHPSVHVRVRAHQGPP

SEQ ID NO: 781791 - protein, 135 aa, Homo sapiens
AHLTPQIHFLSCELSLRKWHHHSGQKAESPSLSPATFYLHCSLSPSDMLSPPPPRASVLAAPSLQCVPYPRVSQSSPLSALKSGGFRLTRGSLATLANVMLFHLLSSECCYLKMFSSLIYNFTVCILSLVNKDFR

SEQ ID NO: 781792 - protein, 36 aa, Homo sapiens
LLVLCLKPFATLEAHASVFAVRWRHAPSPLLREAGE

SEQ ID NO: 781793 - protein, 132 aa, Homo sapiens
RQQRVPGLRQQRGRRRAEAEVTKAAAAAAVSLTVAETKAAAADGERPGPGPLLVGCGRAAVGPARLPPPAAPPPAPPPGRRRGPGPARTQTAAAAAAGGVGGGGGAMGGLASGGDVEPGLPVEVRGSNGAFY

SEQ ID NO: 781794 - protein, 159 aa, Homo sapiens
EWLLLWELLRMGLMRHSVVTVAPVPVLSGPMGWWLLYTTVWMRRCHCRREFYQMEMAQAGNSRKHAKSTENQSEARRGRPGKPPGKAGALVQPLWCGAWPGVTTVKGIATFAHTWQNNKTRQLSQAEPQTARLLTAPALCAQVRLRVQALSPPQDSAVA

SEQ ID NO: 781795 - protein, 211 aa, Homo sapiens
MQPRRAQAPGAQLLPALALLLLLLGAGPRGSSLANPVPAAPLSAPGPCAAQPCRNGGVCTSRPEPDPQHPAPAGEPGYSCTCPAGISGANCQLVADPCASNPCHHGNCSSSSSSSSDGYLCICNEGYEGPNCEQALPSLPATGWTESMAPRQLQPVPATQEPDKILPRSQATVTLPTGSENRAESCRNEMGSSGGDPKILACGEMPGSSSY

SEQ ID NO: 781796 - protein, 37 aa, Homo sapiens
MPRFCIQALDSLPNPSSPRRCSQQERLGFAATNQPGP

SEQ ID NO: 781797 - protein, 70 aa, Homo sapiens
RARYPNLYIIAQTTDIYMNVLCHASSRCALAIHASFKDSESVEKKRLRSNSALVPTQMLRNTPWNLITGR

SEQ ID NO: 781798 - protein, 91 aa, Homo sapiens
MGGPDGFESRLMIRKVGVPNCGCQVDPGPANIPNLKGSPGEKRTRERLPKYGKTGLTEWVETTSWVSQNSSQCEHKKHRGRGRKKPLRKNS

SEQ ID NO: 781799 - protein, 374 aa, Homo sapiens
MDLMNGQASSVNIAATASEKSSSSESLSDKGSELKKSFDAVVFDVLKVTPEEYAGQITLMDVPVFKAIQPDELSSCGWNKKEKYSSAPNAVAFTRRFNHVSFWVVREILHAQTLKIRAEVLSHYIKTAKKLYELNNLHALMAVVSGLQSAPIFRLTKTWALLSRKDKTTFEKLEYVMSKEDNYKRLRDYISSLKMTPCIPYLGIYLSDLTYIDSAYPSTGSILENEQRSNLMNNILRIISDLQQSCEYDIPMLPHVQKYLNSVQYIEELQKFVEDDNYKLSLKIEPGTSTPRSAASREDLVGPEVGASPQSGRKSVAAEGALLPQTPPSPRNLIPHGHRKCHSLGYNFIHKMNTAEFKSATFPNAGPRHLLDDS

SEQ ID NO: 781800 - protein, 279 aa, Homo sapiens
MDLMNGQASSVNIAATASEKSSSSESLSDKGSELKKSFDAVVFDVLKVTPEEYAGQITLMDVPVFKAIQPDELSSCGWNKKEKYSSAPNAVAFTRRFNHVSFWVVREILHAQTLKIRAEVLSHYIKTAKKLYELNNLHALMAVVSGLQSAPIFRLTKTWALLSRKDKTTFEKLEYVMSKEDNYKRLRDYISSLKMTPCIPYLGIYLSDLTYIDSAYPSTGSILENEQRSNLMNNILRIISDLQQSCEYDIPMLPHVQKYLNSVQYIEELQKFVEDDNYK

SEQ ID NO: 781801 - protein, 289 aa, Homo sapiens
SSDPPASASQGTVIVSFWVVREILHAQTLKIRAEVLSHYIKTAKKLYELNNLHALMAVVSGLQSAPIFRLTKTWALLSRKDKTTFEKLEYVMSKEDNYKRLRDYISSLKMTPCIPYLGIYLSDLTYIDSAYPSTGSILENEQRSNLMNNILRIISDLQQSCEYDIPMLPHVQKYLNSVQYIEELQKFVEDDNYKLSLKIEPGTSTPRSAASREDLVGPEVGASPQSGRKSVAAEGALLPQTPPSPRNLIPHGHRKCHSLGYNFIHKMNTAEFKSATFPNAGPRHLLDDS

SEQ ID NO: 781802 - protein, 124 aa, Homo sapiens
GGKQRLPLTILQPSLWLLTALHLLWTSSLQYVKQPFQPAWTKERSQDGAEKPMQAGPGTQESGTRCYQMLAPTRVAAVFSVPQLCPLSLQAASSQGDLDGITTLVCLVNTETNSTIQRPDRQMA

SEQ ID NO: 781803 - protein, 98 aa, Homo sapiens
GGKQRLPLTILQPSLWLLTALHLLWTSSLQYVKQPFQPAWTKERSQDGAEKPMQAGPGTQESGTRCYQMLAPTRVAAVFSVPQLCPLSLQAASSQGGR

SEQ ID NO: 781804 - protein, 78 aa, Homo sapiens
GKAEQIRKGALRNLWCRAMIEWIPTNISLSKNCWQLAQLTLKFWMLQFLPNLDGITTLVCLVNTETNSTIQRPDRQMA

SEQ ID NO: 781805 - protein, 108 aa, Homo sapiens
MSVLKVTPFDFANIPEPCEHMNIPKKKIPPGSSDESHSVAQAGIHWHRLSSLQPPTPWFKRFSCLSLPSSWDYSFSKAIRLQNLVLLCAQKENEKDFKNHSGLSLLQE

SEQ ID NO: 781806 - protein, 115 aa, Homo sapiens
LSSSIFQGPHSCSPRFSSLNNVTVPAPFAEPGGSSSENCGLGRRSQKGERPHATPTQRTPPNADPDPKSWPAHTHRTTVDPPRRMLSPSFTPGQTASQTLLTSPRSQANQRQGRL

SEQ ID NO: 781807 - protein, 102 aa, Homo sapiens
DPKCLQTLPSVCWGEGWGGAVQNHLMLKTIYVGKDVVGDGRCTFSLWGRHLVKGKKKTLLQKKKKGNLKLNTLLKDTIACIFFQFYFCTIILGILVGKLFLT

SEQ ID NO: 781808 - protein, 134 aa, Homo sapiens
FPPASGCAPVSLSLSAATCYSPPLGHLHTACDLSHLLQTFLEPSNLQFLSPHSKQSPSKELFPFNIYHSHLNPFETGLRPHNSSTETALVKATGGLHVAKYKGQVSSSLHLTSRIILDTFSMWLPGLHIPWFSS

SEQ ID NO: 781809 - protein, 72 aa, Homo sapiens
FFKVLGSKDSQCFRMHSRGVPAEDGLLPICKRDKNRGFLGLLVLFNVTQGGGDTVGESSWLFSLLGPRVPAP

SEQ ID NO: 781810 - protein, 70 aa, Homo sapiens
RHQLVLRARRKELPPELGGVALGMPHRPHLSTELRVASPIAPTPHAPWPRTGARLGQGSPRGRGYPNFRA

SEQ ID NO: 781811 - protein, 31 aa, Homo sapiens
MPTQHSKTSPVIPNPGLTTPNHSRGKDTERR

SEQ ID NO: 781812 - protein, 126 aa, Homo sapiens
TKPRVFHCDQIKFLVTPLGMPALEGSPCGHTLGIHPKVLGRLFPKMIEPVASWRTSGNICYSSKIQVKTRILENLTSLAMSLVSSQHLETFLVRSVGVTDGMFPPLPVKCVSLWKTYLTRWEILPE

SEQ ID NO: 781813 - protein, 101 aa, Homo sapiens
QGSIDHVYTGSGYRIRDSELQKIHRAAVKGDAAEVERCLARRSGDLDALDKQHRTALHLACASGHVQVVTLLVNRKCQIDVCDKENRTPLIQAVHCQEEAC

SEQ ID NO: 781814 - protein, 115 aa, Homo sapiens
MALRAHKREPPARDAAGLLPCPLSTPEPCTQTPPPRQSTPAGQASQTGERPSTRTSLGHTLRHQTGDSWWAHGLAREHEAAVPGRPHHHQVGHKCLLRHPQGDGLRSREQRKPVP

SEQ ID NO: 781815 - protein, 106 aa, Homo sapiens
PCQHLELSNGRFRLPPRVTPPLPADLDAGIPSELASNVSKTHHVFFLPVPCPCAKWPGRVPSAQDMVLLRVPAAQLLLGPTKIHSPFPCDLILTFLTHTLPHMVSM

SEQ ID NO: 781816 - protein, 86 aa, Homo sapiens
GFAGAVQLGLIGTRIRARIRVQFFIFIQIPNDLVKMHILTPEGCGLRFCISNTLPGDVTMLVHGPYSSSKGINDMITLPNNTKRPR

SEQ ID NO: 781817 - protein, 115 aa, Homo sapiens [sequence omitted]

SEQ ID NO: 781818 - protein, 91 aa, Homo sapiens
QNPGRPDCGLGKVWKQSSASDMPDIPRAAGSDVGTCPGSARSARSILPRPPPEGPRAASPSPRGTPTCCVWGSGRPGSSQYGGGAAPTTKS

SEQ ID NO: 781819 - protein, 36 aa, Homo sapiens
REESLSEEQPGSLAHQGLMMSPALDELWGSYIPPRQ

SEQ ID NO: 781820 - protein, 580 aa, Homo sapiens
MAFHVEGLIAIIVFYLLILLVGIWAAWRTKNSGSAEERSEAIIVGGRDIGLLVGGFTMTATWVGGGYINGTAEAVYVPGYGLAWAQAPIGYSLSLILGGLFFAKPMRSKGYVTMLDPFQQIYGKRMGGLLFIPALMGEMFWAAAIFSALGATISVIIDVDMHISVIISALIATLYTLVGGLYSVAYTDVVQLFCIFVGLWISVPFALSHPAVADIGFTAVHAKYQKPWLGTVDSSEVYSWLDSFLLLMLGGIPWQAYFQRVLSSSSATYAQVLSFLAAFGCLVMAIPAILIGAIGASTDWNQTAYGLPDPKTTEEADMILPIVLQYLCPVYISFFGLGAVSAAVMSSADSSILSASSMFARNIYQLSFRQNASDKEIVWVMRITVFVFGASATAMALLTKTVYGLWYLSSDLVYIVIFPQLLCVLFVKGTNTYGAVAGYVSGLFLRITGGEPYLYLQPLIFYPGYYPDDNGIYNQKFPFKTLAMVTSFLTNICISYLAKYLFESGTLPPKLDVFDAVVARHSEENMDKTILVKNENIKLDELALVKPRQSMTLSSTFTNKEAFLDVDSSPEGSGTEDNLQ

SEQ ID NO: 781821 - protein, 101 aa, Homo sapiens
GGSDCPKSTQPQKGYSGNKSRLNPPAAPGSSPSTVLYCAVLIIFQLGRTPISGIKPWTNLLIILEIILIRNPRRKSYRVPHPLFSSLELFRHFIIFFLNQS

SEQ ID NO: 781822 - protein, 141 aa, Homo sapiens
GLPVLKQRKPGATQVKLSALPGQSLEGLQSGGETSMGIESQSRVRPALMGAIEVQQGGPAAGHDSPRPHRTSRWMKENGKGDQGRSKLVQRPNDARSWHASGIQGVCGRVSFLLRSGSERPGTVAHTCNPSTLGGQGGRIT

SEQ ID NO: 781823 - protein, 622 aa, Homo sapiens
ASEPSVCGQSRDFFRYAAPDKNSSSSTIGSPSSRTNIIHPQVYFSSLPPVRVVFAVTMEGSARKVITVRSALIVRNRLETPMELRLDSPSAPDKPVVLPAIMPGDSFAVPLHLTSWRLQARPKGLGVFFCKAPIHWTNVVKTAEISSSKRECHSMDTEKSRFFRFCVAIKKENYPDYMPSNIFSDSAKQIFRQPGHTIYLLPTVVICNLLPCELDFYVKGMPINGTLKPGKEAALHTADTSQNIELGVSLENFPLCKELLIPPGTQNYMVRMRLYDVNRRQLNLTIRIVCRAEGSLKIFISAPYWLINKTGLPLIFRQDNAKTDAAGQFEEHELARSLSPLLFCYADKEQPNLCTMRIGRGIHPEGMPGWCQGFSLDGGSGVRALKVIQQGNRPGLIYNIGIDVKKGRGRYIDTCMVIFAPRYLLDNKSSHKLAFAQREFARGQGTANPEGYISTLPGSSVVFHWPRNDYDQLLCVRLMDVPNCIWSGGFEVNKNNSFHINMRDTLGKCFFLRVEITLRGATYRISFSDTDQLPPPFRIDNFSKVPVVFTQHGVAEPRLRTEVKPMTSLDYAWDEPTLPPFITLTVKGAGSSEINCNMNDFQDNRQLYYENFIYIAATYTFS

SEQ ID NO: 781824 - protein, 143 aa, Homo sapiens
MAALGDIQESPSVPSPVSLSSPGTPGTQHHEPQLHLHGHQHGSPGSSPKVLSQPSDLDLQDVEEVEIGRDTFWPADASRGGDCSPQPPAPVAPRGLLPAPAGHSESGTPPSPPPALGWGFWLRAPLSPQIHELSCVPSSSCIP

SEQ ID NO: 781825 - protein, 376 aa, Homo sapiens
MAALGDIQESPSVPSPVSLSSPGTPGTQHHEPQLHLHGHQHGSPGSSPKVLSQPSDLDLQDVEEVEIGRDTFWPDSEPKPEQAPRSPGSQAPDEGAGGALRSLLRSLPRRARCSAGFGPESSAERPAGQPPGAVPCAQPRGAWRVTLVQQAAAGPEGAPERAAELGVNFGRSRQGSARGAKPHRCEACGKSFKYNSLLLKHQRIHTGEKPYACHECGKRFRGWSGFIQHHRIHTGEKPYECGQCGRAFSHSSHFTQHLRIHNGEKPYKCGECGQAFSQSSNLVRHQRLHTGEKPYACSQCGKAFIWSSVLIEHQRIHTGEKPYECSDCGKAFRGRSHFFRHLRTHTGEKPFACGACGKAFGQSSQLIQHQRVHYRE

SEQ ID NO: 781826 - protein, 380 aa, Homo sapiens
VPAALGHPATPPTPVSMSALLGTALRAPVRLSPIHWVPGPSLSPLSPPVQLCSHSPSPSLRATVGACGYYPPLPFLISDSEPKPEQAPRSPGSQAPDEGAGGALRSLLRSLPRRARCSAGFGPESSAERPAGQPPGAVPCAQPRGAWRVTLVQQAAAGPEGAPERAAELGVNFGRSRQGSARGAKPHRCEACGKSFKYNSLLLKHQRIHTGEKPYACHECGKRFRGWSGFIQHHRIHTGEKPYECGQCGRAFSHSSHFTQHLRIHNGEKPYKCGECGQAFSQSSNLVRHQRLHTGEKPYACSQCGKAFIWSSVLIEHQRIHTGEKPYECSDCGKAFRGRSHFFRHLRTHTGEKPFACGACGKAFGQSSQLIQHQRVHYRE

SEQ ID NO: 781827 - protein, 122 aa, Homo sapiens
MQHLRIHNGEKPYKCGECGQAFSQSSNLVRHQRLHTGEKPYACSQCGKAFIWSSVLIEHQRIHTGEKPYECSDCGKAFRGRSHFFRHLRTHTGEKPFACGACGKAFGQSSQLIQHQRVHYRE

SEQ ID NO: 781828 - protein, 332 aa, Homo sapiens
MAALGDIQESPSVPSPVSLSSPGTPGTQHHEPQLHLHGHQHGSPGSSPKVLSQPSDLDLQDVEEVEIGRDTFWPAESSAERPAGQPPGAVPCAQPRGAWRVTLVQQAAAGPEGAPERAAELGVNFGRSRQGSARGAKPHRCEACGKSFKYNSLLLKHQRIHTGEKPYACHECGKRFRGWSGFIQHHRIHTGEKPYECGQCGRAFSHSSHFTQHLRIHNGEKPYKCGECGQAFSQSSNLVRHQRLHTGEKPYACSQCGKAFIWSSVLIEHQRIHTGEKPYECSDCGKAFRGRSHFFRHLRTHTGEKPFACGACGKAFGQSSQLIQHQRVHYRE

SEQ ID NO: 781829 - protein, 305 aa, Homo sapiens
MAALGDIQESPSVPSPVSLSSPGTPGTQHHEPQLHLHGHQHGSPGSSPKVLSQPSDLDLQDVEEVEIGRDTFWPDSEPKPEQAPRSPGSQAPDEGAGGALRSLLRSLPRRARCSAGFGPESSAERPAGQPPGAVPCAQPRGAWRVTLVQQAAAGPEGAPERAAELGVNFGRSRQGSARGAKPHRSSLRIHNGEKPYKCGECGQAFSQSSNLVRHQRLHTGEKPYACSQCGKAFIWSSVLIEHQRIHTGEKPYECSDCGKAFRGRSHFFRHLRTHTGEKPFACGACGKAFGQSSQLIQHQRVHYRE

SEQ ID NO: 781830 - protein, 134 aa, Homo sapiens
MASPQPGWSCVQVPCTSPLRSSQGSLWAMLVIWLDLTVLSPRPHLGGPGVGSRCLRSGPWKETLGQRFAWEAPGVGMGAGRQHTCHRGLGQPHEELCPYGPHPRQGFEAPSGALASPRLRVLTNTLCFLLAKGD

SEQ ID NO: 781831 - protein, 376 aa, Homo sapiens; identical to SEQ ID NO: 781825

SEQ ID NO: 781832 - protein, 194 aa, Homo sapiens
RGRTLPSGARRPPPARKVPGVTPSAGLREDGSPRGHSGVPFCPVPCQSLITGDTWNPAPRASASPPWASTCQESTHLPPVPRRVQPPHLHLEDQPQQGCQVLSSGVPAQGKGGKAVSGDVLTAPSVGAWRWSLPCIWPSVEQASSPGCQGMVTWCPQACLHNGEGIRKTQRWFGTPTSCFGAAKQFWTLGSRGR

SEQ ID NO: 781833 - protein, 196 aa, Homo sapiens
MAALGDIQESPSVPSPVSLSSPGTPGTQHHEPQLHLHGHQHGSPGSSPKVLSQPSDLDLQDVEEVEIGRDTFWPAQHLRIHNGEKPYKCGECGQAFSQSSNLVRHQRLHTGEKPYACSQCGKAFIWSSVLIEHQRIHTGEKPYECSDCGKAFRGRSHFFRHLRTHTGEKPFACGACGKAFGQSSQLIQHQRVHYRE

SEQ ID NO: 781834 - protein, 107 aa, Homo sapiens
MASPQPGWSCVQVPCTSPLRSSQGSLWAMLVIWLDLTVLSPRPHLGGPGVGSRCLRSGPWKETLGQRFAWEAPGVGMGAGRQHTCHRGLGQPHEELCPYGPHPRQGL

SEQ ID NO: 781835 - protein, 163 aa, Homo sapiens
MTRALCSALRQALLLLAAAAELSPGLKCVCLLCDSSNFTCQTEGACWASVMLTNGKEQVIKSCVSLPELNAQVFCHSSNNVTKTECCFTDFGNNITLHLPTASPNAPKLGPMELAIIITVPVCLLSIAAMLTVWACQGRQCSYRKNKRPNVEEPSLSASGNVE

SEQ ID NO: 781836 - protein, 175 aa, Homo sapiens
MTRALCSALRQALLLLAAAAELSPGLKCVCLLCDSSNFTCQTEGACWASVMLTNGKEQVIKSCVSLPELNAQVFCHSSNNVTKTECCFTDFGNNITLHLPTDNGTWTQLWLVSEYHEQGSLYDYLNRNIVTVAGMIKLALSIASGLAHLHMEIVGTQGKPAIAHRDIKSKNILVK

SEQ ID NO: 781837 - protein, 111 aa, Homo sapiens
MHSAHEASCRDHHAETTIPRGCPWETLSVHSLPSLRTHEEPGFVPLTWVQTGTASQLCPQKLPVLRGGWAEVLPNNYRGGQAYHRGILTCFCPSALTSLSDCTPVTQPMAS

SEQ ID NO: 781838 - protein, 56 aa, Homo sapiens
MAQGYKRPKEKSLVICRQAPSILIRDLDNDVEDKTRSAGNIIGRGRVSNRSWCLRD

SEQ ID NO: 781839 - protein, 117 aa, Homo sapiens
MSIILNHSLELAGPRGCSNSTHGSLGYRARELGGLEEAQSGGRPRIFPLSNPKVCSMNLWPKDNAPGNGSRAGCFASRTAVPASREVEVTLSLPGGGGAPASQGTASRGSAPHTRRP

SEQ ID NO: 781840 - protein, 216 aa, Homo sapiens
GSRQRAPEPPEEKELERKMEEQTEGGEGGRRCSSPKRGGRRCSSPKRGGSPLGKMRTEPQGGLGLAKGACSFFVGAGASRATSLSCACVWTSPQSVCLPGVPRLRVAVARRRRPFGSLCELEGAPWASGPGQVRDRNGVRGPMRAPRGNVRCGRPRRPHLTPGRERGRAQFTGCSSPDEAAGGCLASTLTFWAGGPRTGQAVAATGARKRRRQLAP

SEQ ID NO: 781841 - protein, 108 aa, Homo sapiens [sequence omitted]

SEQ ID NO: 781842 - protein, 311 aa, Homo sapiens
MAGPLWRTAAFVQRHRTGLLVGSCAGLFGVPVSYHLFPDPVVQWLYQYWPQGQPAPLPPQLQSLFQEVLQDIGVPSGHCYKPFTTFTFQPVSAGFPRLPAGAVVGIPASFLGDLVINTNHPVVIHGHTVDWRSPAGARLRASLTLSREAQKFALAREVVYLESSTTAVHALLAPACLAGTWALGVGAKYTLGLHAGPMNLRAAFSLVAAVAGFVAYAFSQDSLTHAVESWLDRRTASLSAAYACGGVEFYEKLLSGNLALRSLLGKEGEKLYTPSGNIVPRHLFRIKHLPYTTRRDSVLQMWRGMLNPGRS

SEQ ID NO: 781843 - protein, 131 aa, Homo sapiens
GRPAARTCRRSERRRRLSAVTTLMAGPLWRTAAFVQRHRTGLLVGSCAGLFGVPVSYHLFPDPVVQWLYQYWPQGQPAPLPPQLQSLFQEVLQDIGVPSGHCYKPFTTFTFQPEREHHRKVKKFALNHKTL

SEQ ID NO: 781844 - protein, 311 aa, Homo sapiens; identical to SEQ ID NO: 781842

SEQ ID NO: 781845 - protein, 108 aa, Homo sapiens
AALPRAHVGVPSGGGGERTDEREGPFSGLMRPGNAFRLRSSLGAQSGSVARTPLRGSCSPSSPSHRRAAWYCVLGPPRSAMALGTLDFGPDLSFLSLTFRIGKKKKPE

SEQ ID NO: 781846 - protein, 108 aa, Homo sapiens; identical to SEQ ID NO: 781845

SEQ ID NO: 781847 - protein, 319 aa, Homo sapiens
GRPAARTCRRSERRRRLSAVTTLMAGPLWRTAAFVQRHRTGLLVGSCAGLFGVPVSYHLFPDPVVQWLYQYWPQGQPAPLPPQLQSLFQEVLQDIGVPSGHCYKPFTTFTFQPVSAGFPRLPAGAVVGIPASFLGDLVINTNHPVVIHGHTVDWRSPAGARLRASLTLSREAQKFALAREVVYLESSTTAVHALLAPACLAGTWALGVGAKYTLGLHAGPMNLRAAFSLVAAVAGFVAYAFSQDSLTHAVESWLDRRGSPEHAGVDGLKKRRERRQTWRTEREQRDGTRAELPTPDGEGETRQRHKGHQRARSNEKGTR

SEQ ID NO: 781848 - protein, 334 aa, Homo sapiens
GRPAARTCRRSERRRRLSAVTTLMAGPLWRTAAFVQRHRTGLLVGSCAGLFGVPVSYHLFPDPVVQWLYQYWPQGQPAPLPPQLQSLFQEVLQDIGVPSGHCYKPFTTFTFQPVSAGFPRLPAGAVVGIPASFLGDLVINTNHPVVIHGHTVDWRSPAGARLRASLTLSREAQKFALAREVVYLESSTTAVHALLAPACLAGTWALGVGAKYTLGLHAGPMNLRAAFSLVAAVAGFVAYAFSQDSLTHAVESWLDRRTASLSAAYACGGVEFYEKLLSGNLALRSLLGKEGEKLYTPSGNIVPRHLFRIKHLPYTTRRDSVLQMWRGMLNPGRS

SEQ ID NO: 781849 - protein, 296 aa, Homo sapiens
MAGPLWRTAAFVQRHRTGLLVGSCAGLFGVPVSYHLFPDPVVQWLYQYWPQGQPAPLPPQLQSLFQEVLQDIGVPSGHCYKPFTTFTFQPVSAGFPRLPAGAVVGIPASFLGDLVINTNHPVVIHGHTVDWRSPAGARLRASLTLSREAQKFALAREVVYLESSTTAVHALLAPACLAGTWALGVGAKYTLGLHAGPMNLRAAFSLVAAVAGFVAYAFSQDSLTHAVESWLDRRGSPEHAGVDGLKKRRERRQTWRTEREQRDGTRAELPTPDGEGETRQRHKGHQRARSNEKGTR

SEQ ID NO: 781850 - protein, 108 aa, Homo sapiens; identical to SEQ ID NO: 781845

SEQ ID NO: 781851 - protein, 74 aa, Homo sapiens
MHYVVLDAGLLAKHVELAPYMCINPNQEILKFMNTGYMSKVNLPILCQSKSKSLMRRKARSPERTLGVGDKQSE

SEQ ID NO: 781852 - protein, 105 aa, Homo sapiens
APPPRPIGPGAGASRALGAPSGYDESQVGPGSRPAGERSRAPQAGSVTPGGERRAGGGTSATGLGRGRAAAAGSCSPAVVGGAAAHARCTEACFTSVTTGGGPAS

SEQ ID NO: 781853 - protein, 1155 aa, Homo sapiens
MAASRDLLKEFPQPKNLLNSVIGRALGISHAKDKLVYVHTNGPKKKKVTLHIKWPKSVEVEGYGSKKIDAERQAAAAACQLFKGWGLLGPRNELFDAAKYRVLADRFGSPADSWWRPEPTMPPTSWRQLNPESIRPGGPGGLSRSLGREEEEDEEEELEEGTIDVTDFLSMTQQDSHAPLRDSRGSSFEMTDDDSAIRALTQFPLPKNLLAKVIQIATSSSTAKNLMQFHTVGTKTKLSTLTLLWPCPMTFVAKGRRKAEAENKAAALACKKLKSLGLVDRNNEPLTHAMYNLASLRELGETQRRPCTIQVPEPILRKIETFLNHYPVESSWIAPELRLQSDDILPLGKDSGPLSDPITGKPYVPLLEAEEVRLSQSLLELWRRRGPVWQEAPQLPVDPHRDTILNAIEQHPVVVISGDTGCGKTTRIPQLLLERYVTEGRGARCNVIITQPRRISAVSVAQRVSHELGPSLRRNVGFQVRLESKPPSRGGALLFCTVGILLRKLQSNPSLEGVSHVIVDEVHERDVNTDFLLILLKGLQRLNPALRLVLMSATGDNERFSRYFGGCPVIKVPGFMYPVKEHYLEDILAKLGKHQYLHRHRHHESEDECALDLDLVTDLVLHIDARGEPGGILCFLPGWQEIKGVQQRLQEALGMHESKYLILPVHSNIPMMDQKAIFQQPPVGVRKIVLATNIAETSITINDIVHVVDSGLHKEERYDLKTKVSCLETVWVSRANVIQRRGRAGRCQSGFAYHLFPRSRLEKMVPFQVPEILRTPLENLVLQAKIHMPEKTAVEFLSKAVDSPNIKAVDEAVILLQEIGVLDQREYLTTLGQRLAHISTDPRLAKAIVLAAIFRCLHPLLVVVSCLTRDPFSSSLQNRAEVDKVKALLSHDSGSDHLAFVRAVAGWEEVLRWQDRSSRENYLEENLLYAPSLRFIHGLIKQFSENIYEAFLVGKPSDCTLASAQCNEYSEEEELVKGVLMAGLYPNLIQVRQGKVTRQGKFKPNSVTYRTKSGNILLHKSTINREATRLRSRWLTYFMAVKSNGSVFVRDSSQVHPLAVLLLTDGDVHIRDDGRRATISLSDSDLLRLEGDSRTVRLLKELRRALGRMVERSLRSELAALPPSVQEEHGQLLALLAELLRGPCGSFDVRKTADD

SEQ ID NO: 781854 - protein, 185 aa, Homo sapiens
RTSLETSSLSLAGLYPNLIQVRQGKVTRQGKFKPNSVTYRTKSGNILLHKSTINREATRLRSRWLTYFMAVKSNGSVFVRDSSQVHPLAVLLLTDGDVHIRDDGRRATISLSDSDLLRLEGDSRTVRLLKELRRALGRMVERSLRSELAALPPSVQEEHGQLLALLAELLRGPCGSFDVRKTADD

SEQ ID NO: 781855 - protein, 1222 aa, Homo sapiens
MAAARRLMALAAGISPRLQPLGPRAAGRQGRSRGFSSSCAHPDHTKEAAEAESGMAPGGPGEGDGSLVNASRDLLKEFPQPKNLLNSVIGRALGISHAKDKLVYVHTNGPKKKKVTLHIKWPKSVEVEGYGSKKIDAERQAAAAACQLFKGWGLLGPRNELFDAAKYRVLADRFGSPADSWWRPEPTMPPTSWRQLNPESIRPGGPGGLSRSLGREEEEDEEEELEEGTIDVTDFLSMTQQDSHAPLRDSRGSSFEMTDDDSAIRALTQFPLPKNLLAKVIQIATSSSTAKNLMQFHTVGTKTKLSTLTLLWPCPMTFVAKGRRKAEAENKAAALACKKLKSLGLVDRNNEPLTHAMYNLASLRELGETQRRPCTIQVPEPILRKIETFLNHYPVESSWIAPELRLQSDDILPLGKDSGPLSDPITGKPYVPLLEAEEVRLSQSLLELWRRRGPVWQEAPQLPVDPHRDTILNAIEQHPVVVISGDTGCGKTTRIPQLLLERYVTEGRGARCNVIITQPRRISAVSVAQRVSHELGPSLRRNVGFQVRLESKPPSRGGALLFCTVGILLRKLQSNPSLEGVSHVIVDEVHERDVNTDFLLILLKGLQRLNPALRLVLMSATGDNERFSRYFGGCPVIKVPGFMYPVKEHYLEDILAKLGKHQYLHRHRHHESEDECALDLDLVTDLVLHIDARGEPGGILCFLPGWQEIKGVQQRLQEALGMHESKYLILPVHSNIPMMDQKAIFQQPPVGVRKIVLATNIAETSITINDIVHVVDSGLHKEERYDLKTKVSCLETVWVSRANVIQRRGRAGRCQSGFAYHLFPRSRLEKMVPFQVPEILRTPLENLVLQAKIHMPEKTAVEFLSKAVDSPNIKAVDEAVILLQEIGVLDQREYLTTLGQRLAHISTDPRLAKAIVLAAIFRCLHPLLVVVSCLTRDPFSSSLQNRAEVDKVKALLSHDSGSDHLAFVRAVAGWEEVLRWQDRSSRENYLEENLLYAPSLRFIHGLIKQFSENIYEAFLVGKPSDCTLASAQCNEYSEEEELVKGVLMAGLYPNLIQVRQGKVTRQGKFKPNSVTYRTKSGNILLHKSTINREATRLRSRWLTYFMAVKSNGSVFVRDSSQVHPLAVLLLTDGDVHIRDDGRRATISLSDSDLLRLEGDSRTVRLLKELRRALGRMVERSLRSELAALPPSVQEEHGQLLALLAELLRGPCGSFDVRKTADD

SEQ ID NO: 781856 - protein, 1222 aa, Homo sapiens; identical to SEQ ID NO: 781855

SEQ ID NO: 781857 - protein, 1222 aa, Homo sapiens; identical to SEQ ID NO: 781855

SEQ ID NO: 781858 - protein, 1207 aa, Homo sapiens
LPGSALSAGCFLSPRVPDRVHSDRAQHRQRQCKLPPPRLPPMCVNPTPGGTISRASRDLLKEFPQPKNLLNSVIGRALGISHAKDKLVYVHTNGPKKKKVTLHIKWPKSVEVEGYGSKKIDAERQAAAAACQLFKGWGLLGPRNELFDAAKYRVLADRFGSPADSWWRPEPTMPPTSWRQLNPESIRPGGPGGLSRSLGREEEEDEEEELEEGTIDVTDFLSMTQQDSHAPLRDSRGSSFEMTDDDSAIRALTQFPLPKNLLAKVIQIATSSSTAKNLMQFHTVGTKTKLSTLTLLWPCPMTFVAKGRRKAEAENKAAALACKKLKSLGLVDRNNEPLTHAMYNLASLRELGETQRRPCTIQVPEPILRKIETFLNHYPVESSWIAPELRLQSDDILPLGKDSGPLSDPITGKPYVPLLEAEEVRLSQSLLELWRRRGPVWQEAPQLPVDPHRDTILNAIEQHPVVVISGDTGCGKTTRIPQLLLERYVTEGRGARCNVIITQPRRISAVSVAQRVSHELGPSLRRNVGFQVRLESKPPSRGGALLFCTVGILLRKLQSNPSLEGVSHVIVDEVHERDVNTDFLLILLKGLQRLNPALRLVLMSATGDNERFSRYFGGCPVIKVPGFMYPVKEHYLEDILAKLGKHQYLHRHRHHESEDECALDLDLVTDLVLHIDARGEPGGILCFLPGWQEIKGVQQRLQEALGMHESKYLILPVHSNIPMMDQKAIFQQPPVGVRKIVLATNIAETSITINDIVHVVDSGLHKEERYDLKTKVSCLETVWVSRANVIQRRGRAGRCQSGFAYHLFPRSRLEKMVPFQVPEILRTPLENLVLQAKIHMPEKTAVEFLSKAVDSPNIKAVDEAVILLQEIGVLDQREYLTTLGQRLAHISTDPRLAKAIVLAAIFRCLHPLLVVVSCLTRDPFSSSLQNRAEVDKVKALLSHDSGSDHLAFVRAVAGWEEVLRWQDRSSRENYLEENLLYAPSLRFIHGLIKQFSENIYEAFLVGKPSDCTLASAQCNEYSEEEELVKGVLMAGLYPNLIQVRQGKVTRQGKFKPNSVTYRTKSGNILLHKSTINREATRLRSRWLTYFMAVKSNGSVFVRDSSQVHPLAVLLLTDGDVHIRDDGRRATISLSDSDLLRLEGDSRTVRLLKELRRALGRMVERSLRSELAALPPSVQEEHGQLLALLAELLRGPCGSFDVRKTADD

SEQ ID NO: 781859 - protein, 939 aa, Homo sapiens
GRDMLPPFNLMQFHTVGTKTKLSTLTLLWPCPMTFVAKGRRKAEAENKAAALACKKLKSLGLVDRNNEPLTHAMYNLASLRELGETQRRPCTIQVPEPILRKIETFLNHYPVESSWIAPELRLQSDDILPLGKDSGPLSDPITGKPYVPLLEAEEVRLSQSLLELWRRRGPVWQEAPQLPVDPHRDTILNAIEQHPVVVISGDTGCGKTTRIPQLLLERYVTEGRGARCNVIITQPRRISAVSVAQRVSHELGPSLRRNVGFQVRLESKPPSRGGALLFCTVGILLRKLQSNPSLEGVSHVIVDEVHERDVNTDFLLILLKGLQRLNPALRLVLMSATGDNERFSRYFGGCPVIKVPGFMYPVKEHYLEDILAKLGKHQYLHRHRHHESEDECALDLDLVTDLVLHIDARGEPGGILCFLPGWQEIKGVQQRLQEALGMHESKYLILPVHSNIPMMDQKAIFQQPPVGVRKIVLATNIAETSITINDIVHVVDSGLHKEERYDLKTKVSCLETVWVSRANVIQRRGRAGRCQSGFAYHLFPRSRLEKMVPFQVPEILRTPLENLVLQAKIHMPEKTAVEFLSKAVDSPNIKAVDEAVILLQEIGVLDQREYLTTLGQRLAHISTDPRLAKAIVLAAIFRCLHPLLVVVSCLTRDPFSSSLQNRAEVDKVKALLSHDSGSDHLAFVRAVAGWEEVLRWQDRSSRENYLEENLLYAPSLRFIHGLIKQFSENIYEAFLVGKPSDCTLASAQCNEYSEEEELVKGVLMAGLYPNLIQVRQGKVTRQGKFKPNSVTYRTKSGNILLHKSTINREATRLRSRWLTYFMAVKSNGSVFVRDSSQVHPLAVLLLTDGDVHIRDDGRRATISLSDSDLLRLEGDSRTVRLLKELRRALGRMVERSLRSELAALPPSVQEEHGQLLALLAELLRGPCGSFDVRKTADD

SEQ ID NO: 781860 - protein, 1222 aa, Homo sapiens; identical to SEQ ID NO: 781855

SEQ ID NO: 781861 - protein, 1204 aa, Homo sapiens
MAAARRLMALAAGISPRLQPLGPRAAGRQGRSRGFSSSCAHPDHTKEAAEAESGMAPGGPGEGDGSLVNASRDLLKEFPQPKNLLNSVIGRALGISHAKDKLVYVHTNGPKKKKVTLHIKWPKSVEVEGYGSKKIDAERQAAAAACQLFKGWGLLGPRNELFDAAKYRVLADRFGSPADSWWRPEPTMPPTSWRQLNPESIRPGGPGGLSRSLGREEEEDEEEELEEGTIDVTDFLSMTQQDSHAPLRDSRGSSFEMTDDDSAIRALTQFPLPKNLLAKVIQIATSSSTAKNLMQFHTVGTKTKLSTLTLLWPCPMTFVAKGRRKAEAENKAAALACKKLKSLGLVDRNNEPLTHAMYNLASLRELGETQRRPCTIQVPEPILRKIETFLNHYPVESSWIAPELRLQSDDILPLGKDSGPLSDPITGKPYVPLLEAEEVRLSQSLLELWRRRGPVWQEAPQLPVDPHRDTILNAIEQHPVVVISGDTGCGKTTRIPQLLLERYVTEGRGARCNVIITQPRRISAVSVAQRVSHELGPSLRRNVGFQVRLESKPPSRGGALLFCTVGILLRKLQSNPSLEGVSHVIVDEVHERDVNTDFLLILLKGLQRLNPALRLVLMSATGDNERFSRYFGGCPVIKVPGFMYPVKEHYLEDILAKLGKHQYLHRHRHHESEDECALDLDLVTDLVLHIDARGEPGGILCFLPGWQEIKGVQQRLQEALGMHESKYLILPVHSNIPMMDQKAIFQQPPVGVRKIVLATNIAETSITINDIVHVVDSGLHKEERYDLKTKVSCLETVWVSRANVIQRRGRAGRCQSGFAYHLFPRSRLEKMVPFQVPEILRTPLENLVLQASPNIKAVDEAVILLQEIGVLDQREYLTTLGQRLAHISTDPRLAKAIVLAAIFRCLHPLLVVVSCLTRDPFSSSLQNRAEVDKVKALLSHDSGSDHLAFVRAVAGWEEVLRWQDRSSRENYLEENLLYAPSLRFIHGLIKQFSENIYEAFLVGKPSDCTLASAQCNEYSEEEELVKGVLMAGLYPNLIQVRQGKVTRQGKFKPNSVTYRTKSGNILLHKSTINREATRLRSRWLTYFMAVKSNGSVFVRDSSQVHPLAVLLLTDGDVHIRDDGRRATISLSDSDLLRLEGDSRTVRLLKELRRALGRMVERSLRSELAALPPSVQEEHGQLLALLAELLRGPCGSFDVRKTADD

SEQ ID NO: 781862 - protein, 730 aa, Homo sapiens
MYEGWFNLAEAVREGRGARCNVIITQPRRISAVSVAQRVSHELGPSLRRNVGFQVRLESKPPSRGGALLFCTVGILLRKLQSNPSLEGVSHVIVDEVHERDVNTDFLLILLKGLQRLNPALRLVLMSATGDNERFSRYFGGCPVIKVPGFMYPVKEHYLEDILAKLGKHQYLHRHRHHESEDECALDLDLVTDLVLHIDARGEPGGILCFLPGWQEIKGVQQRLQEALGMHESKYLILPVHSNIPMMDQKAIFQQPPVGVRKIVLATNIAETSITINDIVHVVDSGLHKEERYDLKTKVSCLETVWVSRANVIQRRGRAGRCQSGFAYHLFPRSRLEKMVPFQVPEILRTPLENLVLQAKIHMPEKTAVEFLSKAVDSPNIKAVDEAVILLQEIGVLDQREYLTTLGQRLAHISTDPRLAKAIVLAAIFRCLHPLLVVVSCLTRDPFSSSLQNRAEVDKVKALLSHDSGSDHLAFVRAVAGWEEVLRWQDRSSRENYLEENLLYAPSLRFIHGLIKQFSENIYEAFLVGKPSDCTLASAQCNEYSEEEELVKGVLMAGLYPNLIQVRQGKVTRQGKFKPNSVTYRTKSGNILLHKSTINREATRLRSRWLTYFMAVKSNGSVFVRDSSQVHPLAVLLLTDGDVHIRDDGRRATISLSDSDLLRLEGDSRTVRLLKELRRALGRMVERSLRSELAALPPSVQEEHGQLLALLAELLRGPCGSFDVRKTADD

SEQ ID NO: 781863 - protein, 704 aa, Homo sapiens
TEDVRTAGTRFVISLRWTCRFQPVNYMAPRLTMYSPSRGGALLFCTVGILLRKLQSNPSLEGVSHVIVDEVHERDVNTDFLLILLKGLQRLNPALRLVLMSATGDNERFSRYFGGCPVIKVPGFMYPVKEHYLEDILAKLGKHQYLHRHRHHESEDECALDLDLVTDLVLHIDARGEPGGILCFLPGWQEIKGVQQRLQEALGMHESKYLILPVHSNIPMMDQKAIFQQPPVGVRKIVLATNIAETSITINDIVHVVDSGLHKEERYDLKTKVSCLETVWVSRANVIQRRGRAGRCQSGFAYHLFPRSRLEKMVPFQVPEILRTPLENLVLQAKIHMPEKTAVEFLSKAVDSPNIKAVDEAVILLQEIGVLDQREYLTTLGQRLAHISTDPRLAKAIVLAAIFRCLHPLLVVVSCLTRDPFSSSLQNRAEVDKVKALLSHDSGSDHLAFVRAVAGWEEVLRWQDRSSRENYLEENLLYAPSLRFIHGLIKQFSENIYEAFLVGKPSDCTLASAQCNEYSEEEELVKGVLMAGLYPNLIQVRQGKVTRQGKFKPNSVTYRTKSGNILLHKSTINREATRLRSRWLTYFMAVKSNGSVFVRDSSQVHPLAVLLLTDGDVHIRDDGRRATISLSDSDLLRLEGDSRTVRLLKELRRALGRMVERSLRSELAALPPSVQEEHGQLLALLAELLRGPCGSFDVRKTADD

SEQ ID NO: 781864 - protein, 401 aa, Homo sapiens
MAAARRLMALAAGISPRLQPLGPRAAGRQGRSRGFSSSCAHPDHTKEAAEAESGMAPGGPGEGDGSLVNASRDLLKEFPQPKNLLNSVIGRALGISHAKDKLVYVHTNGPKKKKVTLHIKWPKSVEVEGYGSKKIDAERQAAAAACQLFKGWGLLGPRNELFDAAKYRVLADRFGSPADSWWRPEPTMPPTSWRQLNPESIRPGGPGGLSRSLGREEEEDEEEELEEGTIDVTDFLSMTQQDSHAPLRDSRGSSFEMTDDDSAIRALTQFPLPKNLLAKVIQIATSSSTAKNLMQFHTVGTKTKLSTLTLLWPCPMTFVAKGRRKAEAENKAAALACKKLKSLGLVDRNNEPLTHGGHTVTEPMADVFHGSQVQWQRLRPGLLSGAPASCAAADRRGRAHP

SEQ ID NO: 781865 - protein, 106 aa, Homo sapiens
MAAARRLMALAAGISPRLQPLGPRAAGRQGRSRGFSSSCAHPDHTKEAAEAESGMAPGGPGEGDGSLVNGEGIGGGGRSAAPLTPGMAELGARAEIGPGGRGSSLP

SEQ ID NO: 781866 - protein, 1194 aa, Homo sapiens
MFSLDSFRKDRAQHRQRQCKLPPPRLPPMCVNPTPGGTISRASRDLLKEFPQPKNLLNSVIGRALGISHAKDKLVYVHTNGPKKKKVTLHIKWPKSVEVEGYGSKKIDAERQAAAAACQLFKGWGLLGPRNELFDAAKYRVLADRFGSPADSWWRPEPTMPPTSWRQLNPESIRPGGPGGLSRSLGREEEEDEEEELEEGTIDVTDFLSMTQQDSHAPLRDSRGSSFEMTDDDSAIRALTQFPLPKNLLAKVIQIATSSSTAKNLMQFHTVGTKTKLSTLTLLWPCPMTFVAKGRRKAEAENKAAALACKKLKSLGLVDRNNEPLTHAMYNLASLRELGETQRRPCTIQVPEPILRKIETFLNHYPVESSWIAPELRLQSDDILPLGKDSGPLSDPITGKPYVPLLEAEEVRLSQSLLELWRRRGPVWQEAPQLPVDPHRDTILNAIEQHPVVVISGDTGCGKTTRIPQLLLERYVTEGRGARCNVIITQPRRISAVSVAQRVSHELGPSLRRNVGFQVRLESKPPSRGGALLFCTVGILLRKLQSNPSLEGVSHVIVDEVHERDVNTDFLLILLKGLQRLNPALRLVLMSATGDNERFSRYFGGCPVIKVPGFMYPVKEHYLEDILAKLGKHQYLHRHRHHESEDECALDLDLVTDLVLHIDARGEPGGILCFLPGWQEIKGVQQRLQEALGMHESKYLILPVHSNIPMMDQKAIFQQPPVGVRKIVLATNIAETSITINDIVHVVDSGLHKEERYDLKTKVSCLETVWVSRANVIQRRGRAGRCQSGFAYHLFPRSRLEKMVPFQVPEILRTPLENLVLQAKIHMPEKTAVEFLSKAVDSPNIKAVDEAVILLQEIGVLDQREYLTTLGQRLAHISTDPRLAKAIVLAAIFRCLHPLLVVVSCLTRDPFSSSLQNRAEVDKVKALLSHDSGSDHLAFVRAVAGWEEVLRWQDRSSRENYLEENLLYAPSLRFIHGLIKQFSENIYEAFLVGKPSDCTLASAQCNEYSEEEELVKGVLMAGLYPNLIQVRQGKVTRQGKFKPNSVTYRTKSGNILLHKSTINREATRLRSRWLTYFMAVKSNGSVFVRDSSQVHPLAVLLLTDGDVHIRDDGRRATISLSDSDLLRLEGDSRTVRLLKELRRALGRMVERSLRSELAALPPSVQEEHGQLLALLAELLRGPCGSFDVRKTADD

SEQ ID NO: 781867 - protein, 183 aa, Homo sapiens
MVPFQVPEILRTPLENLVLQAKIHMPEKTAVEFLSKAVDSPNIKAVDEAVILLQEIGVLDQREYLTTLGQRLAHISTDPRLAKAIVLAAIFRCLHPLLVVVSCLTRDPFSSSLQNRAEVDKVKALLSHDSGSDHLAFVRAVAGWEEVLRWQDRSSRENYLEENLLYAPSLRFIHGQSGPHLLS

SEQ ID NO: 781868 - protein, 1194 aa, Homo sapiens; identical to SEQ ID NO: 781866

SEQ ID NO: 781869 - protein, 1185 aa, Homo sapiens
MAAARRLMALAAGISPRLQPLGPRAAGRQGRSRGFSSSCAHPDHTKEAAEAESGMAPGGPGEGDGSLVNASRDLLKEFPQPKNLLNSVIGRALGISHAKDKLVYVHTNGPKKKGWGLLGPRNELFDAAKYRVLADRFGSPADSWWRPEPTMPPTSWRQLNPESIRPGGPGGLSRSLGREEEEDEEEELEEGTIDVTDFLSMTQQDSHAPLRDSRGSSFEMTDDDSAIRALTQFPLPKNLLAKVIQIATSSSTAKNLMQFHTVGTKTKLSTLTLLWPCPMTFVAKGRRKAEAENKAAALACKKLKSLGLVDRNNEPLTHAMYNLASLRELGETQRRPCTIQVPEPILRKIETFLNHYPVESSWIAPELRLQSDDILPLGKDSGPLSDPITGKPYVPLLEAEEVRLSQSLLELWRRRGPVWQEAPQLPVDPHRDTILNAIEQHPVVVISGDTGCGKTTRIPQLLLERYVTEGRGARCNVIITQPRRISAVSVAQRVSHELGPSLRRNVGFQVRLESKPPSRGGALLFCTVGILLRKLQSNPSLEGVSHVIVDEVHERDVNTDFLLILLKGLQRLNPALRLVLMSATGDNERFSRYFGGCPVIKVPGFMYPVKEHYLEDILAKLGKHQYLHRHRHHESEDECALDLDLVTDLVLHIDARGEPGGILCFLPGWQEIKGVQQRLQEALGMHESKYLILPVHSNIPMMDQKAIFQQPPVGVRKIVLATNIAETSITINDIVHVVDSGLHKEERYDLKTKVSCLETVWVSRANVIQRRGRAGRCQSGFAYHLFPRSRLEKMVPFQVPEILRTPLENLVLQAKIHMPEKTAVEFLSKAVDSPNIKAVDEAVILLQEIGVLDQREYLTTLGQRLAHISTDPRLAKAIVLAAIFRCLHPLLVVVSCLTRDPFSSSLQNRAEVDKVKALLSHDSGSDHLAFVRAVAGWEEVLRWQDRSSRENYLEENLLYAPSLRFIHGLIKQFSENIYEAFLVGKPSDCTLASAQCNEYSEEEELVKGVLMAGLYPNLIQVRQGKVTRQGKFKPNSVTYRTKSGNILLHKSTINREATRLRSRWLTYFMAVKSNGSVFVRDSSQVHPLAVLLLTDGDVHIRDDGRRATISLSDSDLLRLEGDSRTVRLLKELRRALGRMVERSLRSELAALPPSVQEEHGQLLALLAELLRGPCGSFDVRKTADD

SEQ ID NO: 781870 - protein, 1035 aa, Homo sapiens
MPPTSWRQLNPESIRPGGPGGLSRSLGREEEEDEEEELEEGTIDVTDFLSMTQQDSHAPLRDSRGSSFEMTDDDSAIRALTQFPLPKNLLAKVIQIATSSSTAKNLMQFHTVGTKTKLSTLTLLWPCPMTFVAKGRRKAEAENKAAALACKKLKSLGLVDRNNEPLTHAMYNLASLRELGETQRRPCTIQVPEPILRKIETFLNHYPVESSWIAPELRLQSDDILPLGKDSGPLSDPITGKPYVPLLEAEEVRLSQSLLELWRRRGPVWQEAPQLPVDPHRDTILNAIEQHPVVVISGDTGCGKTTRIPQLLLERYVTEGRGARCNVIITQPRRISAVSVAQRVSHELGPSLRRNVGFQVRLESKPPSRGGALLFCTVGILLRKLQSNPSLEGVSHVIVDEVHERDVNTDFLLILLKGLQRLNPALRLVLMSATGDNERFSRYFGGCPVIKVPGFMYPVKEHYLEDILAKLGKHQYLHRHRHHESEDECALDLDLVTDLVLHIDARGEPGGILCFLPGWQEIKGVQQRLQEALGMHESKYLILPVHSNIPMMDQKAIFQQPPVGVRKIVLATNIAETSITINDIVHVVDSGLHKEERYDLKTKVSCLETVWVSRANVIQRRGRAGRCQSGFAYHLFPRSRLEKMVPFQVPEILRTPLENLVLQAKIHMPEKTAVEFLSKAVDSPNIKAVDEAVILLQEIGVLDQREYLTTLGQRLAHISTDPRLAKAIVLAAIFRCLHPLLVVVSCLTRDPFSSSLQNRAEVDKVKALLSHDSGSDHLAFVRAVAGWEEVLRWQDRSSRENYLEENLLYAPSLRFIHGLIKQFSENIYEAFLVGKPSDCTLASAQCNEYSEEEELVKGVLMAGLYPNLIQVRQGKVTRQGKFKPNSVTYRTKSGNILLHKSTINREATRLRSRWLTYFMAVKSNGSVFVRDSSQVHPLAVLLLTDGDVHIRDDGRRATISLSDSDLLRLEGDSRTVRLLKELRRALGRMVERSLRSELAALPPSVQEEHGQLLALLAELLRGPCGSFDVRKTADD

SEQ ID NO: 781871 - protein, 866 aa, Homo sapiens
MYNLASLRELGETQRRPCTIQVPEPILRKIETFLNHYPVESSWIAPELRLQSDDILPLGKDSGPLSDPITGKPYVPLLEAEEVRLSQSLLELWRRRGPVWQEAPQLPVDPHRDTILNAIEQHPVVVISGDTGCGKTTRIPQLLLERYVTEGRGARCNVIITQPRRISAVSVAQRVSHELGPSLRRNVGFQVRLESKPPSRGGALLFCTVGILLRKLQSNPSLEGVSHVIVDEVHERDVNTDFLLILLKGLQRLNPALRLVLMSATGDNERFSRYFGGCPVIKVPGFMYPVKEHYLEDILAKLGKHQYLHRHRHHESEDECALDLDLVTDLVLHIDARGEPGGILCFLPGWQEIKGVQQRLQEALGMHESKYLILPVHSNIPMMDQKAIFQQPPVGVRKIVLATNIAETSITINDIVHVVDSGLHKEERYDLKTKVSCLETVWVSRANVIQRRGRAGRCQSGFAYHLFPRSRLEKMVPFQVPEILRTPLENLVLQAKIHMPEKTAVEFLSKAVDSPNIKAVDEAVILLQEIGVLDQREYLTTLGQRLAHISTDPRLAKAIVLAAIFRCLHPLLVVVSCLTRDPFSSSLQNRAEVDKVKALLSHDSGSDHLAFVRAVAGWEEVLRWQDRSSRENYLEENLLYAPSLRFIHGLIKQFSENIYEAFLVGKPSDCTLASAQCNEYSEEEELVKGVLMAGLYPNLIQVRQGKVTRQGKFKPNSVTYRTKSGNILLHKSTINREATRLRSRWLTYFMAVKSNGSVFVRDSSQVHPLAVLLLTDGDVHIRDDGRRATISLSDSDLLRLEGDSRTVRLLKELRRALGRMVERSLRSELAALPPSVQEEHGQLLALLAELLRGPCGSFDVRKTADD

SEQ ID NO: 781872 - protein, 1254 aa, Homo sapiens
MAAARRLMALAAGISPRLQPLGPRAAGRQGRSRGFSSSCAHPDHTKEAAEAESGMAPGGPGEGDGSLVNASRDLLKEFPQPKNLLNSVIGRALGISHAKDKLVYVHTNGPKKKKVTLHIKWPKSVEVEGYGSKKIDAERQAAAAACQLFKGWGLLGPRNELFDAAKYRVLADRFGSPADSWWRPEPTMPPTSWRQLNPESIRPGGPGGLSRSLGREEEEDEEEELEEGTIDVTDFLSMTQQDSHAPLRDSRGSSFEMTDDDSAIRALTQFPLPKNLLAKVIQIATSSSTAKNLMQFHTVGTKTKLSTLTLLWPCPMTFVAKGRRKAEAENKAAALACKKLKSLGLVDRNNEPLTHAMYNLASLRELGETQRRPCTIQVPEPILRKIETFLNHYPVESSWIAPELRLQSDDILPLGKDSGPLSDPITGKPYVPLLEAEEVRLSQSLLELWRRRGPVWQEAPQLPVDPHRDTILNAIEQHPVVVISGDTGCGKTTRIPQLLLERYVTEGRGARCNVIITQPRRISAVSVAQRVSHELGPSLRRNVGFQVRLESKPPSRGGALLFCTVGILLRKLQSNPSLEGVSHVIVDEVHERDVNTDFLLILLKGLQRLNPALRLVLMSATGDNERFSRYFGGCPVIKVPGFMYPVKEHYLEDILAKLGKHQYLHRHRHHESEDECALDLDLVTDLVLHIDARGEPGGILCFLPGWQEIKGVQQRLQEALGMHESKYLILPVHSNIPMMDQKAIFQQPPVGVRKIVLATNIAETSITINDIVHVVDSGLHKEERYDLKTKVSCLETVWVSRANVIQRRGRAGRCQSGFAYHLFPRSRLEKMVPFQVPEILRTPLENLVLQAKIHMPEKTAVEFLSKAVDSPNIKAVDEAVILLQEIGVLDQREYLTTLGQRLAHISTDPRLAKAIVLAAIFRCLHPLLVVVSCLTRDPFSSSLQNRAEVDKVKALLSHDSGSDHLAFVRAVAGWEEVLRWQDRSSRENYLEENLLYAPSLRFIHGLIKQFSENIYEAFLVGKPSDCTLASAQCNEYSEEEELVKGVLMAGLYPNLIQVRQGKVTRQGKFKPNSVTYRTKSGNILLHKSTINREATRLRSRWLTYFMAVKSNGSVFVRDSSQVHPLAVLLLTDGDVHIRGGCLQASRPPRSAAAPPGPGSPQFPTIFSIPSDDGRRATISLSDSDLLRLEGDSRTVRLLKELRRALGRMVERSLRSELAALPPSVQEEHGQLLALLAELLRGPCGSFDVRKTADD

SEQ ID NO: 781873 - protein, 1213 aa, Homo sapiens
MAAARRLMALAAGISPRLQPLGPRAAGRQGRSRGFSSSCAHPDHTKEAAEAESGMAPGGPGEGDGSLVNASRDLLKEFPQPKNLLNSVIGRALGISHAKDKLVYVHTNGPKKKKVTLHIKWPKSVEVEGYGSKKIDAERQAAAAACQLFKGWGLLGPRNELFDAAKYRVLADRFGSPADSWWRPEPTMPPTSWRQLNPESIRPGGPGGLSRSLGREEEEDEEEELEEGTIDVTDFLSMTQQDSHAPLRDSRGSSFEMTDDDSAIRALTQFPLPKNLLAKVIQIATSSSTAKNLMQFHTVGTKTKLSTLTLLWPCPMTFVAKGRRKAEAENKAAALACKKLKSLGLVDRNNEPLTHAMYNLASLRELGETQRRPCTIQVPEPILRKIETFLNHYPVESSWIAPELRLQSDDILPLGKDSGPLSDPITGKPYVPLLEAEEVRLSQSLLELWRRRGPVWQEAPQLPVDPHRDTILNAIEQHPVVVISGDTGCGKTTRIPQLLLERYVTEGRGARCNVIITQPRRISAVSVAQRVSHELGPSLRRNVGFQVRLESKPPSRGGALLFCTVGILLRKLQSNPSLEGVSHVIVDEVHERDVNTDFLLILLKGLQRLNPALRLVLMSATGDNERFSRYFGGCPVIKVPGFMYPVKEHYLEDILAKLGKHQYLHRHRHHESEDECALDLDLVTDLVLHIDARGEPGGILCFLPGWQEIKGVQQRLQEALGMHESKYLILPVHSNIPMMDQKAIFQQPPVGVRKIVLATNIAETSITINDIVHVVDSGLHKEERYDLKTKVSCLETVWVSRANVIQRRGRAGRCQSGFAYHLFPRSRLEKMVPFQVPEILRTPLENLVLQAKIHMPEKTAVEFLSKAVDSPNIKAVDEAVILLQEIGVLDQREYLTTLGQRLAHISTDPRLAKAIVLAAIFRCLHPRDPFSSSLQNRAEVDKVKALLSHDSGSDHLAFVRAVAGWEEVLRWQDRSSRENYLEENLLYAPSLRFIHGLIKQFSENIYEAFLVGKPSDCTLASAQCNEYSEEEELVKGVLMAGLYPNLIQVRQGKVTRQGKFKPNSVTYRTKSGNILLHKSTINREATRLRSRWLTYFMAVKSNGSVFVRDSSQVHPLAVLLLTDGDVHIRDDGRRATISLSDSDLLRLEGDSRTVRLLKELRRALGRMVERSLRSELAALPPSVQEEHGQLLALLAELLRGPCGSFDVRKTADD
